United States Patent Application Publication US 2007/0214517 A1 - sequence listing, part 50

SEQ ID NO: 65680 - protein, 369 aa, Triticum aestivum
  peptide (1)..(369): Ceres Seq. ID no. 14302464
  misc_feature (23)..(287): Homolog of NCBI NO: 22962211 NR Description: hypothetical protein [Rhodopseudomonas palustris]
  misc_feature (55)..(89): Homolog of NCBI NO: 1184100 NR Description: pistil extensin-like protein
QRSCHSTLLPDPFLPCESDRQTAAVPCRWRAASGDGHGAPAGQHPHGVPGRRGRRAVRAHGLVAPPPRPPAPRLAAPALPIPRRRSPGPHFLRHRPGHRRLLPDLALHVQARPPRRRPRAARPRAPRAAVPLHHAAPRQAPPLRCGSIQSQAAAVARLLRGQGRRHSRHPRHLPVQRSAAPLRAPDAVRRPHILLPGPLLPLHRGGRRRARHGDGAAVRPPLPGLLAAGLLGPPVEPHGVGHPPAVGVHPRACARREPRRRAGHLPGVRADARGHGVLPQLPAAGRPDDRLLPAPWRLLRRRGVVRPAVGGEGVAVAVAGRGDGDCGGVRRPHVVLALLPAVVQGRRRGEAAGGVGCPGGLLPRRRQKD

SEQ ID NO: 65681 - protein, 341 aa, Triticum aestivum
  peptide (1)..(341): Ceres Seq. ID no. 14302465
  misc_feature (50)..(308): Pfam Name: MBOAT family Pfam Description: MBOAT family
  misc_feature (7)..(318): Homolog of NCBI NO: 15240497 NR Description: long-chain-alcohol O-fatty-acyltransferase (wax
  misc_feature (21)..(333): Homolog of NCBI NO: 15231093 NR Description: long-chain-alcohol O-fatty-acyltransferase (wax
  misc_feature (11)..(318): Homolog of NCBI NO: 27728718 NR Description: wax synthase isoform 3 [Vitis vinifera]
  misc_feature (13)..(333): Homolog of NCBI NO: 34911838 NR Description: wax synthase-like protein
  misc_feature (7)..(325): Homolog of NCBI NO: 27728716 NR Description: wax synthase isoform 2 [Vitis vinifera]
  misc_feature (7)..(325): Homolog of NCBI NO: 27728714 NR Description: wax synthase isoform 1 [Vitis vinifera]
  misc_feature (21)..(338): Homolog of NCBI NO: 28812087 NR Description: putative wax synthase isoform protein
  misc_feature (4)..(339): Homolog of NCBI NO: 38345253 NR Description: OSJNBb0011N17.14 [Oryza sativa (japonica
  misc_feature (7)..(330): Homolog of NCBI NO: 38345254 NR Description: OSJNBb0011N17.15 [Oryza sativa (japonica
  misc_feature (1)..(341): Homolog of NCBI NO: 38347115 NR Description: OSJNBa0009K15.12 [Oryza sativa (japonica
MELLRDSIPMVSLAAAAAALYARMASSLLRPGLPRLVSLLPLFPFLAAAPLALTSSAIVRGTAAFFLTWLCTFKLALLAAGRGPLDPALPVLPFLFTTLLPVKLRPSGAGASKAKPLPSLVSCAAKVAAIAAILGIYQYNARLHPYARRTLYGVHIYCFLDLFFPCIAAAAGALGMETEPQFDRPYLASSLRDFWGRRWNLMVSAILRPSVYIPVLARAGSPAGVLATFLVSGLMHEGMVYYLSFRRPDGRMTAFFLLHGVCCVAEGWCARRWAARGWPSPSRAVATVIVVVFVARTSFWLFFPPLCRDGGEEKLLAEWAALAAFFLDAGRKINGIVRSTD

SEQ ID NO: 65682 - DNA, 527 bp, Triticum aestivum
  misc_feature (1)..(527): Ceres Seq. ID no. 12626214
atcaacccaagcagtcagttcttcacttacacaacagattctacactccactactgcccaatcttcaggaacctcaaagttttgcaaaagaaagaagagagagatcatggcgggtgcggcgaaggcgtcatggacggtggcgatgagtgtgggcgcggtggaggcgctcaaggaccaggcggggctctgccgctggaactatgcgctcaagtccatccaccgagctgccaaggccaaggccaccatccgcggtggcgtctcgcagggcagcaagcagcttcaggcctccgcgtcggccgtggcggagaggcggcgagcagagaaagcagaggaggggctgaggacggcgatgtacctcagttgctggggtcccagttagtggtagctagcatgaggtgtttctgcagttctgctagctctatcctccagcaacaactatgccgtgtggcttggctggttaattccttcccggttgtaaatatgtctcaccatgatgatgatgatgatgatgatgatgaaatctttcc

SEQ ID NO: 65683 - protein, 175 aa, Triticum aestivum
  peptide (1)..(175): Ceres Seq. ID no. 12626215
INPSSQFFTYTTDSTLHYCPIFRNLKVLQKKEERDHGGCGEGVMDGGDECGRGGGAQGPGGALPLELCAQVHPPSCQGQGHHPRWRLAGQQAASGLRVGRGGEAASRESRGGAEDGDVPQLLGSQLVVASMRCFCSSASSILQQQLCRVAWLVNSFPVVNMSHHDDDDDDDDEIF

SEQ ID NO: 65684 - protein, 132 aa, Triticum aestivum
  peptide (1)..(132): Ceres Seq. ID no. 12626216
MDGGDECGRGGGAQGPGGALPLELCAQVHPPSCQGQGHHPRWRLAGQQAASGLRVGRGGEAASRESRGGAEDGDVPQLLGSQLVVASMRCFCSSASSILQQQLCRVAWLVNSFPVVNMSHHDDDDDDDDEIF

SEQ ID NO: 65685 - protein, 125 aa, Triticum aestivum
  peptide (1)..(125): Ceres Seq. ID no. 12626217
  misc_feature (44)..(125): Homolog of NCBI NO: 6688818 NR Description: putative wound-induced protein [Medicago sativa
  misc_feature (44)..(125): Homolog of NCBI NO: 82114 NR Description: wound-induced protein - tomato (fragment)
  misc_feature (36)..(125): Homolog of NCBI NO: 30681389 NR Description: wound-induced protein, putative [Arabidopsis
  misc_feature (37)..(125): Homolog of NCBI NO: 38636812 NR Description: unknown protein [Oryza sativa (japonica
  misc_feature (38)..(125): Homolog of NCBI NO: 38344798 NR Description: OSJNBa0043L09.18 [Oryza sativa (japonica
  misc_feature (36)..(125): Homolog of NCBI NO: 15234987 NR Description: probable wound-induced protein
  misc_feature (36)..(122): Homolog of NCBI NO: 38344805 NR Description: OSJNBa0043L09.25 [Oryza sativa (japonica
  misc_feature (36)..(122): Homolog of NCBI NO: 38344804 NR Description: OSJNBa0043L09.24 [Oryza sativa (japonica
  misc_feature (36)..(125): Homolog of NCBI NO: 38344803 NR Description: OSJNBa0043L09.23 [Oryza sativa (japonica
  misc_feature (36)..(125): Homolog of NCBI NO: 38344799 NR Description: OSJNBa0043L09.19 [Oryza sativa (japonica
STQAVSSSLTQQILHSTTAQSSGTSKFCKRKKREIMAGAAKASWTVAMSVGAVEALKDQAGLCRWNYALKSIHRAAKAKATIRGGVSQGSKQLQASASAVAERRRAEKAEEGLRTAMYLSCWGPS

SEQ ID NO: 65686 - protein, 90 aa, Triticum aestivum
  peptide (1)..(90): Ceres Seq. ID no. 12626218
  misc_feature (9)..(90): Homolog of NCBI NO: 6688818 NR Description: putative wound-induced protein [Medicago sativa
  misc_feature (9)..(90): Homolog of NCBI NO: 82114 NR Description: wound-induced protein - tomato (fragment)
  misc_feature (1)..(90): Homolog of NCBI NO: 30681389 NR Description: wound-induced protein, putative [Arabidopsis
  misc_feature (2)..(90): Homolog of NCBI NO: 38636812 NR Description: unknown protein [Oryza sativa (japonica
  misc_feature (3)..(90): Homolog of NCBI NO: 38344798 NR Description: OSJNBa0043L09.18 [Oryza sativa (japonica
  misc_feature (1)..(90): Homolog of NCBI NO: 15234987 NR Description: probable wound-induced protein
  misc_feature (1)..(87): Homolog of NCBI NO: 38344805 NR Description: OSJNBa0043L09.25 [Oryza sativa (japonica
  misc_feature (1)..(87): Homolog of NCBI NO: 38344804 NR Description: OSJNBa0043L09.24 [Oryza sativa (japonica
  misc_feature (1)..(90): Homolog of NCBI NO: 38344803 NR Description: OSJNBa0043L09.23 [Oryza sativa (japonica
  misc_feature (1)..(90): Homolog of NCBI NO: 38344799 NR Description: OSJNBa0043L09.19 [Oryza sativa (japonica
MAGAAKASWTVAMSVGAVEALKDQAGLCRWNYALKSIHRAAKAKATIRGGVSQGSKQLQASASAVAERRRAEKAEEGLRTAMYLSCWGPS

SEQ ID NO: 65687 - DNA, 825 bp, Triticum aestivum
  misc_feature (1)..(825): Ceres Seq. ID no. 12619024
atgaacctaaagctgatgagaaaatggaggaagaagatcctgaatatgaagaagatcccgatgaagtagaatatgaaggcgacgaggacatggatgatgccactgctgaagagccggcagaagcacagaatgaggataactcaaacgaaagagaaaccaagccagaagaggtaactgcagaagatgatggaaagaggacaacggagaatcttaagttggaaaaagcagaagaggacaagcagtctgtagcagagaaaggagatttgaaagaagttgaagagaaatctgttggtaaggagggaaagatatctggttcacaaaaaggagattcagcgaaacatgatgtggttgataaggacctgttgcaggcttttaggtacttcgaccaaaacagagttggttatataaaggtggatgatttaaggtgcatccttcacaacttggggaaatttttatccaacagggatgtgaaggacatggttcaaattgctcttgctgagagcaattctgcaagggatggtcgcattatctatacaaagcttgtcaagaaagctgacctctgatctggacctggttttggccctagcagctagttgagttatggaacttgtttgttggagattcttgacagtgaatcgatgatcaatggaaagtcacccgagtagtgtacttccatgtagctgggagctagtttttgtttctttgaatgaatatttgttaatgaactgatatcgtttgtatgttgacctactaggaaaatttcattagatttttttcacacagcaaacataatggcctaataataataacatttcctggtgtggt

SEQ ID NO: 65688 - protein, 186 aa, Triticum aestivum
  peptide (1)..(186): Ceres Seq. ID no. 12619025
  misc_feature (1)..(62): Pfam Name: Prothymosin/parathymosin family Pfam Description: Prothymosin/parathymosin family
  misc_feature (1)..(119): Homolog of NCBI NO: 9631239 NR Description: orf 48 [Ateline herpesvirus 3]
  misc_feature (42)..(183): Homolog of NCBI NO: 28829323 NR Description: similar to Dictyostelium discoideum (Slime mold).
  misc_feature (42)..(183): Homolog of NCBI NO: 4731916 NR Description: development protein DG1124 [Dictyostelium
  misc_feature (3)..(167): Homolog of NCBI NO: 33563288 NR Description: RIKEN cDNA 2610511G16 [Mus musculus]
  misc_feature (3)..(167): Homolog of NCBI NO: 32441867 NR Description: cell-cycle and apoptosis regulatory protein 1
  misc_feature (3)..(167): Homolog of NCBI NO: 29789088 NR Description: hypothetical protein FLJ10839 [Homo sapiens]
  misc_feature (1)..(167): Homolog of NCBI NO: 26347237 NR Description: unnamed protein product [Mus musculus]
  misc_feature (3)..(167): Homolog of NCBI NO: 7022719 NR Description: unnamed protein product [Homo sapiens]
  misc_feature (3)..(167): Homolog of NCBI NO: 26345990 NR Description: unnamed protein product [Mus musculus]
  misc_feature (6)..(182): Homolog of NCBI NO: 15227543 NR Description: putative calmodulin; protein id: At2g03150.1
EPKADEKMEEEDPEYEEDPDEVEYEGDEDMDDATAEEPAEAQNEDNSNERETKPEEVTAEDDGKRTTENLKLEKAEEDKQSVAEKGDLKEVEEKSVGKEGKISGSQKGDSAKHDVVDKDLLQAFRYFDQNRVGYIKVDDLRCILHNLGKFLSNRDVKDMVQIALAESNSARDGRIIYTKLVKKADL

SEQ ID NO: 65689 - protein, 179 aa, Triticum aestivum
  peptide (1)..(179): Ceres Seq. ID no. 12619026
  misc_feature (1)..(55): Pfam Name: Prothymosin/parathymosin family Pfam Description: Prothymosin/parathymosin family
  misc_feature (1)..(112): Homolog of NCBI NO: 9631239 NR Description: orf 48 [Ateline herpesvirus 3]
  misc_feature (35)..(176): Homolog of NCBI NO: 28829323 NR Description: similar to Dictyostelium discoideum (Slime mold).
  misc_feature (35)..(176): Homolog of NCBI NO: 4731916 NR Description: development protein DG1124 [Dictyostelium
  misc_feature (1)..(160): Homolog of NCBI NO: 33563288 NR Description: RIKEN cDNA 2610511G16 [Mus musculus]
  misc_feature (1)..(160): Homolog of NCBI NO: 32441867 NR Description: cell-cycle and apoptosis regulatory protein 1
  misc_feature (1)..(160): Homolog of NCBI NO: 29789088 NR Description: hypothetical protein FLJ10839 [Homo sapiens]
  misc_feature (1)..(160): Homolog of NCBI NO: 26347237 NR Description: unnamed protein product [Mus musculus]
  misc_feature (1)..(160): Homolog of NCBI NO: 7022719 NR Description: unnamed protein product [Homo sapiens]
  misc_feature (1)..(160): Homolog of NCBI NO: 26345990 NR Description: unnamed protein product [Mus musculus]
  misc_feature (1)..(175): Homolog of NCBI NO: 15227543 NR Description: putative calmodulin; protein id: At2g03150.1
MEEEDPEYEEDPDEVEYEGDEDMDDATAEEPAEAQNEDNSNERETKPEEVTAEDDGKRTTENLKLEKAEEDKQSVAEKGDLKEVEEKSVGKEGKISGSQKGDSAKHDVVDKDLLQAFRYFDQNRVGYIKVDDLRCILHNLGKFLSNRDVKDMVQIALAESNSARDGRIIYTKLVKKADL

SEQ ID NO: 65690 - protein, 157 aa, Triticum aestivum
  peptide (1)..(157): Ceres Seq. ID no. 12619027
  misc_feature (1)..(70): Pfam Name: Transferrin binding protein-like solute binding protein Pfam Description: Transferrin binding protein-like solute binding
  misc_feature (1)..(90): Homolog of NCBI NO: 9631239 NR Description: orf 48 [Ateline herpesvirus 3]
  misc_feature (13)..(154): Homolog of NCBI NO: 28829323 NR Description: similar to Dictyostelium discoideum (Slime mold).
  misc_feature (13)..(154): Homolog of NCBI NO: 4731916 NR Description: development protein DG1124 [Dictyostelium
  misc_feature (1)..(138): Homolog of NCBI NO: 33563288 NR Description: RIKEN cDNA 2610511G16 [Mus musculus]
  misc_feature (1)..(138): Homolog of NCBI NO: 32441867 NR Description: cell-cycle and apoptosis regulatory protein 1
  misc_feature (1)..(138): Homolog of NCBI NO: 29789088 NR Description: hypothetical protein FLJ10839 [Homo sapiens]
  misc_feature (1)..(138): Homolog of NCBI NO: 26347237 NR Description: unnamed protein product [Mus musculus]
  misc_feature (1)..(138): Homolog of NCBI NO: 7022719 NR Description: unnamed protein product [Homo sapiens]
  misc_feature (1)..(138): Homolog of NCBI NO: 26345990 NR Description: unnamed protein product [Mus musculus]
  misc_feature (1)..(153): Homolog of NCBI NO: 15227543 NR Description: putative calmodulin; protein id: At2g03150.1
MDDATAEEPAEAQNEDNSNERETKPEEVTAEDDGKRTTENLKLEKAEEDKQSVAEKGDLKEVEEKSVGKEGKISGSQKGDSAKHDVVDKDLLQAFRYFDQNRVGYIKVDDLRCILHNLGKFLSNRDVKDMVQIALAESNSARDGRIIYTKLVKKADL

SEQ ID NO: 65691 - DNA, 1686 bp, Triticum aestivum
  misc_feature (1)..(1686): Ceres Seq. ID no. 13656635
atcgcgtcgcatatcccctccctcccctctcatcacccacacccacgcggcagccggcttcaatttttccatctgctccccgtgctcttaatgggctttccctccctccgacatggccggcgacccccgcacccgcgccgccggtgaccactccctctccccctcctcccccgccgccgtcctcgtgcccgggggcggcctccgcctggggccctccaggctcttcctccacctgctcctcctccactcgctcttataaccccgcgcccccccgccgccaggccatggccgccgtcttctaccaccacgtcgtcggcgacctcaccgtcggcaagcccgagatcgccgagctcagcgacgcggacacgcttgacgacgcggcgcgggccatcgccggcagccccgagggcgccgtgcccgtctggcgcgcgcgggccgcccccgacgacccgccctccggggcccggttcctcggcatgatctccgccgtcgacatcgccgccttcctcgccggcgccggcgccggcgaccgcgccatgcgcgccgccgtcggcgaggtcgtgcagcccaaccaggacctgctccgggaggtcgatcccggcaccaggttgattgatgcgctggagttgatgaggaatggagtgaagcgcttccttgtccgcaagaacggctcctggacaggcatcaccaagcggttttctatgctttacaatgggaaatggatgaagaactcggaatcgggatccccaagctcagctggcagcagcagcatgcagttgtccccatttatcagttgcgcggagaggttttgctgcctgtcaagggaagacatcctccggttcctgatcgggtgcctcggcgccctcgcgcccatcccactgtctccaatctgtaccctcggagctatcaacccgcactactgccacgtcgaggcgtctgcgccagccatggaggcgatccagaagatccctggggacccctgcggcgtggccgtggttgagacgacatcggacggggtccgcaagatcatcggggacatctctgcctacaagctgtggaagtgtgactacgtggcggccgcgtgggcgctggcgaacctgtcggcggggcagtttgtcatcggcgccgacgagaacgggtcgacccccatctccgccttcccgctgccttccatcagctcgtcgttgtcggaggaggccaccgagcccgggcgctctcccaggctgcttaagaagttcagcagcaggaacatcgggttcctgaacagccaggcgaaccaggtgcggagcatgtaccggggccggagctcgccgctgatgtgccggagcacgagctccctggccgccgtcatggcgcagatgctgtcccaccgggcgactcacgtgtgggtgacggacgcggaggctgaggaggatgacgtcctcgttggcgtggtcgggtacacggacatctttgccgccgtcacccggagcagcgcctgaccgtcgacgacgtcctgatggcggtggcgtgtgtttgggtggtgtactataatttggggttagtttggtggttgtccagagctgagaactttgttttgggtgtgtgggcgtgtgagactgaatgggttgtgtattgttggatgtgcattcgttgttgatggtcctataataaggtagactcgggcctatttatgcctgggagtcc

SEQ ID NO: 65692 - protein, 492 aa, Triticum aestivum
  peptide (1)..(492): Ceres Seq. ID no. 13656636
  misc_feature (431)..(488): Pfam Name: CBS domain Pfam Description: CBS domain
  misc_feature (3)..(90): Homolog of NCBI NO: 17939907 NR Description: UL36 protein [Pseudorabies virus]
  misc_feature (4)..(56): Homolog of NCBI NO: 322759 NR Description: pistil extensin-like protein (clone pMG14) -
  misc_feature (264)..(483): Homolog of NCBI NO: 30687603 NR Description: expressed protein [Arabidopsis thaliana]
  misc_feature (264)..(483): Homolog of NCBI NO: 27754524 NR Description: unknown protein [Arabidopsis thaliana]
  misc_feature (5)..(88): Homolog of NCBI NO: 31414574 NR Description: large tegument protein [Cercopithecine
  misc_feature (95)..(489): Homolog of NCBI NO: 15238832 NR Description: expressed protein [Arabidopsis thaliana]
  misc_feature (95)..(202): Homolog of NCBI NO: 7487793 NR Description: hypothetical protein T8F5.10 - Arabidopsis
  misc_feature (203)..(492): Homolog of NCBI NO: 7487793 NR Description: hypothetical protein T8F5.10 - Arabidopsis
  misc_feature (95)..(492): Homolog of NCBI NO: 15218643 NR Description: CBS domain containing protein [Arabidopsis
  misc_feature (95)..(490): Homolog of NCBI NO: 19386732 NR Description: P0678F11.21 [Oryza sativa (japonica
RVAYPLPPLSSPTPTRQPASIFPSAPRALNGLSLPPTWPATPAPAPPVTTPSPPPPPPPSSCPGAASAWGPPGSSSTCSSSTRSYNPAPPRRQAMAAVFYHHVVGDLTVGKPEIAELSDADTLDDAARAIAGSPEGAVPVWRARAAPDDPPSGARFLGMISAVDIAAFLAGAGAGDRAMRAAVGEVVQPNQDLLREVDPGTRLIDALELMRNGVKRFLVRKNGSWTGITKRFSMLYNGKWMKNSESGSPSSAGSSSMQLSPFISCAERFCCLSREDILRFLIGCLGALAPIPLSPICTLGAINPHYCHVEASAPAMEAIQKIPGDPCGVAVVETTSDGVRKIIGDISAYKLWKCDYVAAAWALANLSAGQFVIGADENGSTPISAFPLPSISSSLSEEATEPGRSPRLLKKFSSRNIGFLNSQANQVRSMYRGRSSPLMCRSTSSLAAVMAQMLSHRATHVWVTDAEAEEDDVLVGVVGYTDIFAAVTRSSA

SEQ ID NO: 65693 - protein, 398 aa, Triticum aestivum
  peptide (1)..(398): Ceres Seq. ID no. 13656637
  misc_feature (337)..(394): Pfam Name: CBS domain Pfam Description: CBS domain
  misc_feature (170)..(384): Homolog of NCBI NO: 7486257 NR Description: hypothetical protein F27G19.60 - Arabidopsis
  misc_feature (170)..(389): Homolog of NCBI NO: 30687603 NR Description: expressed protein [Arabidopsis thaliana]
  misc_feature (170)..(389): Homolog of NCBI NO: 27754524 NR Description: unknown protein [Arabidopsis thaliana]
  misc_feature (1)..(395): Homolog of NCBI NO: 15238832 NR Description: expressed protein [Arabidopsis thaliana]
  misc_feature (1)..(108): Homolog of NCBI NO: 7487793 NR Description: hypothetical protein T8F5.10 - Arabidopsis
  misc_feature (109)..(398): Homolog of NCBI NO: 7487793 NR Description: hypothetical protein T8F5.10 - Arabidopsis
  misc_feature (1)..(398): Homolog of NCBI NO: 15218643 NR Description: CBS domain containing protein [Arabidopsis
  misc_feature (1)..(396): Homolog of NCBI NO: 19386732 NR Description: P0678F11.21 [Oryza sativa (japonica
MAAVFYHHVVGDLTVGKPEIAELSDADTLDDAARAIAGSPEGAVPVWRARAAPDDPPSGARFLGMISAVDIAAFLAGAGAGDRAMRAAVGEVVQPNQDLLREVDPGTRLIDALELMRNGVKRFLVRKNGSWTGITKRFSMLYNGKWMKNSESGSPSSAGSSSMQLSPFISCAERFCCLSREDILRFLIGCLGALAPIPLSPICTLGAINPHYCHVEASAPAMEAIQKIPGDPCGVAVVETTSDGVRKIIGDISAYKLWKCDYVAAAWALANLSAGQFVIGADENGSTPISAFPLPSISSSLSEEATEPGRSPRLLKKFSSRNIGFLNSQANQVRSMYRGRSSPLMCRSTSSLAAVMAQMLSHRATHVWVTDAEAEEDDVLVGVVGYTDIFAAVTRSSA

SEQ ID NO: 65694 - protein, 334 aa, Triticum aestivum
  peptide (1)..(334): Ceres Seq. ID no. 13656638
  misc_feature (273)..(330): Pfam Name: CBS domain Pfam Description: CBS domain
  misc_feature (106)..(320): Homolog of NCBI NO: 7486257 NR Description: hypothetical protein F27G19.60 - Arabidopsis
  misc_feature (106)..(325): Homolog of NCBI NO: 30687603 NR Description: expressed protein [Arabidopsis thaliana]
  misc_feature (106)..(325): Homolog of NCBI NO: 27754524 NR Description: unknown protein [Arabidopsis thaliana]
  misc_feature (1)..(331): Homolog of NCBI NO: 15238832 NR Description: expressed protein [Arabidopsis thaliana]
  misc_feature (1)..(44): Homolog of NCBI NO: 7487793 NR Description: hypothetical protein T8F5.10 - Arabidopsis
  misc_feature (45)..(334): Homolog of NCBI NO: 7487793 NR Description: hypothetical protein T8F5.10 - Arabidopsis
  misc_feature (1)..(334): Homolog of NCBI NO: 15218643 NR Description: CBS domain containing protein [Arabidopsis
  misc_feature (1)..(332): Homolog of NCBI NO: 19386732 NR Description: P0678F11.21 [Oryza sativa (japonica
MISAVDIAAFLAGAGAGDRAMRAAVGEVVQPNQDLLREVDPGTRLIDALELMRNGVKRFLVRKNGSWTGITKRFSMLYNGKWMKNSESGSPSSAGSSSMQLSPFISCAERFCCLSREDILRFLIGCLGALAPIPLSPICTLGAINPHYCHVEASAPAMEAIQKIPGDPCGVAVVETTSDGVRKIIGDISAYKLWKCDYVAAAWALANLSAGQFVIGADENGSTPISAFPLPSISSSLSEEATEPGRSPRLLKKFSSRNIGFLNSQANQVRSMYRGRSSPLMCRSTSSLAAVMAQMLSHRATHVWVTDAEAEEDDVLVGVVGYTDIFAAVTRSSA

SEQ ID NO: 65695 - DNA, 1099 bp, Triticum aestivum
  misc_feature (1)..(1099): Ceres Seq. ID no. 12780602
atcctaatcgaaaaatccctcccttcctcacggtctccgccccccaaatcgcattcctctcctcgccgccgtccgccgccgctcgctcgccatggacgccgccaagcccgccccggcccccgcccgccccgccggccccgggctctacgccgacatcggcaagaaggccagagatctcctcaacagggactacaccacgggccagaagttcaccttcaccaccaccgccgccaacggagctacaattactagttcgagcacaaagaaaaatgaagctatcgtggctgacctccagacccaggtgaagatcaagaatttcacagtggatgtgaaagcaacttcggactcaagtgttgtaactacaatcactgttcctgagctgtacacaccgggcttgaagggagttctttctcttcctttcccctaccagaagtctacccctgggaaggctgaactccagtacttgcatccccatcttggcatcaacggcagtgttggcctgaattcaaaccctcttgttaacttttctggtgtcattgggactaaggcttttgcttttggtgttgatgttgcatttgacactgcctctggtgacttcaccaagtacaatgctggactgagccacactaatcaagatcttactgcttcgttgaatctgaacaacaaggcaaacaccctggctgcttcctactaccaccaggtgcagcgcaccactgctgtgggagcagagatcgctcacagcttctcgagcaacgagaacaccatcaccgtcgggacgcagcacgagctggaccccctgacgaccgtgaaggggcgctacaacaacttcggcatcgcaagtgcgctcatccagcacgcgtggaggcccaagtctctcatcaccttctccaccgaggttgacaccaaggccattgagaagagccccaagttcgggctggccctgtcactcaagccctgatgtgggattcgtgggtgcgttaggatgctagcattttggtaccatcagctcttggtccagcgaacaaagcttggacagacagaacttgtaatgcccaactttggtgacgcgacaaacttatgtcgttttttagcctgttcc

SEQ ID NO: 65696 - protein, 288 aa, Triticum aestivum
  peptide (1)..(288): Ceres Seq. ID no. 12780603
  misc_feature (16)..(281): Pfam Name: Eukaryotic porin Pfam Description: Eukaryotic porin
  misc_feature (15)..(288): Homolog of NCBI NO: 2130107 NR Description: porin (clone Tavdac1) - wheat
  misc_feature (15)..(288): Homolog of NCBI NO: 5929928 NR Description: voltage-dependent anion channel protein 1a [Zea
  misc_feature (8)..(288): Homolog of NCBI NO: 34910590 NR Description: putative voltage-dependent anion channel protein
  misc_feature (15)..(288): Homolog of NCBI NO: 1172553 NR Description: Outer mitochondrial membrane protein porin
  misc_feature (15)..(288): Homolog of NCBI NO: 7442953 NR Description: porin - common ice plant
  misc_feature (15)..(288): Homolog of NCBI NO: 7339529 NR Description: voltage-dependent anion channel [Oryza sativa]
  misc_feature (16)..(287): Homolog of NCBI NO: 34912192 NR Description: voltage-dependent anion channel
  misc_feature (14)..(288): Homolog of NCBI NO: 5929932 NR Description: voltage-dependent anion channel protein 2 [Zea
  misc_feature (9)..(288): Homolog of NCBI NO: 18076158 NR Description: voltage-dependent anion channel
  misc_feature (16)..(288): Homolog of NCBI NO: 2130108 NR Description: porin VDAC2 - wheat (fragment)
MDAAKPAPAPARPAGPGLYADIGKKARDLLNRDYTTGQKFTFTTTAANGATITSSSTKKNEAIVADLQTQVKIKNFTVDVKATSDSSVVTTITVPELYTPGLKGVLSLPFPYQKSTPGKAELQYLHPHLGINGSVGLNSNPLVNFSGVIGTKAFAFGVDVAFDTASGDFTKYNAGLSHTNQDLTASLNLNNKANTLAASYYHQVQRTTAVGAEIAHSFSSNENTITVGTQHELDPLTTVKGRYNNFGIASALIQHAWRPKSLITFSTEVDTKAIEKSPKFGLALSLKP

SEQ ID NO: 65697 - DNA, 1575 bp, Triticum aestivum
  misc_feature (1)..(1575): Ceres Seq. ID no. 13496409
actagtactagtccgggatagtgcggctagggtttcttcgtcccacacacaccccctctcccccaacctgctccgtccccatcccctcgccgccgccgccgccgccgccgtctgagccctagactcgcgcgaatcctccccgggccgagcgatggcgatgcagaagtccggcgggagagactggtagcgagtagggcagttccccggtcaccccacacacaaatcccggcgagcgagcgcagagtgacctgactttttctgccatccatggcgaccgtgaaccccttcgacctcctcggcgacgacgagggcgacgaccccacgcagctcctggccaaggcggccgccctggcgcagaaggccgaggccaagaaggccgccgcgccgcccgccgccggcaagggcggcgcgcggacggtcgccaatctgcccaccaagccgcctccgcctggtcaggctgccaatgagtctcgtggtggtggtccactctcccgtggaggatatggtcgcggtgaacgtggctcaggcagaggtggccgaggagggtacggtcagaatcgcgactacgccagtgaagacacaaatggctacaggggaggttatggtgccagaactggaggtgaggaaggcgcccaggatagagagagggcccctcggcaaccctaccaggggggaggccgtcgtggtgggtatcgtgaaggcgagtttggtgatgattctgagaggccacctcgaaggaactatgagcgccaaagcggcacaggccgtgggtatgagataaaacgcgagggtgctggccgtgggaactggggaactacctctgatgaaattgttgcccaggaaactgaggccctgaagcaggatgagaaggcccctgcacctgagaagcagggcgcaccagaggatgcaccacaggcagatgagaacaaggccaccaaagatggcgctgcagttgtggaagaagaaaaggaagaggataatgagatgactcttgatgaatttgagaaagtaatggaggagaagaggaaagcacttgctgctttgaagaagtctgaagagaggaaggttgaaattgataaggatctgcaggctatgcaactactttccaccaagaaaggaaatgatgaagttttcatcaaactgggtgctgataaggaggctttgaagaagaaagagaatgctgaacgtgaagagcgtgctaagaagtctgtgagcatcaacgagttcctgaagcctgctgaaggagaaaggttctatggcggccgtggccgtggcggcaggggccgtggagaccgcggaggcttcagaggcggatttggtggtgggggttatcacggcccaccgcccgcaccggcaattcaggaccagaaccagttcccaaccctcggtgggaagtgagattgctgtaccatctcaagtgccacctttaccaatatcatcgacgctgtcaagtttagattttcctatcaccatatatttctgcacggatcctatattgaaacaaataactctgctgcatgtggaccattcatccctgtgtctgtcatgactttgtaaatccgatggttgtcgctt

SEQ ID NO: 65698 - protein, 376 aa, Triticum aestivum
  peptide (1)..(376): Ceres Seq. ID no. 15222989
  misc_feature (137)..(318): Pfam Name: Hyaluronan / mRNA binding family Pfam Description: Hyaluronan / mRNA binding family
  misc_feature (32)..(376): Homolog of NCBI NO: 34912396 NR Description: putative putative nuclear RNA binding protein A
  misc_feature (1)..(376): Homolog of NCBI NO: 21537052 NR Description: nuclear antigen homolog [Arabidopsis thaliana]
  misc_feature (1)..(374): Homolog of NCBI NO: 21553991 NR Description: nuclear RNA binding protein A-like protein
  misc_feature (1)..(374): Homolog of NCBI NO: 15238039 NR Description: nuclear RNA binding protein, putative
  misc_feature (1)..(376): Homolog of NCBI NO: 15235894 NR Description: nuclear RNA binding protein [Arabidopsis
  misc_feature (1)..(374): Homolog of NCBI NO: 39725278 NR Description: salt tolerance protein 2 [Beta vulgaris]
  misc_feature (1)..(376): Homolog of NCBI NO: 6492266 NR Description: nuclear RNA binding protein A [Spinacia oleracea]
  misc_feature (1)..(376): Homolog of NCBI NO: 7488863 NR Description: probable transcription factor - fava bean
  misc_feature (1)..(376): Homolog of NCBI NO: 39725276 NR Description: salt tolerance protein 1 [Beta vulgaris]
  misc_feature (1)..(376): Homolog of NCBI NO: 34910712 NR Description: putative nuclear RNA binding protein A
MATVNPFDLLGDDEGDDPTQLLAKAAALAQKAEAKKAAAPPAAGKGGARTVANLPTKPPPPGQAANESRGGGPLSRGGYGRGERGSGRGGRGGYGQNRDYASEDTNGYRGGYGARTGGEEGAQDRERAPRQPYQGGGRRGGYREGEFGDDSERPPRRNYERQSGTGRGYEIKREGAGRGNWGTTSDEIVAQETEALKQDEKAPAPEKQGAPEDAPQADENKATKDGAAVVEEEKEEDNEMTLDEFEKVMEEKRKALAALKKSEERKVEIDKDLQAMQLLSTKKGNDEVFIKLGADKEALKKKENAEREERAKKSVSINEFLKPAEGERFYGGRGRGGRGRGDRGGFRGGFGGGGYHGPPPAPAIQDQNQFPTLGGK

SEQ ID NO: 65699 - DNA, 1701 bp, Triticum aestivum
  misc_feature (1)..(1701): Ceres Seq. ID no. 14301599
atataaaagcccctgtctccgtctccggttagcaggagagagagagagaggagagaggacgggtggaggccaagaacgcagcacgactgcacagcaccagctgccgaccgaccgcgggcggagctgaccccccgacccgatcagatccctcgccgcccgccccctcagatctccccgcgcgcgcccctcccagatccagctccgagcacttggattttcaacaaagaggtcctgccggcggtggtccgcgtctggaagctcgtcggctgctgcttcttgcttccagtgctctgtggcgaaggcgaccggcggagatggggctggctggggagaagttccagctggggacggtgggggcgctcagcctctccgtcgtctcctcggtctccattgtcatctgcaacaaggcgctcatgagcgccctcggcttcatcttcgccaccacgttgacaagctggcatctcttggtgacattctgttcactccatgtggcattatgcatgaagctctttgagcacaaaccttttgacgcgaggaccgtcatggggttcggagtgctcaacggcatctcgattgggcttctcaatctgagtctgggtttcaactctgttggtttctatcagatgacaaagctggccattattccctgcactgttatattggagactcttttcttcaggaagaagttcagtcgctacatccagctctcccttagtgtgctcctttttggtgttggagttgcaactgtgactgatctgcagctcaatgctatgggatctgtgctgtctttactggcaatcgtcacaacctgtattgctcaaattatgaccaatacaattcaaaagaagttcaaagtatcttcaactcagctgctgtaccaatcatgcccataccaagcattgaccctgttcattgttggtccattcctcgatgggtttctgactaacaaaaatgtctttgcttttgcatacacacctcaagttctgttcttcatcgtgctgtcgtgtctgatatcagtctcggtgaacttcagcactttccttgtgattgggaagacatctcctgtaacttaccaagtccttggccatctaaagacatgcttggttcttgccttcggctatgtcttgctgcatgatccgtttagctggagaaatatacttggaatcctgattgcagtggttgggatgggactatattcatacttctgcacccgtgaagctccaaagcccactgaagcctctccacaagtcactcaggtgaaagaaggtgaatcagaccctttgatcgcagactccttgaacgccgccgagaacggggccgctgcagccaccgacgagcctctgaaggtccccatgtggagctccaagtacgcacgggcatgaacgctcctgccccgacctctgaaggtgcccatgtggagctccaagcgctcgcgggcatgaacgccgcttcggaccttggttcatggtattatatacataattattcagtttagtaggcagatagtagggctggaaggaagccaggccagccctgagtgtaatgaacgttccttgttccatttttgggcctttttttctttccccccttttttttccttctgttttggcttaccatgcatgcctgtggtgctgttgtaaaagtggatctcacaccaaatgactccaaatggcagatctacctttgttgaagctaagatac

SEQ ID NO: 65700 - protein, 355 aa, Triticum aestivum
  peptide (1)..(355): Ceres Seq. ID no. 14301600
  misc_feature (163)..(296): Pfam Name: Integral membrane protein DUF6 Pfam Description: Integral membrane protein DUF6
  misc_feature (6)..(310): Homolog of NCBI NO: 18411172 NR Description: transporter-related [Arabidopsis thaliana]
  misc_feature (5)..(82): Homolog of NCBI NO: 37535412 NR Description: putative
  misc_feature (104)..(342): Homolog of NCBI NO: 37535412 NR Description: putative
  misc_feature (104)..(350): Homolog of NCBI NO: 25406945 NR Description: hypothetical protein [imported] - Arabidopsis
  misc_feature (5)..(342): Homolog of NCBI NO: 13384378 NR Description: putative phosphate translocator
  misc_feature (6)..(324): Homolog of NCBI NO: 30683853 NR Description: transporter-related [Arabidopsis thaliana]
  misc_feature (6)..(350): Homolog of NCBI NO: 27311731 NR Description: putative integral membrane protein [Arabidopsis
  misc_feature (5)..(350): Homolog of NCBI NO: 22329373 NR Description: transporter-related [Arabidopsis thaliana]
  misc_feature (1)..(355): Homolog of NCBI NO: 13699188 NR Description: putative glucose-6-phosphate/phosphate-tranlocat
  misc_feature (1)..(355): Homolog of NCBI NO: 34896140 NR Description: P0701D05.25 [Oryza sativa (japonica
MGLAGEKFQLGTVGALSLSVVSSVSIVICNKALMSALGFIFATTLTSWHLLVTFCSLHVALCMKLFEHKPFDARTVMGFGVLNGISIGLLNLSLGFNSVGFYQMTKLAIIPCTVILETLFFRKKFSRYIQLSLSVLLFGVGVATVTDLQLNAMGSVLSLLAIVTTCIAQIMTNTIQKKFKVSSTQLLYQSCPYQALTLFIVGPFLDGFLTNKNVFAFAYTPQVLFFIVLSCLISVSVNFSTFLVIGKTSPVTYQVLGHLKTCLVLAFGYVLLHDPFSWRNILGILIAVVGMGLYSYFCTREAPKPTEASPQVTQVKEGESDPLIADSLNAAENGAAAATDEPLKVPMWSSKYARA

SEQ ID NO: 65701 - protein, 322 aa, Triticum aestivum
  peptide (1)..(322): Ceres Seq. ID no. 14301601
  misc_feature (130)..(263): Pfam Name: Integral membrane protein DUF6 Pfam Description: Integral membrane protein DUF6
  misc_feature (1)..(277): Homolog of NCBI NO: 18411172 NR Description: transporter-related [Arabidopsis thaliana]
  misc_feature (1)..(49): Homolog of NCBI NO: 37535412 NR Description: putative
  misc_feature (71)..(309): Homolog of NCBI NO: 37535412 NR Description: putative
  misc_feature (71)..(317): Homolog of NCBI NO: 25406945 NR Description: hypothetical protein [imported] - Arabidopsis
  misc_feature (1)..(309): Homolog of NCBI NO: 13384378 NR Description: putative phosphate translocator
  misc_feature (1)..(291): Homolog of NCBI NO: 30683853 NR Description: transporter-related [Arabidopsis thaliana]
  misc_feature (1)..(317): Homolog of NCBI NO: 27311731 NR Description: putative integral membrane protein [Arabidopsis
  misc_feature (1)..(317): Homolog of NCBI NO: 22329373 NR Description: transporter-related [Arabidopsis thaliana]
  misc_feature (1)..(322): Homolog of NCBI NO: 13699188 NR Description: putative glucose-6-phosphate/phosphate-tranlocat
  misc_feature (1)..(322): Homolog of NCBI NO: 34896140 NR Description: P0701D05.25 [Oryza sativa (japonica
MSALGFIFATTLTSWHLLVTFCSLHVALCMKLFEHKPFDARTVMGFGVLNGISIGLLNLSLGFNSVGFYQMTKLAIIPCTVILETLFFRKKFSRYIQLSLSVLLFGVGVATVTDLQLNAMGSVLSLLAIVTTCIAQIMTNTIQKKFKVSSTQLLYQSCPYQALTLFIVGPFLDGFLTNKNVFAFAYTPQVLFFIVLSCLISVSVNFSTFLVIGKTSPVTYQVLGHLKTCLVLAFGYVLLHDPFSWRNILGILIAVVGMGLYSYFCTREAPKPTEASPQVTQVKEGESDPLIADSLNAAENGAAAATDEPLKVPMWSSKYARA

SEQ ID NO: 65702 - protein, 293 aa, Triticum aestivum
  peptide (1)..(293): Ceres Seq. ID no. 14301602
  misc_feature (101)..(234): Pfam Name: Integral membrane protein DUF6 Pfam Description: Integral membrane protein DUF6
  misc_feature (1)..(248): Homolog of NCBI NO: 18411172 NR Description: transporter-related [Arabidopsis thaliana]
  misc_feature (1)..(20): Homolog of NCBI NO: 37535412 NR Description: putative
  misc_feature (42)..(280): Homolog of NCBI NO: 37535412 NR Description: putative
  misc_feature (42)..(288): Homolog of NCBI NO: 25406945 NR Description: hypothetical protein [imported] - Arabidopsis
  misc_feature (1)..(280): Homolog of NCBI NO: 13384378 NR Description: putative phosphate translocator
  misc_feature (1)..(262): Homolog of NCBI NO: 30683853 NR Description: transporter-related [Arabidopsis thaliana]
  misc_feature (1)..(288): Homolog of NCBI NO: 27311731 NR Description: putative integral membrane protein [Arabidopsis
  misc_feature (1)..(288): Homolog of NCBI NO: 22329373 NR Description: transporter-related [Arabidopsis thaliana]
  misc_feature (1)..(293): Homolog of NCBI NO: 13699188 NR Description: putative glucose-6-phosphate/phosphate-tranlocat
  misc_feature (1)..(293): Homolog of NCBI NO: 34896140 NR Description: P0701D05.25 [Oryza sativa (japonica
MKLFEHKPFDARTVMGFGVLNGISIGLLNLSLGFNSVGFYQMTKLAIIPCTVILETLFFRKKFSRYIQLSLSVLLFGVGVATVTDLQLNAMGSVLSLLAIVTTCIAQIMTNTIQKKFKVSSTQLLYQSCPYQALTLFIVGPFLDGFLTNKNVFAFAYTPQVLFFIVLSCLISVSVNFSTFLVIGKTSPVTYQVLGHLKTCLVLAFGYVLLHDPFSWRNILGILIAVVGMGLYSYFCTREAPKPTEASPQVTQVKEGESDPLIADSLNAAENGAAAATDEPLKVPMWSSKYARA

SEQ ID NO: 65703 - DNA, 1199 bp, Triticum aestivum
  misc_feature (1)..(1199): Ceres Seq. ID no. 13656441
attttttattagttctggacgaagcagtggctgtgtacgagtcgagcacgtcacgcacgcggccaggctgtgctgggagcttcgtccccctccactcccgtcagctccccgggcctgccccgccccgcccccactccgccgccgactgcgagagaagcctgtcatgtcaaacattgggaaatcaactaatattctatggcatgactgcccaattggacaaactgagcgacagaaattgctggggcaaaaaggatgtgtcatatggatcacaggactcagcggttcagggaaaagtaccgttgcctgtgcactgagtcgggaattacactacagaggccaccacacgtatgtccttgatggtgacaacctcagacatggcctcaatcgagatctaagcttcaaggcagaagaccgtacagaaaatatacgaagagttggtgaagtggcaaagctttttgcagatgctggtaccatatgcattgctagtttgatatctccatacaggagagaccgtgatgcatgccgagctctacttccagattctagatttattgaagtatttatggatttgccactagaattatgtgaagctcgtgatcctaaagggttatacaagcttgcacgcacaggaaagattaaagggttcaccggagttgatgatccatacgaatcaccagtgaatagtgagatagtaattaagatggaaggtggggaatgcccttcaccgaaagcaatggcccagcaagttctatcctaccttgagaagaatggatatttgcaggcttagcacacatactccagatccagaagattgatcttattcttctgtgtccataactcatggacacaggtacaatccatttggtccatccggaataaaaggtgctgttatcgaagcaacaagctgcctttttcacgaggaaagggacgcagatcgatgatcagtttgattgttcggcattgctcctctcctgtgtgttgtgctattttagctgtagtttatacttactcatttcggctgaaatggtgtgctgtgctgtgtttatctctactcctaatggacgacttggtgaatagtcttcgcgtttttaaaaaaaaaaaaaaaaaaaaaaaaaaaaaaaaaaaaaaaaaaaaaaaaaaaaaagaaaaaaaaaaaaaaaaaggtttatcaataccgtcaacctcaagggggggcccgg

SEQ ID NO: 65704 - protein, 261 aa, Triticum aestivum
  peptide (1)..(261): Ceres Seq. ID no. 13656442
  misc_feature (83)..(238): Pfam Name: Adenylylsulphate kinase Pfam Description: Adenylylsulphate kinase
  misc_feature (59)..(261): Homolog of NCBI NO: 21537248 NR Description: adenylylsulfate kinase-like protein [Arabidopsis
  misc_feature (59)..(261): Homolog of NCBI NO: 18425199 NR Description: adenylylsulfate kinase-related protein
  misc_feature (59)..(261): Homolog of NCBI NO: 9757873 NR Description: adenylylsulfate kinase-like protein [Arabidopsis
  misc_feature (60)..(260): Homolog of NCBI NO: 15236087 NR Description: adenosine-5-phosphosulfate-kinase [Arabidopsis
  misc_feature (55)..(261): Homolog of NCBI NO: 21553403 NR Description: putative adenosine phosphosulfate kinase
  misc_feature (55)..(261): Homolog of NCBI NO: 15225999 NR Description: adenosine phosphosulfate kinase -related
  misc_feature (56)..(259): Homolog of NCBI NO: 6563285 NR Description: adenosine-5'-phosphosulfate kinase [Zea mays]
  misc_feature (56)..(261): Homolog of NCBI NO: 7387809 NR Description: Adenylylsulfate kinase, chloroplast precursor kinase) (Adenosine-5'phosphosulfate kinase) (ATP
  misc_feature (55)..(259): Homolog of NCBI NO: 34393551 NR Description: putative adenosine-5'-phosphosulfate kinase
  misc_feature (55)..(260): Homolog of NCBI NO: 15228666 NR Description: adenylylsulfate kinase -related [Arabidopsis
FFISSGRSSGCVRVEHVTHAARLCWELRPPPLPSAPRACPAPPPLRRRLREKPVMSNIGKSTNILWHDCPIGQTERQKLLGQKGCVIWITGLSGSGKSTVACALSRELHYRGHHTYVLDGDNLRHGLNRDLSFKAEDRTENIRRVGEVAKLFADAGTICIASLISPYRRDRDACRALLPDSRFIEVFMDLPLELCEARDPKGLYKLARTGKIKGFTGVDDPYESPVNSEIVIKMEGGECPSPKAMAQQVLSYLEKNGYLQA

SEQ ID NO: 65705 - protein, 207 aa, Triticum aestivum
  peptide (1)..(207): Ceres Seq. ID no. 13656443
  misc_feature (29)..(184): Pfam Name: Adenylylsulphate kinase Pfam Description: Adenylylsulphate kinase
  misc_feature (5)..(207): Homolog of NCBI NO: 21537248 NR Description: adenylylsulfate kinase-like protein [Arabidopsis
  misc_feature (5)..(207): Homolog of NCBI NO: 18425199 NR Description: adenylylsulfate kinase-related protein
  misc_feature (5)..(207): Homolog of NCBI NO: 9757873 NR Description: adenylylsulfate kinase-like protein [Arabidopsis
  misc_feature (6)..(206): Homolog of NCBI NO: 15236087 NR Description: adenosine-5-phosphosulfate-kinase [Arabidopsis
  misc_feature (1)..(207): Homolog of NCBI NO: 21553403 NR Description: putative adenosine phosphosulfate kinase
  misc_feature (1)..(207): Homolog of NCBI NO: 15225999 NR Description: adenosine phosphosulfate kinase -related
  misc_feature (2)..(205): Homolog of NCBI NO: 6563285 NR Description: adenosine-5'-phosphosulfate kinase [Zea mays]
  misc_feature (2)..(207): Homolog of NCBI NO: 7387809 NR Description: Adenylylsulfate kinase, chloroplast precursor kinase) (Adenosine-5'phosphosulfate kinase) (ATP
  misc_feature (1)..(205): Homolog of NCBI NO: 34393551 NR Description: putative adenosine-5'-phosphosulfate kinase
  misc_feature (1)..(206): Homolog of NCBI NO: 15228666 NR Description: adenylylsulfate kinase -related [Arabidopsis
MSNIGKSTNILWHDCPIGQTERQKLLGQKGCVIWITGLSGSGKSTVACALSRELHYRGHHTYVLDGDNLRHGLNRDLSFKAEDRTENIRRVGEVAKLFADAGTICIASLISPYRRDRDACRALLPDSRFIEVFMDLPLELCEARDPKGLYKLARTGKIKGFTGVDDPYESPVNSEIVIKMEGGECPSPKAMAQQVLSYLEKNGYLQA

SEQ ID NO: 65706 - DNA, 702 bp, Triticum aestivum
  misc_feature (1)..(702): Ceres Seq. ID no. 12619044
aattctatcttcccatccatcttgcggctcgtgccatggcagatcggccgggaagctcgttgccggtcgttcctcgtccggcccggctccggagcggccaagcgtcctactcgtcccgccggcgcgtccatccatccaacgcccagctcctcgtctacctagccctcgccgtcaccttggccgccctcctggtcctcaccggcgtcacgctcaccgtcgcgtcagtcgtgctcgtcgtcctcgtcgtcctcgccccgctcttgctcctcaccagccctctctgggcgccggtggcagtggtggccatcgtctcggggggcgccttgctgtttggctgtagcctcacggtgttcgcgctgagagcgagcacgtgggcgcaccggcgcctgacggggcggcacccggtgggcgcgcgtcgggtgggctacgcccgtgggcgtggccggttcgccggcgcgggtggccacgcgacgggctaccacgggcagggacaagggtacgatcggatgaaggacgccgtgcccggggcctagctggcggcgaacaagcttctccttccgcgcattccgtttggtttggatacgttttacacgctgtgttttagttggaactggttcgttggcgaggtatatactgtgctgatacacgttttcatgtgtgttttgaatgcatttcttgatcctgcgggaatcaactctgctc

SEQ ID NO: 65707 - protein, 176 aa, Triticum aestivum
  peptide (1)..(176): Ceres Seq. ID no. 12619045
  misc_feature (45)..(166): Pfam Name: Oleosin Pfam Description: Oleosin
  misc_feature (45)..(171): Homolog of NCBI NO: 129083 NR Description: Oleosin Bn-V (BnV)
  misc_feature (29)..(146): Homolog of NCBI NO: 82705 NR Description: lipid body-associated major protein L3 - maize
  misc_feature (32)..(146): Homolog of NCBI NO: 3334280 NR Description: OLEOSIN 16 KD (OSE701)
  misc_feature (32)..(146): Homolog of NCBI NO: 38346165 NR Description: OSJNBa0079A21.12 [Oryza sativa (japonica
  misc_feature (44)..(144): Homolog of NCBI NO: 21311555 NR Description: 15.8 kDa oleosin [Theobroma cacao]
  misc_feature (33)..(144): Homolog of NCBI NO: 5381321 NR Description: 15 kDa oleosin [Sesamum indicum]
  misc_feature (30)..(146): Homolog of NCBI NO: 1362168 NR Description: oleosin 2 - barley
  misc_feature (44)..(164): Homolog of NCBI NO: 27754701 NR Description: putative oleosin protein [Arabidopsis thaliana]
  misc_feature (44)..(164): Homolog of NCBI NO: 15225211 NR Description: oleosin; protein id: At2g25890.1 [Arabidopsis
  misc_feature (34)..(176): Homolog of NCBI NO: 15229674 NR Description: oleosin; protein id: At3g18570.1 [Arabidopsis
FYLPIHLAARAMADRPGSSLPVVPRPARLRSGQASYSSRRRVHPSNAQLLVYLALAVTLAALLVLTGVTLTVASVVLVVLVVLAPLLLLTSPLWAPVAVVAIVSGGALLFGCSLTVFALRASTWAHRRLTGRHPVGARRVGYARGRGRFAGAGGHATGYHGQGQGYDRMKDAVPGA

SEQ ID NO: 65708 - protein, 165 aa, Triticum aestivum
  peptide (1)..(165): Ceres Seq. ID no. 12619046
  misc_feature (34)..(155): Pfam Name: Oleosin Pfam Description: Oleosin
  misc_feature (34)..(160): Homolog of NCBI NO: 129083 NR Description: Oleosin Bn-V (BnV)
  misc_feature (18)..(135): Homolog of NCBI NO: 82705 NR Description: lipid body-associated major protein L3 - maize
  misc_feature (21)..(135): Homolog of NCBI NO: 3334280 NR Description: OLEOSIN 16 KD (OSE701)
  misc_feature (21)..(135): Homolog of NCBI NO: 38346165 NR Description: OSJNBa0079A21.12 [Oryza sativa (japonica
  misc_feature (33)..(133): Homolog of NCBI NO: 21311555 NR Description: 15.8 kDa oleosin [Theobroma cacao]
  misc_feature (22)..(133): Homolog of NCBI NO: 5381321 NR Description: 15 kDa oleosin [Sesamum indicum]
  misc_feature (19)..(135): Homolog of NCBI NO: 1362168 NR Description: oleosin 2 - barley
  misc_feature (33)..(153): Homolog of NCBI NO: 27754701 NR Description: putative oleosin protein [Arabidopsis thaliana]
  misc_feature (33)..(153): Homolog of NCBI NO: 15225211 NR Description: oleosin; protein id: At2g25890.1 [Arabidopsis
  misc_feature (23)..(165): Homolog of NCBI NO: 15229674 NR Description: oleosin; protein id: At3g18570.1 [Arabidopsis
MADRPGSSLPVVPRPARLRSGQASYSSRRRVHPSNAQLLVYLALAVTLAALLVLTGVTLTVASVVLVVLVVLAPLLLLTSPLWAPVAVVAIVSGGALLFGCSLTVFALRASTWAHRRLTGRHPVGARRVGYARGRGRFAGAGGHATGYHGQGQGYDRMKDAVPGA

SEQ ID NO: 65709 - protein, 112 aa, Triticum aestivum
  peptide (1)..(112): Ceres Seq. ID no. 12619047
  misc_feature (13)..(112): Homolog of NCBI NO: 23104064 NR Description: hypothetical protein [Azotobacter vinelandii]
  misc_feature (23)..(112): Homolog of NCBI NO: 34906214 NR Description: P0666G04.13 [Oryza sativa (japonica
ILSSHPSCGSCHGRSAGKLVAGRSSSGPAPERPSVLLVPPARPSIQRPAPRLPSPRRHLGRPPGPHRRHAHRRVSRARRPRRPRPALAPHQPSLGAGGSGGHRLGGRLAVWL

SEQ ID NO: 65710 - DNA, 797 bp, Triticum aestivum
  misc_feature (1)..(797): Ceres Seq. ID no. 15225138
tccgcttgtatttctatttccccgtcccttccttccttctagacaccaatccttcttcctcacccgactgcccaacttccggagcaagcgaattgcatcatgcccgcagtgatgaaagctctcgccgccgcctcgccggtctcggcgccgccatcgccccgtcggagggtcgcaggctcgtcaggcgcgccgtgccaaagcctgcagtcctccttccgcggcatctccctgcggtgctgtcccaggaaaccggcccaccgctcgccgccgctacgcagctctcgggcggcggcgcaggtggtggcgatgaagccggcgatccagttcatccagggcacggacgagcagacgatcccggacgtgcggctgaccaagtcccgcgacggcaccaacggggtggccatcttcgagttcgaccagccgtcggtgttcgactcgtcggcggagctcggggacatcacggggttctacatgatcgacgaggagggcgtgctgcagacggcggacgtgagcgccaagttcgtcaacgggaagccggccagggtggaggccaagtacgtgatgcgcacggccggggactgggaccgcttcatgaggttcatggagaggtactcgcaggccaacggcctccagttcgtcaagaactaagtcacatctcctcgatgggccttgtgtgttgcccatgttcagttcagtataactgtcgagctggtaacgaaggtgaatgattgtactgaggtgtcatgtgtatctcttatgtaactttgacattgtgtgaaattttgtatacaccagcc

SEQ ID NO: 65711 - protein, 241 aa, Triticum aestivum
  peptide (1)..(241): Ceres Seq. ID no. 15225139
RLYFYFPVPSFLLDTNPSSSPDCPTSGASELHHARSDESSRRRLAGLGAAIAPSEGRRLVRRAVPKPAVLLPRHLPAVLSQETGPPLAAATQLSGGGAGGGDEAGDPVHPGHGRADDPGRAADQVPRRHQRGGHLRVRPAVGVRLVGGARGHHGVLHDRRGGRAADGGRERQVRQREAGQGGGQVRDAHGRGLGPLHEVHGEVLAGQRPPVRQELSHISSMGLVCCPCSVQYNCRAGNEGE

SEQ ID NO: 65712 - protein, 182 aa, Triticum aestivum
  peptide (1)..(182): Ceres Seq. ID no. 15225140
  misc_feature (68)..(181): Pfam Name: Photosystem II reaction centre W protein, PsbW Pfam Description: Photosystem II reaction centre W protein, PsbW
  misc_feature (74)..(182): Homolog of NCBI NO: 22298036 NR Description: photosystem II reaction center W protein
  misc_feature (73)..(182): Homolog of NCBI NO: 30468121 NR Description: photosystem II protein W [Cyanidioschyzon
  misc_feature (74)..(181): Homolog of NCBI NO: 11467376 NR Description: photosystem II protein W [Cyanophora paradoxa]
  misc_feature (74)..(181): Homolog of NCBI NO: 11465813 NR Description: photosystem II protein W [Porphyra purpurea]
  misc_feature (74)..(181): Homolog of NCBI NO: 11467617 NR Description: photosystem II protein W [Guillardia theta]
  misc_feature (70)..(181): Homolog of NCBI NO: 11467474 NR Description: photosystem II protein W [Odontella sinensis]
  misc_feature (85)..(181): Homolog of NCBI NO: 19880501 NR Description: saline responsive OSSRII protein [Oryza sativa]
  misc_feature (20)..(181): Homolog of NCBI NO: 18417239 NR Description: photosystem II protein W - like [Arabidopsis
  misc_feature (20)..(181): Homolog of NCBI NO: 7488014 NR Description: photosystem II protein W homolog T5F17.110 -
  misc_feature (66)..(181): Homolog of NCBI NO: 34907246 NR Description: photosystem II protein W-like protein
MPAVMKALAAASPVSAPPSPRRRVAGSSGAPCQSLQSSFRGISLRCCPRKPAHRSPPLRSSRAAAQVVAMKPAIQFIQGTDEQTIPDVRLTKSRDGTNGVAIFEFDQPSVFDSSAELGDITGFYMIDEEGVLQTADVSAKFVNGKPARVEAKYVMRTAGDWDRFMRFMERYSQANGLQFVKN

SEQ ID NO: 65713 - protein, 178 aa, Triticum aestivum
  peptide (1)..(178): Ceres Seq. ID no. 15225141
  misc_feature (64)..(177): Pfam Name: Photosystem II reaction centre W protein, PsbW Pfam Description: Photosystem II reaction centre W protein, PsbW
  misc_feature (70)..(178): Homolog of NCBI NO: 22298036 NR Description: photosystem II reaction center W protein
  misc_feature (69)..(178): Homolog of NCBI NO: 30468121 NR Description: photosystem II protein W [Cyanidioschyzon
  misc_feature (70)..(177): Homolog of NCBI NO: 11467376 NR Description: photosystem II protein W [Cyanophora paradoxa]
  misc_feature (70)..(177): Homolog of NCBI NO: 11465813 NR Description: photosystem II protein W [Porphyra purpurea]
  misc_feature (70)..(177): Homolog of NCBI NO: 11467617 NR Description: photosystem II protein W [Guillardia theta]
  misc_feature (66)..(177): Homolog of NCBI NO: 11467474 NR Description: photosystem II protein W [Odontella sinensis]
  misc_feature (81)..(177): Homolog of NCBI NO: 19880501 NR Description: saline responsive OSSRII protein [Oryza sativa]
  misc_feature (16)..(177): Homolog of NCBI NO: 18417239 NR Description: photosystem II protein W - like [Arabidopsis
  misc_feature (16)..(177): Homolog of NCBI NO: 7488014 NR Description: photosystem II protein W homolog T5F17.110 -
  misc_feature (62)..(177): Homolog of NCBI NO: 34907246 NR Description: photosystem II protein W-like protein
MKALAAASPVSAPPSPRRRVAGSSGAPCQSLQSSFRGISLRCCPRKPAHRSPPLRSSRAAAQVVAMKPAIQFIQGTDEQTIPDVRLTKSRDGTNGVAIFEFDQPSVFDSSAELGDITGFYMIDEEGVLQTADVSAKFVNGKPARVEAKYVMRTAGDWDRFMRFMERYSQANGLQFVKN

SEQ ID NO: 65714 - DNA, 949 bp, Triticum aestivum
  misc_feature (1)..(949): Ceres Seq. ID no. 12618747
accggcccaaaagcagagcgcaagtgcgcaccaccggccgagcgagctgagtcgattcgagcagcaggatgggcggcggcggcggcagcagcggcagcccgacggcgagcagcagcagcgacgatgacggagacgcctcgtggagggcggccatcgactctgtagctgtagggggcttcggctacccgtcgtccaacggcgcggcgaaggccgcctctggcggcggcggcggcgtcgaggaggacagcaacgggctggagcagccgccgcaggatgagaagaaggcgcaaacgcctgggctcaagctgtaccagatcaagataaataccatgtgcaactcaagagaccaaagattcttcctgggccagaggtcgacgagaaatcaaagaagttcagacatatgcttcagtctgttgttgttgatggtaacgacgtacttgtttccgcgaaagaagcatcccaaatatcattggctagaatggaagctagagaaactgcagcaaagaccaaagccaagagggaggaagaaagggtgaaccagctgaagaaggtcaggggagagaaatggcttccttccattgctagtaaaatgaagaaagaaaaatcttgggagcaatggcaggaaaaaaagctcaagagcaatggcagtaatggtggatcatttcagctgggccgcatatgctaatcttttaggccatctatgggggcacccttttccggacgccacaagcccacaattgctttgataacttctattttgccatttatccatttgacgatgatggtcgacaagaggattgaattggatgaaaagatagaatgttggactgacgattttgttctaatctagagaacgtagcttatcagtaccttctcaatttttgtagcaaaattatgttatattccaggattgatacgcttgagcagtctctgcctcgcaactggggcc

SEQ ID NO: 65715 - protein, 155 aa, Triticum aestivum
  peptide (1)..(155): Ceres Seq. ID no. 12618748
MGGGGGSSGSPTASSSSDDDGDASWRAAIDSVAVGGFGYPSSNGAAKAASGGGGGVEEDSNGLEQPPQDEKKAQTPGLKLYQIKINTMCNSRDQRFFLGQRSTRNQRSSDICFSLLLLMVTTYLFPRKKHPKYHWLEWKLEKLQQRPKPRGRKKG

SEQ ID NO: 65716 - protein, 94 aa, Triticum aestivum
  peptide (1)..(94): Ceres Seq. ID no. 12618749
  misc_feature (1)..(67): Homolog of NCBI NO: 15229629 NR Description: putative protein
  misc_feature (1)..(67): Homolog of NCBI NO: 21593080 NR Description: unknown [Arabidopsis thaliana]
MLQSVVVDGNDVLVSAKEASQISLARMEARETAAKTKAKREEERVNQLKKVRGEKWLPSIASKMKKEKSWEQWQEKKLKSNGSNGGSFQLGRIC

SEQ ID NO: 65717 - DNA, 2072 bp, Triticum aestivum
  misc_feature (1)..(2072): Ceres Seq. ID no. 13656490
gctggttaggttgtctcgcgttgagggctttgccgacgcaacacgcacccaaaaatcctaatcctcatcgccgccggcgaccatggtgtcgcagcacgacatcctcctcgccgcgggcctcatatccgaccacttcggccccctcgtagcgaaggtgtgcgactgcctcctccgccacggggcgctgcagctgacggagattgtgcgccgtctcaagctcccgcaggggcaagtgaagaactctctcctcgtcctcatccagcacaactgcgttcaggccttctcatcgcccagaggcgataggaccatcacgctctacttggccatcttcgacaatgtcctgcatcggctgcgcttctcaaagttcatctctattatccgcgcggacattccagagtcagaagctcttattgagggattgcttcagaatggtaggctaacatttgaccaacttgtgggacgcacaatctctaaagtgccagaaggcaccatccgaccagcaagggaagaaatacgaatgaacttcaacagacttgtgtatgcacgttatgtggaacgttgcccaaaagctgaaccctatttcaatccacaggaagatgaacaatctacaggtgcaaggagaagagttccaaaaactgccgaggaggttctttcacttgagcagaaagttgtcaatactgcaaccctttctgatccagaaaggttttctgagatcccatacagcatggaggatgcatcaaaaacgaatgattgtcctcataacgctgttgcgggtgctaagcggaaacacggagcctttgaggtagatgaagagctcaactcaacaattgcagagaatgaagtactttggcgggtaaattttgagaaatttatattttgtctaaagaagaagttttgtgcagaccgaaagaagccaaagctgaaggttggcacacatcctatctgggagtcattttttgaagctaacttacctgacaaagatacaaactctgtgacatcatcaataaatggtattttggagaaactaggacaaaaggaaggaggtgcggcaatgtcaattggtgacataaaaccagtcctgctggatttacagtgtactacttccgatggggaagaatttacttttgatttacgcaaaatggttgaagcatgtagaaatgaggagatagagtcgcttgtgaaaaagaaatacgggcaagaagcttttacaatctttaggctattggtcacacaaggttgtgcagttgagacagatcaaattattgacacaacaattctggacaagcagattgttcattcaactttgtacaaactatggaacgacggctacatagatacagagaaaatcgcttccgcagcaggaacagggtacgcacagttttttgtatggagagccaaaaatacatttcgtgagcagttcatcgataatctctaccatgctgctttgaacttgcgccagatggtgaattacattgctgaacttctactcgagggttcgaaggacgaaacaaagctgcggaacagaaagaacattttgatcctggccctcactagacatgatgactctctcatgctgttccatgatttttgagaatacaggctatccattcggttcgtctggccaaatgccactcgtaccggcaggcaggcaggccaccgatgattggaagcggataatcacaataattcgcaagttgcgggggcgcagatgctgcgccacttggagcggctaccattatctatctatcaatccgcgcgcgagaggtagaggtcgcaagcgcgtcgtcatgcacgtatgaccatggacttttgcgagccgtatcgcacccatgtgcgcacacacatgcatgaagcaaccctacaactaatgcgcgcgcatacggccaggtcaactgctgcagttagctggagacaaataacgattctttctttccggaagttgtagatgaaagctaaatcaaaccctgaactttgaatcccggaaattgacactctgaacttgtaatcccggtctattttggaccctatacctgtttggcacatcgggaatacaacaatcccggttgggattt

SEQ ID NO: 65718 - protein, 502 aa, Triticum aestivum
  peptide (1)..(502): Ceres Seq. ID no. 15220581
  misc_feature (10)..(502): Pfam Name: RNA polymerase III subunit RPC82 Pfam Description: RNA polymerase III subunit RPC82
  misc_feature (2)..(161): Homolog of NCBI NO: 4753153 NR Description: RNA polymerase III subunit [Homo sapiens]
  misc_feature (2)..(161): Homolog of NCBI NO: 13325210 NR Description: Unknown (protein for MGC:3538) [Homo sapiens]
  misc_feature (2)..(161): Homolog of NCBI NO: 20070909 NR Description: 4933407E01Rik protein [Mus musculus]
  misc_feature (1)..(440): Homolog of NCBI NO: 28278013 NR Description: Similar to RIKEN cDNA 4933407E01 gene [Danio
  misc_feature (2)..(502): Homolog of NCBI NO: 11358814 NR Description: RNA polymerase III subunit-like protein -
  misc_feature (2)..(502): Homolog of NCBI NO: 21553700 NR Description: RNA polymerase III subunit-like protein
  misc_feature (2)..(502): Homolog of NCBI NO: 18408755 NR Description: RNA polymerase III subunit - like protein
  misc_feature (37)..(412): Homolog of NCBI NO: 34911154 NR Description: putative RNA polymerase III subunit
  misc_feature (1)..(120): Homolog of NCBI NO: 34911154 NR Description: putative RNA polymerase III subunit
  misc_feature (349)..(470): Homolog of NCBI NO: 34911154 NR Description: putative RNA polymerase III subunit
MVSQHDILLAAGLISDHFGPLVAKVCDCLLRHGALQLTEIVRRLKLPQGQVKNSLLVLIQHNCVQAFSSPRGDRTITLYLAIFDNVLHRLRFSKFISIIRADIPESEALIEGLLQNGRLTFDQLVGRTISKVPEGTIRPAREEIRMNFNRLVYARYVERCPKAEPYFNPQEDEQSTGARRRVPKTAEEVLSLEQKVVNTATLSDPERFSEIPYSMEDASKTNDCPHNAVAGAKRKHGAFEVDEELNSTIAENEVLWRVNFEKFIFCLKKKFCADRKKPKLKVGTHPIWESFFEANLPDKDTNSVTSSINGILEKLGQKEGGAAMSIGDIKPVLLDLQCTTSDGEEFTFDLRKMVEACRNEEIESLVKKKYGQEAFTIFRLLVTQGCAVETDQIIDTTILDKQIVHSTLYKLWNDGYIDTEKIASAAGTGYAQFFVWRAKNTFREQFIDNLYHAALNLRQMVNYIAELLLEGSKDETKLRNRKNILILALTRHDDSLMLFHDF

SEQ ID NO: 65719 - protein, 357 aa, Triticum aestivum
  peptide (1)..(357): Ceres Seq. ID no. 15220582
  misc_feature (1)..(357): Pfam Name: RNA polymerase III subunit RPC82 Pfam Description: RNA polymerase III subunit RPC82
  misc_feature (1)..(16): Homolog of NCBI NO: 21359969 NR Description: polymerase (RNA) III (DNA directed) (62kD) [Homo
  misc_feature (1)..(16): Homolog of NCBI NO: 4753153 NR Description: RNA polymerase III subunit [Homo sapiens]
  misc_feature (1)..(16): Homolog of NCBI NO: 13325210 NR Description: Unknown (protein for MGC:3538) [Homo sapiens]
  misc_feature (1)..(16): Homolog of NCBI NO: 20070909 NR Description: 4933407E01Rik protein [Mus musculus]
  misc_feature (1)..(295): Homolog of NCBI NO: 28278013 NR Description: Similar to RIKEN cDNA 4933407E01 gene [Danio
  misc_feature (1)..(357): Homolog of NCBI NO: 11358814 NR Description: RNA polymerase III subunit-like protein -
  misc_feature (1)..(357): Homolog of NCBI NO: 21553700 NR Description: RNA polymerase III subunit-like protein
  misc_feature (1)..(357): Homolog of NCBI NO: 18408755 NR Description: RNA polymerase III subunit - like protein
  misc_feature (1)..(267): Homolog of NCBI NO: 34911154 NR Description: putative RNA polymerase III subunit
  misc_feature (204)..(325): Homolog of NCBI NO: 34911154 NR Description: putative RNA polymerase III subunit
MNFNRLVYARYVERCPKAEPYFNPQEDEQSTGARRRVPKTAEEVLSLEQKVVNTATLSDPERFSEIPYSMEDASKTNDCPHNAVAGAKRKHGAFEVDEELNSTIAENEVLWRVNFEKFIFCLKKKFCADRKKPKLKVGTHPIWESFFEANLPDKDTNSVTSSINGILEKLGQKEGGAAMSIGDIKPVLLDLQCTTSDGEEFTFDLRKMVEACRNEEIESLVKKKYGQEAFTIFRLLVTQGCAVETDQIIDTTILDKQIVHSTLYKLWNDGYIDTEKIASAAGTGYAQFFVWRAKNTFREQFIDNLYHAALNLRQMVNYIAELLLEGSKDETKLRNRKNILILALTRHDDSLMLFHDF

SEQ ID NO: 65720 - protein, 288 aa, Triticum aestivum
  peptide (1)..(288): Ceres Seq. ID no. 15220583
  misc_feature (1)..(288): Pfam Name: RNA polymerase III subunit RPC82 Pfam Description: RNA polymerase III subunit RPC82
  misc_feature (1)..(226): Homolog of NCBI NO: 28278013 NR Description: Similar to RIKEN cDNA 4933407E01 gene [Danio
  misc_feature (1)..(288): Homolog of NCBI NO: 11358814 NR Description: RNA polymerase III subunit-like protein -
  misc_feature (1)..(288): Homolog of NCBI NO: 21553700 NR Description: RNA polymerase III subunit-like protein
  misc_feature (1)..(288): Homolog of NCBI NO: 18408755 NR Description: RNA polymerase III subunit - like protein
  misc_feature (1)..(198): Homolog of NCBI NO: 34911154 NR Description: putative RNA polymerase III subunit
  misc_feature (135)..(256): Homolog of NCBI NO: 34911154 NR Description: putative RNA polymerase III subunit
MEDASKTNDCPHNAVAGAKRKHGAFEVDEELNSTIAENEVLWRVNFEKFIFCLKKKFCADRKKPKLKVGTHPIWESFFEANLPDKDTNSVTSSINGILEKLGQKEGGAAMSIGDIKPVLLDLQCTTSDGEEFTFDLRKMVEACRNEEIESLVKKKYGQEAFTIFRLLVTQGCAVETDQIIDTTILDKQIVHSTLYKLWNDGYIDTEKIASAAGTGYAQFFVWRAKNTFREQFIDNLYHAALNLRQMVNYIAELLLEGSKDETKLRNRKNILILALTRHDDSLMLFHDF

SEQ ID NO: 65721 - DNA, 1408 bp, Triticum aestivum
  misc_feature (1)..(1408): Ceres Seq. ID no. 13663031
gaacatcctaatcgaaaaagattggcgttcaaacagtccagttccagcccgactcgggccgcacccatgtctcgtctcatcccccggcggctccaccgcgccgtctccgccggcggcgcgacctcctcgagcccctcaaatctccgcagcagcgacgccaccaccgccgccacctcaaatgcgatcgtcagcctcgtcgcggcaggcggcgacggcggcagcctggaggcggacctggaccgcctcggcccgcccctctccgacgccgccgtgtcggcggcgctccgcgcgctcacggaccgcggcgtccccgcgttccgcttcttcgcatggctctcccggcacaggggcgtccccccgagcgcccgcgcccacaacctgctcgtccagaacgccggcaggctggccgactaccccaccatggcccgcgccctcgacctagtgtcggcgcgacggctcccccttaccgagcaggcgttcttgttcctggaggccgccgcgaggtcgtcctcatctgcgagcagcgtggatgacgcggtgagggcgactctgacggttttggatggtgccggtggcccgtgccgcgcgtccggcgtgttctcgctggtcaaggcgttggcctcgatcggcgagttcgacgcggccgtctgggtgatcgaggagacggccaggagagcgagctactacaacgtcctcttggctgccaagtgcaaggctggtgacttccggggcgcccgcgaggtgttcgacggaatgaggaaggggagctgcggcccaaatgccaactcctggaactacctcctcgggtgcctgctgaagaatggcagggccaccgaagcatgcgacctcgttgagaccatggagaggtcgggacacgacgacatcccaaactcactgtcgtacgagatcctcacataccatgcctgcaaggcggggaagatggattcggcaaggcagattctcgatcagttgttctcagaaaatctgacgccgaggattacaatccacacagccttcatcaaagggtacttctatactgggagaatcaaagatgcttgcgattatgtgagggctatgagcaccagggattcacactccaccaacaggaactacagcctgctcgccaagctgttgcacaggtcggggaggatcgtcgaggctggaagtgtcctgtatgagttgatggagaagggcctcaggcctgaccattctgcttatgttacagtgtccaaaggtttgcacaagatgggaaggggagatctgtgtgctgaattgaagtccttgtttcagaatttcattgtacagtcaggtttggaacactgatttacgtttgagctcttgttgagtcatctacttgagtgaaacttgcttgtccacataagatatttaggtgccatttatgccttcc

SEQ ID NO: 65722 - protein, 440 aa, Triticum aestivum
  peptide (1)..(440): Ceres Seq. ID no. 13663032
  misc_feature (262)..(295): Pfam Name: PPR repeat Pfam Description: PPR repeat
  misc_feature (191)..(440): Homolog of NCBI NO: 37535752 NR Description: hypothetical protein [Oryza sativa (japonica
  misc_feature (105)..(418): Homolog of NCBI NO: 15232243 NR Description: pentatricopeptide (PPR) repeat-containing protein
  misc_feature (49)..(440): Homolog of NCBI NO: 34906814 NR Description: similar to membrane-associated salt-inducible
  misc_feature (202)..(420): Homolog of NCBI NO: 15218325 NR Description: pentatricopeptide (PPR) repeat-containing protein
  misc_feature (75)..(411): Homolog of NCBI NO: 15223926 NR Description: pentatricopeptide (PPR) repeat-containing protein
  misc_feature (201)..(431): Homolog of NCBI NO: 15238505 NR Description: pentatricopeptide (PPR) repeat-containing protein
  misc_feature (200)..(440): Homolog of NCBI NO: 15235288 NR Description: pentatricopeptide (PPR) repeat-containing protein
  misc_feature (118)..(400): Homolog of NCBI NO: 15225665 NR Description: pentatricopeptide (PPR) repeat-containing protein
  misc_feature (13)..(428): Homolog of NCBI NO: 34896658 NR Description: putative membrane-associated salt-inducible
  misc_feature (14)..(436): Homolog of NCBI NO: 34902210 NR Description: Putative callose synthase
EHPNRKRLAFKQSSSSPTRAAPMSRLIPRRLHRAVSAGGATSSSPSNLRSSDATTAATSNAIVSLVAAGGDGGSLEADLDRLGPPLSDAAVSAALRALTDRGVPAFRFFAWLSRHRGVPPSARAHNLLVQNAGRLADYPTMARALDLVSARRLPLTEQAFLFLEAAARSSSSASSVDDAVRATLTVLDGAGGPCRASGVFSLVKALASIGEFDAAVWVIEETARRASYYNVLLAAKCKAGDFRGAREVFDGMRKGSCGPNANSWNYLLGCLLKNGRATEACDLVETMERSGHDDIPNSLSYEILTYHACKAGKMDSARQILDQLFSENLTPRITIHTAFIKGYFYTGRIKDACDYVRAMSTRDSHSTNRNYSLLAKLLHRSGRIVEAGSVLYELMEKGLRPDHSAYVTVSKGLHKMGRGDLCAELKSLFQNFIVQSGLEH

SEQ ID NO: 65723 - protein, 418 aa, Triticum aestivum
  peptide (1)..(418): Ceres Seq. ID no. 13663033
  misc_feature (240)..(273): Pfam Name: PPR repeat Pfam Description: PPR repeat
  misc_feature (169)..(418): Homolog of NCBI NO: 37535752 NR Description: hypothetical protein [Oryza sativa (japonica
  misc_feature (83)..(396): Homolog of NCBI NO: 15232243 NR Description: pentatricopeptide (PPR) repeat-containing protein
  misc_feature (27)..(418): Homolog of NCBI NO: 34906814 NR Description: similar to membrane-associated salt-inducible
  misc_feature (180)..(398): Homolog of NCBI NO: 15218325 NR Description: pentatricopeptide (PPR) repeat-containing protein
  misc_feature (53)..(389): Homolog of NCBI NO: 15223926 NR Description: pentatricopeptide (PPR) repeat-containing protein
  misc_feature (179)..(409): Homolog of NCBI NO: 15238505 NR Description: pentatricopeptide (PPR) repeat-containing protein
  misc_feature (178)..(418): Homolog of NCBI NO: 15235288 NR Description: pentatricopeptide (PPR) repeat-containing protein
  misc_feature (96)..(378): Homolog of NCBI NO: 15225665 NR Description: pentatricopeptide (PPR) repeat-containing protein
  misc_feature (1)..(406): Homolog of NCBI NO: 34896658 NR Description: putative membrane-associated salt-inducible
  misc_feature (1)..(414): Homolog of NCBI NO: 34902210 NR Description: Putative callose synthase
MSRLIPRRLHRAVSAGGATSSSPSNLRSSDATTAATSNAIVSLVAAGGDGGSLEADLDRLGPPLSDAAVSAALRALTDRGVPAFRFFAWLSRHRGVPPSARAHNLLVQNAGRLADYPTMARALDLVSARRLPLTEQAFLFLEAAARSSSSASSVDDAVRATLTVLDGAGGPCRASGVFSLVKALASIGEFDAAVWVIEETARRASYYNVLLAAKCKAGDFRGAREVFDGMRKGSCGPNANSWNYLLGCLLKNGRATEACDLVETMERSGHDDIPNSLSYEILTYHACKAGKMDSARQILDQLFSENLTPRITIHTAFIKGYFYTGRIKDACDYVRAMSTRDSHSTNRNYSLLAKLLHRSGRIVEAGSVLYELMEKGLRPDHSAYVTVSKGLHKMGRGDLCAELKSLFQNFIVQSGLEH

SEQ ID NO: 65724 - protein, 300 aa, Triticum aestivum
  peptide (1)..(300): Ceres Seq. ID no. 13663034
  misc_feature (122)..(155): Pfam Name: PPR repeat Pfam Description: PPR repeat
  misc_feature (51)..(300): Homolog of NCBI NO: 37535752 NR Description: hypothetical protein [Oryza sativa (japonica
  misc_feature (1)..(278): Homolog of NCBI NO: 15232243 NR Description: pentatricopeptide (PPR) repeat-containing protein
  misc_feature (1)..(300): Homolog of NCBI NO: 34906814 NR Description: similar to membrane-associated salt-inducible
  misc_feature (62)..(280): Homolog of NCBI NO: 15218325 NR Description: pentatricopeptide (PPR) repeat-containing protein
  misc_feature (1)..(271): Homolog of NCBI NO: 15223926 NR Description: pentatricopeptide (PPR) repeat-containing protein
  misc_feature (61)..(291): Homolog of NCBI NO: 15238505 NR Description: pentatricopeptide (PPR) repeat-containing protein
  misc_feature (60)..(300): Homolog of NCBI NO: 15235288 NR Description: pentatricopeptide (PPR) repeat-containing protein
  misc_feature (1)..(260): Homolog of NCBI NO: 15225665 NR Description: pentatricopeptide (PPR) repeat-containing protein
  misc_feature (1)..(288): Homolog of NCBI NO: 34896658 NR Description: putative membrane-associated salt-inducible
  misc_feature (1)..(296): Homolog of NCBI NO: 34902210 NR Description: Putative callose synthase
MARALDLVSARRLPLTEQAFLFLEAAARSSSSASSVDDAVRATLTVLDGAGGPCRASGVFSLVKALASIGEFDAAVWVIEETARRASYYNVLLAAKCKAGDFRGAREVFDGMRKGSCGPNANSWNYLLGCLLKNGRATEACDLVETMERSGHDDIPNSLSYEILTYHACKAGKMDSARQILDQLFSENLTPRITIHTAFIKGYFYTGRIKDACDYVRAMSTRDSHSTNRNYSLLAKLLHRSGRIVEAGSVLYELMEKGLRPDHSAYVTVSKGLHKMGRGDLCAELKSLFQNFIVQSGLEH

SEQ ID NO: 65725 - DNA, 1518 bp, Triticum aestivum
  misc_feature (1)..(1518): Ceres Seq. ID no. 13656752
agaacatcctaatcgaaaagtaccatctgggctggggaggggaaggagcagaggggatgagcggcggcggcggcggcggagtgctgggcgccggctcgtcgtaccagagcttcgtccgcaccgcgctggaacagacccgcctccgcaccgccctcacgccccacccctcgcaggaaaagttcaggctcatacgagccaacgacgatgctgctgttttggacgctctctcattcagcacccccaagatcagactgcttcgcagcttgacggttgagaagaaaaactcggttcaggttcttgactttgctgctttctctgaacctgaatatgatcttcctatattttgcgccaacgcttttacgactcctgcacagagtatcgttgtcttggacctcaatccgctatacgatataactgaagacaaggattacaaagataaatactacaggaatttgatgcctcttatacacaagtatagtgaggtgcttggatcttatccttcaccccaaatatattaccccagtcttcttctattagctttatacatagagtgctatctttatttagagaaaatgcagcttctgccatggggtggcaagattacgagcgaatctctgagattcttctctccaatcgtgatctggactatatttgagcccactgaacgtaaccatcatgttctgtattcagctttgatggattactataaggtttggcttcagttaacggatcaagcaactgaagaaaatgacacaacgaaagttgttcgtaacagagaagcgcaacatagatatctcacatggagggctgaaaaggatcctgggtttccacttctgaagaagttgattggtgaaagccatgccaaggatttggtgactgagttcctgttcgaaggagtgcattctcttggaactaaatctttcctggactattttcgcgagtacgcatgtgacgacgggacagtaaacaagaagaggagtatgatcgggaaatctttcgaagataggccttgggatgctacgggagaattcattggtggcaaggatgcaggatgagatcttttgatgcaggatgatatcttttgcagtaggatccacatgggcattcttagggttttgctgagctcctagcgattcacggcactcttgcttctcaggtttcattttaacgttcttcgttacacgctgtccgggctaatttgcatccatgtaatttcatctgagttctctgtgtagcttagaaaacatgtgtaatatttgattgaccctgataagtttttatggcaagtttagcgacgcgagaatggcaactttagttgtcaagcaagtcaacttcttttcggatggtacgttttagttttttttcgggtttgtttttttcaatttggatagcaactttaattgtaaaaaaaatatcagggccggagtgcttcgtgctacacgtgtggcacttatcatttgggtatattaaattgagtgcattatcaataataccttgcagtgatattatacactggcc

SEQ ID NO: 65726 - protein, 350 aa, Triticum aestivum
  peptide (1)..(350): Ceres Seq. ID no. 13656753
  misc_feature (37)..(161): Pfam Name: Ferredoxin-dependent bilin reductase Pfam Description: Ferredoxin-dependent bilin reductase
  misc_feature (186)..(272): Homolog of NCBI NO: 5923680 NR Description: hypothetical protein [Arabidopsis thaliana]
  misc_feature (33)..(160): Homolog of NCBI NO: 30680787 NR Description: auxin-regulated protein [Arabidopsis thaliana]
  misc_feature (33)..(160): Homolog of NCBI NO: 21618130 NR Description: unknown [Arabidopsis thaliana]
  misc_feature (186)..(345): Homolog of NCBI NO: 30680787 NR Description: auxin-regulated protein [Arabidopsis thaliana]
  misc_feature (186)..(345): Homolog of NCBI NO: 21618130 NR Description: unknown [Arabidopsis thaliana]
  misc_feature (33)..(160): Homolog of NCBI NO: 22330928 NR Description: auxin-regulated protein [Arabidopsis thaliana]
  misc_feature (186)..(345): Homolog of NCBI NO: 22330928 NR Description: auxin-regulated protein [Arabidopsis thaliana]
  misc_feature (234)..(272): Homolog of NCBI NO: 19386814 NR Description: B1147A04.9 [Oryza sativa (japonica
  misc_feature (288)..(349): Homolog of NCBI NO: 19386814 NR Description: B1147A04.9 [Oryza sativa (japonica
  misc_feature (20)..(161): Homolog of NCBI NO: 19386814 NR Description: B1147A04.9 [Oryza sativa (japonica
NILIEKYHLGWGGEGAEGMSGGGGGGVLGAGSSYQSFVRTALEQTRLRTALTPHPSQEKFRLIRANDDAAVLDALSFSTPKIRLLRSLTVEKKNSVQVLDFAAFSEPEYDLPIFCANAFTTPAQSIVVLDLNPLYDITEDKDYKDKYYRNLMPLIHKYSEVLGSYPSPQIYYPSLLLLALYIECYLYLEKMQLLPWGGKITSESLRFFSPIVIWTIFEPTERNHHVLYSALMDYYKVWLQLTDQATEENDTTKVVRNREAQHRYLTWRAEKDPGFPLLKKLIGESHAKDLVTEFLFEGVHSLGTKSFLDYFREYACDDGTVNKKRSMIGKSFEDRPWDATGEFIGGKDAG

SEQ ID NO: 65727 - protein, 332 aa, Triticum aestivum
  peptide (1)..(332): Ceres Seq. ID no. 13656754
  misc_feature (19)..(143): Pfam Name: Ferredoxin-dependent bilin reductase Pfam Description: Ferredoxin-dependent bilin reductase
  misc_feature (168)..(254): Homolog of NCBI NO: 5923680 NR Description: hypothetical protein [Arabidopsis thaliana]
  misc_feature (15)..(142): Homolog of NCBI NO: 30680787 NR Description: auxin-regulated protein [Arabidopsis thaliana]
  misc_feature (15)..(142): Homolog of NCBI NO: 21618130 NR Description: unknown [Arabidopsis thaliana]
  misc_feature (168)..(327): Homolog of NCBI NO: 30680787 NR Description: auxin-regulated protein [Arabidopsis thaliana]
  misc_feature (168)..(327): Homolog of NCBI NO: 21618130 NR Description: unknown [Arabidopsis thaliana]
  misc_feature (15)..(142): Homolog of NCBI NO: 22330928 NR Description: auxin-regulated protein [Arabidopsis thaliana]
  misc_feature (168)..(327): Homolog of NCBI NO: 22330928 NR Description: auxin-regulated protein [Arabidopsis thaliana]
  misc_feature (216)..(254): Homolog of NCBI NO: 19386814 NR Description: B1147A04.9 [Oryza sativa (japonica
  misc_feature (270)..(331): Homolog of NCBI NO: 19386814 NR Description: B1147A04.9 [Oryza sativa (japonica
  misc_feature (2)..(143): Homolog of NCBI NO: 19386814 NR Description: B1147A04.9 [Oryza sativa (japonica
MSGGGGGGVLGAGSSYQSFVRTALEQTRLRTALTPHPSQEKFRLIRANDDAAVLDALSFSTPKIRLLRSLTVEKKNSVQVLDFAAFSEPEYDLPIFCANAFTTPAQSIVVLDLNPLYDITEDKDYKDKYYRNLMPLIHKYSEVLGSYPSPQIYYPSLLLLALYIECYLYLEKMQLLPWGGKITSESLRFFSPIVIWTIFEPTERNHHVLYSALMDYYKVWLQLTDQATEENDTTKVVRNREAQHRYLTWRAEKDPGFPLLKKLIGESHAKDLVTEFLFEGVHSLGTKSFLDYFREYACDDGTVNKKRSMIGKSFEDRPWDATGEFIGGKDAG

SEQ ID NO: 65728 - protein, 199 aa, Triticum aestivum
  peptide (1)..(199): Ceres Seq. ID no. 13656755
  misc_feature (1)..(15): Homolog of NCBI NO: 37520830 NR Description: phycoerythrobilin:ferredoxin oxidoreductase
  misc_feature (41)..(146): Homolog of NCBI NO: 23127198 NR Description: hypothetical protein [Nostoc punctiforme]
  misc_feature (1)..(25): Homolog of NCBI NO: 23127198 NR Description: hypothetical protein [Nostoc punctiforme]
  misc_feature (137)..(194): Homolog of NCBI NO: 5923680 NR Description: hypothetical protein [Arabidopsis thaliana]
  misc_feature (35)..(121): Homolog of NCBI NO: 5923680 NR Description: hypothetical protein [Arabidopsis thaliana]
  misc_feature (35)..(194): Homolog of NCBI NO: 30680787 NR Description: auxin-regulated protein [Arabidopsis thaliana]
  misc_feature (35)..(194): Homolog of NCBI NO: 21618130 NR Description: unknown [Arabidopsis thaliana]
  misc_feature (35)..(194): Homolog of NCBI NO: 22330928 NR Description: auxin-regulated protein [Arabidopsis thaliana]
  misc_feature (83)..(121): Homolog of NCBI NO: 19386814 NR Description: B1147A04.9 [Oryza sativa (japonica
  misc_feature (137)..(198): Homolog of NCBI NO: 19386814 NR Description: B1147A04.9 [Oryza sativa (japonica
MPLIHKYSEVLGSYPSPQIYYPSLLLLALYIECYLYLEKMQLLPWGGKITSESLRFFSPIVIWTIFEPTERNHHVLYSALMDYYKVWLQLTDQATEENDTTKVVRNREAQHRYLTWRAEKDPGFPLLKKLIGESHAKDLVTEFLFEGVHSLGTKSFLDYFREYACDDGTVNKKRSMIGKSFEDRPWDATGEFIGGKDAG

SEQ ID NO: 65729 - DNA, 1572 bp, Triticum aestivum
  misc_feature (1)..(1572): Ceres Seq. ID no. 13656546
agattcccaactggcatgtccctgatcccgcgcgctgctccggcggcgagcatggcgttcgccggacgggaccccgctgtcatctccctcctcaagatgctaccgctgctcgtgctcctcaccttctcctccgccgcggcgcccccggcggcggcgtcaccctccgccgtgcacaacaacaactgggccgtgctcgtctgtacctctcgcttctggtttaattatagacatatggccaacacgctgtctttgtacaggactgttaagagattgggaatacctgacgagaggataatacttatgttggctgatgatatggcttgtaatcctcggaacaattatcctgcccaagtgttcaacaatgagaaccaccagcttaatctttatggtgacaatgttgaggttgattaccgaggttatgaggttacagttgaaaactttttgcgagttttgactggaagacatgagagcgctgtaccaagatcaaagcgtctcttaagtgatgaaggaagccatattcttttgtacatgactggacatggcggggatgaatttttgaagttccaagataacgaagaacttcagagccatgatttagcagatgcagtaaagcaaatgaaggagaagcatagatttaaagagttgttgataatggtagatacctgccaggctgctactcttttttcacagcttcaatcacccggtgttttggcgattggtagcagcatgaagggggaaaactcttactctcaccatctcgactcagacattggtgtttctgttgtggatagatttaccttccatacacttgctttctttgagaagctgaacatgtatagcaatgcttcattgaacagtcttttcaactcatacgacccttctatgctgctgtctactgcatattatcgaatggatctttacaagcgtgcattaaacgaggtcccagtgacaaatttctttggatcagtcatgaagactatccacactgattcagcctacacaggctttctagctgcacatgacgcggaactccccctttctgcaggaaataatatacttgatcatgtcatgtcacagaatgaggctagtgcaagaagatcgaacatagaagagatgaatgaggcacaattaatgtcccatggatggacagaggtcctgctagagcagctggaagacaaaaattctgatgttgttgtgatgtatggtctgggaactatgggcatattgctggcaatttgaacctggctatcaatgtaggaactctgaagtgtgctcttaacacatcatcttcttgcagaaaaacttagtcatactaactttcacaggatgggaccaagaagaatgaaaagaagagagatactttggcggtcaacgttctgtatttcctttttacctaatcatagcatccattcagtttggaacaaattgttgtatgtagttttcgcatggtaccctctactttttggatacgtagctcgatatgtttcgtagtcatttttatgcatctgtgctcctgcatcacatattgtacctgtcagattatttcattgctacttgaaaatatttccatgt

SEQ ID NO: 65730 - protein, 412 aa, Triticum aestivum
  peptide (1)..(412): Ceres Seq. ID no. 15219828
  misc_feature (32)..(336): Pfam Name: Peptidase C13 family Pfam Description: Peptidase C13 family
  misc_feature (33)..(331): Homolog of NCBI NO: 20071719 NR Description: Similar to phosphatidylinositol glycan, class K
  misc_feature (52)..(330): Homolog of NCBI NO: 24639234 NR Description: CG4406-PA [Drosophila melanogaster]
  misc_feature (52)..(330): Homolog of NCBI NO: 7511896 NR Description: hypothetical protein 133E12.3 - fruit fly
  misc_feature (33)..(331): Homolog of NCBI NO: 23199983 NR Description: phosphatidylinositol glycan, class K precursor
  misc_feature (33)..(331): Homolog of NCBI NO: 1518259 NR Description: gpi8 [Homo sapiens]
  misc_feature (34)..(371): Homolog of NCBI NO: 6320538 NR Description: Protein involved in the attachment of
  misc_feature (50)..(336): Homolog of NCBI NO: 9802563 NR Description: F22O13.24 [Arabidopsis thaliana]
  misc_feature (31)..(336): Homolog of NCBI NO: 7485988 NR Description: hypothetical protein F22O13.26 - Arabidopsis
  misc_feature (31)..(412): Homolog of NCBI NO: 21537105 NR Description: putative GPI-anchor transamidase [Arabidopsis
  misc_feature (31)..(412): Homolog of NCBI NO: 18390936 NR Description: GPI-anchor transamidase (U32517) -related
RFPTGMSLIPRAAPAASMAFAGRDPAVISLLKMLPLLVLLTFSSAAAPPAAASPSAVHNNNWAVLVCTSRFWFNYRHMANTLSLYRTVKRLGIPDERIILMLADDMACNPRNNYPAQVFNNENHQLNLYGDNVEVDYRGYEVTVENFLRVLTGRHESAVPRSKRLLSDEGSHILLYMTGHGGDEFLKFQDNEELQSHDLADAVKQMKEKHRFKELLIMVDTCQAATLFSQLQSPGVLAIGSSMKGENSYSHHLDSDIGVSVVDRFTFHTLAFFEKLNMYSNASLNSLFNSYDPSMLLSTAYYRMDLYKRALNEVPVTNFFGSVMKTIHTDSAYTGFLAAHDAELPLSAGNNILDHVMSQNEASARRSNIEEMNEAQLMSHGWTEVLLEQLEDKNSDVVVMYGLGTMGILLAI

SEQ ID NO: 65731 - protein, 407 aa, Triticum aestivum
  peptide (1)..(407): Ceres Seq. ID no. 15219829
  misc_feature (27)..(331): Pfam Name: Peptidase C13 family Pfam Description: Peptidase C13 family
  misc_feature (28)..(326): Homolog of NCBI NO: 20071719 NR Description: Similar to phosphatidylinositol glycan, class K
  misc_feature (47)..(325): Homolog of NCBI NO: 24639234 NR Description: CG4406-PA [Drosophila melanogaster]
  misc_feature (47)..(325): Homolog of NCBI NO: 7511896 NR Description: hypothetical protein 133E12.3 - fruit fly
  misc_feature (28)..(326): Homolog of NCBI NO: 23199983 NR Description: phosphatidylinositol glycan, class K precursor
  misc_feature (28)..(326): Homolog of NCBI NO: 1518259 NR Description: gpi8 [Homo sapiens]
  misc_feature (29)..(366): Homolog of NCBI NO: 6320538 NR Description: Protein involved in the attachment of
  misc_feature (45)..(331): Homolog of NCBI NO: 9802563 NR Description: F22O13.24 [Arabidopsis thaliana]
  misc_feature (26)..(331): Homolog of NCBI NO: 7485988 NR Description: hypothetical protein F22O13.26 - Arabidopsis
  misc_feature (26)..(407): Homolog of NCBI NO: 21537105 NR Description: putative GPI-anchor transamidase [Arabidopsis
  misc_feature (26)..(407): Homolog of NCBI NO: 18390936 NR Description: GPI-anchor transamidase (U32517) -related
MSLIPRAAPAASMAFAGRDPAVISLLKMLPLLVLLTFSSAAAPPAAASPSAVHNNNWAVLVCTSRFWFNYRHMANTLSLYRTVKRLGIPDERIILMLADDMACNPRNNYPAQVFNNENHQLNLYGDNVEVDYRGYEVTVENFLRVLTGRHESAVPRSKRLLSDEGSHILLYMTGHGGDEFLKFQDNEELQSHDLADAVKQMKEKHRFKELLIMVDTCQAATLFSQLQSPGVLAIGSSMKGENSYSHHLDSDIGVSVVDRFTFHTLAFFEKLNMYSNASLNSLFNSYDPSMLLSTAYYRMDLYKRALNEVPVTNFFGSVMKTIHTDSAYTGFLAAHDAELPLSAGNNILDHVMSQNEASARRSNIEEMNEAQLMSHGWTEVLLEQLEDKNSDVVVMYGLGTMGILLAI

SEQ ID NO: 65732 - protein, 395 aa, Triticum aestivum
  peptide (1)..(395): Ceres Seq. ID no. 15219830
  misc_feature (15)..(319): Pfam Name: Peptidase C13 family Pfam Description: Peptidase C13 family
  misc_feature (16)..(314): Homolog of NCBI NO: 20071719 NR Description: Similar to phosphatidylinositol glycan, class K
  misc_feature (35)..(313): Homolog of NCBI NO: 24639234 NR Description: CG4406-PA [Drosophila melanogaster]
  misc_feature (35)..(313): Homolog of NCBI NO: 7511896 NR Description: hypothetical protein 133E12.3 - fruit fly
  misc_feature (16)..(314): Homolog of NCBI NO: 23199983 NR Description: phosphatidylinositol glycan, class K precursor
  misc_feature (16)..(314): Homolog of NCBI NO: 1518259 NR Description: gpi8 [Homo sapiens]
  misc_feature (17)..(354): Homolog of NCBI NO: 6320538 NR Description: Protein involved in the attachment of
  misc_feature (33)..(319): Homolog of NCBI NO: 9802563 NR Description: F22O13.24 [Arabidopsis thaliana]
  misc_feature (14)..(319): Homolog of NCBI NO: 7485988 NR Description: hypothetical protein F22O13.26 - Arabidopsis
  misc_feature (14)..(395): Homolog of NCBI NO: 21537105 NR Description: putative GPI-anchor transamidase [Arabidopsis
  misc_feature (14)..(395): Homolog of NCBI NO: 18390936 NR Description: GPI-anchor transamidase (U32517) -related
MAFAGRDPAVISLLKMLPLLVLLTFSSAAAPPAAASPSAVHNNNWAVLVCTSRFWFNYRHMANTLSLYRTVKRLGIPDERIILMLADDMACNPRNNYPAQVFNNENHQLNLYGDNVEVDYRGYEVTVENFLRVLTGRHESAVPRSKRLLSDEGSHILLYMTGHGGDEFLKFQDNEELQSHDLADAVKQMKEKHRFKELLIMVDTCQAATLFSQLQSPGVLAIGSSMKGENSYSHHLDSDIGVSVVDRFTFHTLAFFEKLNMYSNASLNSLFNSYDPSMLLSTAYYRMDLYKRALNEVPVTNFFGSVMKTIHTDSAYTGFLAAHDAELPLSAGNNILDHVMSQNEASARRSNIEEMNEAQLMSHGWTEVLLEQLEDKNSDVVVMYGLGTMGILLAI

SEQ ID NO: 65733 - DNA, 1791 bp, Triticum aestivum
  misc_feature (1)..(1791): Ceres Seq. ID no. 15176091
accgatagaccgataaactagcagccgtcccgtcatcaaccttgcaagttagaaaccagccccgtctccaaattaatggacgtcacggcatgggcatgggcctccttcctggccgtcgtcctcgtcgtcctaaccattctccgccgtggccgtggctcgcagccgcaggggaacaggcttccaccaggaccgaagccgtggcccgtgatcggcaacctcaatctcatcggcgcgctgccgcaccgctccatccacgagctgtccaagcagtacggcccgttgatgcagctccggttcgggtccttccccgtcgtggtgggctcctcggccgagatggccaggttcttcctcaagacccacgacacggtgttcgccgaccggccaaggaccgccgccggcaagcacaccacctacaactactccgacgtcctgtgggcgccctacaacgcccacttccgccgcgcgcgcaggctcttcgccaccgagctgttcagcgcggcgcggctcgagtcctacaagcacatccgccacgaggaggtgagcgcgctgctgcgcgacctggccgcggccgctcacggggcatctggccgtgccgtgccgctcaggggacacctctttgcggcgaccaacggcatcatctcgcgggtggtgctgggcaagaagtacgcggagaaggaggcaggaggctcggcagccatggcgctggaggatttgtcgggcttaattgaggagtttttccttctcaacggcgtgatcaacgtcggcgatttcattccgtggttcgactggctggacctgcaagggtacgtccggaggatgaagaagtacagcaagaagatggaccgctttctcgagcatgtcctggaggaacacgaggagcgccggcgtgtcaagggggagcagttcgtggcgagggacatggtggacgtgctgctgcagctcgccgacaatcctaaccggcttgaccgagacaccgtcaaggctctcactcaggaacttatcgtcgggggttcagatacctccagtgtaaccatggagtgggcgatgtcggaggttctcaggaaccctgaggtcttgggcaaggccaccaaggagctcgaccgtgtggtcggccgtgacaggatggtcatggagaaggacatcccagacctcccttacatagaggccatcgtgaaggaggcgatgcgcatgcacccggtgtcgcccatgttggcgccccacctcgcacgcgaggacgcgtccgtcgacggccacgacatccccgccggcacgctcgtcctcgtcaacgtgtgggccatcggccgtgacccgacctattgggacgcgccggaggagttccgaccagagaggtttatggggagcaagatcgacgtgaaggggcaggacatggagctgctaccgttcggggccggccgccggatgtgccccgggtatagcctgggactgaaggtggtgcagttgatcgtcgccaatcttctgcatggcttcacgtgggggctccctgacggcacaacgatggagcaactcaacatggaggagatatatgggctcaccactgcgcgcaagttcccgttagaggcagtggtggagcctaagctccaagaacacgtcttctcgtagcgccgccgccgcaaaaatgctagactcacgcatcattacggaggttctagtcattgtggtatacgacttctagtccaagtcagttttatacccctaccctaagtcggtttgtaccctcttatatactcttgtatgccgcatcaaatcatcaataagcaacagttttattct

SEQ ID NO: 65734 - protein, 514 aa, Triticum aestivum
  peptide (1)..(514): Ceres Seq. ID no. 15176092
  misc_feature (36)..(500): Pfam Name: Cytochrome P450 Pfam Description: Cytochrome P450
  misc_feature (35)..(513): Homolog of NCBI NO: 27151498 NR Description: Flavonoid 3'-monooxygenase (Flavonoid
  misc_feature (1)..(497): Homolog of NCBI NO: 12004682 NR Description: cytochrome P450 [Pisum sativum]
  misc_feature (8)..(502): Homolog of NCBI NO: 7430637 NR Description: cytochrome P450 - common tobacco
  misc_feature (10)..(514): Homolog of NCBI NO: 7430636 NR Description: probable cytochrome P450,
  misc_feature (10)..(514): Homolog of NCBI NO: 14423327 NR Description: elicitor-inducible cytochrome P450 [Nicotiana
  misc_feature (8)..(514): Homolog of NCBI NO: 18377404 NR Description: cytochrome P450 monooxygenase CYP92A1 [Zea mays
MDVTAWAWASFLAVVLVVLTILRRGRGSQPQGNRLPPGPKPWPVIGNLNLIGALPHRSIHELSKQYGPLMQLRFGSFPVVVGSSAEMARFFLKTHDTVFADRPRTAAGKHTTYNYSDVLWAPYNAHFRRARRLFATELFSAARLESYKHIRHEEVSALLRDLAAAAHGASGRAVPLRGHLFAATNGIISRVVLGKKYAEKEAGGSAAMALEDLSGLIEEFFLLNGVINVGDFIPWFDWLDLQGYVRRMKKYSKKMDRFLEHVLEEHEERRRVKGEQFVARDMVDVLLQLADNPNRLDRDTVKALTQELIVGGSDTSSVTMEWAMSEVLRNPEVLGKATKELDRVVGRDRMVMEKDIPDLPYIEAIVKEAMRMHPVSPMLAPHLAREDASVDGHDIPAGTLVLVNVWAIGRDPTYWDAPEEFRPERFMGSKIDVKGQDMELLPFGAGRRMCPGYSLGLKVVQLIVANLLHGFTWGLPDGTTMEQLNMEEIYGLTTARKFPLEAVVEPKLQEHVFS

SEQ ID NO: 65735 - protein, 445 aa, Triticum aestivum
  peptide (1)..(445): Ceres Seq. ID no. 15176093
  misc_feature (1)..(431): Pfam Name: Cytochrome P450 Pfam Description: Cytochrome P450
  misc_feature (1)..(444): Homolog of NCBI NO: 27151498 NR Description: Flavonoid 3'-monooxygenase (Flavonoid
  misc_feature (1)..(428): Homolog of NCBI NO: 12004682 NR Description: cytochrome P450 [Pisum sativum]
  misc_feature (1)..(433): Homolog of NCBI NO: 7430637 NR Description: cytochrome P450 - common tobacco
  misc_feature (1)..(445): Homolog of NCBI NO: 7430636 NR Description: probable cytochrome P450,
  misc_feature (1)..(445): Homolog of NCBI NO: 14423327 NR Description: elicitor-inducible cytochrome P450 [Nicotiana
  misc_feature (1)..(445): Homolog of NCBI NO: 18377404 NR Description: cytochrome P450 monooxygenase CYP92A1 [Zea mays
MQLRFGSFPVVVGSSAEMARFFLKTHDTVFADRPRTAAGKHTTYNYSDVLWAPYNAHFRRARRLFATELFSAARLESYKHIRHEEVSALLRDLAAAAHGASGRAVPLRGHLFAATNGIISRVVLGKKYAEKEAGGSAAMALEDLSGLIEEFFLLNGVINVGDFIPWFDWLDLQGYVRRMKKYSKKMDRFLEHVLEEHEERRRVKGEQFVARDMVDVLLQLADNPNRLDRDTVKALTQELIVGGSDTSSVTMEWAMSEVLRNPEVLGKATKELDRVVGRDRMVMEKDIPDLPYIEAIVKEAMRMHPVSPMLAPHLAREDASVDGHDIPAGTLVLVNVWAIGRDPTYWDAPEEFRPERFMGSKIDVKGQDMELLPFGAGRRMCPGYSLGLKVVQLIVANLLHGFTWGLPDGTTMEQLNMEEIYGLTTARKFPLEAVVEPKLQEHVFS

SEQ ID NO: 65736 - protein, 428 aa, Triticum aestivum
  peptide (1)..(428): Ceres Seq. ID no. 15176094
  misc_feature (1)..(414): Pfam Name: Cytochrome P450 Pfam Description: Cytochrome P450
  misc_feature (1)..(427): Homolog of NCBI NO: 27151498 NR Description: Flavonoid 3'-monooxygenase (Flavonoid
  misc_feature (1)..(411): Homolog of NCBI NO: 12004682 NR Description: cytochrome P450 [Pisum sativum]
  misc_feature (1)..(416): Homolog of NCBI NO: 7430637 NR Description: cytochrome P450 - common tobacco
  misc_feature (1)..(428): Homolog of NCBI NO: 7430636 NR Description: probable cytochrome P450,
  misc_feature (1)..(428): Homolog of NCBI NO: 14423327 NR Description: elicitor-inducible cytochrome P450 [Nicotiana
  misc_feature (1)..(428): Homolog of NCBI NO: 18377404 NR Description: cytochrome P450 monooxygenase CYP92A1 [Zea mays
MARFFLKTHDTVFADRPRTAAGKHTTYNYSDVLWAPYNAHFRRARRLFATELFSAARLESYKHIRHEEVSALLRDLAAAAHGASGRAVPLRGHLFAATNGIISRVVLGKKYAEKEAGGSAAMALEDLSGLIEEFFLLNGVINVGDFIPWFDWLDLQGYVRRMKKYSKKMDRFLEHVLEEHEERRRVKGEQFVARDMVDVLLQLADNPNRLDRDTVKALTQELIVGGSDTSSVTMEWAMSEVLRNPEVLGKATKELDRVVGRDRMVMEKDIPDLPYIEAIVKEAMRMHPVSPMLAPHLAREDASVDGHDIPAGTLVLVNVWAIGRDPTYWDAPEEFRPERFMGSKIDVKGQDMELLPFGAGRRMCPGYSLGLKVVQLIVANLLHGFTWGLPDGTTMEQLNMEEIYGLTTARKFPLEAVVEPKLQEHVFS

SEQ ID NO: 65737 - DNA, 1820 bp, Triticum aestivum
  misc_feature (1)..(1820): Ceres Seq. ID no. 14307991
atatctttttcatccacttgtctccaagcaagaaagaggccacggccggataagactcaccaagcttagctaagcaacttcaacaatggagggggcgggaacagcactactgtggagccaggtgggctcgccgctggcatccttcccggcgatgctgttcacggtggcggccatggcggccggcgcattcgcagtgtacttctacgcgccgtcatggcgcctgcgcagtgtgccgggccccctcgcttacggcctcgtcggccacctgccgctgctggacaagcatggctcccaggcgttcggcgtcctcgcaaagaaatacgggcccatctacaggttctacatgggcaggcagccgctggtggtggtcgccgacccggagctgtgcagggaggccggcatcaagaagttcaagagcatcgtcgacaggagcgtgccggtcaccatcgctagctcgcccatccactacaagagcctcctcttcaccaagggctcgacatggcaggcgatgcggaacgtgatcatctccatctaccagccatcgcacctggcgagcctcatcccggccatccagccctacatcgagcaggcgggcaacctgttctgccccggcgaggagatcaccttctctgacatctccatcaggctcttcaccgacgtcatcggccaggccgcctttggcgtcgacttcgggctcaccaaggacgccgccgacgacgccgagaagatcatccacgacgcgccccgcgacttcatccagaagcacctgtacgccaccacgtccctcaagatggacctgtcgggctcgctgtccatgctcgtcggcacgttcctgccggcgctccagaagccgctgcggcagctgatgctgcgcgtgccgggctccatggaccggcggatggacgagaccaacacggcgctcagcggcgagctcgacaccatcgtggcggagcgggcggctcaggcggaccggggccagaagaacttcctctccgtgctgctcaacggcatcgacaccagcgacgccatgaggaagctcttcacgccggactacgtcagcgcgctcacgtacgagcacttgctcgcgggctccggcaccatgtccttcacgctgtcgagcctggtgtacctcgtgtcggcgcacccggaggtggaggggaagctgctccaggagatcgacgcgttcgggcccaaggacgtggtgcccgacgccgacgacctccgcaccaagttcccctacctggagcaggtcgtcaaggagaccatgcgatactttcccggctccccggtggtctcgagggaggcgaccgccgacgtcgagatcggaggctatttcctgcccaaggggacgtgggtgtggctggcgacggcggtgctggggagggacccggagcagttcccggagcccgaagcgttccggccggagcgcttcgacccggagagcgagcagtgcaagcggagacacccctacgcgtacatccccttcggcatcggcccgcgggcgtgcccggggcagaagttcgcgttccagcagctcaagctcaccgtcatccacctctaccgccgctacgtcttcaggcactcgaccagcatggagtccccactgcagctgcagttctccatcgtcaccaacttcaagaacggtgtcaagctccaggtcgttcaaaggaagaactaatatgagtgtatgacagtaagtttgtgaccgactatttatgtactagtagcagtacatgcttgctccgttcaacgtgtgcgaaatcacatttttgaaagtgtgtaatcgatttgttcaattcaataaaagttgcggttttgac

SEQ ID NO: 65738 - protein, 530 aa, Triticum aestivum
  peptide (1)..(530): Ceres Seq. ID no. 14307992
  misc_feature (315)..(528): Homolog of NCBI NO: 1351234 NR Description: Thromboxane-A synthase (TXA synthase) (TXS)
  misc_feature (13)..(298): Homolog of NCBI NO: 34911504 NR Description: cytochrome P450-like protein
  misc_feature (198)..(394): Homolog of NCBI NO: 34911498 NR Description: cytochrome P450-like protein
  misc_feature (210)..(528): Homolog of NCBI NO: 34911504 NR Description: cytochrome P450-like protein
  misc_feature (142)..(528): Homolog of NCBI NO: 15810030 NR Description: At2g26170/T19L18.2 [Arabidopsis thaliana]
  misc_feature (388)..(528): Homolog of NCBI NO: 34911498 NR Description: cytochrome P450-like protein
  misc_feature (13)..(296): Homolog of NCBI NO: 34911498 NR Description: cytochrome P450-like protein
  misc_feature (87)..(528): Homolog of NCBI NO: 30683028 NR Description: thromboxane-A synthase, putative / cytochrome
  misc_feature (38)..(508): Homolog of NCBI NO: 34911506 NR Description: cytochrome P450-like protein
  misc_feature (10)..(528): Homolog of NCBI NO: 30683024 NR Description: thromboxane-A synthase, putative / cytochrome
MEGAGTALLWSQVGSPLASFPAMLFTVAAMAAGAFAVYFYAPSWRLRSVPGPLAYGLVGHLPLLDKHGSQAFGVLAKKYGPIYRFYMGRQPLVVVADPELCREAGIKKFKSIVDRSVPVTIASSPIHYKSLLFTKGSTWQAMRNVIISIYQPSHLASLIPAIQPYIEQAGNLFCPGEEITFSDISIRLFTDVIGQAAFGVDFGLTKDAADDAEKIIHDAPRDFIQKHLYATTSLKMDLSGSLSMLVGTFLPALQKPLRQLMLRVPGSMDRRMDETNTALSGELDTIVAERAAQADRGQKNFLSVLLNGIDTSDAMRKLFTPDYVSALTYEHLLAGSGTMSFTLSSLVYLVSAHPEVEGKLLQEIDAFGPKDVVPDADDLRTKFPYLEQVVKETMRYFPGSPVVSREATADVEIGGYFLPKGTWVWLATAVLGRDPEQFPEPEAFRPERFDPESEQCKRRHPYAYIPFGIGPRACPGQKFAFQQLKLTVIHLYRRYVFRHSTSMESPLQLQFSIVTNFKNGVKLQVVQRKN

SEQ ID NO: 65739 - protein, 508 aa, Triticum aestivum
  peptide (1)..(508): Ceres Seq. ID no. 14307993
  misc_feature (293)..(506): Homolog of NCBI NO: 1351234 NR Description: Thromboxane-A synthase (TXA synthase) (TXS)
  misc_feature (1)..(276): Homolog of NCBI NO: 34911504 NR Description: cytochrome P450-like protein
  misc_feature (176)..(372): Homolog of NCBI NO: 34911498 NR Description: cytochrome P450-like protein
  misc_feature (188)..(506): Homolog of NCBI NO: 34911504 NR Description: cytochrome P450-like protein
  misc_feature (120)..(506): Homolog of NCBI NO: 15810030 NR Description: At2g26170/T19L18.2 [Arabidopsis thaliana]
  misc_feature (366)..(506): Homolog of NCBI NO: 34911498 NR Description: cytochrome P450-like protein
  misc_feature (1)..(274): Homolog of NCBI NO: 34911498 NR Description: cytochrome P450-like protein
  misc_feature (65)..(506): Homolog of NCBI NO: 30683028 NR Description: thromboxane-A synthase, putative / cytochrome
  misc_feature (16)..(486): Homolog of NCBI NO: 34911506 NR Description: cytochrome P450-like protein
  misc_feature (1)..(506): Homolog of NCBI NO: 30683024 NR Description: thromboxane-A synthase, putative / cytochrome
MLFTVAAMAAGAFAVYFYAPSWRLRSVPGPLAYGLVGHLPLLDKHGSQAFGVLAKKYGPIYRFYMGRQPLVVVADPELCREAGIKKFKSIVDRSVPVTIASSPIHYKSLLFTKGSTWQAMRNVIISIYQPSHLASLIPAIQPYIEQAGNLFCPGEEITFSDISIRLFTDVIGQAAFGVDFGLTKDAADDAEKIIHDAPRDFIQKHLYATTSLKMDLSGSLSMLVGTFLPALQKPLRQLMLRVPGSMDRRMDETNTALSGELDTIVAERAAQADRGQKNFLSVLLNGIDTSDAMRKLFTPDYVSALTYEHLLAGSGTMSFTLSSLVYLVSAHPEVEGKLLQEIDAFGPKDVVPDADDLRTKFPYLEQVVKETMRYFPGSPVVSREATADVEIGGYFLPKGTWVWLATAVLGRDPEQFPEPEAFRPERFDPESEQCKRRHPYAYIPFGIGPRACPGQKFAFQQLKLTVIHLYRRYVFRHSTSMESPLQLQFSIVTNFKNGVKLQVVQRKN

SEQ ID NO: 65740 - protein, 501 aa, Triticum aestivum
  peptide (1)..(501): Ceres Seq. ID no. 14307994
  misc_feature (286)..(499): Homolog of NCBI NO: 1351234 NR Description: Thromboxane-A synthase (TXA synthase) (TXS)
  misc_feature (1)..(269): Homolog of NCBI NO: 34911504 NR Description: cytochrome P450-like protein
  misc_feature (169)..(365): Homolog of NCBI NO: 34911498 NR Description: cytochrome P450-like protein
  misc_feature (181)..(499): Homolog of NCBI NO: 34911504 NR Description: cytochrome P450-like protein
  misc_feature (113)..(499): Homolog of NCBI NO: 15810030 NR Description: At2g26170/T19L18.2 [Arabidopsis thaliana]
  misc_feature (359)..(499): Homolog of NCBI NO: 34911498 NR Description: cytochrome P450-like protein
  misc_feature (1)..(267): Homolog of NCBI NO: 34911498 NR Description: cytochrome P450-like protein
  misc_feature (58)..(499): Homolog of NCBI NO: 30683028 NR Description: thromboxane-A synthase, putative / cytochrome
  misc_feature (9)..(479): Homolog of NCBI NO: 34911506 NR Description: cytochrome P450-like protein
  misc_feature (1)..(499): Homolog of NCBI NO: 30683024 NR Description: thromboxane-A synthase, putative / cytochrome
MAAGAFAVYFYAPSWRLRSVPGPLAYGLVGHLPLLDKHGSQAFGVLAKKYGPIYRFYMGRQPLVVVADPELCREAGIKKFKSIVDRSVPVTIASSPIHYKSLLFTKGSTWQAMRNVIISIYQPSHLASLIPAIQPYIEQAGNLFCPGEEITFSDISIRLFTDVIGQAAFGVDFGLTKDAADDAEKIIHDAPRDFIQKHLYATTSLKMDLSGSLSMLVGTFLPALQKPLRQLMLRVPGSMDRRMDETNTALSGELDTIVAERAAQADRGQKNFLSVLLNGIDTSDAMRKLFTPDYVSALTYEHLLAGSGTMSFTLSSLVYLVSAHPEVEGKLLQEIDAFGPKDVVPDADDLRTKFPYLEQVVKETMRYFPGSPVVSREATADVEIGGYFLPKGTWVWLATAVLGRDPEQFPEPEAFRPERFDPESEQCKRRHPYAYIPFGIGPRACPGQKFAFQQLKLTVIHLYRRYVFRHSTSMESPLQLQFSIVTNFKNGVKLQVVQRKN

SEQ ID NO: 65741 - DNA, 1789 bp, Triticum aestivum
  misc_feature (1)..(1789): Ceres Seq. ID no. 14303169
atcgacgatccatcccgtgtgcggccgcccacaccagtttcctcgtccccacaagcagcggcacggctaaaaacggggggacgcttccctttcatctcgcgactataaaaaagaacgggcggccctgcctaaagccccctctcctcgccttctccgccctccgctccattcgtttcgatctatttcggcttcttcctctccaagctacagccccggccatggcggcgacgatccagtccgtgaaggcccgccagatcttcgacagccgcggcaaccccaccgtcgaggttgatgtgtgctgctcagatggaaccttcgccagggccgctgttcccagcggtgcatcaactggtgtttatgaagctttggaactgagagacggtggatctgactacttgggaaagggtgtttccaaggctgttgacaatgtgaacttgattatcgcaccagctttgattggcaaggaccctacagctcaaactgagctcgacaactttatggttcagcagcttgatggaaccaaaaacgaatggggttggtgcaagcagaagcttggtgctaatgcaatcctggctgtgtcactagctatttgcaaagctggagccagcatcaagaagattccgctgtaccagcacattgccaaccttgctggcaacaagcaattggttttgcctgttcctgcattcaatgtcatcaatggtggatcccatgctggaaacaagcttgctatgcaggagttcatgatccttcctactggagctgcctcattcaaggaggcaatgaagatgggcgttgaagtgtaccacaacttgaagtctgttatcaagaagaagtacgggcaagatgccaccaatgttggagatgaaggtggttttgctcctaacattcaggagaataaggagggccttgagctcttgaagactgcaattgaaaaggctggatacaccggcaaggttgtcattggaatggatgttgctgcttcagagttctacaatgacaaggacaaaacatatgacctcaacttcaaggaagagaacaacgatggttcccagaagatatctggagatagcctgaagaatgtatacaagtcattcgtgagtgagtaccccattgtgtcgattgaggacccatttgaccaggatgactgggtgcactatgctaagatgactgaagaatgtggagagcaagttcagattgttggtgatgaccttctagtcaccaacccaaccagagttgcgaaggcaatcaaggagaagtcatgcaatgctcttctgctgaaggttaaccaaattggatccgtcactgaaagtatcgaggccgtgaagatgtcgaaacatgctggctggggtgtgatgaccagtcacaggagtggtgagactgaggacacattcattgctgatttggctgttggtttgtccacgggtcagatcaagactggggctccctgccgctcagagcggcttgccaagtacaaccagcttctgaggatcgaggaagagctgggcgctgccgctgtgtatgccggcctcaagttccgcgcaccggtggagccatactagatgggacctgcatccgagacatgatcactctgcacttgtttttgtgaaagtgggcgtgtcttaacttgtggaatgaactatggttgaagctcttaggactagtcgagcaataatgtaccgcatgttgctgtgaacgggacggatatgtacctacgtgctccaaacttgctccaattttggtctttgtggtgagcgagcaagcacgcctgattaccttttggatctctagc

SEQ ID NO: 65742 - protein, 518 aa, Triticum aestivum
  peptide (1)..(518): Ceres Seq. ID no. 14303170
  misc_feature (220)..(515): Pfam Name: Enolase, C-terminal TIM barrel domain Pfam Description: Enolase, C-terminal TIM barrel domain
  misc_feature (76)..(518): Homolog of NCBI NO: 7436883 NR Description: phosphopyruvate hydratase (EC 4.2.1.11) - common
  misc_feature (75)..(518): Homolog of NCBI NO: 15227987 NR Description: enolase (2-phospho-D-glycerate hydroylase)
  misc_feature (73)..(518): Homolog of NCBI NO: 1169534 NR Description: Enolase (2-phosphoglycerate dehydratase)
  misc_feature (75)..(518): Homolog of NCBI NO: 119354 NR Description: Enolase (2-phosphoglycerate dehydratase)
  misc_feature (73)..(518): Homolog of NCBI NO: 119355 NR Description: Enolase 1 (2-phosphoglycerate dehydratase 1)
  misc_feature (493)..(518): Homolog of NCBI NO: 37531422 NR Description: putative enolase (2-phospho-D-glycerate
  misc_feature (73)..(473): Homolog of NCBI NO: 37531422 NR Description: putative enolase (2-phospho-D-glycerate
  misc_feature (73)..(518): Homolog of NCBI NO: 1169528 NR Description: Enolase 2 (2-phosphoglycerate dehydratase 2)
  misc_feature (73)..(518): Homolog of NCBI NO: 3023713 NR Description: Enolase (2-phosphoglycerate dehydratase)
  misc_feature (73)..(518): Homolog of NCBI NO: 33113259 NR Description: enolase [Oryza sativa (japonica cultivar-group)]
RRSIPCAAAHTSFLVPTSSGTAKNGGTLPFHLATIKKNGRPCLKPPLLAFSALRSIRFDLFRLLPLQATAPAMAATIQSVKARQIFDSRGNPTVEVDVCCSDGTFARAAVPSGASTGVYEALELRDGGSDYLGKGVSKAVDNVNLIIAPALIGKDPTAQTELDNFMVQQLDGTKNEWGWCKQKLGANAILAVSLAICKAGASIKKIPLYQHIANLAGNKQLVLPVPAFNVINGGSHAGNKLAMQEFMILPTGAASFKEAMKMGVEVYHNLKSVIKKKYGQDATNVGDEGGFAPNIQENKEGLELLKTAIEKAGYTGKVVIGMDVAASEFYNDKDKTYDLNFKEENNDGSQKISGDSLKNVYKSFVSEYPIVSIEDPFDQDDWVHYAKMTEECGEQVQIVGDDLLVTNPTRVAKAIKEKSCNALLLKVNQIGSVTESIEAVKMSKHAGWGVMTSHRSGETEDTFIADLAVGLSTGQIKTGAPCRSERLAKYNQLLRIEEELGAAAVYAGLKFRAPVEPY

SEQ ID NO: 65743 - protein, 446 aa, Triticum aestivum
  peptide (1)..(446): Ceres Seq. ID no. 14303171
  misc_feature (148)..(443): Pfam Name: Enolase, C-terminal TIM barrel domain Pfam Description: Enolase, C-terminal TIM barrel domain
  misc_feature (4)..(446): Homolog of NCBI NO: 7436883 NR Description: phosphopyruvate hydratase (EC 4.2.1.11) - common
  misc_feature (3)..(446): Homolog of NCBI NO: 15227987 NR Description: enolase (2-phospho-D-glycerate hydroylase)
  misc_feature (1)..(446): Homolog of NCBI NO: 1169534 NR Description: Enolase (2-phosphoglycerate dehydratase)
  misc_feature (3)..(446): Homolog of NCBI NO: 119354 NR Description: Enolase (2-phosphoglycerate dehydratase)
  misc_feature (1)..(446): Homolog of NCBI NO: 119355 NR Description: Enolase 1 (2-phosphoglycerate dehydratase 1)
  misc_feature (421)..(446): Homolog of NCBI NO: 37531422 NR Description: putative enolase (2-phospho-D-glycerate
  misc_feature (1)..(401): Homolog of NCBI NO: 37531422 NR Description: putative enolase (2-phospho-D-glycerate
  misc_feature (1)..(446): Homolog of NCBI NO: 1169528 NR Description: Enolase 2 (2-phosphoglycerate dehydratase 2)
  misc_feature (1)..(446): Homolog of NCBI NO: 3023713 NR Description: Enolase (2-phosphoglycerate dehydratase)
  misc_feature (1)..(446): Homolog of NCBI NO: 33113259 NR Description: enolase [Oryza sativa (japonica cultivar-group)]
MAATIQSVKARQIFDSRGNPTVEVDVCCSDGTFARAAVPSGASTGVYEALELRDGGSDYLGKGVSKAVDNVNLIIAPALIGKDPTAQTELDNFMVQQLDGTKNEWGWCKQKLGANAILAVSLAICKAGASIKKIPLYQHIANLAGNKQLVLPVPAFNVINGGSHAGNKLAMQEFMILPTGAASFKEAMKMGVEVYHNLKSVIKKKYGQDATNVGDEGGFAPNIQENKEGLELLKTAIEKAGYTGKVVIGMDVAASEFYNDKDKTYDLNFKEENNDGSQKISGDSLKNVYKSFVSEYPIVSIEDPFDQDDWVHYAKMTEECGEQVQIVGDDLLVTNPTRVAKAIKEKSCNALLLKVNQIGSVTESIEAVKMSKHAGWGVMTSHRSGETEDTFIADLAVGLSTGQIKTGAPCRSERLAKYNQLLRIEEELGAAAVYAGLKFRAPVEPY

SEQ ID NO: 65744 - protein, 353 aa, Triticum aestivum
  peptide (1)..(353): Ceres Seq. ID no. 14303172
  misc_feature (55)..(350): Pfam Name: Enolase, C-terminal TIM barrel domain Pfam Description: Enolase, C-terminal TIM barrel domain
  misc_feature (1)..(353): Homolog of NCBI NO: 7436883 NR Description: phosphopyruvate hydratase (EC 4.2.1.11) - common
  misc_feature (1)..(353): Homolog of NCBI NO: 15227987 NR Description: enolase (2-phospho-D-glycerate hydroylase)
  misc_feature (1)..(353): Homolog of NCBI NO: 1169534 NR Description: Enolase (2-phosphoglycerate dehydratase)
  misc_feature (1)..(353): Homolog of NCBI NO: 119354 NR Description: Enolase (2-phosphoglycerate dehydratase)
  misc_feature (1)..(353): Homolog of NCBI NO: 119355 NR Description: Enolase 1 (2-phosphoglycerate dehydratase 1)
  misc_feature (328)..(353): Homolog of NCBI NO: 37531422 NR Description: putative enolase (2-phospho-D-glycerate
  misc_feature (1)..(308): Homolog of NCBI NO: 37531422 NR Description: putative enolase (2-phospho-D-glycerate
  misc_feature (1)..(353): Homolog of NCBI NO: 1169528 NR Description: Enolase 2 (2-phosphoglycerate dehydratase 2)
  misc_feature (1)..(353): Homolog of NCBI NO: 3023713 NR Description: Enolase (2-phosphoglycerate dehydratase)
  misc_feature (1)..(353): Homolog of NCBI NO: 33113259 NR Description: enolase [Oryza sativa (japonica cultivar-group)]
MVQQLDGTKNEWGWCKQKLGANAILAVSLAICKAGASIKKIPLYQHIANLAGNKQLVLPVPAFNVINGGSHAGNKLAMQEFMILPTGAASFKEAMKMGVEVYHNLKSVIKKKYGQDATNVGDEGGFAPNIQENKEGLELLKTAIEKAGYTGKVVIGMDVAASEFYNDKDKTYDLNFKEENNDGSQKISGDSLKNVYKSFVSEYPIVSIEDPFDQDDWVHYAKMTEECGEQVQIVGDDLLVTNPTRVAKAIKEKSCNALLLKVNQIGSVTESIEAVKMSKHAGWGVMTSHRSGETEDTFIADLAVGLSTGQIKTGAPCRSERLAKYNQLLRIEEELGAAAVYAGLKFRAPVEPY

SEQ ID NO: 65745 - DNA, 1026 bp, Triticum aestivum
  misc_feature (1)..(1026): Ceres Seq. ID no. 13656452
cctagaacatactaatcgaaaaatgcacagtcacctcgtaagcaagcagctgctacagcctcaacaatcaaaccttgattcgacatggcgaagtcgcccatggcgatcttggctctcgggctagcagcactagtcctatccggcgccgggctggtggccgcgcagaactgcggctgccagccgaacgagtgctgcagcaagtacggttattgcgggaccgatgccagctactgcggacaagattgtcggtcgggcccgtgcacggcgagcggcggcgggagcggcgatcccgtggagagcgtcgtcaccgacgcgttctttgacgggatcaagtcccaggccgccgacgggtgccccgggaagagcttttacacgcgccagtttttcctggacggcgcccaggcgaaccccgacttcggcaaaggcagcaccagcgacgacggcaagagggagatagccgccttcttcgcccacttcacccacgagaccggacacatgtgctccatcgaggagaacgaaggggcgagcaaggattactgcgacgagacgaacacgcaatggccgtgtaccccggggaaggcgtactacgggcgcgggccgctgcagctgtcgtggaactacaactacggggcggccggggagagcaccgggttcgacgggctcaacagcccggagacggtggcgcaggaccaggcgctaacgttcaaggcggcgttctggttctggatgaccaacgtgcaccaggccgtgcccagtgggttcggcgcgacgaccagggcaatcaacggtgacgtggagtgcgacggcaagaagccagacttggtgagcgcgcgggcgggctactacacggactactgccagcagttcggcgtcgacccagggaacaacctcacttgctaggtgcttggttctgaattgatcgacgcgcaaaaacctttctggcgatgctcctactgctctacctccctgtgtattctgggatatctatatatcctgtatacgtaataaatttacatctctgtattc

SEQ ID NO: 65746 - protein, 271 aa, Triticum aestivum; identical to SEQ ID NO: 52785
  peptide (1)..(271): Ceres Seq. ID no. 13656453
  misc_feature (73)..(271): Pfam Name: Chitinase class I Pfam Description: Chitinase class I
  misc_feature (8)..(271): Homolog of NCBI NO: 116333 NR Description: ENDOCHITINASE B PRECURSOR (SEED CHITINASE B)
  misc_feature (8)..(271): Homolog of NCBI NO: 15213848 NR Description: chitinase-B [Saccharum officinarum]
  misc_feature (8)..(271): Homolog of NCBI NO: 15213852 NR Description: chitinase-B [Sorghum halepense]
  misc_feature (1)..(271): Homolog of NCBI NO: 116329 NR Description: ENDOCHITINASE A PRECURSOR (SEED CHITINASE A)
  misc_feature (1)..(271): Homolog of NCBI NO: 283037 NR Description: chitinase (EC 3.2.1.14) A - maize
  misc_feature (6)..(271): Homolog of NCBI NO: 38345417 NR Description: OSJNBb0091E11.8 [Oryza sativa (japonica
  misc_feature (6)..(271): Homolog of NCBI NO: 30793457 NR Description: chitinase [Oryza sativa (japonica cultivar-group)]
  misc_feature (1)..(25): Homolog of NCBI NO: 4741842 NR Description: chitinase II precursor [Triticum aestivum]
  misc_feature (62)..(271): Homolog of NCBI NO: 4741842 NR Description: chitinase II precursor [Triticum aestivum]
  misc_feature (1)..(271): Homolog of NCBI NO: 4741848 NR Description: chitinase IV precursor [Triticum aestivum]

SEQ ID NO: 65747 - protein, 266 aa, Triticum aestivum; identical to SEQ ID NO: 52786
  peptide (1)..(266): Ceres Seq. ID no. 13656454
  misc_feature (68)..(266): Pfam Name: Chitinase class I Pfam Description: Chitinase class I
  misc_feature (3)..(266): Homolog of NCBI NO: 116333 NR Description: ENDOCHITINASE B PRECURSOR (SEED CHITINASE B)
  misc_feature (3)..(266): Homolog of NCBI NO: 15213848 NR Description: chitinase-B [Saccharum officinarum]
  misc_feature (3)..(266): Homolog of NCBI NO: 15213852 NR Description: chitinase-B [Sorghum halepense]
  misc_feature (1)..(266): Homolog of NCBI NO: 116329 NR Description: ENDOCHITINASE A PRECURSOR (SEED CHITINASE A)
  misc_feature (1)..(266): Homolog of NCBI NO: 283037 NR Description: chitinase (EC 3.2.1.14) A - maize
  misc_feature (1)..(266): Homolog of NCBI NO: 38345417 NR Description: OSJNBb0091E11.8 [Oryza sativa (japonica
  misc_feature (1)..(266): Homolog of NCBI NO: 30793457 NR Description: chitinase [Oryza sativa (japonica cultivar-group)]
  misc_feature (1)..(20): Homolog of NCBI NO: 4741842 NR Description: chitinase II precursor [Triticum aestivum]
  misc_feature (57)..(266): Homolog of NCBI NO: 4741842 NR Description: chitinase II precursor [Triticum aestivum]
  misc_feature (1)..(266): Homolog of NCBI NO: 4741848 NR Description: chitinase IV precursor [Triticum aestivum]

SEQ ID NO: 65748 - DNA, 1301 bp, Triticum aestivum
  misc_feature (1)..(1301): Ceres Seq. ID no. 13656794
attacatagaacatcctaatcgaaaatataattctatgttctgttttacatcgttgggtgcacaagttgatcatagtatcaatgttggaggtgctccatacgttttcaagatgaatggggtggtttaccatcgtattggttcgttgttgccggctggcggtgcaccaccaaagtttgcgcaactgtatatgatggattctgctgacgagttggactgtaggttgaatgtgtttgacagagaagaaactagctcacttgagcccgatcctgaaattgtttcttcattgatagacatgcttaatatgcatcaccgtctggtgcacaaatttagaattgcacgacagagtctgtgtactcctggtgtttctgatgtctcaattcgtttcttgagcagcgatggcggtgctcatggtacgcgtttctccggtcctaccacttctgaagtggctgcgcttatagttggtgatctcatggatagtgcaagcatccagccctgaaatttaatcatggaaatggaaatagttcgcaggaaaatcttatgatttatatctcaagacggccaatgcttgaaaagttagtgaaacaattgggttgaaagtacaaggatatacatattggtacgtccatcaaggtatgatgcaagcatctgtactaattggcctaccacgccaagaagatagttttagagaatcttccatcacatatgaaggggaggcagctaatagagaagatgaagcaatggagaaagcagtctcaagtggccttagaatgtatttgtgcagactataatatttctgtcaatgatcacaattactatgcccttgaagtcacaaaagaaagattgcttacaacaagagagaaagctcaaacaaaacaatggcagttcaacatggcgcgccagcaaataactatgcagcagaatgaatttgcaagacaaacaatgattctggcaaagatatgcaatagcttttttgatatactgccacttcgtatgtacccccagcgtccagaaagcagtgatcccattattacatacacaggcgcacaccctcccatcggacgtatggaagaacttgcaaaatcactttatcactttatcacaggcaccaatcctgcaggaggctacaccagaatgatctaatttactatcaactacttctagcttatctacgtaatatgtttgtgtttctatatacagttctctgtctgcagcgagttgtatgtagtttaaataatttgtttgcctcaagtgtgtaccacttttaatttgcagctttgtaaccctgcatttwcarcmttyt

SEQ ID NO: 65749 - protein, 164 aa, Triticum aestivum
  peptide (1)..(164): Ceres Seq. ID no. 15219851
  misc_feature (7)..(156): Homolog of NCBI NO: 38346863 NR Description: OSJNBb0002N06.2 [Oryza sativa (japonica
  misc_feature (1)..(136): Homolog of NCBI NO: 38346787 NR Description: OSJNBa0095H06.12 [Oryza sativa (japonica
  misc_feature (7)..(148): Homolog of NCBI NO: 37530422 NR Description: putative helicase [Oryza sativa (japonica
  misc_feature (7)..(157): Homolog of NCBI NO: 34906276 NR Description: P0489A01.23 [Oryza sativa (japonica
  misc_feature (7)..(155): Homolog of NCBI NO: 34902784 NR Description: unnamed protein product [Oryza sativa (japonica
  misc_feature (7)..(162): Homolog of NCBI NO: 21743013 NR Description: OSJNBb0013O03.3 [Oryza sativa (japonica
  misc_feature (7)..(155): Homolog of NCBI NO: 34394334 NR Description: helicase-like protein [Oryza sativa (japonica
  misc_feature (7)..(160): Homolog of NCBI NO: 34904560 NR Description: putative helicase [Oryza sativa (japonica
  misc_feature (7)..(155): Homolog of NCBI NO: 38424032 NR Description: helicase-like protein [Oryza sativa (japonica
  misc_feature (7)..(155): Homolog of NCBI NO: 34914948 NR Description: helicase-like protein [Oryza sativa (japonica
YIEHPNRKYNSMFCFTSLGAQVDHSINVGGAPYVFKMNGVVYHRIGSLLPAGGAPPKFAQLYMMDSADELDCRLNVFDREETSSLEPDPEIVSSLIDMLNMHHRLVHKFRIARQSLCTPGVSDVSIRFLSSDGGAHGTRFSGPTTSEVAALIVGDLMDSASIQP

SEQ ID NO: 65750 - protein, 153 aa, Triticum aestivum
  peptide (1)..(153): Ceres Seq. ID no. 15219852
  misc_feature (1)..(145): Homolog of NCBI NO: 38346863 NR Description: OSJNBb0002N06.2 [Oryza sativa (japonica
  misc_feature (1)..(125): Homolog of NCBI NO: 38346787 NR Description: OSJNBa0095H06.12 [Oryza sativa (japonica
  misc_feature (1)..(137): Homolog of NCBI NO: 37530422 NR Description: putative helicase [Oryza sativa (japonica
  misc_feature (1)..(146): Homolog of NCBI NO: 34906276 NR Description: P0489A01.23 [Oryza sativa (japonica
  misc_feature (1)..(144): Homolog of NCBI NO: 34902784 NR Description: unnamed protein product [Oryza sativa (japonica
  misc_feature (1)..(151): Homolog of NCBI NO: 21743013 NR Description: OSJNBb0013O03.3 [Oryza sativa (japonica
  misc_feature (1)..(144): Homolog of NCBI NO: 34394334 NR Description: helicase-like protein [Oryza sativa (japonica
  misc_feature (1)..(149): Homolog of NCBI NO: 34904560 NR Description: putative helicase [Oryza sativa (japonica
  misc_feature (1)..(144): Homolog of NCBI NO: 38424032 NR Description: helicase-like protein [Oryza sativa (japonica
  misc_feature (1)..(144): Homolog of NCBI NO: 34914948 NR Description: helicase-like protein [Oryza sativa (japonica
MFCFTSLGAQVDHSINVGGAPYVFKMNGVVYHRIGSLLPAGGAPPKFAQLYMMDSADELDCRLNVFDREETSSLEPDPEIVSSLIDMLNMHHRLVHKFRIARQSLCTPGVSDVSIRFLSSDGGAHGTRFSGPTTSEVAALIVGDLMDSASIQP

SEQ ID NO: 65751 - protein, 145 aa, Triticum aestivum
  peptide (1)..(145): Ceres Seq. ID no. 15219853
MKGRQLIEKMKQWRKQSQVALECICADYNISVNDHNYYALEVTKERLLTTREKAQTKQWQFNMARQQITMQQNEFARQTMILAKICNSFFDILPLRMYPQRPESSDPIITYTGAHPPIGRMEELAKSLYHFITGTNPAGGYTRMI

SEQ ID NO: 65752 - DNA, 1975 bp, Triticum aestivum
  misc_feature (1)..(1975): Ceres Seq. ID no. 14303141
cttttgaagccccgccctccttccacaggcccatgacgaagccaacctagctagcttgcaccacgtaccgtgtggcattatatatacgcccaccggccctccgtgccatcccggtctccatcgccatggcgacgacggggagggtgaggccttctcctctcctcgcggcgtggctggctctcggctttgcgtggcattgcgcgcttcaccatgctccggcggcggccgtgacgctgtcgacggcgtcccggtgggtcgtggacgaggccggggaccgcgtgaagctggcgtgcgtgaactggccgtcgcacctggagccgatgctggcggaggggctgggcaagcggcccgtgggcgccatcgccggggacgtggccaccatggggttcaactgcgtccggctcacctggcccacgttcctggtgaccaacgcctcctactcgtccctcaccgtcgagcagtccttccagaggctcaacctcaccgagtcgctcgccggcatcagggccaacaaccccgccgtcgtcgacctcaagctcatcgacgcgttcaaggccgtggtgagcagcctcggtgagaacaacgtcatggtgatcctggacaaccacgtgagcaagcccgggtggtgctgcgacaacgcggacggcaacgggttcttcggcgacggctacttcgagccggacgtctgggtcgacggcctcaccaagatggccaccatgttcgccggcgtcccccacgtcgtcggcatgagcctcaggaacgagctccgaggccccaggcagaactcaaacgactggtacaagtacatgcagcgcggcgcggaggcggtgcacgcggcgaacccgcgggtgctggtgatcctctcgggcctcagcttcgacaacgacctggcgttcctcaactcgcggcaggtgagcctgagcttcgcccggaaggcggcgttcgaggtgcactggtacagcttctccaacggccaggagtgggcggcggggaaccccaacgaggtgtgcgcgcggatcggggccagcgtgtcccgccgcgcgctctacctgctcgactagggctggccggtcttcctcagcgagttcggcgtcgacaaccgcggcgggaacgccaacgacaaccgctactacggctgcgccgccgccgtcgccgccgacctcgacctcgactgggcgctctggacgctgcaggggagctactacctccgccagggcgtgctggacctcgacgaggtctacggcgtgctcgaccgggcctggtccaggccacgcaacgtcaccgcgctccgcagggtccagcccctgcagcgcccgctccgagggcctggctacgcggaggcggcgccgtacacggtgctgttccacccggcgacggggctgtgcgtgctgcggcggtcgctggcgcagccactggagctgggcgcgtgcgccgggacggaggcctgggagtacgcgccgcagcaggggcggctggcgctgcgggacggcccgctgatgtgcctccacgcgcagggcgccggccggcccgtgcgcctcggcacgccttgcgacgacgacatgtcccggtggcgcctcgtgtcggactccaagctgcacgtcgccgtcaacgcatcgtcttcgtcgtcatccggctccggcgatggccgtggcatgctctgcctggacgtcggcgcggacggccagagcgtggtcaccaacccgtgccgctgcctgagcgcggacaacagctgcgacccggagagccagtggttcaagatggtgagcagcacgaggagcgtcgccgccaatagcatgctcgcggagctgcctgtgaagctcgggagctcgaagattcgctcgctttgatcggcgccagtaggaccgacatatataattgtataggtgcacgcatccgttgtactagctgcaaaggcgccgggatggacgagagaagctgctctagaaccggaataatatccttcagagttcagatg

SEQ ID NO: 65753 - protein, 311 aa, Triticum aestivum
  peptide (1)..(311): Ceres Seq. ID no. 14303142
  misc_feature (42)..(311): Pfam Name: Cellulase (glycosyl hydrolase family 5) Pfam Description: Cellulase (glycosyl hydrolase family 5)
  misc_feature (37)..(311): Homolog of NCBI NO: 40742809 NR Description: hypothetical protein AN9166.2 [Aspergillus
  misc_feature (37)..(311): Homolog of NCBI NO: 15237397 NR Description: glycosyl hydrolase family 5/cellulase
  misc_feature (37)..(311): Homolog of NCBI NO: 15237972 NR Description: glycosyl hydrolase family 5/cellulase
  misc_feature (38)..(311): Homolog of NCBI NO: 15231513 NR Description: glycosyl hydrolase family 5/cellulase
  misc_feature (38)..(311): Homolog of NCBI NO: 11994430 NR Description: gene_id:MTC11.2~unknown protein [Arabidopsis
  misc_feature (34)..(311): Homolog of NCBI NO: 15231514 NR Description: glycosyl hydrolase family 5/cellulase
  misc_feature (9)..(311): Homolog of NCBI NO: 38345245 NR Description: OSJNBb0011N17.6 [Oryza sativa (japonica
  misc_feature (10)..(311): Homolog of NCBI NO: 38345244 NR Description: OSJNBb0011N17.5 [Oryza sativa (japonica
  misc_feature (37)..(311): Homolog of NCBI NO: 15222185 NR Description: glycosyl hydrolase family 5/cellulase
  misc_feature (12)..(311): Homolog of NCBI NO: 38345246 NR Description: OSJNBb0011N17.7 [Oryza sativa (japonica
MATTGRVRPSPLLAAWLALGFAWHCALHHAPAAAVTLSTASRWVVDEAGDRVKLACVNWPSHLEPMLAEGLGKRPVGAIAGDVATMGFNCVRLTWPTFLVTNASYSSLTVEQSFQRLNLTESLAGIRANNPAVVDLKLIDAFKAVVSSLGENNVMVILDNHVSKPGWCCDNADGNGFFGDGYFEPDVWVDGLTKMATMFAGVPHVVGMSLRNELRGPRQNSNDWYKYMQRGAEAVHAANPRVLVILSGLSFDNDLAFLNSRQVSLSFARKAAFEVHWYSFSNGQEWAAGNPNEVCARIGASVSRRALYLLD

SEQ ID NO: 65754 - protein, 246 aa, Triticum aestivum
  peptide (1)..(246): Ceres Seq. ID no. 14303143
  misc_feature (1)..(246): Pfam Name: Cellulase (glycosyl hydrolase family 5) Pfam Description: Cellulase (glycosyl hydrolase family 5)
  misc_feature (1)..(246): Homolog of NCBI NO: 40742809 NR Description: hypothetical protein AN9166.2 [Aspergillus
  misc_feature (1)..(246): Homolog of NCBI NO: 15237397 NR Description: glycosyl hydrolase family 5/cellulase
  misc_feature (1)..(246): Homolog of NCBI NO: 15237972 NR Description: glycosyl hydrolase family 5/cellulase
  misc_feature (1)..(246): Homolog of NCBI NO: 15231513 NR Description: glycosyl hydrolase family 5/cellulase
  misc_feature (1)..(246): Homolog of NCBI NO: 11994430 NR Description: gene_id:MTC11.2~unknown protein [Arabidopsis
  misc_feature (1)..(246): Homolog of NCBI NO: 15231514 NR Description: glycosyl hydrolase family 5/cellulase
  misc_feature (1)..(246): Homolog of NCBI NO: 38345245 NR Description: OSJNBb0011N17.6 [Oryza sativa (japonica
  misc_feature (1)..(246): Homolog of NCBI NO: 38345244 NR Description: OSJNBb0011N17.5 [Oryza sativa (japonica
  misc_feature (1)..(246): Homolog of NCBI NO: 15222185 NR Description: glycosyl hydrolase family 5/cellulase
  misc_feature (1)..(246): Homolog of NCBI NO: 38345246 NR Description: OSJNBb0011N17.7 [Oryza sativa (japonica
MLAEGLGKRPVGAIAGDVATMGFNCVRLTWPTFLVTNASYSSLTVEQSFQRLNLTESLAGIRANNPAVVDLKLIDAFKAVVSSLGENNVMVILDNHVSKPGWCCDNADGNGFFGDGYFEPDVWVDGLTKMATMFAGVPHVVGMSLRNELRGPRQNSNDWYKYMQRGAEAVHAANPRVLVILSGLSFDNDLAFLNSRQVSLSFARKAAFEVHWYSFSNGQEWAAGNPNEVCARIGASVSRRALYLLD

SEQ ID NO: 65755 - protein, 226 aa, Triticum aestivum
  peptide (1)..(226): Ceres Seq. ID no. 14303144
  misc_feature (1)..(226): Pfam Name: Cellulase (glycosyl hydrolase family 5) Pfam Description: Cellulase (glycosyl hydrolase family 5)
  misc_feature (1)..(226): Homolog of NCBI NO: 40742809 NR Description: hypothetical protein AN9166.2 [Aspergillus
  misc_feature (1)..(226): Homolog of NCBI NO: 15237397 NR Description: glycosyl hydrolase family 5/cellulase
  misc_feature (1)..(226): Homolog of NCBI NO: 15237972 NR Description: glycosyl hydrolase family 5/cellulase
  misc_feature (1)..(226): Homolog of NCBI NO: 15231513 NR Description: glycosyl hydrolase family 5/cellulase
  misc_feature (1)..(226): Homolog of NCBI NO: 11994430 NR Description: gene_id:MTC11.2~unknown protein [Arabidopsis
  misc_feature (1)..(226): Homolog of NCBI NO: 15231514 NR Description: glycosyl hydrolase family 5/cellulase
  misc_feature (1)..(226): Homolog of NCBI NO: 38345245 NR Description: OSJNBb0011N17.6 [Oryza sativa (japonica
  misc_feature (1)..(226): Homolog of NCBI NO: 38345244 NR Description: OSJNBb0011N17.5 [Oryza sativa (japonica
  misc_feature (1)..(226): Homolog of NCBI NO: 15222185 NR Description: glycosyl hydrolase family 5/cellulase
  misc_feature (1)..(226): Homolog of NCBI NO: 38345246 NR Description: OSJNBb0011N17.7 [Oryza sativa (japonica
MGFNCVRLTWPTFLVTNASYSSLTVEQSFQRLNLTESLAGIRANNPAVVDLKLIDAFKAVVSSLGENNVMVILDNHVSKPGWCCDNADGNGFFGDGYFEPDVWVDGLTKMATMFAGVPHVVGMSLRNELRGPRQNSNDWYKYMQRGAEAVHAANPRVLVILSGLSFDNDLAFLNSRQVSLSFARKAAFEVHWYSFSNGQEWAAGNPNEVCARIGASVSRRALYLLD

SEQ ID NO: 65756 - DNA, 1351 bp, Triticum aestivum
  misc_feature (1)..(1351): Ceres Seq. ID no. 13656797
cattagatactgtgagccttctcctcctcatccgtgacactagcatcatcccatcccatggtgatcgggcaaaaaaatgcggagggttcgatccaacggtcatgcctaccccgtctgctctgcgcgcgggagcagtactccgcattgctccttttcgtggccgtggccgccgtctgcctcctcgtcgtggttggcagtggcacatacgcgctatcgtctccggccgacgtcggcggcgagatggagcagaggttcttcaacatatttcctcgccaagcagcggccggcgcctcggacgatgaactggaggcggcgctgcgcggcgcggccgacgcgaacaggacgctgatcgtgagcgtgctgaacaaggcgtacgccgaggagggcggcctgctggaccttttcatcgagagcctgaagcaaggggagggcaccgggcatctcatcggccacgtcctccttgtagccatggacgaaccagccttccgcaggtgcagtggcctcggcggcgtccggtgctacctccttcccccggcggccgcgaccaacagcaccaacctctcctcggagcagctctacatgtctggcggcttcatacgcatgatgtggcggcgcattcgcctcctcggcgacatcctcaagcacggctacagcttcatattcaccgatatggatgtgatgtggctgaggaacccgttcccgagcctgaatcgcaccgaggaggaagacctcctgatcagcaccgacggattcaaggggcggccggaggactacctcggccacgagctcaacacgaggttcttcttcgtggccgcgagcaaccggacggcggcgatgttcgacgagtggcacgcggcacgggaggcgtcggaaggcatgaaggagcaggacgtgctaaaccagatgaagcaacaaggcgcgttccgccggctcggcgtgagggtgcgcgtcctggacacggcgcgcttcagcggcttctgccaggacagccaggacgcccggcaggtggtcaccgtgcacgccaactgctgccggaccatgcgggccaaggtcgccgacctcaaggccgttcttggcgccgccaagcagctcaacgggacgacggggcggctgaaatggccgcgtcattcagcctgcttgggatcgtggaggaagtgagacgaggaagcgctcgttcgaggcttcaccttgtctcccttatctcgtttccattgctttacttaccattcgtcactttactgctggtaagatgttttggtttgttggcatgaggaaagaaaaacacccaaaacatcttgctgagtagtaccaagttatcacttatcacatagtacttccttctggaggggtg

SEQ ID NO: 65757 - protein, 366 aa, Triticum aestivum
  peptide (1)..(366): Ceres Seq. ID no. 15219854
  misc_feature (82)..(354): Homolog of NCBI NO: 15235236 NR Description: hypothetical protein common family [Arabidopsis
  misc_feature (69)..(366): Homolog of NCBI NO: 15223826 NR Description: expressed protein [Arabidopsis thaliana]
  misc_feature (7)..(339): Homolog of NCBI NO: 21536907 NR Description: regulatory protein [Arabidopsis thaliana]
  misc_feature (101)..(357): Homolog of NCBI NO: 15218760 NR Description: hypothetical protein [Arabidopsis thaliana]
  misc_feature (93)..(358): Homolog of NCBI NO: 6063544 NR Description: similar to Arabidopsis thaliana chromosome 2, BAC
  misc_feature (24)..(339): Homolog of NCBI NO: 15235236 NR Description: hypothetical protein common family [Arabidopsis
  misc_feature (78)..(358): Homolog of NCBI NO: 23306127 NR Description: Putataive InsB from Escherichia coli
  misc_feature (81)..(360): Homolog of NCBI NO: 6691205 NR Description: F1K23.11 [Arabidopsis thaliana]
  misc_feature (81)..(365): Homolog of NCBI NO: 25372968 NR Description: protein F1K23.10 [imported] - Arabidopsis
  misc_feature (38)..(364): Homolog of NCBI NO: 18396892 NR Description: expressed protein [Arabidopsis thaliana]
MVIGQKNAEGSIQRSCLPRLLCAREQYSALLLFVAVAAVCLLVVVGSGTYALSSPADVGGEMEQRFFNIFPRQAAAGASDDELEAALRGAADANRTLIVSVLNKAYAEEGGLLDLFIESLKQGEGTGHLIGHVLLVAMDEPAFRRCSGLGGVRCYLLPPAAATNSTNLSSEQLYMSGGFIRMMWRRIRLLGDILKHGYSFIFTDMDVMWLRNPFPSLNRTEEEDLLISTDGFKGRPEDYLGHELNTRFFFVAASNRTAAMFDEWHAAREASEGMKEQDVLNQMKQQGAFRRLGVRVRVLDTARFSGFCQDSQDARQVVTVHANCCRTMRAKVADLKAVLGAAKQLNGTTGRLKWPRHSACLGSWRK

SEQ ID NO: 65758 - protein, 305 aa, Triticum aestivum
  peptide (1)..(305): Ceres Seq. ID no. 15219855
  misc_feature (21)..(293): Homolog of NCBI NO: 15235236 NR Description: hypothetical protein common family [Arabidopsis
  misc_feature (8)..(305): Homolog of NCBI NO: 15223826 NR Description: expressed protein [Arabidopsis thaliana]
  misc_feature (1)..(278): Homolog of NCBI NO: 21536907 NR Description: regulatory protein [Arabidopsis thaliana]
  misc_feature (40)..(296): Homolog of NCBI NO: 15218760 NR Description: hypothetical protein [Arabidopsis thaliana]
  misc_feature (32)..(297): Homolog of NCBI NO: 6063544 NR Description: similar to Arabidopsis thaliana chromosome 2, BAC
  misc_feature (1)..(278): Homolog of NCBI NO: 15235236 NR Description: hypothetical protein common family [Arabidopsis
  misc_feature (17)..(297): Homolog of NCBI NO: 23306127 NR Description: Putataive InsB from Escherichia coli
  misc_feature (20)..(299): Homolog of NCBI NO: 6691205 NR Description: F1K23.11 [Arabidopsis thaliana]
  misc_feature (20)..(304): Homolog of NCBI NO: 25372968 NR Description: protein F1K23.10 [imported] - Arabidopsis
  misc_feature (1)..(303): Homolog of NCBI NO: 18396892 NR Description: expressed protein [Arabidopsis thaliana]
MEQRFFNIFPRQAAAGASDDELEAALRGAADANRTLIVSVLNKAYAEEGGLLDLFIESLKQGEGTGHLIGHVLLVAMDEPAFRRCSGLGGVRCYLLPPAAATNSTNLSSEQLYMSGGFIRMMWRRIRLLGDILKHGYSFIFTDMDVMWLRNPFPSLNRTEEEDLLISTDGFKGRPEDYLGHELNTRFFFVAASNRTAAMFDEWHAAREASEGMKEQDVLNQMKQQGAFRRLGVRVRVLDTARFSGFCQDSQDARQVVTVHANCCRTMRAKVADLKAVLGAAKQLNGTTGRLKWPRHSACLGSWRK

SEQ ID NO: 65759 - protein, 229 aa, Triticum aestivum
  peptide (1)..(229): Ceres Seq. ID no. 15219856
  misc_feature (1)..(217): Homolog of NCBI NO: 15235236 NR Description: hypothetical protein common family [Arabidopsis
  misc_feature (1)..(229): Homolog of NCBI NO: 15223826 NR Description: expressed protein [Arabidopsis thaliana]
  misc_feature (1)..(202): Homolog of NCBI NO: 21536907 NR Description: regulatory protein [Arabidopsis thaliana]
  misc_feature (1)..(220): Homolog of NCBI NO: 15218760 NR Description: hypothetical protein [Arabidopsis thaliana]
  misc_feature (1)..(221): Homolog of NCBI NO: 6063544 NR Description: similar to Arabidopsis thaliana chromosome 2, BAC
  misc_feature (1)..(202): Homolog of NCBI NO: 15235236 NR Description: hypothetical protein common family [Arabidopsis
  misc_feature (1)..(221): Homolog of NCBI NO: 23306127 NR Description: Putataive InsB from Escherichia coli
  misc_feature (1)..(223): Homolog of NCBI NO: 6691205 NR Description: F1K23.11 [Arabidopsis thaliana]
  misc_feature (1)..(228): Homolog of NCBI NO: 25372968 NR Description: protein F1K23.10 [imported] - Arabidopsis
  misc_feature (1)..(227): Homolog of NCBI NO: 18396892 NR Description: expressed protein [Arabidopsis thaliana]
MDEPAFRRCSGLGGVRCYLLPPAAATNSTNLSSEQLYMSGGFIRMMWRRIRLLGDILKHGYSFIFTDMDVMWLRNPFPSLNRTEEEDLLISTDGFKGRPEDYLGHELNTRFFFVAASNRTAAMFDEWHAAREASEGMKEQDVLNQMKQQGAFRRLGVRVRVLDTARFSGFCQDSQDARQVVTVHANCCRTMRAKVADLKAVLGAAKQLNGTTGRLKWPRHSACLGSWRK

SEQ ID NO: 65760 - DNA, 1883 bp, Triticum aestivum
  misc_feature (1)..(1883): Ceres Seq. ID no. 14308007
ataaccataaaccatctcatatctcaggctctcgacttagcagcagagaaagccaagcacagaattaaccacaaatcatggagatggagctcaatctcgtctcgtacgtgtccatcgccctgttcgtcctctcgggcgcgtacgtctaccacgcgacgcggagccggtcgccgaggcagcggctcccgccggcgccgccggggtggcccgtgatcggccacctccacctgctgacggacatgccccaccacgcgctggcggagctggccaagaccatgcgcgccccactgctccggctccggctcgggagcgtcccggccctggtgatctccaagcccgacctggcccgcgccgcgctcaccagcaacgacgcggccatggcgtcccgcccccacctcctctccggccagttcctctcgttcgggtgctccgacgtgaccttcgcccccgcggggccgtaccaccgcatggcgcggcgggtggtcgtctccgagctcctctcggcgcgccgcgtcgccacctacggcagcgtccggggcaaggagctccgccgcctgctcgcgcacctcaccaagaacaccaagccgggaacgcccgtcgacctcagcgagtgcttcctcaacctcgccaacgacgtgctctgccgcgtggccttcggccgccggttcccgcacggcaaggacgacaagctcgccgcggtgctcgccgaggcccaggacctgttcgccgggttcaccatcggggacttcttcccggagctcgagcccttcgccagcaccgtcacgggcctccgccgccggctgaagagctgcctcgccgacctccgcgaggtctgcgacgacatcgtcgaggagcacgtgagcggcaagcaccagcgcctccccggcgaccgcgacgaggacttcgtggacgtgctcctccgcgtccagaagtcgcccgacctcgaggtcccgctcaccgacgacaacctcaaagccctcgtcctggacatgttcgtcgccggcacggacacgacgttcgcgacgctggagtgggtgatgacggagctggtgcgccacccgcgcatccttcaaaaggcgcaggaggaggtccggcgggtggtgggcgccaagggccgggtggaggagtcggacctggcggagctccactacatgcgcgccatcatcaaggagaccttccggctgcacccggcggtgccgctgctcgtgccgcgggagaccgtcgcggcgtgcactctcggcggctacgacatcccggccaagacccgcgtcttcatcaacaccttcgccatgggccgggacccggagatctgggaggagccgctggagtactcgccggagcggttcgaggtggccggcgccggcggcgagatcgacctcaaggacccggactacaagctgctgccgttcggcggcgggcggagggggtgcccggggtacacgttcgcgctggccaccgtgcaggtatcgctggccagcctgctgtaccacttcgagtgggcgctgccggccggcgtgcgcgccgaggacgtgagcgtggaggagaccttcgggctggccaccaggaagaaggagccgctcttcgtcgccgtcagcaagagcgatgtgtaccagttcaagggggaggagctcaacgaggtttaaattatttttgcttagtaatttcttgtcatgcaagtaggttttttctcttctcttcagacaatgcaaataagagagtaggtagctaggtaaaaaaacaaaagcaaggaagagagagaataggtaaaataaaaatggatctagtaccgcacgtgttggtgcctgacttgctgtggtaagagacgtgtatgtgtgtaattttgttgtggtaattcttctaaaaaaatgcaatattttgtagtc

SEQ ID NO: 65761 - protein, 521 aa, Triticum aestivum
  peptide (1)..(521): Ceres Seq. ID no. 14308008
  misc_feature (37)..(477): Pfam Name: Cytochrome P450 Pfam Description: Cytochrome P450
  misc_feature (7)..(477): Homolog of NCBI NO: 117188 NR Description: CYTOCHROME P450 71A1 (CYPLXXIA1) (ARP-2)
  misc_feature (7)..(501): Homolog of NCBI NO: 25282608 NR Description: cytochrome P-450LXXIA1 [similarity] - avocado
MEMELNLVSYVSIALFVLSGAYVYHATRSRSPRQRLPPAPPGWPVIGHLHLLTDMPHHALAELAKTMRAPLLRLRLGSVPALVISKPDLARAALTSNDAAMASRPHLLSGQFLSFGCSDVTFAPAGPYHRMARRVVVSELLSARRVATYGSVRGKELRRLLAHLTKNTKPGTPVDLSECFLNLANDVLCRVAFGRRFPHGKDDKLAAVLAEAQDLFAGFTIGDFFPELEPFASTVTGLRRRLKSCLADLREVCDDIVEEHVSGKHQRLPGDRDEDFVDVLLRVQKSPDLEVPLTDDNLKALVLDMFVAGTDTTFATLEWVMTELVRHPRILQKAQEEVRRVVGAKGRVEESDLAELHYMRAIIKETFRLHPAVPLLVPRETVAACTLGGYDIPAKTRVFINTFAMGRDPEIWEEPLEYSPERFEVAGAGGEIDLKDPDYKLLPFGGGRRGCPGYTFALATVQVSLASLLYHFEWALPAGVRAEDVSVEETFGLATRKKEPLFVAVSKSDVYQFKGEELNEV

SEQ ID NO: 65762 - protein, 519 aa, Triticum aestivum
  peptide (1)..(519): Ceres Seq. ID no. 14308009
  misc_feature (35)..(475): Pfam Name: Cytochrome P450 Pfam Description: Cytochrome P450
  misc_feature (5)..(475): Homolog of NCBI NO: 117188 NR Description: CYTOCHROME P450 71A1 (CYPLXXIA1) (ARP-2)
  misc_feature (5)..(499): Homolog of NCBI NO: 25282608 NR Description: cytochrome P-450LXXIA1 [similarity] - avocado
MELNLVSYVSIALFVLSGAYVYHATRSRSPRQRLPPAPPGWPVIGHLHLLTDMPHHALAELAKTMRAPLLRLRLGSVPALVISKPDLARAALTSNDAAMASRPHLLSGQFLSFGCSDVTFAPAGPYHRMARRVVVSELLSARRVATYGSVRGKELRRLLAHLTKNTKPGTPVDLSECFLNLANDVLCRVAFGRRFPHGKDDKLAAVLAEAQDLFAGFTIGDFFPELEPFASTVTGLRRRLKSCLADLREVCDDIVEEHVSGKHQRLPGDRDEDFVDVLLRVQKSPDLEVPLTDDNLKALVLDMFVAGTDTTFATLEWVMTELVRHPRILQKAQEEVRRVVGAKGRVEESDLAELHYMRAIIKETFRLHPAVPLLVPRETVAACTLGGYDIPAKTRVFINTFAMGRDPEIWEEPLEYSPERFEVAGAGGEIDLKDPDYKLLPFGGGRRGCPGYTFALATVQVSLASLLYHFEWALPAGVRAEDVSVEETFGLATRKKEPLFVAVSKSDVYQFKGEELNEV

SEQ ID NO: 65763 - protein, 467 aa, Triticum aestivum
  peptide (1)..(467): Ceres Seq. ID no. 14308010
  misc_feature (1)..(423): Pfam Name: Cytochrome P450 Pfam Description: Cytochrome P450
  misc_feature (1)..(423): Homolog of NCBI NO: 117188 NR Description: CYTOCHROME P450 71A1 (CYPLXXIA1) (ARP-2)
  misc_feature (1)..(447): Homolog of NCBI NO: 25282608 NR Description: cytochrome P-450LXXIA1 [similarity] - avocado
MPHHALAELAKTMRAPLLRLRLGSVPALVISKPDLARAALTSNDAAMASRPHLLSGQFLSFGCSDVTFAPAGPYHRMARRVVVSELLSARRVATYGSVRGKELRRLLAHLTKNTKPGTPVDLSECFLNLANDVLCRVAFGRRFPHGKDDKLAAVLAEAQDLFAGFTIGDFFPELEPFASTVTGLRRRLKSCLADLREVCDDIVEEHVSGKHQRLPGDRDEDFVDVLLRVQKSPDLEVPLTDDNLKALVLDMFVAGTDTTFATLEWVMTELVRHPRILQKAQEEVRRVVGAKGRVEESDLAELHYMRAIIKETFRLHPAVPLLVPRETVAACTLGGYDIPAKTRVFINTFAMGRDPEIWEEPLEYSPERFEVAGAGGEIDLKDPDYKLLPFGGGRRGCPGYTFALATVQVSLASLLYHFEWALPAGVRAEDVSVEETFGLATRKKEPLFVAVSKSDVYQFKGEELNEV

SEQ ID NO: 65764 - DNA, 1393 bp, Triticum aestivum
  misc_feature (1)..(1393): Ceres Seq. ID no. 13656849
accacacactgccctccctccccctccctccccccaccccactcctccccgccgccgccgccgccgccccgctccgatccgccccgcgccgcgcggatcgccgcgccatggaccagtacgagaaggtggagaagatcggggagggcacgtacggggtggtgtacaaggccaaggaccgctacaccaacgagacgatcgcgctcaagaagatccggctggagcaggaggacgagggcgtcccctccaccgccatccgcgagatctccctcctcaaggagatgcagcaccggaacatcgtcaggctgcaggacgtggtgcacaacgagaagtgcatatacctcgtcttcgagtacctcgacctcgacctcaagaagcacatggactcctccgcggacttcaagaaccaccacatagtcaagtccttcctctaccagatcctgcacggcatcgcctactgccactcgcaccgtgtgcttcacagggatctcaagccccagaacctgctgatagatcgccgtaccaattcattgaagcttgctgacttcggattggcgagggcgttcggcattcctgtccggacatttactcacgaggtggtgacattatggtatagagcaccagaaattcttctgggtgcgaggcagtattctacccctgttgatgtgtggtcggttggttgcattttcgccgaaatggtgaatcagaaacctctatttcctggtgattctgagattgatgaactcttcaagattttcagaattatgggcactcctaatgaagaaacctggccaggtgtttcttcgttacctgactacaaatcagctttccccaagtggccatccgtggatcttgcaactgtggttccaacactcgaacctttgggacttgatcttctctctaaaatgctctgcttagatccaaccagaagaatcaacgcccgaaccgccctcgagcacgagtacttcaaggatctggacgtatcctcgtagatcacttgccctgctcctctgtaaattaagatcgcgtcgactgatcgatagcttcctggatcatgtactgtgtgctcctttctctcccattctttctgactctggctgtgtagagagaaatgagaacggaagcgcctccggattcacccttccttgtagtccaagccaattgaaaaatgatcctgatgctctgggagctctgcattgcgatttcgcccgtatttatatggacatcgacgccggcaccagacttgttcatgtacgatggattttggagtagtggcagatagtcaaggggctgcagtgtttcatgaactaccaactgatgtgacaatgtttgggagtgtactactacttgtacttggtaaacatcattatcatcatgaatggaatcagttgtggac

SEQ ID NO: 65765 - protein, 328 aa, Triticum aestivum
  peptide (1)..(328): Ceres Seq. ID no. 13656850
  misc_feature (39)..(313): Pfam Name: Protein kinase domain Pfam Description: Protein kinase domain
  misc_feature (36)..(324): Homolog of NCBI NO: 9885803 NR Description: cyclin-dependent kinase A:4 [Nicotiana tabacum]
  misc_feature (36)..(324): Homolog of NCBI NO: 25989351 NR Description: cyclin-dependent kinase [Helianthus tuberosus]
  misc_feature (36)..(326): Homolog of NCBI NO: 1196796 NR Description: protein kinase p34cdc2
  misc_feature (36)..(324): Homolog of NCBI NO: 8671339 NR Description: cdc2Pnc [Pinus contorta]
  misc_feature (36)..(324): Homolog of NCBI NO: 2289782 NR Description: cdc2 kinase [Allium cepa]
  misc_feature (36)..(324): Homolog of NCBI NO: 17224978 NR Description: cyclin dependent kinase [Helianthus annuus]
  misc_feature (36)..(324): Homolog of NCBI NO: 541800 NR Description: protein kinase (EC 2.7.1.37) cdc2 - Norway spruce
  misc_feature (36)..(324): Homolog of NCBI NO: 13249052 NR Description: CDC2 homolog [Populus tremula x Populus
  misc_feature (36)..(327): Homolog of NCBI NO: 231707 NR Description: CELL DIVISION CONTROL PROTEIN 2 HOMOLOG 2
  misc_feature (36)..(315): Homolog of NCBI NO: 4096105 NR Description: p34cdc2 [Triticum aestivum]
HTLPSLPLPPPTPLLPAAAAAAPLRSAPRRADRRAMDQYEKVEKIGEGTYGVVYKAKDRYTNETIALKKIRLEQEDEGVPSTAIREISLLKEMQHRNIVRLQDVVHNEKCIYLVFEYLDLDLKKHMDSSADFKNHHIVKSFLYQILHGIAYCHSHRVLHRDLKPQNLLIDRRTNSLKLADFGLARAFGIPVRTFTHEVVTLWYRAPEILLGARQYSTPVDVWSVGCIFAEMVNQKPLFPGDSEIDELFKIFRIMGTPNEETWPGVSSLPDYKSAFPKWPSVDLATVVPTLEPLGLDLLSKMLCLDPTRRINARTALEHEYFKDLDVSS

SEQ ID NO: 65766 - protein, 293 aa, Triticum aestivum
  peptide (1)..(293): Ceres Seq. ID no. 13656851
  misc_feature (4)..(278): Pfam Name: Protein kinase domain Pfam Description: Protein kinase domain
  misc_feature (1)..(289): Homolog of NCBI NO: 9885803 NR Description: cyclin-dependent kinase A:4 [Nicotiana tabacum]
  misc_feature (1)..(289): Homolog of NCBI NO: 25989351 NR Description: cyclin-dependent kinase [Helianthus tuberosus]
  misc_feature (1)..(291): Homolog of NCBI NO: 1196796 NR Description: protein kinase p34cdc2
  misc_feature (1)..(289): Homolog of NCBI NO: 8671339 NR Description: cdc2Pnc [Pinus contorta]
  misc_feature (1)..(289): Homolog of NCBI NO: 2289782 NR Description: cdc2 kinase [Allium cepa]
  misc_feature (1)..(289): Homolog of NCBI NO: 17224978 NR Description: cyclin dependent kinase [Helianthus annuus]
  misc_feature (1)..(289): Homolog of NCBI NO: 541800 NR Description: protein kinase (EC 2.7.1.37) cdc2 - Norway spruce
  misc_feature (1)..(289): Homolog of NCBI NO: 13249052 NR Description: CDC2 homolog [Populus tremula x Populus
  misc_feature (1)..(292): Homolog of NCBI NO: 231707 NR Description: CELL DIVISION CONTROL PROTEIN 2 HOMOLOG 2
  misc_feature (1)..(280): Homolog of NCBI NO: 4096105 NR Description: p34cdc2 [Triticum aestivum]
MDQYEKVEKIGEGTYGVVYKAKDRYTNETIALKKIRLEQEDEGVPSTAIREISLLKEMQHRNIVRLQDVVHNEKCIYLVFEYLDLDLKKHMDSSADFKNHHIVKSFLYQILHGIAYCHSHRVLHRDLKPQNLLIDRRTNSLKLADFGLARAFGIPVRTFTHEVVTLWYRAPEILLGARQYSTPVDVWSVGCIFAEMVNQKPLFPGDSEIDELFKIFRIMGTPNEETWPGVSSLPDYKSAFPKWPSVDLATVVPTLEPLGLDLLSKMLCLDPTRRINARTALEHEYFKDLDVSS

SEQ ID NO: 65767 - protein, 236 aa, Triticum aestivum
  peptide (1)..(236): Ceres Seq. ID no. 13656852
  misc_feature (1)..(221): Pfam Name: Protein kinase domain Pfam Description: Protein kinase domain
  misc_feature (1)..(232): Homolog of NCBI NO: 9885803 NR Description: cyclin-dependent kinase A:4 [Nicotiana tabacum]
  misc_feature (1)..(232): Homolog of NCBI NO: 25989351 NR Description: cyclin-dependent kinase [Helianthus tuberosus]
  misc_feature (1)..(234): Homolog of NCBI NO: 1196796 NR Description: protein kinase p34cdc2
  misc_feature (1)..(232): Homolog of NCBI NO: 8671339 NR Description: cdc2Pnc [Pinus contorta]
  misc_feature (1)..(232): Homolog of NCBI NO: 2289782 NR Description: cdc2 kinase [Allium cepa]
  misc_feature (1)..(232): Homolog of NCBI NO: 17224978 NR Description: cyclin dependent kinase [Helianthus annuus]
  misc_feature (1)..(232): Homolog of NCBI NO: 541800 NR Description: protein kinase (EC 2.7.1.37) cdc2 - Norway spruce
  misc_feature (1)..(232): Homolog of NCBI NO: 13249052 NR Description: CDC2 homolog [Populus tremula x Populus
  misc_feature (1)..(235): Homolog of NCBI NO: 231707 NR Description: CELL DIVISION CONTROL PROTEIN 2 HOMOLOG 2
  misc_feature (1)..(223): Homolog of NCBI NO: 4096105 NR Description: p34cdc2 [Triticum aestivum]
MQHRNIVRLQDVVHNEKCIYLVFEYLDLDLKKHMDSSADFKNHHIVKSFLYQILHGIAYCHSHRVLHRDLKPQNLLIDRRTNSLKLADFGLARAFGIPVRTFTHEVVTLWYRAPEILLGARQYSTPVDVWSVGCIFAEMVNQKPLFPGDSEIDELFKIFRIMGTPNEETWPGVSSLPDYKSAFPKWPSVDLATVVPTLEPLGLDLLSKMLCLDPTRRINARTALEHEYFKDLDVSS

SEQ ID NO: 65768 - DNA, 881 bp, Triticum aestivum
  misc_feature (1)..(881): Ceres Seq. ID no. 12626248
gtgctcatcgcagtaaaatccagaaacatccgacgaacacaggcagggagagaagggagagcgtggacaatggcatcacgggtggtgttctccaacaggatcccgctggcgcgcgccatggagaacctcctggccgcgtcctccgggtcggctctcaggccggctgccgtcgccggcggcgtccgcgggtacaacgccggcgcgcccctccggagctacgaccgggacgaggcggtcgagcgcagcccccgcagcggcgcgcgcgagcgcgacgtcggcgtgcccagcttcttctcagatgtgttccgtgacccgttcagcgcgccgcagagcctgggccggctgctgagcatgctggacgacgtggcggcggcgtccaccgacggcgcggcgcgggcggcgccgctccggcgcgggtggaacgcgagggaggacgcggacgcgctgcggctgagggtggacatgccggggctgggcaaggagcacgtgaaggtgtgggcggagcagaacagcctggtgatcaagggcgagggcgagaaggaatcggaccgggagggcgccgacgcgccgaggtacagcggccggctcgagctcgccggggacgtgtaccggatggaccagatcaaggccgagatgaagaacggcgtgctccgggtggtcgtgcccaaggtcaaggaggaggagcgcaaggacgtcttcgaggtcaaagtggactaggcactaggcaggatcacgccaagtttcgcgtcacggaatagccgagtcgtctcgtgtgagccgagtaataataactaaaaataactcaagcttttttgtttgtcgtgttgggtctggatgttttggtctcgtgttaagtgcctgtacgagtagaatcgatcaaa

SEQ ID NO: 65769 - protein, 238 aa, Triticum aestivum
  peptide (1)..(238): Ceres Seq. ID no. 12626249
  misc_feature (31)..(238): Homolog of NCBI NO: 2326354 NR Description: LMW heat shock protein [Arabidopsis thaliana]
  misc_feature (37)..(238): Homolog of NCBI NO: 15242086 NR Description: mitochondrial heat shock 22 kd protein-like
  misc_feature (31)..(238): Homolog of NCBI NO: 15234969 NR Description: Arabidopsis mitochondrion-localized small heat
  misc_feature (37)..(238): Homolog of NCBI NO: 21554988 NR Description: mitochondrial heat shock 22 kd protein-like
  misc_feature (39)..(238): Homolog of NCBI NO: 4138871 NR Description: small heat shock protein Hsp23.6 [Triticum
  misc_feature (39)..(238): Homolog of NCBI NO: 1170368 NR Description: Heat shock 22 kDa protein, mitochondrial
  misc_feature (39)..(238): Homolog of NCBI NO: 123564 NR Description: Small heat shock protein, chloroplast precursor
  misc_feature (39)..(238): Homolog of NCBI NO: 7441310 NR Description: heat shock protein MTSHP precursor, mitochondrial
  misc_feature (24)..(238): Homolog of NCBI NO: 7441311 NR Description: heat shock protein hsp22 precursor, mitochondrial
  misc_feature (24)..(238): Homolog of NCBI NO: 4138869 NR Description: small heat shock protein Hsp23.5 [Triticum
VLIAVKSRNIRRTQAGREGRAWTMASRVVFSNRIPLARAMENLLAASSGSALRPAAVAGGVRGYNAGAPLRSYDRDEAVERSPRSGARERDVGVPSFFSDVFRDPFSAPQSLGRLLSMLDDVAAASTDGAARAAPLRRGWNAREDADALRLRVDMPGLGKEHVKVWAEQNSLVIKGEGEKESDREGADAPRYSGRLELAGDVYRMDQIKAEMKNGVLRVVVPKVKEEERKDVFEVKVD

SEQ ID NO: 65770 - protein, 215 aa, Triticum aestivum
  peptide (1)..(215): Ceres Seq. ID no. 12626250
  misc_feature (8)..(215): Homolog of NCBI NO: 2326354 NR Description: LMW heat shock protein [Arabidopsis thaliana]
  misc_feature (14)..(215): Homolog of NCBI NO: 15242086 NR Description: mitochondrial heat shock 22 kd protein-like
  misc_feature (8)..(215): Homolog of NCBI NO: 15234969 NR Description: Arabidopsis mitochondrion-localized small heat
  misc_feature (14)..(215): Homolog of NCBI NO: 21554988 NR Description: mitochondrial heat shock 22 kd protein-like
  misc_feature (16)..(215): Homolog of NCBI NO: 4138871 NR Description: small heat shock protein Hsp23.6 [Triticum
  misc_feature (16)..(215): Homolog of NCBI NO: 1170368 NR Description: Heat shock 22 kDa protein, mitochondrial
  misc_feature (16)..(215): Homolog of NCBI NO: 123564 NR Description: Small heat shock protein, chloroplast precursor
  misc_feature (16)..(215): Homolog of NCBI NO: 7441310 NR Description: heat shock protein MTSHP precursor, mitochondrial
  misc_feature (1)..(215): Homolog of NCBI NO: 7441311 NR Description: heat shock protein hsp22 precursor, mitochondrial
  misc_feature (1)..(215): Homolog of NCBI NO: 4138869 NR Description: small heat shock protein Hsp23.5 [Triticum
MASRVVFSNRIPLARAMENLLAASSGSALRPAAVAGGVRGYNAGAPLRSYDRDEAVERSPRSGARERDVGVPSFFSDVFRDPFSAPQSLGRLLSMLDDVAAASTDGAARAAPLRRGWNAREDADALRLRVDMPGLGKEHVKVWAEQNSLVIKGEGEKESDREGADAPRYSGRLELAGDVYRMDQIKAEMKNGVLRVVVPKVKEEERKDVFEVKVD

SEQ ID NO: 65771 - protein, 199 aa, Triticum aestivum
  peptide (1)..(199): Ceres Seq. ID no. 12626251
  misc_feature (1)..(199): Homolog of NCBI NO: 2326354 NR Description: LMW heat shock protein [Arabidopsis thaliana]
  misc_feature (1)..(199): Homolog of NCBI NO: 15242086 NR Description: mitochondrial heat shock 22 kd protein-like
  misc_feature (1)..(199): Homolog of NCBI NO: 15234969 NR Description: Arabidopsis mitochondrion-localized small heat
  misc_feature (1)..(199): Homolog of NCBI NO: 21554988 NR Description: mitochondrial heat shock 22 kd protein-like
  misc_feature (1)..(199): Homolog of NCBI NO: 4138871 NR Description: small heat shock protein Hsp23.6 [Triticum
  misc_feature (1)..(199): Homolog of NCBI NO: 1170368 NR Description: Heat shock 22 kDa protein, mitochondrial
  misc_feature (1)..(199): Homolog of NCBI NO: 123564 NR Description: Small heat shock protein, chloroplast precursor
  misc_feature (1)..(199): Homolog of NCBI NO: 7441310 NR Description: heat shock protein MTSHP precursor, mitochondrial
  misc_feature (1)..(199): Homolog of NCBI NO: 7441311 NR Description: heat shock protein hsp22 precursor, mitochondrial
  misc_feature (1)..(199): Homolog of NCBI NO: 4138869 NR Description: small heat shock protein Hsp23.5 [Triticum
MENLLAASSGSALRPAAVAGGVRGYNAGAPLRSYDRDEAVERSPRSGARERDVGVPSFFSDVFRDPFSAPQSLGRLLSMLDDVAAASTDGAARAAPLRRGWNAREDADALRLRVDMPGLGKEHVKVWAEQNSLVIKGEGEKESDREGADAPRYSGRLELAGDVYRMDQIKAEMKNGVLRVVVPKVKEEERKDVFEVKVD

SEQ ID NO: 65772 - DNA, 1148 bp, Triticum aestivum
  misc_feature (1)..(1148): Ceres Seq. ID no. 15169603
aacaccaagcttacatcatctcctttactcgtgacttatgagcagctcatccaagagagagcaaatggatgatgccgtggggctgtcatgggaggcgcggtgcgcggggctagccttcttcagcctgtccatcttcttggtggccctcaccgcggtgctcctgctcgtccgccggtggcccaacccctggtgcggctgccacgtgtgccgggcttacctcacggggtcctgggccaaggacttcaccaacctcgccgactggtacgcgcacctgctgcgcgagtcgccgacaggcaccgtccacttccacgtcctcggctgcaccgtcaccgccaaccctgccaacgtcgagtacatgctcaagacccgcttcgacaacttccccaagggcaagcgcttcgccgcgctcctcggcgacctccttggcggcggcatcttcaacgtcgacggcgacgcctggcgccaccagcgcaagatggccagcctcgagctcggcagcgtcaccgtgcgctcctacgcctacaagatcgtagcccaggaggtggaggcccgcctcctgccggtcctggccgacgccgccgacaagggcaaggtgatcgacctccaggacgtgttccggcggttcgccttcgacaccgtctgcaagatctccttcgggcttgacccaggctgcctcgacctcgacatgcccatgtccgacctagccaacgcgttcgacaccgcctcgcggctctgcgccatgcggggcgccgcggcctcgccgttggtgtggaagatgaagcggatgctcaacattgggtcagagagggagcttaagaaggccatcaagctcgtcgacgacctcgcgtcggccatgattctgcagcggcggagtctgggttttgacaacagccacgaccttctgtcccgcttcatggcctcggacgtcgccatggacgacaagtatctccgcaacatcgtggtcagcttcctcctcgccgggcgggatacggttgcctcggcgcttacaacgctcttcatcccgaaaatataaaatagcacagctgcaccctggccctctctatctaaccatccattctgcgtatcgcaattcgtgcaaacacatttttcttttttgtttctctcatataaaacatattttgaagttc

SEQ ID NO: 65773 - protein, 331 aa, Triticum aestivum
  peptide (1)..(331): Ceres Seq. ID no. 15169604
  misc_feature (31)..(327): Homolog of NCBI NO: 18395978 NR Description: cytochrome P450 family [Arabidopsis thaliana]
  misc_feature (30)..(327): Homolog of NCBI NO: 34902476 NR Description: Putative cytochrome P450 [Oryza sativa (japonica
  misc_feature (74)..(327): Homolog of NCBI NO: 15218671 NR Description: cytochrome P450 family [Arabidopsis thaliana]
  misc_feature (74)..(327): Homolog of NCBI NO: 15228981 NR Description: cytochrome P450, putative [Arabidopsis thaliana]
  misc_feature (64)..(327): Homolog of NCBI NO: 26452145 NR Description: putative cytochrome P450 [Arabidopsis thaliana]
  misc_feature (64)..(327): Homolog of NCBI NO: 21536522 NR Description: cytochrome P450-like protein [Arabidopsis
  misc_feature (64)..(327): Homolog of NCBI NO: 15242759 NR Description: cytochrome P450, putative [Arabidopsis thaliana]
  misc_feature (64)..(327): Homolog of NCBI NO: 15228396 NR Description: cytochrome P450 family [Arabidopsis thaliana]
  misc_feature (25)..(327): Homolog of NCBI NO: 15226228 NR Description: cytochrome P450, putative [Arabidopsis thaliana]
  misc_feature (26)..(328): Homolog of NCBI NO: 34908446 NR Description: putative cytochrome P450 [Oryza sativa (japonica
MSSSSKREQMDDAVGLSWEARCAGLAFFSLSIFLVALTAVLLLVRRWPNPWCGCHVCRAYLTGSWAKDFTNLADWYAHLLRESPTGTVHFHVLGCTVTANPANVEYMLKTRFDNFPKGKRFAALLGDLLGGGIFNVDGDAWRHQRKMASLELGSVTVRSYAYKIVAQEVEARLLPVLADAADKGKVIDLQDVFRRFAFDTVCKISFGLDPGCLDLDMPMSDLANAFDTASRLCAMRGAAASPLVWKMKRMLNIGSERELKKAIKLVDDLASAMILQRRSLGFDNSHDLLSRFMASDVAMDDKYLRNIVVSFLLAGRDTVASALTTLFIPKI

SEQ ID NO: 65774 - protein, 322 aa, Triticum aestivum
  peptide (1)..(322): Ceres Seq. ID no. 15169605
  misc_feature (22)..(318): Homolog of NCBI NO: 18395978 NR Description: cytochrome P450 family [Arabidopsis thaliana]
  misc_feature (21)..(318): Homolog of NCBI NO: 34902476 NR Description: Putative cytochrome P450 [Oryza sativa (japonica
  misc_feature (65)..(318): Homolog of NCBI NO: 15218671 NR Description: cytochrome P450 family [Arabidopsis thaliana]
  misc_feature (65)..(318): Homolog of NCBI NO: 15228981 NR Description: cytochrome P450, putative [Arabidopsis thaliana]
  misc_feature (55)..(318): Homolog of NCBI NO: 21536522 NR Description: cytochrome P450-like protein [Arabidopsis
  misc_feature (55)..(318): Homolog of NCBI NO: 26452145 NR Description: putative cytochrome P450 [Arabidopsis thaliana]
  misc_feature (55)..(318): Homolog of NCBI NO: 15242759 NR Description: cytochrome P450, putative [Arabidopsis thaliana]
  misc_feature (55)..(318): Homolog of NCBI NO: 15228396 NR Description: cytochrome P450 family [Arabidopsis thaliana]
  misc_feature (16)..(318): Homolog of NCBI NO: 15226228 NR Description: cytochrome P450, putative [Arabidopsis thaliana]
  misc_feature (17)..(319): Homolog of NCBI NO: 34908446 NR Description: putative cytochrome P450 [Oryza sativa (japonica
MDDAVGLSWEARCAGLAFFSLSIFLVALTAVLLLVRRWPNPWCGCHVCRAYLTGSWAKDFTNLADWYAHLLRESPTGTVHFHVLGCTVTANPANVEYMLKTRFDNFPKGKRFAALLGDLLGGGIFNVDGDAWRHQRKMASLELGSVTVRSYAYKIVAQEVEARLLPVLADAADKGKVIDLQDVFRRFAFDTVCKISFGLDPGCLDLDMPMSDLANAFDTASRLCAMRGAAASPLVWKMKRMLNIGSERELKKAIKLVDDLASAMILQRRSLGFDNSHDLLSRFMASDVAMDDKYLRNIVVSFLLAGRDTVASALTTLFIPKI

SEQ ID NO: 65775 - protein, 225 aa, Triticum aestivum
  peptide (1)..(225): Ceres Seq. ID no. 15169606
  misc_feature (1)..(221): Homolog of NCBI NO: 18395978 NR Description: cytochrome P450 family [Arabidopsis thaliana]
  misc_feature (1)..(221): Homolog of NCBI NO: 34902476 NR Description: Putative cytochrome P450 [Oryza sativa (japonica
  misc_feature (1)..(221): Homolog of NCBI NO: 15218671 NR Description: cytochrome P450 family [Arabidopsis thaliana]
  misc_feature (1)..(221): Homolog of NCBI NO: 15228981 NR Description: cytochrome P450, putative [Arabidopsis thaliana]
  misc_feature (1)..(221): Homolog of NCBI NO: 21536522 NR Description: cytochrome P450-like protein [Arabidopsis
  misc_feature (1)..(221): Homolog of NCBI NO: 26452145 NR Description: putative cytochrome P450 [Arabidopsis thaliana]
  misc_feature (1)..(221): Homolog of NCBI NO: 15242759 NR Description: cytochrome P450, putative [Arabidopsis thaliana]
  misc_feature (1)..(221): Homolog of NCBI NO: 15228396 NR Description: cytochrome P450 family [Arabidopsis thaliana]
  misc_feature (1)..(221): Homolog of NCBI NO: 15226228 NR Description: cytochrome P450, putative [Arabidopsis thaliana]
  misc_feature (1)..(222): Homolog of NCBI NO: 34908446 NR Description: putative cytochrome P450 [Oryza sativa (japonica
MLKTRFDNFPKGKRFAALLGDLLGGGIFNVDGDAWRHQRKMASLELGSVTVRSYAYKIVAQEVEARLLPVLADAADKGKVIDLQDVFRRFAFDTVCKISFGLDPGCLDLDMPMSDLANAFDTASRLCAMRGAAASPLVWKMKRMLNIGSERELKKAIKLVDDLASAMILQRRSLGFDNSHDLLSRFMASDVAMDDKYLRNIVVSFLLAGRDTVASALTTLFIPKI

SEQ ID NO: 65776 - DNA, 362 bp, Triticum aestivum
  misc_feature (1)..(362): Ceres Seq. ID no. 12619355
atcagcctaaacccgcaccaaagccccgagcgccgtcggatcagatcccactccaccaccaccaccaccacgctcctgccggccaccgctccttrtattccgaggccggccggagaccccctgctcattttccgtctccccccctctgcccgccctcstcctcctcgagctgagctcaaggggaaagaaccatggagccggcgacgatggcgtggacggcggggctggtgggcgccggcytggtgtactggttcgtgtgggtgatgggcgcggcggaggtgaaggggaagcggrcggtggatctcaagatgggatccatcacgcgggacaaggtgcaggacawgtacacgcagtactggtcc

SEQ ID NO: 65777 - protein, 87 aa, Triticum aestivum
  peptide (1)..(87): Ceres Seq. ID no. 13656860
  misc_feature (32)..(32): Xaa is any aa, unknown or other
  misc_feature (53)..(53): Xaa is any aa, unknown or other
  misc_feature (80)..(80): Xaa is any aa, unknown or other
ISLNPHQSPERRRIRSHSTTTTTTLLPATAPXIPRPAGDPLLIFRLPPSARPXPPRAELKGKEPWSRRRWRGRRGWWAPXWCTGSCG

SEQ ID NO: 65778 - protein, 57 aa, Triticum aestivum
  peptide (1)..(57): Ceres Seq. ID no. 13656861
  misc_feature (9)..(56): Homolog of NCBI NO: 7443717 NR Description: probable sterol 24-C-methyltransferase (EC
  misc_feature (1)..(56): Homolog of NCBI NO: 15222955 NR Description: S-adenosyl-methionine-sterol-C-methyltransferase,
  misc_feature (1)..(56): Homolog of NCBI NO: 2246456 NR Description: S-adenosyl-methionine-sterol-C-methyltransferase
  misc_feature (1)..(56): Homolog of NCBI NO: 22136020 NR Description: 24-sterol C-methyltransferase [Arabidopsis
  misc_feature (1)..(56): Homolog of NCBI NO: 23397216 NR Description: putative sterol-C-methyltransferase [Arabidopsis
  misc_feature (1)..(56): Homolog of NCBI NO: 21555010 NR Description: sterol-C-methyltransferase [Arabidopsis thaliana]
  misc_feature (1)..(56): Homolog of NCBI NO: 15217917 NR Description: sterol-C-methyltransferase
  misc_feature (1)..(56): Homolog of NCBI NO: 1061040 NR Description: sterol-C-methyltransferase [Arabidopsis thaliana]
  misc_feature (1)..(56): Homolog of NCBI NO: 7443718 NR Description: probable sterol 24-C-methyltransferase (EC
  misc_feature (1)..(56): Homolog of NCBI NO: 3560533 NR Description: 24-methylene lophenol C24(1)methyltransferase
  misc_feature (17)..(17): Xaa is any aa, unknown or other
  misc_feature (35)..(35): Xaa is any aa, unknown or other
  misc_feature (51)..(51): Xaa is any aa, unknown or other
MEPATMAWTAGLVGAGXVYWFVWVMGAAEVKGKRXVDLKMGSITRDKVQDXYTQYWS

SEQ ID NO: 65779 - protein, 56 aa, Triticum aestivum
  peptide (1)..(56): Ceres Seq. ID no. 13656862
  misc_feature (31)..(31): Xaa is any aa, unknown or other
  misc_feature (52)..(52): Xaa is any aa, unknown or other
QPKPAPKPRAPSDQIPLHHHHHHAPAGHRSXYSEAGRRPPAHFPSPPLCPPXSSSS

SEQ ID NO: 65780 - DNA, 797 bp, Triticum aestivum
  misc_feature (1)..(797): Ceres Seq. ID no. 14301890
actcacacacacacaaccagtaccagatccacaagccagcagaaaggaagaagatgatgagcaccaaggccctcaccctcggcgcggtcgtcgtcctcgccatcgccatggcgggcgcgcacgccgagcagtgcggccacgcggccgacggcatggagtgcccaaacaacctctgctgcagcgcgtgggggtactgcggcatggacgccaactactgcggcgacggctgccagagcggcgcctgctacgagcccaaacgctgcggcgcccaggccgaggggaacgcggtgacgtgccccaacaaccactgctgcagcggcaacgggtactgcggctacggccaggagtactgcggcgacggctgccagaacgggccatgccgcgccaacatcaagtgcagcgccgacaagccgtgcctgagcaacttctgctgcagcaagtacggatactgcgggctcggcgtcgagttctgcggccagggctgccagagcggcgcctgccatgacgccgttggcgccgccgccctgccgctcagctccatagtgcaggggtgatcttgaactgcgcatggctacaagtattgcgacgggatcaggtgaggagatgagttgtggcaatgtcgatcgttgccacgtcttcttcaccggctagtttgcgttttcctcgtctttacaatcgttcccatcatgcatgcacgcatgcatgattagcgttcgggaaccacaaataatgcgtgtggcgccatgcgccgtctttgtaacctttgtaatccaataaatctgaatctcgttgcaatc

SEQ ID NO: 65781 - protein, 183 aa, Triticum aestivum
  peptide (1)..(183): Ceres Seq. ID no. 14301891
  misc_feature (85)..(126): Pfam Name: Chitin recognition protein Pfam Description: Chitin recognition protein
  misc_feature (41)..(166): Homolog of NCBI NO: 4689400 NR Description: lectin [Oryza sativa subsp. japonica]
  misc_feature (43)..(166): Homolog of NCBI NO: 230784 NR Description: Chain A, Wheat Germ Agglutinin (Isolectin 2)
  misc_feature (29)..(166): Homolog of NCBI NO: 220977 NR Description: agglutinin isolectin 2 precursor [synthetic
  misc_feature (43)..(166): Homolog of NCBI NO: 1065091 NR Description: Chain A, Wheat Germ Agglutinin (Isolectin 3)
  misc_feature (42)..(166): Homolog of NCBI NO: 113507 NR Description: Agglutinin isolectin 3 precursor (WGA3)
  misc_feature (24)..(166): Homolog of NCBI NO: 38346860 NR Description: OSJNBb0015C06.8 [Oryza sativa (japonica
  misc_feature (20)..(166): Homolog of NCBI NO: 113509 NR Description: Lectin precursor (Agglutinin)
  misc_feature (17)..(166): Homolog of NCBI NO: 113505 NR Description: Agglutinin isolectin 1 precursor (WGA1)
  misc_feature (16)..(166): Homolog of NCBI NO: 113506 NR Description: Agglutinin isolectin 2 precursor (WGA2)
  misc_feature (17)..(166): Homolog of NCBI NO: 113508 NR Description: Root-specific lectin precursor
SHTHNQYQIHKPAERKKMMSTKALTLGAVVVLAIAMAGAHAEQCGHAADGMECPNNLCCSAWGYCGMDANYCGDGCQSGACYEPKRCGAQAEGNAVTCPNNHCCSGNGYCGYGQEYCGDGCQNGPCRANIKCSADKPCLSNFCCSKYGYCGLGVEFCGQGCQSGACHDAVGAAALPLSSIVQG

SEQ ID NO: 65782 - protein, 167 aa, Triticum aestivum
  peptide (1)..(167): Ceres Seq. ID no. 14301892
LTHTQPVPDPQASRKEEDDEHQGPHPRRGRRPRHRHGGRARRAVRPRGRRHGVPKQPLLQRVGVLRHGRQLLRRRLPERRLLRAQTLRRPGRGERGDVPQQPLLQRQRVLRLRPGVLRRRLPERAMPRQHQVQRRQAVPEQLLLQQVRILRARRRVLRPGLPERRLP

SEQ ID NO: 65783 - protein, 166 aa, Triticum aestivum
  peptide (1)..(166): Ceres Seq. ID no. 14301893
  misc_feature (68)..(109): Pfam Name: Chitin recognition protein Pfam Description: Chitin recognition protein
  misc_feature (24)..(149): Homolog of NCBI NO: 4689400 NR Description: lectin [Oryza sativa subsp. japonica]
  misc_feature (26)..(149): Homolog of NCBI NO: 230784 NR Description: Chain A, Wheat Germ Agglutinin (Isolectin 2)
  misc_feature (12)..(149): Homolog of NCBI NO: 220977 NR Description: agglutinin isolectin 2 precursor [synthetic
  misc_feature (26)..(149): Homolog of NCBI NO: 1065091 NR Description: Chain A, Wheat Germ Agglutinin (Isolectin 3)
  misc_feature (25)..(149): Homolog of NCBI NO: 113507 NR Description: Agglutinin isolectin 3 precursor (WGA3)
  misc_feature (7)..(149): Homolog of NCBI NO: 38346860 NR Description: OSJNBb0015C06.8 [Oryza sativa (japonica
  misc_feature (3)..(149): Homolog of NCBI NO: 113509 NR Description: Lectin precursor (Agglutinin)
  misc_feature (1)..(149): Homolog of NCBI NO: 113505 NR Description: Agglutinin isolectin 1 precursor (WGA1)
  misc_feature (1)..(149): Homolog of NCBI NO: 113506 NR Description: Agglutinin isolectin 2 precursor (WGA2)
  misc_feature (1)..(149): Homolog of NCBI NO: 113508 NR Description: Root-specific lectin precursor
MMSTKALTLGAVVVLAIAMAGAHAEQCGHAADGMECPNNLCCSAWGYCGMDANYCGDGCQSGACYEPKRCGAQAEGNAVTCPNNHCCSGNGYCGYGQEYCGDGCQNGPCRANIKCSADKPCLSNFCCSKYGYCGLGVEFCGQGCQSGACHDAVGAAALPLSSIVQG

SEQ ID NO: 65784 - DNA, 1168 bp, Triticum aestivum
  misc_feature (1)..(1168): Ceres Seq. ID no. 12620027
aaagaagtacagcatcagaagaggagaggagagcagaggcggagagtgaggagagagaggtgtagcggaggagccgtaggtaggtagagagagatggaggtggcggtgcctgtcatggcgccgagcgcgccgtgcagcccaagaaccgcggccgccatgggcggcggcggcagccacctgcccagctactgctacttcttctccagcgcccccacgagcccgtccagggccagcagctacgccgcggacgagcagggcgacgccgccacgttcgacttcgccttcggcttcagcgggcagctccgggagtccacgcccatcctcgccgccgccgacgagctgttcgagggcggcaggatccggccgctcaacggcccgcgctcaagcggcagcggcctgctcgccgacgaggactacgcctccctctccgtctccccccggtcgccgagaagagcgaggacgatgtccgcggtgcgcggcggtgcaggggatcgggcggaggcgccggccgatcagggtcagacgaggggcaggtccggccggccggcccctgcgtcgtcctcgtcgtcgggcgtgtcgtctcgcagcaggagggccacgcggtctctgtccccgtacaggggcgaccccatcgacgacgagttctgctcctccccaccctcccctcgcggcgccgcctccctgatgcgcggctgcgggagcggcagccgcaagtggcggctcaaggacctgttcctgttccgcagcgcgtcggagggccgcgccaccgccggcaaggacccgctgctcaagtacagcatgctcaagagcggcggcgacgcgtcgatgcggaaggggaggggctcggcggcgtcggcgagcgacatggcgccgtacacggtgagccgggcggcggccgaggagatgcggcggaggacgacgacgccgctgccgttccaccggaacagcctcttcggctacttccggtccaacccggccatccactccatcagccgcaagcttagcagctactcctcgtcgaactccaaccgcggccggaacgccgccgccgccgccaactgacagccgacgacgcagctcgctcgctcgctcgcgcgcacatgcatggcatgctggctactttggcagtagaaaaaaagggaaggaaagagaacagttttattcgttc

SEQ ID NO: 65785 - protein, 322 aa, Triticum aestivum
  peptide (1)..(322): Ceres Seq. ID no. 12620028
  misc_feature (95)..(278): Homolog of NCBI NO: 15293109 NR Description: putative yeast pheromone receptor protein AR781
  misc_feature (95)..(278): Homolog of NCBI NO: 15225326 NR Description: AR781, similar to yeast pheromone receptor
  misc_feature (95)..(278): Homolog of NCBI NO: 1669593 NR Description: AR781 [Arabidopsis thaliana]
  misc_feature (142)..(309): Homolog of NCBI NO: 33111961 NR Description: pheromone receptor-like protein [Quercus robur]
  misc_feature (1)..(318): Homolog of NCBI NO: 34906768 NR Description: contains EST AU082121(R10455)~similar to
MEVAVPVMAPSAPCSPRTAAAMGGGGSHLPSYCYFFSSAPTSPSRASSYAADEQGDAATFDFAFGFSGQLRESTPILAAADELFEGGRIRPLNGPRSSGSGLLADEDYASLSVSPRSPRRARTMSAVRGGAGDRAEAPADQGQTRGRSGRPAPASSSSSGVSSRSRRATRSLSPYRGDPIDDEFCSSPPSPRGAASLMRGCGSGSRKWRLKDLFLFRSASEGRATAGKDPLLKYSMLKSGGDASMRKGRGSAASASDMAPYTVSRAAAEEMRRRTTTPLPFHRNSLFGYFRSNPAIHSISRKLSSYSSSNSNRGRNAAAAAN

SEQ ID NO: 65786 - protein, 315 aa, Triticum aestivum
  peptide (1)..(315): Ceres Seq. ID no. 12620029
  misc_feature (88)..(271): Homolog of NCBI NO: 15293109 NR Description: putative yeast pheromone receptor protein AR781
  misc_feature (88)..(271): Homolog of NCBI NO: 15225326 NR Description: AR781, similar to yeast pheromone receptor
  misc_feature (88)..(271): Homolog of NCBI NO: 1669593 NR Description: AR781 [Arabidopsis thaliana]
  misc_feature (135)..(302): Homolog of NCBI NO: 33111961 NR Description: pheromone receptor-like protein [Quercus robur]
  misc_feature (1)..(311): Homolog of NCBI NO: 34906768 NR Description: contains EST AU082121(R10455)~similar to
MAPSAPCSPRTAAAMGGGGSHLPSYCYFFSSAPTSPSRASSYAADEQGDAATFDFAFGFSGQLRESTPILAAADELFEGGRIRPLNGPRSSGSGLLADEDYASLSVSPRSPRRARTMSAVRGGAGDRAEAPADQGQTRGRSGRPAPASSSSSGVSSRSRRATRSLSPYRGDPIDDEFCSSPPSPRGAASLMRGCGSGSRKWRLKDLFLFRSASEGRATAGKDPLLKYSMLKSGGDASMRKGRGSAASASDMAPYTVSRAAAEEMRRRTTTPLPFHRNSLFGYFRSNPAIHSISRKLSSYSSSNSNRGRNAAAAAN

SEQ ID NO: 65787 - protein, 301 aa, Triticum aestivum
  peptide (1)..(301): Ceres Seq. ID no. 12620030
  misc_feature (74)..(257): Homolog of NCBI NO: 15293109 NR Description: putative yeast pheromone receptor protein AR781
  misc_feature (74)..(257): Homolog of NCBI NO: 15225326 NR Description: AR781, similar to yeast pheromone receptor
  misc_feature (74)..(257): Homolog of NCBI NO: 1669593 NR Description: AR781 [Arabidopsis thaliana]
  misc_feature (121)..(288): Homolog of NCBI NO: 33111961 NR Description: pheromone receptor-like protein [Quercus robur]
  misc_feature (1)..(297): Homolog of NCBI NO: 34906768 NR Description: contains EST AU082121(R10455)~similar to
MGGGGSHLPSYCYFFSSAPTSPSRASSYAADEQGDAATFDFAFGFSGQLRESTPILAAADELFEGGRIRPLNGPRSSGSGLLADEDYASLSVSPRSPRRARTMSAVRGGAGDRAEAPADQGQTRGRSGRPAPASSSSSGVSSRSRRATRSLSPYRGDPIDDEFCSSPPSPRGAASLMRGCGSGSRKWRLKDLFLFRSASEGRATAGKDPLLKYSMLKSGGDASMRKGRGSAASASDMAPYTVSRAAAEEMRRRTTTPLPFHRNSLFGYFRSNPAIHSISRKLSSYSSSNSNRGRNAAAAAN

SEQ ID NO: 65788 - DNA, 1319 bp, Triticum aestivum
  misc_feature (1)..(1319): Ceres Seq. ID no. 13656856
agaacatcctaattgaaaagagttctgattagtggctttgtgatgcaatcccagttgaagtgcagaacctttccggagtttggactttgggaacttcgaatcatcatcagccgagaaagagaaaagttgcccacgaacacacgaaaaagagccccatcatgactaggctcgctcctcctgttgctttccggccctgtctctctgtattgcacgaacttttagcgcgtaacatttactctcttatattatctgcgatctgaatcttgctgctgatttgctgagactttctgtttgtgcttcatgcagagcgggagatcggcgccgcgcctgagcccgtcgtgtacacgccgccggcgccgctgatgccgtccccgccctcggtcaacggcgccaatgtcagtgccagcaccagcagcgtcgcggccacgtcgcagagcctcctcggcagcatgttcgcgccgtcttccgtggcccagacggcgcagtatccggagcgcgcgctggcagccaagcccccgtcgctgtgcctcgcgaccgacgccgcgtccgcccagttctcggcccctacggctgaccggcagcagcagctcgtgcagccgccgccgtcgccgtccccatcggcgcacatgtccgccacggcgctgcttcagaaggcggcgcagatgggcgccacctcgtcgagctcctcgttcctgcgtgggctgggcctcgacatctcgtcgtcgccgccgggcgtcgacgtcgtcaggtcagcatcaacagcagcaccaccaccaccagcaacaccaccaggagcccatgcagatgcagttcccggagggttcgctgcagcaatggccgccgcggttggagcccgagccggccccgatgatgtcggccgggctgggcctcgggctgccatacgactcgaccggcggtccgatggggttgccggagctcatgatgggccagtcatcactgttcagcgccaagccggccacgctggacttcctggggctggggatgagccccacgggggcgaccacgagcaggggcctccccgtgttcatgcagcccatgggcggcgcggtcggcatggcccggaccggctccggccctccagacacgttcggctccggccggggcgctcaggccaagccgtgggagaggaacccgagcagctcgccgatcctgtaaaaggactgctgggaaagtagtaacacgtagcacagcagctgtaaaatgctgcttgtgtctaattagcagcagctagtcgtcagtccttggccgttcttttgttttcttaggtcacaatcaagaaagtaagttacttttgttcc

SEQ ID NO: 65789 - protein, 277 aa, Triticum aestivum
  peptide (1)..(277): Ceres Seq. ID no. 15220591
  misc_feature (1)..(128): Homolog of NCBI NO: 15229832 NR Description: zinc finger protein [Arabidopsis thaliana]
  misc_feature (6)..(121): Homolog of NCBI NO: 9858780 NR Description: BAC19.12 [Lycopersicon esculentum]
  misc_feature (29)..(136): Homolog of NCBI NO: 15240072 NR Description: zinc finger protein [Arabidopsis thaliana]
  misc_feature (1)..(151): Homolog of NCBI NO: 33146841 NR Description: zinc finger protein-like protein
MPSPPSVNGANVSASTSSVAATSQSLLGSMFAPSSVAQTAQYPERALAAKPPSLCLATDAASAQFSAPTADRQQQLVQPPPSPSPSAHMSATALLQKAAQMGATSSSSSFLRGLGLDISSSPPGVDVVRSASTAAPPPPATPPGAHADAVPGGFAAAMAAAVGARAGPDDVGRAGPRAAIRLDRRSDGVAGAHDGPVITVQRQAGHAGLPGAGDEPHGGDHEQGPPRVHAAHGRRGRHGPDRLRPSRHVRLRPGRSGQAVGEEPEQLADPVKGLLGK

SEQ ID NO: 65790 - protein, 260 aa, Triticum aestivum
  peptide (1)..(260): Ceres Seq. ID no. 15220592
  misc_feature (1)..(90): Pfam Name: Cupin Pfam Description: Cupin
  misc_feature (1)..(154): Homolog of NCBI NO: 25143299 NR Description: pre-mRNA splicing SR protein related RSR-1 (68.2
  misc_feature (163)..(234): Homolog of NCBI NO: 15229832 NR Description: zinc finger protein [Arabidopsis thaliana]
  misc_feature (146)..(241): Homolog of NCBI NO: 9858780 NR Description: BAC19.12 [Lycopersicon esculentum]
  misc_feature (152)..(234): Homolog of NCBI NO: 15240072 NR Description: zinc finger protein [Arabidopsis thaliana]
  misc_feature (135)..(228): Homolog of NCBI NO: 33146841 NR Description: zinc finger protein-like protein
MSVPAPAASRPRRRASSAACSRRLPWPRRRSIRSARWQPSPRRCASRPTPRPPSSRPLRLTGSSSSCSRRRRRPHRRTCPPRRCFRRRRRWAPPRRAPRSCVGWASTSRRRRRASTSSGQHQQQHHHHQQHHQEPMQMQFPEGSLQQWPPRLEPEPAPMMSAGLGLGLPYDSTGGPMGLPELMMGQSSLFSAKPATLDFLGLGMSPTGATTSRGLPVFMQPMGGAVGMARTGSGPPDTFGSGRGAQAKPWERNPSSSPIL

SEQ ID NO: 65791 - protein, 248 aa, Triticum aestivum
  peptide (1)..(248): Ceres Seq. ID no. 15220593
  misc_feature (1)..(99): Homolog of NCBI NO: 15229832 NR Description: zinc finger protein [Arabidopsis thaliana]
  misc_feature (1)..(92): Homolog of NCBI NO: 9858780 NR Description: BAC19.12 [Lycopersicon esculentum]
  misc_feature (1)..(107): Homolog of NCBI NO: 15240072 NR Description: zinc finger protein [Arabidopsis thaliana]
  misc_feature (1)..(122): Homolog of NCBI NO: 33146841 NR Description: zinc finger protein-like protein
MFAPSSVAQTAQYPERALAAKPPSLCLATDAASAQFSAPTADRQQQLVQPPPSPSPSAHMSATALLQKAAQMGATSSSSSFLRGLGLDISSSPPGVDVVRSASTAAPPPPATPPGAHADAVPGGFAAAMAAAVGARAGPDDVGRAGPRAAIRLDRRSDGVAGAHDGPVITVQRQAGHAGLPGAGDEPHGGDHEQGPPRVHAAHGRRGRHGPDRLRPSRHVRLRPGRSGQAVGEEPEQLADPVKGLLGK

SEQ ID NO: 65792 - DNA, 1419 bp, Triticum aestivum
  misc_feature (1)..(1419): Ceres Seq. ID no. 13654452
acacacacacagcgcaacgcctcccagctcgactccacgtgctgccgccgccgccggcgtagacctcccgttggccgccatggacccgcgcttccagctgcccactccggtgccgtcctccggcggcgctggtgtgcgagggcaccaccggcgggcccattcggagacgtttctgcgcttccccgacaccgacctcttcctcgaccccgatggagacttctccttctccgacctcgacttcccatccctctccgacgactccccggcggtctccgacccgaccccgcctcctcccccgccgatggcggccagctcgtcccagacaccggctccccgtccaccgggcgggacccacaacaggagcctctcccttgacgccgccttcttcgagggcctcgccttgcaggggggaggaggcgggggttgtggtggccataagaggagcgggtccatggatggggtgaactcgccgttcgaaggcgagtcggcgctgtcgggcgggctggactacgccaagaaggccatgccggccgagaggatcgccgagctagctctccttgaccccaaacgcgcaaagaggattttggcaaaccggcagtcggcagcgaggtcgaaggagaggaagatcaagtataccggtgagctagagaggaaggtccagacactgcagaccgaggccactacgctatcagcacagcttacacttctccagagggatacttctggtttaactaccgagaatagagaactcaaacttcggttgcagtccatggaggagcaagctaaactacgggatgctctaaatgacgctctgcgagaagaagtccagcggcttaagatagctgcagggcaagctccaaaaatgaatgggagtcaattcaacggcggactccagcagattccatcctatttctctcagcaacaccagcgacagcagcagcagcagcatcaacaacagatggcttacttaggtgggcaccaagctcagcgtcaccatccaaaccatcaccagagcccatcgaatggtggccagtcgctgagtggtctgtccctagacgactccatggatttcatttgaggaacactagggccctcctattaaatcatacaccaactgcaactcagcattgtacagatagctaatgtactatctatgcatatgaatcattggtagggtagctagcctttctttgtatttctatcattaatcagaaagcatgctcttgtatgacataatctcctctttcccttctttgtctgtttctggagagcaattgatgatactgggaactcttacttacaatgtgcttttcaggtcataactgttatgagatacacttgttagatwaaaaaaaaaaaaaaaaaaaaaaaaaaaaacaaaaaaccaaaaaaaaaaaaaaaaaagcttatcgataccgt

SEQ ID NO: 65793 - protein, 358 aa, Triticum aestivum
  peptide (1)..(358): Ceres Seq. ID no. 15219657
  misc_feature (187)..(249): Pfam Name: bZIP transcription factor Pfam Description: bZIP transcription factor
  misc_feature (187)..(249): Pfam Name: bZIP transcription factor Pfam Description: bZIP transcription factor
  misc_feature (49)..(337): Homolog of NCBI NO: 21553831 NR Description: transcriptional activator RF2a, putative
  misc_feature (49)..(337): Homolog of NCBI NO: 15221391 NR Description: bZIP protein [Arabidopsis thaliana]
  misc_feature (83)..(324): Homolog of NCBI NO: 18400998 NR Description: VirE2-interacting protein VIP1 [Arabidopsis
  misc_feature (83)..(324): Homolog of NCBI NO: 7258340 NR Description: VirE2-interacting protein VIP1 [Arabidopsis
  misc_feature (83)..(324): Homolog of NCBI NO: 21553989 NR Description: VirE2-interacting protein VIP1 [Arabidopsis
  misc_feature (49)..(337): Homolog of NCBI NO: 21553831 NR Description: transcriptional activator RF2a, putative
  misc_feature (83)..(324): Homolog of NCBI NO: 18400998 NR Description: VirE2-interacting protein VIP1 [Arabidopsis
  misc_feature (83)..(324): Homolog of NCBI NO: 21553989 NR Description: VirE2-interacting protein VIP1 [Arabidopsis
  misc_feature (151)..(358): Homolog of NCBI NO: 29367343 NR Description: bZIP-like protein [Oryza sativa (japonica
  misc_feature (169)..(358): Homolog of NCBI NO: 19401702 NR Description: susceptibility transcription factor RVS1 [Oryza
  misc_feature (78)..(353): Homolog of NCBI NO: 2921823 NR Description: shoot-forming PKSF1 [Paulownia kawakamii]
  misc_feature (64)..(316): Homolog of NCBI NO: 8777512 NR Description: bZIP transcriptional activator RSG [Nicotiana
  misc_feature (113)..(355): Homolog of NCBI NO: 34394739 NR Description: putative transcription activator RF2a
  misc_feature (83)..(324): Homolog of NCBI NO: 7258340 NR Description: VirE2-interacting protein VIP1 [Arabidopsis
  misc_feature (49)..(337): Homolog of NCBI NO: 15221391 NR Description: bZIP protein [Arabidopsis thaliana]
  misc_feature (113)..(355): Homolog of NCBI NO: 34394739 NR Description: putative transcription activator RF2a
  misc_feature (64)..(316): Homolog of NCBI NO: 8777512 NR Description: bZIP transcriptional activator RSG [Nicotiana
  misc_feature (78)..(353): Homolog of NCBI NO: 2921823 NR Description: shoot-forming PKSF1 [Paulownia kawakamii]
  misc_feature (169)..(358): Homolog of NCBI NO: 19401702 NR Description: susceptibility transcription factor RVS1 [Oryza
  misc_feature (151)..(358): Homolog of NCBI NO: 29367343 NR Description: bZIP-like protein [Oryza sativa (japonica
HTHSATPPSSTPRAAAAAGVDLPLAAMDPRFQLPTPVPSSGGAGVRGHHRRAHSETFLRFPDTDLFLDPDGDFSFSDLDFPSLSDDSPAVSDPTPPPPPPMAASSSQTPAPRPPGGTHNRSLSLDAAFFEGLALQGGGGGGCGGHKRSGSMDGVNSPFEGESALSGGLDYAKKAMPAERIAELALLDPKRAKRILANRQSAARSKERKIKYTGELERKVQTLQTEATTLSAQLTLLQRDTSGLTTENRELKLRLQSMEEQAKLRDALNDALREEVQRLKIAAGQAPKMNGSQFNGGLQQIPSYFSQQHQRQQQQQHQQQMAYLGGHQAQRHHPNHHQSPSNGGQSLSGLSLDDSMDFI

SEQ ID NO: 65794 - protein, 332 aa, Triticum aestivum
  peptide (1)..(332): Ceres Seq. ID no. 15219658
  misc_feature (161)..(223): Pfam Name: bZIP transcription factor Pfam Description: bZIP transcription factor
  misc_feature (161)..(223): Pfam Name: bZIP transcription factor Pfam Description: bZIP transcription factor
  misc_feature (23)..(311): Homolog of NCBI NO: 21553831 NR Description: transcriptional activator RF2a, putative
  misc_feature (23)..(311): Homolog of NCBI NO: 15221391 NR Description: bZIP protein [Arabidopsis thaliana]
  misc_feature (57)..(298): Homolog of NCBI NO: 18400998 NR Description: VirE2-interacting protein VIP1 [Arabidopsis
  misc_feature (57)..(298): Homolog of NCBI NO: 7258340 NR Description: VirE2-interacting protein VIP1 [Arabidopsis
  misc_feature (57)..(298): Homolog of NCBI NO: 21553989 NR Description: VirE2-interacting protein VIP1 [Arabidopsis
  misc_feature (23)..(311): Homolog of NCBI NO: 21553831 NR Description: transcriptional activator RF2a, putative
  misc_feature (57)..(298): Homolog of NCBI NO: 18400998 NR Description: VirE2-interacting protein VIP1 [Arabidopsis
  misc_feature (57)..(298): Homolog of NCBI NO: 21553989 NR Description: VirE2-interacting protein VIP1 [Arabidopsis
  misc_feature (125)..(332): Homolog of NCBI NO: 29367343 NR Description: bZIP-like protein [Oryza sativa (japonica
  misc_feature (143)..(332): Homolog of NCBI NO: 19401702 NR Description: susceptibility transcription factor RVS1 [Oryza
  misc_feature (52)..(327): Homolog of NCBI NO: 2921823 NR Description: shoot-forming PKSF1 [Paulownia kawakamii]
  misc_feature (38)..(290): Homolog of NCBI NO: 8777512 NR Description: bZIP transcriptional activator RSG [Nicotiana
  misc_feature (87)..(329): Homolog of NCBI NO: 34394739 NR Description: putative transcription activator RF2a
  misc_feature (57)..(298): Homolog of NCBI NO: 7258340 NR Description: VirE2-interacting protein VIP1 [Arabidopsis
  misc_feature (23)..(311): Homolog of NCBI NO: 15221391 NR Description: bZIP protein [Arabidopsis thaliana]
  misc_feature (87)..(329): Homolog of NCBI NO: 34394739 NR Description: putative transcription activator RF2a
  misc_feature (38)..(290): Homolog of NCBI NO: 8777512 NR Description: bZIP transcriptional activator RSG [Nicotiana
  misc_feature (52)..(327): Homolog of NCBI NO: 2921823 NR Description: shoot-forming PKSF1 [Paulownia kawakamii]
  misc_feature (143)..(332): Homolog of NCBI NO: 19401702 NR Description: susceptibility transcription factor RVS1 [Oryza
  misc_feature (125)..(332): Homolog of NCBI NO: 29367343 NR Description: bZIP-like protein [Oryza sativa (japonica
MDPRFQLPTPVPSSGGAGVRGHHRRAHSETFLRFPDTDLFLDPDGDFSFSDLDFPSLSDDSPAVSDPTPPPPPPMAASSSQTPAPRPPGGTHNRSLSLDAAFFEGLALQGGGGGGCGGHKRSGSMDGVNSPFEGESALSGGLDYAKKAMPAERIAELALLDPKRAKRILANRQSAARSKERKIKYTGELERKVQTLQTEATTLSAQLTLLQRDTSGLTTENRELKLRLQSMEEQAKLRDALNDALREEVQRLKIAAGQAPKMNGSQFNGGLQQIPSYFSQQHQRQQQQQHQQQMAYLGGHQAQRHHPNHHQSPSNGGQSLSGLSLDDSMDFI

SEQ ID NO: 65795 - protein, 258 aa, Triticum aestivum
  peptide (1)..(258): Ceres Seq. ID no. 15219659
  misc_feature (87)..(149): Pfam Name: bZIP transcription factor Pfam Description: bZIP transcription factor
  misc_feature (87)..(149): Pfam Name: bZIP transcription factor Pfam Description: bZIP transcription factor
  misc_feature (1)..(237): Homolog of NCBI NO: 21553831 NR Description: transcriptional activator RF2a, putative
  misc_feature (1)..(237): Homolog of NCBI NO: 15221391 NR Description: bZIP protein [Arabidopsis thaliana]
  misc_feature (1)..(224): Homolog of NCBI NO: 18400998 NR Description: VirE2-interacting protein VIP1 [Arabidopsis
  misc_feature (1)..(224): Homolog of NCBI NO: 7258340 NR Description: VirE2-interacting protein VIP1 [Arabidopsis
  misc_feature (1)..(224): Homolog of NCBI NO: 21553989 NR Description: VirE2-interacting protein VIP1 [Arabidopsis
  misc_feature (1)..(237): Homolog of NCBI NO: 21553831 NR Description: transcriptional activator RF2a, putative
  misc_feature (1)..(224): Homolog of NCBI NO: 18400998 NR Description: VirE2-interacting protein VIP1 [Arabidopsis
  misc_feature (1)..(224): Homolog of NCBI NO: 21553989 NR Description: VirE2-interacting protein VIP1 [Arabidopsis
  misc_feature (51)..(258): Homolog of NCBI NO: 29367343 NR Description: bZIP-like protein [Oryza sativa (japonica
  misc_feature (69)..(258): Homolog of NCBI NO: 19401702 NR Description: susceptibility transcription factor RVS1 [Oryza
  misc_feature (1)..(253): Homolog of NCBI NO: 2921823 NR Description: shoot-forming PKSF1 [Paulownia kawakamii]
  misc_feature (1)..(216): Homolog of NCBI NO: 8777512 NR Description: bZIP transcriptional activator RSG [Nicotiana
  misc_feature (13)..(255): Homolog of NCBI NO: 34394739 NR Description: putative transcription activator RF2a
  misc_feature (1)..(224): Homolog of NCBI NO: 7258340 NR Description: VirE2-interacting protein VIP1 [Arabidopsis
  misc_feature (1)..(237): Homolog of NCBI NO: 15221391 NR Description: bZIP protein [Arabidopsis thaliana]
  misc_feature (13)..(255): Homolog of NCBI NO: 34394739 NR Description: putative transcription activator RF2a
  misc_feature (1)..(216): Homolog of NCBI NO: 8777512 NR Description: bZIP transcriptional activator RSG [Nicotiana
  misc_feature (1)..(253): Homolog of NCBI NO: 2921823 NR Description: shoot-forming PKSF1 [Paulownia kawakamii]
  misc_feature (69)..(258): Homolog of NCBI NO: 19401702 NR Description: susceptibility transcription factor RVS1 [Oryza
  misc_feature (51)..(258): Homolog of NCBI NO: 29367343 NR Description: bZIP-like protein [Oryza sativa (japonica
MAASSSQTPAPRPPGGTHNRSLSLDAAFFEGLALQGGGGGGCGGHKRSGSMDGVNSPFEGESALSGGLDYAKKAMPAERIAELALLDPKRAKRILANRQSAARSKERKIKYTGELERKVQTLQTEATTLSAQLTLLQRDTSGLTTENRELKLRLQSMEEQAKLRDALNDALREEVQRLKIAAGQAPKMNGSQFNGGLQQIPSYFSQQHQRQQQQQHQQQMAYLGGHQAQRHHPNHHQSPSNGGQSLSGLSLDDSMDFI

SEQ ID NO: 65796 - DNA, 610 bp, Triticum aestivum
  misc_feature (1)..(610): Ceres Seq. ID no. 14302375
accccacttcccacttcccaagcgcgcccacgcgcacgaaaatactcctagtactaattcgagagccagtgagtctagggtcgagtcccggctggggatgacgagccctcgccggcgatggacttgccgctagccctcgcagctctactcctcctcctcctagtgctcctcgctgccccgccggcggcgctcctcattgccctccacctgaaccgccgccgccgcctaacgccgcccgagccggcggccgcggcgctcgagccgagcgcgccggccgaggagaacgagggcgggaaggagaagaggcggcggcgcagggcgaggcggaagcagcagcagaagcagggcggcgacggggccctctcgcaggcggcaggcggcggcggggacgacgcgctgccgccgcggccgcggttcccgctcgcctcggtggccggcgcactgcagcggcggatcaccgcgcggtacgacgagctcgcgcgggccagccaggcccagtccctcaccatggacggtgtgatcgtgctcgtcaagctcttgggcctccccctgtgccttgaactcttgagtcatggctatgaataagatctgaactgggcagatccaaatg

SEQ ID NO: 65797 - protein, 155 aa, Triticum aestivum
  peptide (1)..(155): Ceres Seq. ID no. 14302376
  misc_feature (1)..(131): Homolog of NCBI NO: 34903590 NR Description: P0419B01.8 [Oryza sativa (japonica
MDLPLALAALLLLLLVLLAAPPAALLIALHLNRRRRLTPPEPAAAALEPSAPAEENEGGKEKRRRRRARRKQQQKQGGDGALSQAAGGGGDDALPPRPRFPLASVAGALQRRITARYDELARASQAQSLTMDGVIVLVKLLGLPLCLELLSHGYE

SEQ ID NO: 65798 - DNA, 1749 bp, Triticum aestivum
  misc_feature (1)..(1749): Ceres Seq. ID no. 14308015
agagcaatacttgttgccaacacagacaccgctctgcctcttgaacccaagcagagcatcaaagaaaccagaggaggcggaggcagaggaagaagatggcgctcctccttgtgcttgtcggcgttgtggtcggcgtggtgctcgcgagcagcctgctgctgcggtggaacgaggtcaggtacggccggaggaaggagggccgcttgccgccggggacaatggggtggccgctcttcggcgagaccaccgagttcctcaagcagggcccgagcttcatgaagcagaggaggctcaggtacgggaggctgttccggacgcacatcctgggttgccccacggtggtgtgcatggacccggagctcaaccgccggatgctgctgcagggcgaggccggcggcctggtgcccggctacccgcagtccatgctcgacatcctcggccgcaacaatatcgccgccgtgcacggccagctgcaccgcgtcatgcgtggtgccatggtcggcctcgtccgccccgccgcgctccggcaaagcctcctccccaagatcgacgccttcatgcgcgaccacctctgcggctgggccggcaccgttgtcgacgtccaggccaagaccaaggagatggccttgctgtctgcactcaggcagatcgccggcgtcacggccggcccactctctgacgccctcaagacggagctgtacacgcttgtgctcggcaccatctccttgcccatcaacctcccagggaccagctactaccaaggctttcaggcaaggaagaagctcgtgtccattctagagcagatgatcgcggaacggcgatcctctggtgatgctcacgatgacatgttggatgctctcttgagaagcggcgatgacggcaccagggaaaagattagcgatgagcagatcattgacttgctcatcgccctcatctactctgggtacgagaccatgtcgacgacctcaatgatggctgtcaagtacctgtcagaacatccgcgggccctcgaagaacttaggagagagcatcttgatatcaggaagggaaaatcgccggacgaagccatcagctacgatgatgtcaagtccatgactttcactcgagctgccatttttgagacgctaagattagccacagttgtgaatggactgctgaggaaaactattaaggatgtagaaatgaatgggtatgtcattccaaaaggctggagaatctatgtttacacaagggagataaactacgatccgttcatgtatcctgacccgatgacctttaatccgtggagatggctggagaagaacatggaatcgcacccgcacttcatgttgttcggagggggcggccggatgtgccccgggaaggaggtgggaacggtggagatcacgactttcctccactatttcgtgacccgatacagatgggaggaagaaggcaagaacaccatcttgaaattcccccgggtggaagctcccaacgggctgcatatccgagttcaagattactgaactcttccaagaaacattttgcagagtttagatagatatgacaaagacaaagacgatgagagcgcgattctgcgccgatgaatagattagattagaaatttgatacctgtataaacataggaaaatagcgatagtatagatgttataggttcactaggtagccgggataataggcaacaacatgctcctgtgttcttttgttctaccaattccgaaatgaacaaaggcgtatgatgtgggt

SEQ ID NO: 65799 - protein, 470 aa, Triticum aestivum
  peptide (1)..(470): Ceres Seq. ID no. 14308016
  misc_feature (2)..(470): Homolog of NCBI NO: 15239203 NR Description: cytochrome p450 90A1 [Arabidopsis thaliana]
  misc_feature (7)..(467): Homolog of NCBI NO: 34903584 NR Description: cytochrome P450-like protein
  misc_feature (3)..(225): Homolog of NCBI NO: 34896758 NR Description: 'OSJNBa0015G17.1' [Oryza sativa (japonica
  misc_feature (1)..(400): Homolog of NCBI NO: 30693331 NR Description: cytochrome p450, putative [Arabidopsis thaliana]
  misc_feature (1)..(470): Homolog of NCBI NO: 30693327 NR Description: cytochrome p450, putative [Arabidopsis thaliana]
  misc_feature (4)..(470): Homolog of NCBI NO: 21536828 NR Description: cytochrome P450 homolog, putative [Arabidopsis
  misc_feature (1)..(470): Homolog of NCBI NO: 18406372 NR Description: cytochrome p450, putative [Arabidopsis thaliana]
  misc_feature (1)..(470): Homolog of NCBI NO: 9294419 NR Description: cytochrome P450 [Arabidopsis thaliana]
  misc_feature (1)..(467): Homolog of NCBI NO: 5921933 NR Description: Cytochrome P450 85 (Dwarf protein)
  misc_feature (3)..(470): Homolog of NCBI NO: 27127269 NR Description: cytochrome P450 [Oryza sativa (japonica
MALLLVLVGVVVGVVLASSLLLRWNEVRYGRRKEGRLPPGTMGWPLFGETTEFLKQGPSFMKQRRLRYGRLFRTHILGCPTVVCMDPELNRRMLLQGEAGGLVPGYPQSMLDILGRNNIAAVHGQLHRVMRGAMVGLVRPAALRQSLLPKIDAFMRDHLCGWAGTVVDVQAKTKEMALLSALRQIAGVTAGPLSDALKTELYTLVLGTISLPINLPGTSYYQGFQARKKLVSILEQMIAERRSSGDAHDDMLDALLRSGDDGTREKISDEQIIDLLIALIYSGYETMSTTSMMAVKYLSEHPRALEELRREHLDIRKGKSPDEAISYDDVKSMTFTRAAIFETLRLATVVNGLLRKTIKDVEMNGYVIPKGWRIYVYTREINYDPFMYPDPMTFNPWRWLEKNMESHPHFMLFGGGGRMCPGKEVGTVEITTFLHYFVTRYRWEEEGKNTILKFPRVEAPNGLHIRVQDY

SEQ ID NO: 65800 - protein, 429 aa, Triticum aestivum
  peptide (1)..(429): Ceres Seq. ID no. 14308017
  misc_feature (1)..(429): Homolog of NCBI NO: 15239203 NR Description: cytochrome p450 90A1 [Arabidopsis thaliana]
  misc_feature (1)..(426): Homolog of NCBI NO: 34903584 NR Description: cytochrome P450-like protein
  misc_feature (1)..(184): Homolog of NCBI NO: 34896758 NR Description: 'OSJNBa0015G17.1' [Oryza sativa (japonica
  misc_feature (1)..(359): Homolog of NCBI NO: 30693331 NR Description: cytochrome p450, putative [Arabidopsis thaliana]
  misc_feature (1)..(429): Homolog of NCBI NO: 30693327 NR Description: cytochrome p450, putative [Arabidopsis thaliana]
  misc_feature (1)..(429): Homolog of NCBI NO: 21536828 NR Description: cytochrome P450 homolog, putative [Arabidopsis
  misc_feature (1)..(429): Homolog of NCBI NO: 18406372 NR Description: cytochrome p450, putative [Arabidopsis thaliana]
  misc_feature (1)..(429): Homolog of NCBI NO: 9294419 NR Description: cytochrome P450 [Arabidopsis thaliana]
  misc_feature (1)..(426): Homolog of NCBI NO: 5921933 NR Description: Cytochrome P450 85 (Dwarf protein)
  misc_feature (1)..(429): Homolog of NCBI NO: 27127269 NR Description: cytochrome P450 [Oryza sativa (japonica
MGWPLFGETTEFLKQGPSFMKQRRLRYGRLFRTHILGCPTVVCMDPELNRRMLLQGEAGGLVPGYPQSMLDILGRNNIAAVHGQLHRVMRGAMVGLVRPAALRQSLLPKIDAFMRDHLCGWAGTVVDVQAKTKEMALLSALRQIAGVTAGPLSDALKTELYTLVLGTISLPINLPGTSYYQGFQARKKLVSILEQMIAERRSSGDAHDDMLDALLRSGDDGTREKISDEQIIDLLIALIYSGYETMSTTSMMAVKYLSEHPRALEELRREHLDIRKGKSPDEAISYDDVKSMTFTRAAIFETLRLATVVNGLLRKTIKDVEMNGYVIPKGWRIYVYTREINYDPFMYPDPMTFNPWRWLEKNMESHPHFMLFGGGGRMCPGKEVGTVEITTFLHYFVTRYRWEEEGKNTILKFPRVEAPNGLHIRVQDY

SEQ ID NO: 65801 - protein, 410 aa, Triticum aestivum
  peptide (1)..(410): Ceres Seq. ID no. 14308018
  misc_feature (1)..(410): Homolog of NCBI NO: 15239203 NR Description: cytochrome p450 90A1 [Arabidopsis thaliana]
  misc_feature (1)..(407): Homolog of NCBI NO: 34903584 NR Description: cytochrome P450-like protein
  misc_feature (1)..(165): Homolog of NCBI NO: 34896758 NR Description: 'OSJNBa0015G17.1' [Oryza sativa (japonica
  misc_feature (1)..(340): Homolog of NCBI NO: 30693331 NR Description: cytochrome p450, putative [Arabidopsis thaliana]
  misc_feature (1)..(410): Homolog of NCBI NO: 30693327 NR Description: cytochrome p450, putative [Arabidopsis thaliana]
  misc_feature (1)..(410): Homolog of NCBI NO: 21536828 NR Description: cytochrome P450 homolog, putative [Arabidopsis
  misc_feature (1)..(410): Homolog of NCBI NO: 18406372 NR Description: cytochrome p450, putative [Arabidopsis thaliana]
  misc_feature (1)..(410): Homolog of NCBI NO: 9294419 NR Description: cytochrome P450 [Arabidopsis thaliana]
  misc_feature (1)..(407): Homolog of NCBI NO: 5921933 NR Description: Cytochrome P450 85 (Dwarf protein)
  misc_feature (1)..(410): Homolog of NCBI NO: 27127269 NR Description: cytochrome P450 [Oryza sativa (japonica
MKQRRLRYGRLFRTHILGCPTVVCMDPELNRRMLLQGEAGGLVPGYPQSMLDILGRNNIAAVHGQLHRVMRGAMVGLVRPAALRQSLLPKIDAFMRDHLCGWAGTVVDVQAKTKEMALLSALRQIAGVTAGPLSDALKTELYTLVLGTISLPINLPGTSYYQGFQARKKLVSILEQMIAERRSSGDAHDDMLDALLRSGDDGTREKISDEQIIDLLIALIYSGYETMSTTSMMAVKYLSEHPRALEELRREHLDIRKGKSPDEAISYDDVKSMTFTRAAIFETLRLATVVNGLLRKTIKDVEMNGYVIPKGWRIYVYTREINYDPFMYPDPMTFNPWRWLEKNMESHPHFMLFGGGGRMCPGKEVGTVEITTFLHYFVTRYRWEEEGKNTILKFPRVEAPNGLHIRVQDY

SEQ ID NO: 65802 - DNA, 1479 bp, Triticum aestivum
  misc_feature (1)..(1479): Ceres Seq. ID no. 13657621
accgagcttttccttcttcaagcaacataggagtagtcttcgctctgctcctcctctcccccaccagctctcgtgctcgccgccagccccggacagcgccgccccagctcaccgggagggcagcaagcaatggagcggagcctcccccccgtccccgtccccgcggcgcgcgtgtagcgttttgatccgcgaggatggcgatggcggcctacagcaaccaagcgcaggcgatgatgagggactacctgctcgccgacccgctcgtcccctacacctccgtgctcatcggcgttttcctctgcaagatggcttatgacctcacacggatattgagctcattctacttcaagggctattcttctttgacaaaaatacagcgtgttgaatggaacaacaggggtatgtccagtgcacatgcgatctttatcgcagcagtatcagtatatcttgttgcatctacagatcttttctctgatcgccttaatgggcctattacattccgcagttcgatcatctccacctctgcattaggggtttctgtgggttacttcatcactgatcttgcaatgatcttctggttgtttccttcccttggtggaatggaatatgtactccatcatactctttctctggttgcaatagcctacacaatgttgtcaggggaggggcagttttacacatacatgattcttatttcagaaacaaccacccctgaaatcaacatgagatggttccttgacaccgctggattgaagaagtcgagcgcctacctgattaatggtattttgatatttgttgtatggctggtggcaaggatatttttgttcctgtatgtattttaccacatctatttgcactacagccagataatgaagatgcacgcatttggttattacctgacactgaccgtgccgtcggtgctctttgtcatgaacgcaatgtggtttacgaagattttgaaaggggtaatgaaaacactgtcgaaatggtcgtaatcggagtaggctttgcggaccagaagtgcaacataactgggtgttcctgccgtgctgcactgcgtgtgacttgaatatgtaaagttatgaatatatgaattaggctttgcagaccggaagtacaacgccaacttggttggtgttcctgcagtgctgcttgagaccttgatgtgcaaagttatgaacatatcggcgtaactagggaaagtgaatatgtaaaatactagcaaacaagttagattaggctaaatcgcgctattttccatgagctgggatttcctggccagtttggcactgtactgaagttcctattccaatcctgcaatctgtgtataccaggccaggagataattccattgcatctcttattcatactaaatttgataatctaatttgagatattatatataagctgttgttattccaagaaaaaaaaaaaaaaaaaagcttatcgataccgtcgacctcgagggggggcccggta

SEQ ID NO: 65803 - protein, 266 aa, Triticum aestivum
  peptide (1)..(266): Ceres Seq. ID no. 13657622
  misc_feature (25)..(264): Pfam Name: Eukaryotic protein of unknown function (DUF887) Pfam Description: Eukaryotic protein of unknown function (DUF887)
  misc_feature (27)..(263): Homolog of NCBI NO: 34860211 NR Description: similar to RIKEN cDNA C730036B01 [Rattus
  misc_feature (23)..(264): Homolog of NCBI NO: 7486070 NR Description: hypothetical protein F24G24.160 - Arabidopsis
  misc_feature (210)..(264): Homolog of NCBI NO: 25403400 NR Description: protein T19E23.9 [imported] - Arabidopsis
  misc_feature (2)..(164): Homolog of NCBI NO: 25403400 NR Description: protein T19E23.9 [imported] - Arabidopsis
  misc_feature (28)..(264): Homolog of NCBI NO: 34909246 NR Description: B1148D12.11 [Oryza sativa (japonica
  misc_feature (23)..(264): Homolog of NCBI NO: 18413327 NR Description: expressed protein [Arabidopsis thaliana]
  misc_feature (23)..(264): Homolog of NCBI NO: 21537382 NR Description: unknown [Arabidopsis thaliana]
  misc_feature (1)..(264): Homolog of NCBI NO: 22328807 NR Description: expressed protein [Arabidopsis thaliana]
  misc_feature (2)..(264): Homolog of NCBI NO: 18397885 NR Description: expressed protein [Arabidopsis thaliana]
  misc_feature (1)..(266): Homolog of NCBI NO: 40538924 NR Description: expressed protein [Oryza sativa (japonica
MAMAAYSNQAQAMMRDYLLADPLVPYTSVLIGVFLCKMAYDLTRILSSFYFKGYSSLTKIQRVEWNNRGMSSAHAIFIAAVSVYLVASTDLFSDRLNGPITFRSSIISTSALGVSVGYFITDLAMIFWLFPSLGGMEYVLHHTLSLVAIAYTMLSGEGQFYTYMILISETTTPEINMRWFLDTAGLKKSSAYLINGILIFVVWLVARIFLFLYVFYHIYLHYSQIMKMHAFGYYLTLTVPSVLFVMNAMWFTKILKGVMKTLSKWS

SEQ ID NO: 65804 - protein, 264 aa, Triticum aestivum
  peptide (1)..(264): Ceres Seq. ID no. 13657623
  misc_feature (23)..(262): Pfam Name: Eukaryotic protein of unknown function (DUF887) Pfam Description: Eukaryotic protein of unknown function (DUF887)
  misc_feature (25)..(261): Homolog of NCBI NO: 34860211 NR Description: similar to RIKEN cDNA C730036B01 [Rattus
  misc_feature (21)..(262): Homolog of NCBI NO: 7486070 NR Description: hypothetical protein F24G24.160 - Arabidopsis
  misc_feature (208)..(262): Homolog of NCBI NO: 25403400 NR Description: protein T19E23.9 [imported] - Arabidopsis
  misc_feature (1)..(162): Homolog of NCBI NO: 25403400 NR Description: protein T19E23.9 [imported] - Arabidopsis
  misc_feature (26)..(262): Homolog of NCBI NO: 34909246 NR Description: B1148D12.11 [Oryza sativa (japonica
  misc_feature (21)..(262): Homolog of NCBI NO: 18413327 NR Description: expressed protein [Arabidopsis thaliana]
  misc_feature (21)..(262): Homolog of NCBI NO: 21537382 NR Description: unknown [Arabidopsis thaliana]
  misc_feature (1)..(262): Homolog of NCBI NO: 22328807 NR Description: expressed protein [Arabidopsis thaliana]
  misc_feature (1)..(262): Homolog of NCBI NO: 18397885 NR Description: expressed protein [Arabidopsis thaliana]
  misc_feature (1)..(264): Homolog of NCBI NO: 40538924 NR Description: expressed protein [Oryza sativa (japonica
MAAYSNQAQAMMRDYLLADPLVPYTSVLIGVFLCKMAYDLTRILSSFYFKGYSSLTKIQRVEWNNRGMSSAHAIFIAAVSVYLVASTDLFSDRLNGPITFRSSIISTSALGVSVGYFITDLAMIFWLFPSLGGMEYVLHHTLSLVAIAYTMLSGEGQFYTYMILISETTTPEINMRWFLDTAGLKKSSAYLINGILIFVVWLVARIFLFLYVFYHIYLHYSQIMKMHAFGYYLTLTVPSVLFVMNAMWFTKILKGVMKTLSKWS

SEQ ID NO: 65805 - protein, 254 aa, Triticum aestivum
  peptide (1)..(254): Ceres Seq. ID no. 13657624
  misc_feature (13)..(252): Pfam Name: Eukaryotic protein of unknown function (DUF887) Pfam Description: Eukaryotic protein of unknown function (DUF887)
  misc_feature (15)..(251): Homolog of NCBI NO: 34860211 NR Description: similar to RIKEN cDNA C730036B01 [Rattus
  misc_feature (11)..(252): Homolog of NCBI NO: 7486070 NR Description: hypothetical protein F24G24.160 - Arabidopsis
  misc_feature (198)..(252): Homolog of NCBI NO: 25403400 NR Description: protein T19E23.9 [imported] - Arabidopsis
  misc_feature (1)..(152): Homolog of NCBI NO: 25403400 NR Description: protein T19E23.9 [imported] - Arabidopsis
  misc_feature (16)..(252): Homolog of NCBI NO: 34909246 NR Description: B1148D12.11 [Oryza sativa (japonica
  misc_feature (11)..(252): Homolog of NCBI NO: 18413327 NR Description: expressed protein [Arabidopsis thaliana]
  misc_feature (11)..(252): Homolog of NCBI NO: 21537382 NR Description: unknown [Arabidopsis thaliana]
  misc_feature (1)..(252): Homolog of NCBI NO: 22328807 NR Description: expressed protein [Arabidopsis thaliana]
  misc_feature (1)..(252): Homolog of NCBI NO: 18397885 NR Description: expressed protein [Arabidopsis thaliana]
  misc_feature (1)..(254): Homolog of NCBI NO: 40538924 NR Description: expressed protein [Oryza sativa (japonica
MMRDYLLADPLVPYTSVLIGVFLCKMAYDLTRILSSFYFKGYSSLTKIQRVEWNNRGMSSAHAIFIAAVSVYLVASTDLFSDRLNGPITFRSSIISTSALGVSVGYFITDLAMIFWLFPSLGGMEYVLHHTLSLVAIAYTMLSGEGQFYTYMILISETTTPEINMRWFLDTAGLKKSSAYLINGILIFVVWLVARIFLFLYVFYHIYLHYSQIMKMHAFGYYLTLTVPSVLFVMNAMWFTKILKGVMKTLSKWS

SEQ ID NO: 65806 - DNA, 575 bp, Triticum aestivum
  misc_feature (1)..(575): Ceres Seq. ID no. 13656404
gcagtcgatttcacgcgatcggatccagccgccccatgccgccgtcccccgccgcgtccgccccggcgagccgccacctgcgactctggtggcgccgccgcggccgggccggcgccgtcgcggccaccttcgccgcggcactcctcgccgcggccctcctcctctcgctctcctacttcgcctccctgcccctcgcgcccgcctcctcctccgccctcgtcggcctcaccctcctccgccgcgccgaggagaagggcgcgctgtgcttggatgggagcgcgccggggtaccatctgcagcgagggtcagggagtggctctcagagctggctcatccacttggagggtggaggctggtgccgaaatttgaaatcatgcgcttcacgccagaaatcgatgttgggttcttcccattacatggaacgtcaggttgagtttgctgggatgttgagcgatgatgaagatcagaatccagattttcacaactggaataaagtgaagataaggtattgtgatggggcatcattttctgggaacgttaaagacgagttgcagaacggcacaaaattctttttc

SEQ ID NO: 65807 - protein, 191 aa, Triticum aestivum
  peptide (1)..(191): Ceres Seq. ID no. 13656405
  misc_feature (68)..(190): Pfam Name: Pectinacetylesterase Pfam Description: Pectinacetylesterase
  misc_feature (55)..(182): Homolog of NCBI NO: 15228677 NR Description: pectinacetylesterase family [Arabidopsis
  misc_feature (52)..(190): Homolog of NCBI NO: 34907550 NR Description: putative pectinacetylesterase
  misc_feature (68)..(181): Homolog of NCBI NO: 34913332 NR Description: putative pectin acetylesterase precursor
  misc_feature (55)..(190): Homolog of NCBI NO: 22330933 NR Description: pectinacetylesterase family [Arabidopsis thaliana]
  misc_feature (72)..(182): Homolog of NCBI NO: 18397406 NR Description: pectinacetylesterase, putative [Arabidopsis
  misc_feature (72)..(182): Homolog of NCBI NO: 6714404 NR Description: putative pectinacetylesterase [Arabidopsis
  misc_feature (55)..(190): Homolog of NCBI NO: 6478941 NR Description: putative pectinacetylesterase [Arabidopsis
  misc_feature (72)..(182): Homolog of NCBI NO: 7487997 NR Description: pectin acetylesterase homolog F21E10.11 -
  misc_feature (68)..(190): Homolog of NCBI NO: 22330933 NR Description: pectinacetylesterase family [Arabidopsis thaliana]
  misc_feature (68)..(190): Homolog of NCBI NO: 6478931 NR Description: putative pectinacetylesterase [Arabidopsis
SRFHAIGSSRPMPPSPAASAPASRHLRLWWRRRGRAGAVAATFAAALLAAALLLSLSYFASLPLAPASSSALVGLTLLRRAEEKGALCLDGSAPGYHLQRGSGSGSQSWLIHLEGGGWCRNLKSCASRQKSMLGSSHYMERQVEFAGMLSDDEDQNPDFHNWNKVKIRYCDGASFSGNVKDELQNGTKFFF

SEQ ID NO: 65808 - protein, 180 aa, Triticum aestivum
  peptide (1)..(180): Ceres Seq. ID no. 13656406
  misc_feature (57)..(179): Pfam Name: Pectinacetylesterase Pfam Description: Pectinacetylesterase
  misc_feature (44)..(171): Homolog of NCBI NO: 15228677 NR Description: pectinacetylesterase family [Arabidopsis
  misc_feature (41)..(179): Homolog of NCBI NO: 34907550 NR Description: putative pectinacetylesterase
  misc_feature (57)..(170): Homolog of NCBI NO: 34913332 NR Description: putative pectin acetylesterase precursor
  misc_feature (44)..(179): Homolog of NCBI NO: 22330933 NR Description: pectinacetylesterase family [Arabidopsis thaliana]
  misc_feature (61)..(171): Homolog of NCBI NO: 18397406 NR Description: pectinacetylesterase, putative [Arabidopsis
  misc_feature (61)..(171): Homolog of NCBI NO: 6714404 NR Description: putative pectinacetylesterase [Arabidopsis
  misc_feature (44)..(179): Homolog of NCBI NO: 6478941 NR Description: putative pectinacetylesterase [Arabidopsis
  misc_feature (61)..(171): Homolog of NCBI NO: 7487997 NR Description: pectin acetylesterase homolog F21E10.11 -
  misc_feature (57)..(179): Homolog of NCBI NO: 22330933 NR Description: pectinacetylesterase family [Arabidopsis thaliana]
  misc_feature (57)..(179): Homolog of NCBI NO: 6478931 NR Description: putative pectinacetylesterase [Arabidopsis
MPPSPAASAPASRHLRLWWRRRGRAGAVAATFAAALLAAALLLSLSYFASLPLAPASSSALVGLTLLRRAEEKGALCLDGSAPGYHLQRGSGSGSQSWLIHLEGGGWCRNLKSCASRQKSMLGSSHYMERQVEFAGMLSDDEDQNPDFHNWNKVKIRYCDGASFSGNVKDELQNGTKFFF

SEQ ID NO: 65809 - protein, 143 aa, Triticum aestivum
  peptide (1)..(143): Ceres Seq. ID no. 13656407
QSISRDRIQPPHAAVPRRVRPGEPPPATLVAPPRPGRRRRGHLRRGTPRRGPPPLALLLRLPAPRARLLLRPRRPHPPPPRRGEGRAVLGWERAGVPSAARVREWLSELAHPLGGWRLVPKFEIMRFTPEIDVGFFPLHGTSG

SEQ ID NO: 65810 - DNA, 974 bp, Triticum aestivum
  misc_feature (1)..(974): Ceres Seq. ID no. 13656408
attacctagaacatcctaatcgaaaaactgcggcttacaccagggaaaggctctcgcatcgctccctccccggggcgacacgggcggcggctcaggcgcccctccaccagaccccctcctcattcccctcccctcgccgtcgccggtgggctccgccgggcgaagcccgcatggatccggcggcggcgggacctcttctacccggcgtcgctcgtgaggggaagacttgcagcggcgggcgacggatgccggacgacgtacggtgctggtgtcggctgcgggcggcggatggggagctggggcggcggcatcggtccgggctccggcgtggcctgggcgtggacggcatgcatgcgcgcggcggcggtcggcttcggatcgtgcgtggggtgcggatcgacgtcgggcgcggcagcggctttcgtctcccggatttcgccgccgcagccgctcaccgcccacgcctcctacccgtcgacgagatgacgaagcgcaccaagaaggctggtattgtcggcaaatatggtacccgttatggtgccagtttgcgtaagcagatcaagaagatggaggtgtctcagcactccaagtacttctgtgagttctgtgggaagtttgctgtgaagaggaaagcagttggaatttggggatgcaaggactgtgggaaggtgaaggctggcggtgcttacactatgaacactgccagtgcggtcactgtcaggagcactatccgtcgtttgagggagcagactgaagcataagttgctactagtgttttgtcctagtgaatcatctgggatttcgcagtttagacgatactttggattcagttccattggctgtttagtcaaggattatctttgtacttggtgcgatgatgttctgttatgttattctcccacccttttgttgcctgattccactctgatttactgtggattaaaaaaaaaaaaaaaaaagcttatcgataccgt

SEQ ID NO: 65811 - protein, 252 aa, Triticum aestivum
  peptide (1)..(252): Ceres Seq. ID no. 13656409
  misc_feature (161)..(249): Homolog of NCBI NO: 33637090 NR Description: N1 [Toxoplasma gondii]
  misc_feature (161)..(248): Homolog of NCBI NO: 7441206 NR Description: ribosomal protein L37a
  misc_feature (161)..(252): Homolog of NCBI NO: 6093889 NR Description: 60S RIBOSOMAL PROTEIN L37A
  misc_feature (166)..(251): Homolog of NCBI NO: 11358898 NR Description: translation initiation factor eIF-4 gamma homolog
  misc_feature (161)..(251): Homolog of NCBI NO: 1173045 NR Description: 60S RIBOSOMAL PROTEIN L37A
  misc_feature (161)..(251): Homolog of NCBI NO: 18411538 NR Description: 60S ribosomal protein L37a (RPL37aC) [Arabidopsis
  misc_feature (161)..(252): Homolog of NCBI NO: 15228411 NR Description: 60S ribosomal protein L37a (RPL37aB) [Arabidopsis
  misc_feature (161)..(252): Homolog of NCBI NO: 6831602 NR Description: 60S RIBOSOMAL PROTEIN L37A
  misc_feature (161)..(251): Homolog of NCBI NO: 6831607 NR Description: 60S ribosomal protein L37a
  misc_feature (159)..(252): Homolog of NCBI NO: 34911166 NR Description: putative 60S ribosomal protein L37a
YLEHPNRKTAAYTRERLSHRSLPGATRAAAQAPLHQTPSSFPSPRRRRWAPPGEARMDPAAAGPLLPGVAREGKTCSGGRRMPDDVRCWCRLRAADGELGRRHRSGLRRGLGVDGMHARGGGRLRIVRGVRIDVGRGSGFRLPDFAAAAAHRPRLLPVDEMTKRTKKAGIVGKYGTRYGASLRKQIKKMEVSQHSKYFCEFCGKFAVKRKAVGIWGCKDCGKVKAGGAYTMNTASAVTVRSTIRRLREQTEA

SEQ ID NO: 65812 - protein, 196 aa, Triticum aestivum
  peptide (1)..(196): Ceres Seq. ID no. 13656410
  misc_feature (105)..(193): Homolog of NCBI NO: 33637090 NR Description: N1 [Toxoplasma gondii]
  misc_feature (105)..(192): Homolog of NCBI NO: 7441206 NR Description: ribosomal protein L37a
  misc_feature (105)..(196): Homolog of NCBI NO: 6093889 NR Description: 60S RIBOSOMAL PROTEIN L37A
  misc_feature (110)..(195): Homolog of NCBI NO: 11358898 NR Description: translation initiation factor eIF-4 gamma homolog
  misc_feature (105)..(195): Homolog of NCBI NO: 1173045 NR Description: 60S RIBOSOMAL PROTEIN L37A
  misc_feature (105)..(195): Homolog of NCBI NO: 18411538 NR Description: 60S ribosomal protein L37a (RPL37aC) [Arabidopsis
  misc_feature (105)..(196): Homolog of NCBI NO: 15228411 NR Description: 60S ribosomal protein L37a (RPL37aB) [Arabidopsis
  misc_feature (105)..(196): Homolog of NCBI NO: 6831602 NR Description: 60S RIBOSOMAL PROTEIN L37A
  misc_feature (105)..(195): Homolog of NCBI NO: 6831607 NR Description: 60S ribosomal protein L37a
  misc_feature (103)..(196): Homolog of NCBI NO: 34911166 NR Description: putative 60S ribosomal protein L37a
MDPAAAGPLLPGVAREGKTCSGGRRMPDDVRCWCRLRAADGELGRRHRSGLRRGLGVDGMHARGGGRLRIVRGVRIDVGRGSGFRLPDFAAAAAHRPRLLPVDEMTKRTKKAGIVGKYGTRYGASLRKQIKKMEVSQHSKYFCEFCGKFAVKRKAVGIWGCKDCGKVKAGGAYTMNTASAVTVRSTIRRLREQTEA

SEQ ID NO: 65813 - protein, 171 aa, Triticum aestivum
  peptide (1)..(171): Ceres Seq. ID no. 13656411
  misc_feature (80)..(168): Homolog of NCBI NO: 33637090 NR Description: N1 [Toxoplasma gondii]
  misc_feature (80)..(167): Homolog of NCBI NO: 7441206 NR Description: ribosomal protein L37a
  misc_feature (80)..(171): Homolog of NCBI NO: 6093889 NR Description: 60S RIBOSOMAL PROTEIN L37A
  misc_feature (85)..(170): Homolog of NCBI NO: 11358898 NR Description: translation initiation factor eIF-4 gamma homolog
  misc_feature (80)..(170): Homolog of NCBI NO: 1173045 NR Description: 60S RIBOSOMAL PROTEIN L37A
  misc_feature (80)..(170): Homolog of NCBI NO: 18411538 NR Description: 60S ribosomal protein L37a (RPL37aC) [Arabidopsis
  misc_feature (80)..(171): Homolog of NCBI NO: 15228411 NR Description: 60S ribosomal protein L37a (RPL37aB) [Arabidopsis
  misc_feature (80)..(171): Homolog of NCBI NO: 6831602 NR Description: 60S RIBOSOMAL PROTEIN L37A
  misc_feature (80)..(170): Homolog of NCBI NO: 6831607 NR Description: 60S ribosomal protein L37a
  misc_feature (78)..(171): Homolog of NCBI NO: 34911166 NR Description: putative 60S ribosomal protein L37a
MPDDVRCWCRLRAADGELGRRHRSGLRRGLGVDGMHARGGGRLRIVRGVRIDVGRGSGFRLPDFAAAAAHRPRLLPVDEMTKRTKKAGIVGKYGTRYGASLRKQIKKMEVSQHSKYFCEFCGKFAVKRKAVGIWGCKDCGKVKAGGAYTMNTASAVTVRSTIRRLREQTEA

SEQ ID NO: 65814 - DNA, 1310 bp, Triticum aestivum
  misc_feature (1)..(1310): Ceres Seq. ID no. 14302514
agaaaactgaggaaagtagaccgagccccaaacgaaatcaaatcgagaggagaggagaaagagagaggagcacgcgccgccgccaggccaagcacatcgccatggccgcctcctgccgccgcgcgccccagatgctgggctccgccgcctcccgcctcctccattcgcgtggctacgcggccgccgccgccgcgccctccccggcggtgttcgtcgacaagagcacccgcgtgatctgccagggcatcaccgggaagaacggcaccttccacaccgagcaggccatcgagtacggcaccaacatggtaggtggagttactcccaagaaaggtggaactgagcacctaggccttccagttttcaactcggtagcagaagctaaggccgagacaaaggccaatgcatctgttatatatgttccaccaccatttgctgccgctgcaataatggaggcattggaagcagagcttgaccttgttgtctgcattactgaagggatacctcagcatgacatggtgaaagtgaaagctgctctgaacaggcaatcaaaaaccagattgatcgggccaaactgccctggtatcattaagcctggtgaatgtaagattggaatcatgccaggttacatccacaaaccaggacgcattggaattgtatctcgttctggtaccttgacatatgaagcggtgtttcaaacaacagccgtaggcttggggcagtcaacttgtgtgggcatgggtggtgacccctttaacggcactaattttgttgactgccttgaaaagtttgttgatgatcctcagacagaaggtattgttctcattggagaaattggcggtactgctgaggaggatgctgcagcctttatccgggagagcaaaacagaaaagcctgtcgttgcattcatagctggacttactgcacccccaggccgtcgcatgggccatgctggagcaattgtgtcaggggggaagggtaccgcccaggacaagatcaaggcactcagggatgctggggttactgttgtcgagtcaccagctaagatcggttcaaccatgttcgaacttttcaagcagcgcggaatggtagagtagagagaaggaatggtacagtagaaaagaaaacattgggaaacttctttttgttgctcgttggttaatagcgagcaatacgtcggtagggccccatcgctggtcgctgagttgagctactcagtcccttttttccttttcctttccccgtcttaagtgtgagactggcctttacatgtgctcatttcaaatgttcaataagacaaattctcgacatac

SEQ ID NO: 65815 - protein, 363 aa, Triticum aestivum
  peptide (1)..(363): Ceres Seq. ID no. 14302515
  misc_feature (70)..(181): Pfam Name: CoA binding domain Pfam Description: CoA binding domain
  misc_feature (68)..(359): Homolog of NCBI NO: 23056207 NR Description: hypothetical protein [Geobacter metallireducens]
  misc_feature (32)..(362): Homolog of NCBI NO: 2258465 NR Description: succinyl-CoA synthetase alpha subunit [Sus scrofa]
  misc_feature (69)..(362): Homolog of NCBI NO: 4104377 NR Description: ATP-specific succinyl-CoA synthetase alpha
  misc_feature (55)..(352): Homolog of NCBI NO: 1711574 NR Description: SUCCINYL-COA LIGASE
  misc_feature (69)..(363): Homolog of NCBI NO: 1076415 NR Description: succinate-CoA ligase (GDP-forming) (EC 6.2.1.4)
  misc_feature (52)..(363): Homolog of NCBI NO: 15241592 NR Description: succinyl-CoA-ligase alpha subunit [Arabidopsis
  misc_feature (52)..(363): Homolog of NCBI NO: 21593483 NR Description: succinyl-CoA synthetase, alpha subunit
  misc_feature (52)..(363): Homolog of NCBI NO: 15237260 NR Description: succinyl-CoA synthetase, alpha subunit
  misc_feature (39)..(362): Homolog of NCBI NO: 27357175 NR Description: succinyl-CoA ligase alpha subunit [Lycopersicon
  misc_feature (34)..(363): Homolog of NCBI NO: 34393512 NR Description: putative succinyl-CoA ligase alpha subunit
KTEESRPSPKRNQIERRGERERSTRRRQAKHIAMAASCRRAPQMLGSAASRLLHSRGYAAAAAAPSPAVFVDKSTRVICQGITGKNGTFHTEQAIEYGTNMVGGVTPKKGGTEHLGLPVFNSVAEAKAETKANASVIYVPPPFAAAAIMEALEAELDLVVCITEGIPQHDMVKVKAALNRQSKTRLIGPNCPGIIKPGECKIGIMPGYIHKPGRIGIVSRSGTLTYEAVFQTTAVGLGQSTCVGMGGDPFNGTNFVDCLEKFVDDPQTEGIVLIGEIGGTAEEDAAAFIRESKTEKPVVAFIAGLTAPPGRRMGHAGAIVSGGKGTAQDKIKALRDAGVTVVESPAKIGSTMFELFKQRGMVE

SEQ ID NO: 65816 - protein, 330 aa, Triticum aestivum
  peptide (1)..(330): Ceres Seq. ID no. 14302516
  misc_feature (37)..(148): Pfam Name: CoA binding domain Pfam Description: CoA binding domain
  misc_feature (35)..(326): Homolog of NCBI NO: 23056207 NR Description: hypothetical protein [Geobacter metallireducens]
  misc_feature (1)..(329): Homolog of NCBI NO: 2258465 NR Description: succinyl-CoA synthetase alpha subunit [Sus scrofa]
  misc_feature (36)..(329): Homolog of NCBI NO: 4104377 NR Description: ATP-specific succinyl-CoA synthetase alpha
  misc_feature (22)..(319): Homolog of NCBI NO: 1711574 NR Description: SUCCINYL-COA LIGASE
  misc_feature (36)..(330): Homolog of NCBI NO: 1076415 NR Description: succinate-CoA ligase (GDP-forming) (EC 6.2.1.4)
  misc_feature (19)..(330): Homolog of NCBI NO: 15241592 NR Description: succinyl-CoA-ligase alpha subunit [Arabidopsis
  misc_feature (19)..(330): Homolog of NCBI NO: 21593483 NR Description: succinyl-CoA synthetase, alpha subunit
  misc_feature (19)..(330): Homolog of NCBI NO: 15237260 NR Description: succinyl-CoA synthetase, alpha subunit
  misc_feature (6)..(329): Homolog of NCBI NO: 27357175 NR Description: succinyl-CoA ligase alpha subunit [Lycopersicon
  misc_feature (1)..(330): Homolog of NCBI NO: 34393512 NR Description: putative succinyl-CoA ligase alpha subunit
MAASCRRAPQMLGSAASRLLHSRGYAAAAAAPSPAVFVDKSTRVICQGITGKNGTFHTEQAIEYGTNMVGGVTPKKGGTEHLGLPVFNSVAEAKAETKANASVIYVPPPFAAAAIMEALEAELDLVVCITEGIPQHDMVKVKAALNRQSKTRLIGPNCPGIIKPGECKIGIMPGYIHKPGRIGIVSRSGTLTYEAVFQTTAVGLGQSTCVGMGGDPFNGTNFVDCLEKFVDDPQTEGIVLIGEIGGTAEEDAAAFIRESKTEKPVVAFIAGLTAPPGRRMGHAGAIVSGGKGTAQDKIKALRDAGVTVVESPAKIGSTMFELFKQRGMVE

SEQ ID NO: 65817 - protein, 320 aa, Triticum aestivum
  peptide (1)..(320): Ceres Seq. ID no. 14302517
  misc_feature (27)..(138): Pfam Name: CoA binding domain Pfam Description: CoA binding domain
  misc_feature (25)..(316): Homolog of NCBI NO: 23056207 NR Description: hypothetical protein [Geobacter metallireducens]
  misc_feature (1)..(319): Homolog of NCBI NO: 2258465 NR Description: succinyl-CoA synthetase alpha subunit [Sus scrofa]
  misc_feature (26)..(319): Homolog of NCBI NO: 4104377 NR Description: ATP-specific succinyl-CoA synthetase alpha
  misc_feature (12)..(309): Homolog of NCBI NO: 1711574 NR Description: SUCCINYL-COA LIGASE
  misc_feature (26)..(320): Homolog of NCBI NO: 1076415 NR Description: succinate-CoA ligase (GDP-forming) (EC 6.2.1.4)
  misc_feature (9)..(320): Homolog of NCBI NO: 15241592 NR Description: succinyl-CoA-ligase alpha subunit [Arabidopsis
  misc_feature (9)..(320): Homolog of NCBI NO: 21593483 NR Description: succinyl-CoA synthetase, alpha subunit
  misc_feature (9)..(320): Homolog of NCBI NO: 15237260 NR Description: succinyl-CoA synthetase, alpha subunit
  misc_feature (1)..(319): Homolog of NCBI NO: 27357175 NR Description: succinyl-CoA ligase alpha subunit [Lycopersicon
  misc_feature (1)..(320): Homolog of NCBI NO: 34393512 NR Description: putative succinyl-CoA ligase alpha subunit
MLGSAASRLLHSRGYAAAAAAPSPAVFVDKSTRVICQGITGKNGTFHTEQAIEYGTNMVGGVTPKKGGTEHLGLPVFNSVAEAKAETKANASVIYVPPPFAAAAIMEALEAELDLVVCITEGIPQHDMVKVKAALNRQSKTRLIGPNCPGIIKPGECKIGIMPGYIHKPGRIGIVSRSGTLTYEAVFQTTAVGLGQSTCVGMGGDPFNGTNFVDCLEKFVDDPQTEGIVLIGEIGGTAEEDAAAFIRESKTEKPVVAFIAGLTAPPGRRMGHAGAIVSGGKGTAQDKIKALRDAGVTVVESPAKIGSTMFELFKQRGMVE

SEQ ID NO: 65818 - DNA, 808 bp, Triticum aestivum
  misc_feature (1)..(808): Ceres Seq. ID no. 12618916
aaagcaccaacccctcaagagacacatccttcagctcatccttgcctcttgcgttctcttctccgtagcttgcagataagtaagcttgtccgttgtgcggagaggggaggcggataggtacatacacatggaagggttgcagagatcgtcctccactttcagaaggtccggctcgtcgggcctggtgtgggacgagcggttcctgaccgagggcgccgaggcgaaggccgccggcgagggcggcacggatgaagcccagccggagatgcggcgctcccggagcaccggcggcgtcgggatgatgctgcgccgtggcggcgacgacaagaagcagcagcagcagaaaaaggagcagcaaggccagaagaagaaggacgaggagcgcgatccccaggtgttccggaccaaggaggtggccccggacgtggacccgccgtcgccgagggtgtccggctgcatcctctgcgccatcttcgggggctccggctccggctctggcccggcggcgcgccgaggccgcgccaagccgaagaggaggcaacggtcggcggcgtaaagtttgatcgggccttggcggatggatgtcatgcgagctgtgtttatactggagtgacgatgatgatgatatactactgatattggttggtttgtattgtactctgctctgcgttactgcgtacgtagtctatacgtgtcaggttagttcctctttttttggttagtttctgggttcagatccgtgagcagcagcagctgctgagatctgcgatgttctttcttgatctggcgcatgattttttccccgtcc

SEQ ID NO: 65819 - protein, 142 aa, Triticum aestivum
  peptide (1)..(142): Ceres Seq. ID no. 12618917
  misc_feature (1)..(137): Homolog of NCBI NO: 18412687 NR Description: expressed protein
  misc_feature (1)..(139): Homolog of NCBI NO: 30684361 NR Description: expressed protein [Arabidopsis thaliana]
  misc_feature (1)..(139): Homolog of NCBI NO: 30684356 NR Description: expressed protein [Arabidopsis thaliana]
MEGLQRSSSTFRRSGSSGLVWDERFLTEGAEAKAAGEGGTDEAQPEMRRSRSTGGVGMMLRRGGDDKKQQQQKKEQQGQKKKDEERDPQVFRTKEVAPDVDPPSPRVSGCILCAIFGGSGSGSGPAARRGRAKPKRRQRSAA

SEQ ID NO: 65820 - protein, 96 aa, Triticum aestivum
  peptide (1)..(96): Ceres Seq. ID no. 12618918
  misc_feature (1)..(91): Homolog of NCBI NO: 18412687 NR Description: expressed protein
  misc_feature (1)..(93): Homolog of NCBI NO: 30684361 NR Description: expressed protein [Arabidopsis thaliana]
  misc_feature (1)..(93): Homolog of NCBI NO: 30684356 NR Description: expressed protein [Arabidopsis thaliana]
MRRSRSTGGVGMMLRRGGDDKKQQQQKKEQQGQKKKDEERDPQVFRTKEVAPDVDPPSPRVSGCILCAIFGGSGSGSGPAARRGRAKPKRRQRSAA

SEQ ID NO: 65821 - protein, 85 aa, Triticum aestivum
  peptide (1)..(85): Ceres Seq. ID no. 12618919
  misc_feature (1)..(80): Homolog of NCBI NO: 18412687 NR Description: expressed protein
  misc_feature (1)..(82): Homolog of NCBI NO: 30684361 NR Description: expressed protein [Arabidopsis thaliana]
  misc_feature (1)..(82): Homolog of NCBI NO: 30684356 NR Description: expressed protein [Arabidopsis thaliana]
MMLRRGGDDKKQQQQKKEQQGQKKKDEERDPQVFRTKEVAPDVDPPSPRVSGCILCAIFGGSGSGSGPAARRGRAKPKRRQRSAA

SEQ ID NO: 65822 - DNA, 1180 bp, Triticum aestivum
  misc_feature (1)..(1180): Ceres Seq. ID no. 12780566
caggccgggcgttgcaacgaacaaacaaacgctgctttcagaagaagggttcttccttctccactccttgtattccgtcacacgagtccgacggcgacgacgacttgagggagaaggcgaagaggaaggaaggcggactcgagaggttcgacggggattttggtgttcgtccggcggattcccagcgatcggccgatcctcgccggcggatggggcaggcgttccgcaaactgttcgatgccttcttcggcaacagcgagatgagggtcgtgatgcttgggctggatgccgcgggcaagaccaccatcctgtacaagctgcacatcggggaggtcctctcgactgtccctacgattgggttcaatgttgagaaagttcagtacaagaacgtgctgtttacagtgtgggatgttggtggccaggagaagttgaggcccttgtggagacattactttaataacacagatggcttgatctacgtggttgattcattggatagggagagaattggaaaagccaaagcagagtttcagacaataatcaacgatcctttcatgcttaacagtgtcatattggtatttgccaataaacaagatatgaaaggggcgatgacaccaatggaggtgtgcgaaggccttggcctctatgatttgaagaaccgcgtctggcacatccaagtatgagggcttggactggctgtcaagtactctgcaggatctgcaagcgttcggtcgcctaccctcaggagggacctaacagttctaagtagcacttctgcttataagatcctaatgctcatactaacaacctttggatgaaagatgacactcagagagaaagaaaaagatagtggtgagaaacacatccaggttttgcgataagctttggtgttgattctgctgaagaaaagactttgcttgggtctgaccacatcaaatttaccagtacaatcttgtcatggatagtgtggattctctaattcgtgacatatttcatgtaaaatttcctgtgagtttagaggagctaaccatcttatgcttttgttcacatatgaggagtggaacataatgttattgatgtaaattttctgtaagataattttggcacatacgatccgtatctagacaaaagaattttgggacggagggagtacaatttatgtctcccttgcccccccccc

SEQ ID NO: 65823 - protein, 226 aa, Triticum aestivum
  peptide (1)..(226): Ceres Seq. ID no. 12780567
  misc_feature (73)..(225): Pfam Name: ADP-ribosylation factor family Pfam Description: ADP-ribosylation factor family
  misc_feature (70)..(225): Homolog of NCBI NO: 17551730 NR Description: ADP-Ribosylation Factor related ARF-1 (20.5 kD)
  misc_feature (70)..(225): Homolog of NCBI NO: 39584902 NR Description: Hypothetical protein CBG09004 [Caenorhabditis
  misc_feature (15)..(225): Homolog of NCBI NO: 34909214 NR Description: putative ADP-ribosylation factor
  misc_feature (70)..(225): Homolog of NCBI NO: 17136866 NR Description: ADP ribosylation factor 79F CG8385-PB
  misc_feature (70)..(225): Homolog of NCBI NO: 3182915 NR Description: ADP-RIBOSYLATION FACTOR
  misc_feature (70)..(225): Homolog of NCBI NO: 461532 NR Description: ADP-RIBOSYLATION FACTOR
  misc_feature (70)..(225): Homolog of NCBI NO: 34897926 NR Description: Similar to Drosophila melanogaster
  misc_feature (70)..(225): Homolog of NCBI NO: 15228464 NR Description: putative ADP-ribosylation factor
  misc_feature (70)..(225): Homolog of NCBI NO: 15237901 NR Description: ADP-ribosylation factor -like protein
  misc_feature (70)..(225): Homolog of NCBI NO: 37537196 NR Description: putative ADP-ribosylation factor
GRALQRTNKRCFQKKGSSFSTPCIPSHESDGDDDLREKAKRKEGGLERFDGDFGVRPADSQRSADPRRRMGQAFRKLFDAFFGNSEMRVVMLGLDAAGKTTILYKLHIGEVLSTVPTIGFNVEKVQYKNVLFTVWDVGGQEKLRPLWRHYFNNTDGLIYVVDSLDRERIGKAKAEFQTIINDPFMLNSVILVFANKQDMKGAMTPMEVCEGLGLYDLKNRVWHIQV

SEQ ID NO: 65824 - protein, 157 aa, Triticum aestivum
  peptide (1)..(157): Ceres Seq. ID no. 12780568
  misc_feature (4)..(156): Pfam Name: ADP-ribosylation factor family Pfam Description: ADP-ribosylation factor family
  misc_feature (1)..(156): Homolog of NCBI NO: 17551730 NR Description: ADP-Ribosylation Factor related ARF-1 (20.5 kD)
  misc_feature (1)..(156): Homolog of NCBI NO: 39584902 NR Description: Hypothetical protein CBG09004 [Caenorhabditis
  misc_feature (1)..(156): Homolog of NCBI NO: 34909214 NR Description: putative ADP-ribosylation factor
  misc_feature (1)..(156): Homolog of NCBI NO: 17136866 NR Description: ADP ribosylation factor 79F CG8385-PB
  misc_feature (1)..(156): Homolog of NCBI NO: 3182915 NR Description: ADP-RIBOSYLATION FACTOR
  misc_feature (1)..(156): Homolog of NCBI NO: 461532 NR Description: ADP-RIBOSYLATION FACTOR
  misc_feature (1)..(156): Homolog of NCBI NO: 34897926 NR Description: Similar to Drosophila melanogaster
  misc_feature (1)..(156): Homolog of NCBI NO: 15228464 NR Description: putative ADP-ribosylation factor
  misc_feature (1)..(156): Homolog of NCBI NO: 15237901 NR Description: ADP-ribosylation factor -like protein
  misc_feature (1)..(156): Homolog of NCBI NO: 37537196 NR Description: putative ADP-ribosylation factor
MGQAFRKLFDAFFGNSEMRVVMLGLDAAGKTTILYKLHIGEVLSTVPTIGFNVEKVQYKNVLFTVWDVGGQEKLRPLWRHYFNNTDGLIYVVDSLDRERIGKAKAEFQTIINDPFMLNSVILVFANKQDMKGAMTPMEVCEGLGLYDLKNRVWHIQV

SEQ ID NO: 65825 - protein, 140 aa, Triticum aestivum
  peptide (1)..(140): Ceres Seq. ID no. 12780569
  misc_feature (1)..(139): Pfam Name: ADP-ribosylation factor family Pfam Description: ADP-ribosylation factor family
  misc_feature (1)..(139): Homolog of NCBI NO: 17551730 NR Description: ADP-Ribosylation Factor related ARF-1 (20.5 kD)
  misc_feature (1)..(139): Homolog of NCBI NO: 39584902 NR Description: Hypothetical protein CBG09004 [Caenorhabditis
  misc_feature (1)..(139): Homolog of NCBI NO: 34909214 NR Description: putative ADP-ribosylation factor
  misc_feature (1)..(139): Homolog of NCBI NO: 17136866 NR Description: ADP ribosylation factor 79F CG8385-PB
  misc_feature (1)..(139): Homolog of NCBI NO: 3182915 NR Description: ADP-RIBOSYLATION FACTOR
  misc_feature (1)..(139): Homolog of NCBI NO: 461532 NR Description: ADP-RIBOSYLATION FACTOR
  misc_feature (1)..(139): Homolog of NCBI NO: 34897926 NR Description: Similar to Drosophila melanogaster
  misc_feature (1)..(139): Homolog of NCBI NO: 15228464 NR Description: putative ADP-ribosylation factor
  misc_feature (1)..(139): Homolog of NCBI NO: 15237901 NR Description: ADP-ribosylation factor -like protein
  misc_feature (1)..(139): Homolog of NCBI NO: 37537196 NR Description: putative ADP-ribosylation factor
MRVVMLGLDAAGKTTILYKLHIGEVLSTVPTIGFNVEKVQYKNVLFTVWDVGGQEKLRPLWRHYFNNTDGLIYVVDSLDRERIGKAKAEFQTIINDPFMLNSVILVFANKQDMKGAMTPMEVCEGLGLYDLKNRVWHIQV

SEQ ID NO: 65826 - DNA, 1766 bp, Triticum aestivum
  misc_feature (1)..(1766): Ceres Seq. ID no. 14308027
cacaactcacaacttgcaaacacacgaagcgaaattccttagctccgacccagagtcgccagggagagcgcaaatggaggacaccttcatcacggtctgcctcgccgtagctctcgtttcgctgctcatcatgattgcgggccgccggcgctggggggcgcgtggcgacggcctgcgtatggcgcctgggccgtggcagctgccggtgatcggcagcctgcaccacctcgtcctggccgggcagctccctcaccgcgcgatgcgcgacctggcgcgacgctacgggccggccgtgctgctccagctcggccaggtgaagacgctggtggtgtcctctcgggagggggcgcgcgaggtgatgaagaaccacgacaccatgttcgccacgcggccgctgagcaccaccatgcgcgtgctctcctacggcggccaggacatcgtcttcgcgccctacggagaatactggcgccagctccgcaagatcgccgtgtccgagctcttcaccgcgcgccgcgtcctctccttccgcgccatccgcgaggaggaggtcgccacggcgctccgcgtcgtcggcgaggctgcggcggcggcgcgccccgtggagatgcgcgcggtgctatccacgctcgtgacggacagcacggcgcgcgccgtcataggcgaccggtgcagggagcgcgacgcgttcctccgggagctcgaccgcatcgtgcagctcgcgtcggggttcaacctggccgacatgtggccgtcgtcgcagcttgcggcgtggctcagtggagccgaggagtgccgccacaccctgtacaccatgctcgacggcatcgttgaggagcacctggagaggacggacggcggcggaggccacgccgaggacttgctcgacgtgctgctcaagatccagaaggagggtggtctcaagtttcccatccacatggacgccgtcaaagccatcatcttggacgtattctctgccggcagtgaaacaacaactacgacaattgagtgggccatatcagagctgatcaacaacccgatggccatgcagaaggcgacagatgaggtgcgacaagccttccatgctagtggaaccgtgtccgagcacgccctaagcgagctcccatacctgcgcttggtcatccgagagacgctgcggctacacccgcccctgccgttgttgttccgcgagtgccaggaaccgtgccaagtgcagggatacgacgtgcagcggggcacgcaggtgttggtcaatgcttgggcgctaggccgcgacgagcgctattggcccgacgcgcctgaggagttccggccggaacggttcgaggaagaagcagcaaaggcagactttgggggtggtgactttgcgttcttgccgtttggcgccggccgcaggatgtgccctgggatggcgtttggcctcgccggcgtcgagctcccgcttgcaagcatgctcttccactttgactggaagccaccagggccaggctcggcggagctcgacatgacagagacgttcggcctcaccgcacggcggacagaccagctcctgttgcgccctgtccttcgcgtacctattcccggagtctagtcaatatataaactataagaaatggaggtataatgtaaaactatacttgtacccacatagaaaataaattgcaaagttctacgactgttgcataacatcattagtattgtgcaataactagcgtagtggggctagatcaatatgtggttcctgaatatattgtaaacctatttgaaat

SEQ ID NO: 65827 - protein, 528 aa, Triticum aestivum
  peptide (1)..(528): Ceres Seq. ID no. 14308028
  misc_feature (62)..(359): Pfam Name: Cytochrome P450 Pfam Description: Cytochrome P450
  misc_feature (39)..(517): Homolog of NCBI NO: 5915836 NR Description: Cytochrome P450 71D7
  misc_feature (25)..(523): Homolog of NCBI NO: 38345354 NR Description: OSJNBa0032I19.6 [Oryza sativa (japonica
  misc_feature (29)..(517): Homolog of NCBI NO: 12331298 NR Description: cytochrome P450 [Solanum tuberosum]
  misc_feature (273)..(518): Homolog of NCBI NO: 34905742 NR Description: putative cytochrome P450 [Oryza sativa (japonica
  misc_feature (23)..(288): Homolog of NCBI NO: 34905742 NR Description: putative cytochrome P450 [Oryza sativa (japonica
  misc_feature (321)..(521): Homolog of NCBI NO: 37531530 NR Description: putative cytochrome P450 [Oryza sativa (japonica
  misc_feature (34)..(359): Homolog of NCBI NO: 37531530 NR Description: putative cytochrome P450 [Oryza sativa (japonica
  misc_feature (34)..(525): Homolog of NCBI NO: 34914838 NR Description: putative cytochrome P450 [Oryza sativa (japonica
  misc_feature (30)..(527): Homolog of NCBI NO: 34896754 NR Description: putative cytochrome P450 [Oryza sativa (japonica
  misc_feature (25)..(524): Homolog of NCBI NO: 34897000 NR Description: putative cytochrome P450 [Oryza sativa (japonica
TTHNLQTHEAKFLSSDPESPGRAQMEDTFITVCLAVALVSLLIMIAGRRRWGARGDGLRMAPGPWQLPVIGSLHHLVLAGQLPHRAMRDLARRYGPAVLLQLGQVKTLVVSSREGAREVMKNHDTMFATRPLSTTMRVLSYGGQDIVFAPYGEYWRQLRKIAVSELFTARRVLSFRAIREEEVATALRVVGEAAAAARPVEMRAVLSTLVTDSTARAVIGDRCRERDAFLRELDRIVQLASGFNLADMWPSSQLAAWLSGAEECRHTLYTMLDGIVEEHLERTDGGGGHAEDLLDVLLKIQKEGGLKFPIHMDAVKAIILDVFSAGSETTTTTIEWAISELINNPMAMQKATDEVRQAFHASGTVSEHALSELPYLRLVIRETLRLHPPLPLLFRECQEPCQVQGYDVQRGTQVLVNAWALGRDERYWPDAPEEFRPERFEEEAAKADFGGGDFAFLPFGAGRRMCPGMAFGLAGVELPLASMLFHFDWKPPGPGSAELDMTETFGLTARRTDQLLLRPVLRVPIPGV

SEQ ID NO: 65828 - protein, 504 aa, Triticum aestivum
  peptide (1)..(504): Ceres Seq. ID no. 14308029
  misc_feature (38)..(335): Pfam Name: Cytochrome P450 Pfam Description: Cytochrome P450
  misc_feature (15)..(493): Homolog of NCBI NO: 5915836 NR Description: Cytochrome P450 71D7
  misc_feature (1)..(499): Homolog of NCBI NO: 38345354 NR Description: OSJNBa0032I19.6 [Oryza sativa (japonica
  misc_feature (5)..(493): Homolog of NCBI NO: 12331298 NR Description: cytochrome P450 [Solanum tuberosum]
  misc_feature (249)..(494): Homolog of NCBI NO: 34905742 NR Description: putative cytochrome P450 [Oryza sativa (japonica
  misc_feature (1)..(264): Homolog of NCBI NO: 34905742 NR Description: putative cytochrome P450 [Oryza sativa (japonica
  misc_feature (297)..(497): Homolog of NCBI NO: 37531530 NR Description: putative cytochrome P450 [Oryza sativa (japonica
  misc_feature (10)..(335): Homolog of NCBI NO: 37531530 NR Description: putative cytochrome P450 [Oryza sativa (japonica
  misc_feature (10)..(501): Homolog of NCBI NO: 34914838 NR Description: putative cytochrome P450 [Oryza sativa (japonica
  misc_feature (6)..(503): Homolog of NCBI NO: 34896754 NR Description: putative cytochrome P450 [Oryza sativa (japonica
  misc_feature (1)..(500): Homolog of NCBI NO: 34897000 NR Description: putative cytochrome P450 [Oryza sativa (japonica
MEDTFITVCLAVALVSLLIMIAGRRRWGARGDGLRMAPGPWQLPVIGSLHHLVLAGQLPHRAMRDLARRYGPAVLLQLGQVKTLVVSSREGAREVMKNHDTMFATRPLSTTMRVLSYGGQDIVFAPYGEYWRQLRKIAVSELFTARRVLSFRAIREEEVATALRVVGEAAAAARPVEMRAVLSTLVTDSTARAVIGDRCRERDAFLRELDRIVQLASGFNLADMWPSSQLAAWLSGAEECRHTLYTMLDGIVEEHLERTDGGGGHAEDLLDVLLKIQKEGGLKFPIHMDAVKAIILDVFSAGSETTTTTIEWAISELINNPMAMQKATDEVRQAFHASGTVSEHALSELPYLRLVIRETLRLHPPLPLLFRECQEPCQVQGYDVQRGTQVLVNAWALGRDERYWPDAPEEFRPERFEEEAAKADFGGGDFAFLPFGAGRRMCPGMAFGLAGVELPLASMLFHFDWKPPGPGSAELDMTETFGLTARRTDQLLLRPVLRVPIPGV

SEQ ID NO: 65829 - protein, 485 aa, Triticum aestivum
  peptide (1)..(485): Ceres Seq. ID no. 14308030
  misc_feature (19)..(316): Pfam Name: Cytochrome P450 Pfam Description: Cytochrome P450
  misc_feature (1)..(474): Homolog of NCBI NO: 5915836 NR Description: Cytochrome P450 71D7
  misc_feature (1)..(480): Homolog of NCBI NO: 38345354 NR Description: OSJNBa0032I19.6 [Oryza sativa (japonica
  misc_feature (1)..(474): Homolog of NCBI NO: 12331298 NR Description: cytochrome P450 [Solanum tuberosum]
  misc_feature (230)..(475): Homolog of NCBI NO: 34905742 NR Description: putative cytochrome P450 [Oryza sativa (japonica
  misc_feature (1)..(245): Homolog of NCBI NO: 34905742 NR Description: putative cytochrome P450 [Oryza sativa (japonica
  misc_feature (278)..(478): Homolog of NCBI NO: 37531530 NR Description: putative cytochrome P450 [Oryza sativa (japonica
  misc_feature (1)..(316): Homolog of NCBI NO: 37531530 NR Description: putative cytochrome P450 [Oryza sativa (japonica
  misc_feature (1)..(482): Homolog of NCBI NO: 34914838 NR Description: putative cytochrome P450 [Oryza sativa (japonica
  misc_feature (1)..(484): Homolog of NCBI NO: 34896754 NR Description: putative cytochrome P450 [Oryza sativa (japonica
  misc_feature (1)..(481): Homolog of NCBI NO: 34897000 NR Description: putative cytochrome P450 [Oryza sativa (japonica
MIAGRRRWGARGDGLRMAPGPWQLPVIGSLHHLVLAGQLPHRAMRDLARRYGPAVLLQLGQVKTLVVSSREGAREVMKNHDTMFATRPLSTTMRVLSYGGQDIVFAPYGEYWRQLRKIAVSELFTARRVLSFRAIREEEVATALRVVGEAAAAARPVEMRAVLSTLVTDSTARAVIGDRCRERDAFLRELDRIVQLASGFNLADMWPSSQLAAWLSGAEECRHTLYTMLDGIVEEHLERTDGGGGHAEDLLDVLLKIQKEGGLKFPIHMDAVKAIILDVFSAGSETTTTTIEWAISELINNPMAMQKATDEVRQAFHASGTVSEHALSELPYLRLVIRETLRLHPPLPLLFRECQEPCQVQGYDVQRGTQVLVNAWALGRDERYWPDAPEEFRPERFEEEAAKADFGGGDFAFLPFGAGRRMCPGMAFGLAGVELPLASMLFHFDWKPPGPGSAELDMTETFGLTARRTDQLLLRPVLRVPIPGV

SEQ ID NO: 65830 - DNA, 1434 bp, Triticum aestivum
  misc_feature (1)..(1434): Ceres Seq. ID no. 14302355
gaaccttccagaccgctcccgcgccccctcccctatttatcccctcaccccctcccccattcaccaccatctccacaccacacctcactcgcccacaatctcgaacaacggccgtcggatccatcatcatcggcagcggagcgattccatcgaccagctttctacagacggacatggggatgccggccgtgaggaggagggagagggacgcggaggcggagctcaacctgccccccggcttccgcttccaccccaccgacgacgagctcgtcgagcactacctctgccgcaaggcggcggggcagcgcctcccggtccccatcatcgtcgaggtcgacctctaccgcttcgacccctgggcgctccctgaccgcgccctcttcggcacccgcgagtggtacttcttcaccccccgcgaccgcaagtaccccaacggctcccgacccaaccgcgccgccggcaacggctactggaaggccaccggcgccgacaagcccgtcgcgccccgcggcgggcggaccatggggatcaagaaggccctcgtgttttacgcgggcaaggcgcctaagggggtcaagaccgactggatcatgcatgagtatcgcctcgccgacgccggccgcgccgccgccagcaagaagggctcgctcaggctggacgactgggtgctctgccggctctacaacaagaagaacgagtgggagaagatgcagctgcagcagcaaggggaagaggagacgatgatggagcccaaggcggagaacacggcctccgacatggtggtcacctcgcactcccactcgcagtcccagtcgcactcgcactcgtggggcgaggcgcgcacgccggagtcggagatcgtcgacaacgacccgtcgctgttccagcaggcgacggcggcggcgttccaggcccagagccccgcggccgccgcggcgcaccaggagatgatggccacgctgatggtgcccaagaaggaggcggcggacgaggccggcaggaacgacctcttcgtcgacctcagctacgacgacatccagagcatgtacaacggcctcgacatgatgccgcccggggacgacctgctctactcctccctcttcgcctccccccgtgtccgcgggagccagcccagcgccggcggcatgccggccccgttctaagcagagcaaagacagagaccgtcagagaccccgagatcgacagaagtggaatggacgacttcttggccgcgagcgagcgagaccgcggtgcagtgtaaatacagcataggaaacgggagggagggaggtggcgtcgtgtcgagagaagccggcgtcgtgccggggcgtgccgttgtacatggagagcccggcgccggggcctggccggctgggttgattcttttgttcttactaccttgtactctcaatgcggatgtagctctttcttctc

SEQ ID NO: 65831 - protein, 386 aa, Triticum aestivum
  peptide (1)..(386): Ceres Seq. ID no. 14302356
  misc_feature (76)..(203): Pfam Name: No apical meristem (NAM) protein Pfam Description: No apical meristem (NAM) protein
  misc_feature (71)..(291): Homolog of NCBI NO: 31322574 NR Description: NAC-domain protein 5-8 [Brassica napus]
  misc_feature (71)..(291): Homolog of NCBI NO: 31322572 NR Description: NAC-domain protein 5-7 [Brassica napus]
  misc_feature (71)..(291): Homolog of NCBI NO: 31322568 NR Description: NAC-domain protein 3 [Brassica napus]
  misc_feature (71)..(291): Homolog of NCBI NO: 22326685 NR Description: No apical meristem (NAM) protein family
  misc_feature (72)..(241): Homolog of NCBI NO: 21105748 NR Description: nam-like protein 10 [Petunia x hybrida]
  misc_feature (71)..(290): Homolog of NCBI NO: 31322570 NR Description: NAC-domain protein 5-1 [Brassica napus]
  misc_feature (58)..(257): Homolog of NCBI NO: 4218535 NR Description: GRAB1 protein [Triticum sp.]
  misc_feature (60)..(290): Homolog of NCBI NO: 34900404 NR Description: OsNAC3 protein [Oryza sativa (japonica
  misc_feature (68)..(241): Homolog of NCBI NO: 34909234 NR Description: development regulation gene OsNAC4
  misc_feature (58)..(386): Homolog of NCBI NO: 40786563 NR Description: putative NAC-domain protein
TFQTAPAPPPLFIPSPPPPFTTISTPHLTRPQSRTTAVGSIIIGSGAIPSTSFLQTDMGMPAVRRRERDAEAELNLPPGFRFHPTDDELVEHYLCRKAAGQRLPVPIIVEVDLYRFDPWALPDRALFGTREWYFFTPRDRKYPNGSRPNRAAGNGYWKATGADKPVAPRGGRTMGIKKALVFYAGKAPKGVKTDWIMHEYRLADAGRAAASKKGSLRLDDWVLCRLYNKKNEWEKMQLQQQGEEETMMEPKAENTASDMVVTSHSHSQSQSHSHSWGEARTPESEIVDNDPSLFQQATAAAFQAQSPAAAAAHQEMMATLMVPKKEAADEAGRNDLFVDLSYDDIQSMYNGLDMMPPGDDLLYSSLFASPRVRGSQPSAGGMPAPF

SEQ ID NO: 65832 - protein, 329 aa, Triticum aestivum
  peptide (1)..(329): Ceres Seq. ID no. 14302357
  misc_feature (19)..(146): Pfam Name: No apical meristem (NAM) protein Pfam Description: No apical meristem (NAM) protein
  misc_feature (14)..(234): Homolog of NCBI NO: 31322574 NR Description: NAC-domain protein 5-8 [Brassica napus]
  misc_feature (14)..(234): Homolog of NCBI NO: 31322572 NR Description: NAC-domain protein 5-7 [Brassica napus]
  misc_feature (14)..(234): Homolog of NCBI NO: 31322568 NR Description: NAC-domain protein 3 [Brassica napus]
  misc_feature (14)..(234): Homolog of NCBI NO: 22326685 NR Description: No apical meristem (NAM) protein family
  misc_feature (15)..(184): Homolog of NCBI NO: 21105748 NR Description: nam-like protein 10 [Petunia x hybrida]
  misc_feature (14)..(233): Homolog of NCBI NO: 31322570 NR Description: NAC-domain protein 5-1 [Brassica napus]
  misc_feature (1)..(200): Homolog of NCBI NO: 4218535 NR Description: GRAB1 protein [Triticum sp.]
  misc_feature (3)..(233): Homolog of NCBI NO: 34900404 NR Description: OsNAC3 protein [Oryza sativa (japonica
  misc_feature (11)..(184): Homolog of NCBI NO: 34909234 NR Description: development regulation gene OsNAC4
  misc_feature (1)..(329): Homolog of NCBI NO: 40786563 NR Description: putative NAC-domain protein
MGMPAVRRRERDAEAELNLPPGFRFHPTDDELVEHYLCRKAAGQRLPVPIIVEVDLYRFDPWALPDRALFGTREWYFFTPRDRKYPNGSRPNRAAGNGYWKATGADKPVAPRGGRTMGIKKALVFYAGKAPKGVKTDWIMHEYRLADAGRAAASKKGSLRLDDWVLCRLYNKKNEWEKMQLQQQGEEETMMEPKAENTASDMVVTSHSHSQSQSHSHSWGEARTPESEIVDNDPSLFQQATAAAFQAQSPAAAAAHQEMMATLMVPKKEAADEAGRNDLFVDLSYDDIQSMYNGLDMMPPGDDLLYSSLFASPRVRGSQPSAGGMPAPF

SEQ ID NO: 65833 - protein, 327 aa, Triticum aestivum
  peptide (1)..(327): Ceres Seq. ID no. 14302358
  misc_feature (17)..(144): Pfam Name: No apical meristem (NAM) protein Pfam Description: No apical meristem (NAM) protein
  misc_feature (12)..(232): Homolog of NCBI NO: 31322574 NR Description: NAC-domain protein 5-8 [Brassica napus]
  misc_feature (12)..(232): Homolog of NCBI NO: 31322572 NR Description: NAC-domain protein 5-7 [Brassica napus]
  misc_feature (12)..(232): Homolog of NCBI NO: 31322568 NR Description: NAC-domain protein 3 [Brassica napus]
  misc_feature (12)..(232): Homolog of NCBI NO: 22326685 NR Description: No apical meristem (NAM) protein family
  misc_feature (13)..(182): Homolog of NCBI NO: 21105748 NR Description: nam-like protein 10 [Petunia x hybrida]
  misc_feature (12)..(231): Homolog of NCBI NO: 31322570 NR Description: NAC-domain protein 5-1 [Brassica napus]
  misc_feature (1)..(198): Homolog of NCBI NO: 4218535 NR Description: GRAB1 protein [Triticum sp.]
  misc_feature (1)..(231): Homolog of NCBI NO: 34900404 NR Description: OsNAC3 protein [Oryza sativa (japonica
  misc_feature (9)..(182): Homolog of NCBI NO: 34909234 NR Description: development regulation gene OsNAC4
  misc_feature (1)..(327): Homolog of NCBI NO: 40786563 NR Description: putative NAC-domain protein
MPAVRRRERDAEAELNLPPGFRFHPTDDELVEHYLCRKAAGQRLPVPIIVEVDLYRFDPWALPDRALFGTREWYFFTPRDRKYPNGSRPNRAAGNGYWKATGADKPVAPRGGRTMGIKKALVFYAGKAPKGVKTDWIMHEYRLADAGRAAASKKGSLRLDDWVLCRLYNKKNEWEKMQLQQQGEEETMMEPKAENTASDMVVTSHSHSQSQSHSHSWGEARTPESEIVDNDPSLFQQATAAAFQAQSPAAAAAHQEMMATLMVPKKEAADEAGRNDLFVDLSYDDIQSMYNGLDMMPPGDDLLYSSLFASPRVRGSQPSAGGMPAPF

SEQ ID NO: 65834 - DNA, 1292 bp, Triticum aestivum
  misc_feature (1)..(1292): Ceres Seq. ID no. 13656671
ctcgcgggtccggtccacaatttttttcctcgcataaatcatcctccgtcaccggcggggcgagggagacgcggtcggcgggcgagacgccagagacaaacccaacggagtttcccccccctgccgccgaccccaaaccctagccgctcctaccagccccagcctctcctaccgaccccagccagccgcgccggaattctcctgggtgttctattggcttttctcaagcctgtagcttcatcgcggcagcatgagctctgctggttctgcaagggttccaaagaggagacggactaccaagacgtcggaggctgcagaccggcaacttcaggagcgacagtttctggacctaaacttgtttccagctgttgaagtagccagcactgggggttcactctccatcaatgagcctgtctcacacaggcagccccctcctacggtggctgccctgctttacgagaccacacaggtcatggtgtcatctgctgctgcagagtcaaacattggcatgaatagtttccccatcaacgtggaagtgattgatgatgatgttgtgatttatacctcagggccgccccctcaagctaggcaacagtcgtccaggacaggacctatcactgtgataatagatgatgattctgaaactactgctggaccagcaggggaaggtcttgatgagcatgtgaacactctgctgtctctggggatgaaccctaggcacaatccctcgagagcacaacccaacaccgaccttgtaataaacatagtagacacacctgaaaccaacagcataccgcccaaggtggcgcaggctgtccctgaacctgtgaaggagatcccaaaggaaacaaagttcagctgcccagtctgcatgaatgagctggtcaatgcatcatcgaccatctgcggccacatcttctgccagaaatgcatcaaggcctccattcaggctcagaagaagtgccctacctgccggaggaagctgaccatgagcaacttccaccgggtctacctcccgacggcagataattaaacctatccgcaatacttggagctttagagccgtggcagctgtgacccttttttggcactggcattgtggtgattgtatctgagctattcttcacagggtcatcatgaacattcagttttccccccaacaatttaacaagtgctcgagacgtgattaccaatctgcatacctggtggtagtggacactgttagtagtcttccttgtgggaaagtggaaacctgtgcttggtactgtgagattaatgcttgaaaatatttg

SEQ ID NO: 65835 - protein, 260 aa, Triticum aestivum
  peptide (1)..(260): Ceres Seq. ID no. 13656672
  misc_feature (208)..(241): Pfam Name: Zinc finger, C3HC4 type (RING finger) Pfam Description: Zinc finger, C3HC4 type (RING finger)
  misc_feature (203)..(255): Homolog of NCBI NO: 4506561 NR Description: ring finger protein 4 [Homo sapiens]
  misc_feature (155)..(255): Homolog of NCBI NO: 33859620 NR Description: ring finger protein 4 [Mus musculus]
  misc_feature (95)..(255): Homolog of NCBI NO: 21357313 NR Description: CG10981-PA [Drosophila melanogaster]
  misc_feature (95)..(255): Homolog of NCBI NO: 24644441 NR Description: CG10981-PB [Drosophila melanogaster]
  misc_feature (92)..(257): Homolog of NCBI NO: 21954077 NR Description: unknown protein [Arabidopsis thaliana]
  misc_feature (92)..(257): Homolog of NCBI NO: 18422940 NR Description: zinc finger (C3HC4-type RING finger) protein
  misc_feature (92)..(257): Homolog of NCBI NO: 21537318 NR Description: unknown [Arabidopsis thaliana]
  misc_feature (173)..(257): Homolog of NCBI NO: 26451887 NR Description: putative RING finger protein [Arabidopsis
  misc_feature (173)..(257): Homolog of NCBI NO: 15231414 NR Description: RING zinc finger protein -related [Arabidopsis
  misc_feature (208)..(259): Homolog of NCBI NO: 19386727 NR Description: P0678F11.16 [Oryza sativa (japonica
MSSAGSARVPKRRRTTKTSEAADRQLQERQFLDLNLFPAVEVASTGGSLSINEPVSHRQPPPTVAALLYETTQVMVSSAAAESNIGMNSFPINVEVIDDDVVIYTSGPPPQARQQSSRTGPITVIIDDDSETTAGPAGEGLDEHVNTLLSLGMNPRHNPSRAQPNTDLVINIVDTPETNSIPPKVAQAVPEPVKEIPKETKFSCPVCMNELVNASSTICGHIFCQKCIKASIQAQKKCPTCRRKLTMSNFHRVYLPTADN

SEQ ID NO: 65836 - protein, 186 aa, Triticum aestivum
  peptide (1)..(186): Ceres Seq. ID no. 13656673
  misc_feature (134)..(167): Pfam Name: Zinc finger, C3HC4 type (RING finger) Pfam Description: Zinc finger, C3HC4 type (RING finger)
  misc_feature (129)..(181): Homolog of NCBI NO: 4506561 NR Description: ring finger protein 4 [Homo sapiens]
  misc_feature (81)..(181): Homolog of NCBI NO: 33859620 NR Description: ring finger protein 4 [Mus musculus]
  misc_feature (21)..(181): Homolog of NCBI NO: 21357313 NR Description: CG10981-PA [Drosophila melanogaster]
  misc_feature (21)..(181): Homolog of NCBI NO: 24644441 NR Description: CG10981-PB [Drosophila melanogaster]
  misc_feature (18)..(183): Homolog of NCBI NO: 21954077 NR Description: unknown protein [Arabidopsis thaliana]
  misc_feature (18)..(183): Homolog of NCBI NO: 18422940 NR Description: zinc finger (C3HC4-type RING finger) protein
  misc_feature (18)..(183): Homolog of NCBI NO: 21537318 NR Description: unknown [Arabidopsis thaliana]
  misc_feature (99)..(183): Homolog of NCBI NO: 26451887 NR Description: putative RING finger protein [Arabidopsis
  misc_feature (99)..(183): Homolog of NCBI NO: 15231414 NR Description: RING zinc finger protein -related [Arabidopsis
  misc_feature (134)..(185): Homolog of NCBI NO: 19386727 NR Description: P0678F11.16 [Oryza sativa (japonica
MVSSAAAESNIGMNSFPINVEVIDDDVVIYTSGPPPQARQQSSRTGPITVIIDDDSETTAGPAGEGLDEHVNTLLSLGMNPRHNPSRAQPNTDLVINIVDTPETNSIPPKVAQAVPEPVKEIPKETKFSCPVCMNELVNASSTICGHIFCQKCIKASIQAQKKCPTCRRKLTMSNFHRVYLPTADN

SEQ ID NO: 65837 - protein, 174 aa, Triticum aestivum
  peptide (1)..(174): Ceres Seq. ID no. 13656674
  misc_feature (122)..(155): Pfam Name: Zinc finger, C3HC4 type (RING finger) Pfam Description: Zinc finger, C3HC4 type (RING finger)
  misc_feature (117)..(169): Homolog of NCBI NO: 4506561 NR Description: ring finger protein 4 [Homo sapiens]
  misc_feature (69)..(169): Homolog of NCBI NO: 33859620 NR Description: ring finger protein 4 [Mus musculus]
  misc_feature (9)..(169): Homolog of NCBI NO: 21357313 NR Description: CG10981-PA [Drosophila melanogaster]
  misc_feature (9)..(169): Homolog of NCBI NO: 24644441 NR Description: CG10981-PB [Drosophila melanogaster]
  misc_feature (6)..(171): Homolog of NCBI NO: 21954077 NR Description: unknown protein [Arabidopsis thaliana]
  misc_feature (6)..(171): Homolog of NCBI NO: 18422940 NR Description: zinc finger (C3HC4-type RING finger) protein
  misc_feature (6)..(171): Homolog of NCBI NO: 21537318 NR Description: unknown [Arabidopsis thaliana]
  misc_feature (87)..(171): Homolog of NCBI NO: 26451887 NR Description: putative RING finger protein [Arabidopsis
  misc_feature (87)..(171): Homolog of NCBI NO: 15231414 NR Description: RING zinc finger protein -related [Arabidopsis
  misc_feature (122)..(173): Homolog of NCBI NO: 19386727 NR Description: P0678F11.16 [Oryza sativa (japonica
MNSFPINVEVIDDDVVIYTSGPPPQARQQSSRTGPITVIIDDDSETTAGPAGEGLDEHVNTLLSLGMNPRHNPSRAQPNTDLVINIVDTPETNSIPPKVAQAVPEPVKEIPKETKFSCPVCMNELVNASSTICGHIFCQKCIKASIQAQKKCPTCRRKLTMSNFHRVYLPTADN

SEQ ID NO: 65838 - DNA, 2057 bp, Triticum aestivum
  misc_feature (1)..(2057): Ceres Seq. ID no. 15176081
aaactccacatttccggaggaggcgagccaaaaggacacacagcagccacaacccaattcctatttttttcctggccgccgccgccgcagcttttgtttgatttatatagcccacacacggggcagcgccgagcagagctcctcctccatcctcctctgcatctccgccctcggccacaggaaacagcggcaggcaggaagacacgcacgcacgcacgcacccatggctgcggacagcaagctgcagagcccgctgctgccgccgccggccggtagcgagggcggcggcgacgacgaggggcacggggcggccagcaagcggctggagagcatcctgagtgacgagtcggtgccgtgggcgcggcggatgtgcgcggcgacggcggtggagatgcggatgctggtgcggctggcggcgccggccgtgctggtgtacatgatcaactacctcatgtccatgtccacgcagatcttctccggccacctcggcacgctggagctcgccgccgcctccctcggcaacaccggcatccaggtcttcgcctacggcctcatgcttggcatggggagtgcggtggagactctatgtgggcaggcgtacggcgcgaacaagttcgacatgctgggcatctacatgcaacgttccactgtcctgctcatggccaccggcatcccgctcgccgtcctctacgcgttctcccgccccatcctcatcctcctcggcgagtcccccgagatagccagcgccgcggccatctgcgtgtacggcctcatcccgcagatctttgcctacgccgccaacttccccatccagaagttcatgcaggcgcagagcatcatggcgcccagcgcctacatctcaacggccacgctcgccgtccacctcgtcctcagctacctcgtcgtctacaagtttgggctggggcttctgggcgcctcgctcatgctcagcatcagctggtggattatcgtcattgggcagtttgtatacatcgtcaccagcagccggtgccgcctcacttggactggattctccctccaggcgttctccggcttgcctgagtttttcaagctgtcccttgcctccgctatcatgctctgcctcgagacttggtacttccagatactggtgctcattgctggcctcctcaaggaccccgaaatggctctcgcatcgctctctgtctgcatgaccatttcaggatgggtgttcatgatctcagttggattcaatgcagcagctagcgtgagggtgagcaatgagcttggagccggcaaccccaagtcagcggcgttctcggtggtggtggtgacggtgctgtcgttcatcttggcggcgataatctcgatagtcatcctgttcttccgtgactacatcagttacatttacacggggggcgacgatgtggcagcggcggtgtccaagctgacgcctctcctggcgatcaccctcatcctcaacggcatccagccagtattatcaggggtggccgtggggtgtgggtggcaagcgttcgtcgcctacgtcaacgtcggctgctactacgtcgtcggcatccctcttggctgcctcctcggcttctacttcgaccttggtgcggcgggcatatggagcggcatgattggaggcacctttatgcagaccgtgatcctggtgtgggttaccgtgaggaccgactggaacaaagaggtggccgaagcgaggaaaagattgaacaagtgggaaggcaacaagatgcctctattagcaggccaagaatgaaacggtggatcctgtatatgatcaacagaaatgtggttcgttcgcaagttgatctccctaaaatgtgtaaagtgcatttgttcatcgtgcaattcaccattgaaattccgtacttccgttctgctattccggcttcgcaagcacggtagcagcggcgatcttgtcatgttactactagctagtataacgggattctatggcgatgatagattagtgtgggtggatgagatcactttttgtgtgagatatcaatattgttggacagcggtcaataaaagttcatcctttggtcttc

SEQ ID NO: 65839 - protein, 586 aa, Triticum aestivum
  peptide (1)..(586): Ceres Seq. ID no. 15176082
  misc_feature (140)..(300): Pfam Name: MatE Pfam Description: MatE
  misc_feature (151)..(573): Homolog of NCBI NO: 15234633 NR Description: MATE efflux protein family [Arabidopsis thaliana]
  misc_feature (123)..(532): Homolog of NCBI NO: 34901880 NR Description: putative Multidrug resistance protein norM
  misc_feature (81)..(581): Homolog of NCBI NO: 21553843 NR Description: unknown [Arabidopsis thaliana]
  misc_feature (81)..(581): Homolog of NCBI NO: 18415793 NR Description: MATE efflux protein family [Arabidopsis thaliana]
  misc_feature (107)..(582): Homolog of NCBI NO: 15081773 NR Description: At1g61890/F8K4_9 [Arabidopsis thaliana]
  misc_feature (107)..(582): Homolog of NCBI NO: 18407368 NR Description: MATE efflux protein family [Arabidopsis thaliana]
  misc_feature (104)..(582): Homolog of NCBI NO: 22655139 NR Description: unknown protein [Arabidopsis thaliana]
  misc_feature (104)..(582): Homolog of NCBI NO: 15221073 NR Description: MATE efflux protein family [Arabidopsis thaliana]
  misc_feature (108)..(582): Homolog of NCBI NO: 20466556 NR Description: integral membrane protein, putative [Arabidopsis
  misc_feature (108)..(582): Homolog of NCBI NO: 15233127 NR Description: MATE efflux protein family [Arabidopsis thaliana]
NSTFPEEASQKDTQQPQPNSYFFPGRRRRSFCLIYIAHTRGSAEQSSSSILLCISALGHRKQRQAGRHARTHAPMAADSKLQSPLLPPPAGSEGGGDDEGHGAASKRLESILSDESVPWARRMCAATAVEMRMLVRLAAPAVLVYMINYLMSMSTQIFSGHLGTLELAAASLGNTGIQVFAYGLMLGMGSAVETLCGQAYGANKFDMLGIYMQRSTVLLMATGIPLAVLYAFSRPILILLGESPEIASAAAICVYGLIPQIFAYAANFPIQKFMQAQSIMAPSAYISTATLAVHLVLSYLVVYKFGLGLLGASLMLSISWWIIVIGQFVYIVTSSRCRLTWTGFSLQAFSGLPEFFKLSLASAIMLCLETWYFQILVLIAGLLKDPEMALASLSVCMTISGWVFMISVGFNAAASVRVSNELGAGNPKSAAFSVVVVTVLSFILAAIISIVILFFRDYISYIYTGGDDVAAAVSKLTPLLAITLILNGIQPVLSGVAVGCGWQAFVAYVNVGCYYVVGIPLGCLLGFYFDLGAAGIWSGMIGGTFMQTVILVWVTVRTDWNKEVAEARKRLNKWEGNKMPLLAGQE

SEQ ID NO: 65840 - protein, 512 aa, Triticum aestivum
  peptide (1)..(512): Ceres Seq. ID no. 15176083
  misc_feature (66)..(226): Pfam Name: MatE Pfam Description: MatE
  misc_feature (77)..(499): Homolog of NCBI NO: 15234633 NR Description: MATE efflux protein family [Arabidopsis thaliana]
  misc_feature (49)..(458): Homolog of NCBI NO: 34901880 NR Description: putative Multidrug resistance protein norM
  misc_feature (7)..(507): Homolog of NCBI NO: 21553843 NR Description: unknown [Arabidopsis thaliana]
  misc_feature (7)..(507): Homolog of NCBI NO: 18415793 NR Description: MATE efflux protein family [Arabidopsis thaliana]
  misc_feature (33)..(508): Homolog of NCBI NO: 15081773 NR Description: At1g61890/F8K4_9 [Arabidopsis thaliana]
  misc_feature (33)..(508): Homolog of NCBI NO: 18407368 NR Description: MATE efflux protein family [Arabidopsis thaliana]
  misc_feature (30)..(508): Homolog of NCBI NO: 22655139 NR Description: unknown protein [Arabidopsis thaliana]
  misc_feature (30)..(508): Homolog of NCBI NO: 15221073 NR Description: MATE efflux protein family [Arabidopsis thaliana]
  misc_feature (34)..(508): Homolog of NCBI NO: 20466556 NR Description: integral membrane protein, putative [Arabidopsis
  misc_feature (34)..(508): Homolog of NCBI NO: 15233127 NR Description: MATE efflux protein family [Arabidopsis thaliana]
MAADSKLQSPLLPPPAGSEGGGDDEGHGAASKRLESILSDESVPWARRMCAATAVEMRMLVRLAAPAVLVYMINYLMSMSTQIFSGHLGTLELAAASLGNTGIQVFAYGLMLGMGSAVETLCGQAYGANKFDMLGIYMQRSTVLLMATGIPLAVLYAFSRPILILLGESPEIASAAAICVYGLIPQIFAYAANFPIQKFMQAQSIMAPSAYISTATLAVHLVLSYLVVYKFGLGLLGASLMLSISWWIIVIGQFVYIVTSSRCRLTWTGFSLQAFSGLPEFFKLSLASAIMLCLETWYFQILVLIAGLLKDPEMALASLSVCMTISGWVFMISVGFNAAASVRVSNELGAGNPKSAAFSVVVVTVLSFILAAIISIVILFFRDYISYIYTGGDDVAAAVSKLTPLLAITLILNGIQPVLSGVAVGCGWQAFVAYVNVGCYYVVGIPLGCLLGFYFDLGAAGIWSGMIGGTFMQTVILVWVTVRTDWNKEVAEARKRLNKWEGNKMPLLAGQE

SEQ ID NO: 65841 - protein, 464 aa, Triticum aestivum
  peptide (1)..(464): Ceres Seq. ID no. 15176084
  misc_feature (18)..(178): Pfam Name: MatE Pfam Description: MatE
  misc_feature (29)..(451): Homolog of NCBI NO: 15234633 NR Description: MATE efflux protein family [Arabidopsis thaliana]
  misc_feature (1)..(410): Homolog of NCBI NO: 34901880 NR Description: putative Multidrug resistance protein norM
  misc_feature (1)..(459): Homolog of NCBI NO: 21553843 NR Description: unknown [Arabidopsis thaliana]
  misc_feature (1)..(459): Homolog of NCBI NO: 18415793 NR Description: MATE efflux protein family [Arabidopsis thaliana]
  misc_feature (1)..(460): Homolog of NCBI NO: 15081773 NR Description: At1g61890/F8K4_9 [Arabidopsis thaliana]
  misc_feature (1)..(460): Homolog of NCBI NO: 18407368 NR Description: MATE efflux protein family [Arabidopsis thaliana]
  misc_feature (1)..(460): Homolog of NCBI NO: 22655139 NR Description: unknown protein [Arabidopsis thaliana]
  misc_feature (1)..(460): Homolog of NCBI NO: 15221073 NR Description: MATE efflux protein family [Arabidopsis thaliana]
  misc_feature (1)..(460): Homolog of NCBI NO: 20466556 NR Description: integral membrane protein, putative [Arabidopsis
  misc_feature (1)..(460): Homolog of NCBI NO: 15233127 NR Description: MATE efflux protein family [Arabidopsis thaliana]
MCAATAVEMRMLVRLAAPAVLVYMINYLMSMSTQIFSGHLGTLELAAASLGNTGIQVFAYGLMLGMGSAVETLCGQAYGANKFDMLGIYMQRSTVLLMATGIPLAVLYAFSRPILILLGESPEIASAAAICVYGLIPQIFAYAANFPIQKFMQAQSIMAPSAYISTATLAVHLVLSYLVVYKFGLGLLGASLMLSISWWIIVIGQFVYIVTSSRCRLTWTGFSLQAFSGLPEFFKLSLASAIMLCLETWYFQILVLIAGLLKDPEMALASLSVCMTISGWVFMISVGFNAAASVRVSNELGAGNPKSAAFSVVVVTVLSFILAAIISIVILFFRDYISYIYTGGDDVAAAVSKLTPLLAITLILNGIQPVLSGVAVGCGWQAFVAYVNVGCYYVVGIPLGCLLGFYFDLGAAGIWSGMIGGTFMQTVILVWVTVRTDWNKEVAEARKRLNKWEGNKMPLLAGQE

SEQ ID NO: 65842 - DNA, 1258 bp, Triticum aestivum
  misc_feature (1)..(1258): Ceres Seq. ID no. 13656983
aacctcgcaacgcaccagcgccaagtacatccattggccacccacccaccccacacacgacctccacccccactacactccactccgcgagtagctagctagcaagagagtcccagctgccactgctcctctcctagaggcactcaggcgagctactctgcctgcggcggcctgccggcgcgcggggagggggagttggccggccagtgggggcgcgtgaggacaatgcatggcatgtgttaacatgtacaacccggagcaccaccagtcgtccttcatggcgccgcggatgtccttctccagcgacttcgcgctggagccgccgcccgcgtcggcgccgtcggcgcgcgggcccggggacgccgacttcgagttctccgtcggcagccgccccatgatggccgccgacgagctcttctccaagggccgcctcctgccgctccgggaggccccgcacggccagagcggccggcccacgacgctgcgcgaggagctgcgcaccgacgaccgccacgggcgcgcgccccgcgcgcccaacatccggtggaaggagctgctcggcttcaagaaggcgaacaagaaggccgcggccgcagccgccgacgccggcgccagcacgtcgtcggccgaggccgcagccgccgacgccggcgccagcacgtcgtcggccgaggcccacacggatcttggaggtcacggaggcacgagagagtgaagcagcgagcgctcattcaccaaacgagacgggggcatggttaggcaactagtttgtgtgattgggtggtgatttgcctttcagcttcacgtccatcacctacccgcggtgaagatggatctgccaggaacccaacatccatcagcgcttcattggagaagcagcaagcaaattgaagctgtagctagctctggaggccatgcatgcatgaatgtgcatttcattttactgcctgctgcttgttaccctttttttgttattattattattatttcggtgtagtaaaagggaatttttgctcctgctttagctcttggtctggtcgtcgacgggtggttccattgcatcgcatgtagatgtagtagtagtggtcaaggtaactcctctctagtctctagtctctagtctctagtctaggtgtggctctgaatgttttgtatcggaggaaggggccagttaaatgcagtagcagtatttacaaaaaaaaaaaaaaaaaagcttatcgataccgtcgacctccgagggggggggcccgggtaccca

SEQ ID NO: 65843 - protein, 161 aa, Triticum aestivum
  peptide (1)..(161): Ceres Seq. ID no. 15219857
  misc_feature (1)..(118): Homolog of NCBI NO: 22329158 NR Description: hypothetical protein [Arabidopsis thaliana]
  misc_feature (1)..(104): Homolog of NCBI NO: 21536542 NR Description: unknown [Arabidopsis thaliana]
  misc_feature (1)..(104): Homolog of NCBI NO: 15240098 NR Description: expressed protein [Arabidopsis thaliana]
MACVNMYNPEHHQSSFMAPRMSFSSDFALEPPPASAPSARGPGDADFEFSVGSRPMMAADELFSKGRLLPLREAPHGQSGRPTTLREELRTDDRHGRAPRAPNIRWKELLGFKKANKKAAAAAADAGASTSSAEAAAADAGASTSSAEAHTDLGGHGGTRE

SEQ ID NO: 65844 - protein, 156 aa, Triticum aestivum
  peptide (1)..(156): Ceres Seq. ID no. 15219858
  misc_feature (1)..(113): Homolog of NCBI NO: 22329158 NR Description: hypothetical protein [Arabidopsis thaliana]
  misc_feature (1)..(99): Homolog of NCBI NO: 21536542 NR Description: unknown [Arabidopsis thaliana]
  misc_feature (1)..(99): Homolog of NCBI NO: 15240098 NR Description: expressed protein [Arabidopsis thaliana]
MYNPEHHQSSFMAPRMSFSSDFALEPPPASAPSARGPGDADFEFSVGSRPMMAADELFSKGRLLPLREAPHGQSGRPTTLREELRTDDRHGRAPRAPNIRWKELLGFKKANKKAAAAAADAGASTSSAEAAAADAGASTSSAEAHTDLGGHGGTRE

SEQ ID NO: 65845 - protein, 145 aa, Triticum aestivum
  peptide (1)..(145): Ceres Seq. ID no. 15219859
  misc_feature (1)..(102): Homolog of NCBI NO: 22329158 NR Description: hypothetical protein [Arabidopsis thaliana]
  misc_feature (1)..(88): Homolog of NCBI NO: 21536542 NR Description: unknown [Arabidopsis thaliana]
  misc_feature (1)..(88): Homolog of NCBI NO: 15240098 NR Description: expressed protein [Arabidopsis thaliana]
MAPRMSFSSDFALEPPPASAPSARGPGDADFEFSVGSRPMMAADELFSKGRLLPLREAPHGQSGRPTTLREELRTDDRHGRAPRAPNIRWKELLGFKKANKKAAAAAADAGASTSSAEAAAADAGASTSSAEAHTDLGGHGGTRE

SEQ ID NO: 65846 - DNA, 633 bp, Triticum aestivum
  misc_feature (1)..(633): Ceres Seq. ID no. 12618740
cctcattcctcagccaccacaccgatctagggtttcctgctagggttttagtccttcgtttccagcggcggctacggcagcggtggcggcagctacggcggcggtggcggctatggaggtggtggcggcggcggccgctacggaggaggcggcggcggcggccgtgagtgctacaagtgcggcgaggagggccacatctccagggactgcccccagggcggcggcggcggtggcggtggctacggaggtggtggcggccgtggcggtggtggtggcggtggcggctgcttctcctgcggcgagtccggccacttctcgcgcgagtgccccaacaagaccaactagacggctttgcccgtcagatctgagtgccccgttccccttcgctccttttcctaccgcctgactctgcagcaagtcatacctatacctatcagtattagtatatgtcgccgtagtgttccccgtgcttctcgtaggaagaagaatcgacgatgcgagcttggttccanaagtattgttggtggcgtgttgttcgtttgaagttatcttgtgtcgtctgatggggacagaccttatatctttatgtattggattgaatggactaagttatgcaagtcaagttatgctgcc

SEQ ID NO: 65847 - protein, 97 aa, Triticum aestivum
  peptide (1)..(97): Ceres Seq. ID no. 12618741
  misc_feature (1)..(97): Homolog of NCBI NO: 39580676 NR Description: Hypothetical protein CBG05199 [Caenorhabditis
MEVVAAAAATEEAAAAAVSATSAARRATSPGTAPRAAAAVAVATEVVAAVAVVVAVAAASPAASPATSRASAPTRPTRRLCPSDLSAPFPFAPFPTA

SEQ ID NO: 65848 - protein, 54 aa, Triticum aestivum
  peptide (1)..(54): Ceres Seq. ID no. 12618742
SFLSHHTDLGFPARVLVLRFQRRLRQRWRQLRRRWRLWRWWRRRPLRRRRRRRP

SEQ ID NO: 65849 - DNA, 1964 bp, Triticum aestivum
  misc_feature (1)..(1964): Ceres Seq. ID no. 14308019
accctcttacaacacatcaacctgaaacctgcactgcacagtccagaatactccaagaaaaaaagttagagcttttagtttgagaaccaataaatggtggacctgtccatgatcgacatggaatggctccaagagccattgagatggctgttcgttgcctcggtcatcttcgtgttgctgcagcggcggcgtggcaaggcgccgccgctgcccccaggaccgtattcgccgccgattgtcggcaatatcttcatgatggaccagctgacccaccggggcttcgcggggctggccaagcagtacggcggccttctccacctccgcctcggcaaggtccacaccttcgccgtatcgacgccggagtacgcccagcaggtgctgcaggcccaggacgccgccttctcgcaccggcctgccaccatcgccaccacctacctcacctacaaccgcgccgacatggtgttcgcccgctacgggcccttctggcgccagatgcgcaagctgtgcgtgatgaagctcttcagccggcgccgtcccgggacgtggctcgccgtgcgcgacgagtccgcggcgctcgtccgtgccgtggcccggcggagcggcgagcctgtcaacctcggcgacctcatcttcaacctcagcatgaacgtcaccttccgcgcggcgttcggcgctgaagccgccggtgacggcaatggccggaagcgggacgagttcatcgctatcatgcaggagttctccaagctcttcggcgcgttcagcatcggcgacttcatcccatggctgggatgggcggacccgcagggcatcagcgtgcgcctccgagctgcgggcgcagccctagacgatttcatggtcaagatcatggacgagcacataaagaggggcaagaaccctgacgacatggacgccgacatggtagacgccatgctcgcctacctccctgaagcgaagccggagaaggccgctggcgacgacctgcagcacacgctccgcctcaaccgtgacaacatcaaggccattatcatggacgtgatgtttggtgggacggagacggtgtcgtcggcaatagaatgggcaatggccgaaatgatgcatagcccagatgacctcttgcagctgcagcaggagtttgccgataaggtgggactcgaccgaaacgtggacgaggcagacctcaacaacctctccttcctcaaatgtgttatcaaggagacactccggttacacccgcccatcccgctcctccaccgtgagaacgccgaggactgtgtggttggcaactactctgtgccccagggctcgagcgtcaatatcaatgtcttcgcaatgggccgcgacgacagggtgtggaaggacgccgacacattccgtccgtcacggttcatgatgggtgaaggggaggcagccggggtcgacttcaagggcgggtgcttccagttcctgccgtttgggtctggtcgtcgctcgtgcccggggatggcgctcggcctgtactcgctggagctcgttattgcgcggctcgcccatgggttcaactgggcgctgcccgacggtaagaagccgtcggagctcgacatgggtgacattttcggcctcaccgcaccgcgtgccacaaggctctgggtcgtgcccacgccccgacttacctgccctttggttgttgatgtcgacgccgcgtgccagacatgatgtcgtgcgcgcacagctgatggtatctaccagctgcgcaggggtgaaggtgtttgattagcgtgttagttaatctagttgtagctatagctatttcccctttcgtgttagatatttcctagtttcgttcatacaagatcgcacccctataaatcggttgccttgcatgtggaatagcacgacctgttgttggcatcgtggagctgtgggtcacgatcgttcctttcatcatgaataaaaaggagagccctacttcagtgctcccctaacgc

SEQ ID NO: 65850 - protein, 532 aa, Triticum aestivum
  peptide (1)..(532): Ceres Seq. ID no. 14308020
  misc_feature (40)..(510): Pfam Name: Cytochrome P450 Pfam Description: Cytochrome P450
  misc_feature (9)..(522): Homolog of NCBI NO: 5002354 NR Description: ferulate-5-hydroxylase
  misc_feature (19)..(520): Homolog of NCBI NO: 10197654 NR Description: cytochrome p450-dependent monooxygenase [Brassica
  misc_feature (19)..(520): Homolog of NCBI NO: 10197652 NR Description: cytochrome p450-dependent monooxygenase [Brassica
  misc_feature (12)..(522): Homolog of NCBI NO: 12578901 NR Description: ferulate-5-hydroxylase [Arabidopsis thaliana]
  misc_feature (19)..(520): Homolog of NCBI NO: 10197650 NR Description: cytochrome p450-dependent monooxygenase [Brassica
  misc_feature (19)..(522): Homolog of NCBI NO: 6688937 NR Description: ferulate-5-hydroxylase [Populus balsamifera
  misc_feature (12)..(522): Homolog of NCBI NO: 15234332 NR Description: cytochrome P450 84A1 / ferulate-5-hydroxylase
  misc_feature (12)..(522): Homolog of NCBI NO: 12578893 NR Description: ferulate-5-hydroxylase [Arabidopsis thaliana]
  misc_feature (10)..(522): Homolog of NCBI NO: 5731998 NR Description: aldehyde 5-hydroxylase [Liquidambar styraciflua]
  misc_feature (12)..(522): Homolog of NCBI NO: 27476080 NR Description: Hypothetical protein [Oryza sativa (japonica
MVDLSMIDMEWLQEPLRWLFVASVIFVLLQRRRGKAPPLPPGPYSPPIVGNIFMMDQLTHRGFAGLAKQYGGLLHLRLGKVHTFAVSTPEYAQQVLQAQDAAFSHRPATIATTYLTYNRADMVFARYGPFWRQMRKLCVMKLFSRRRPGTWLAVRDESAALVRAVARRSGEPVNLGDLIFNLSMNVTFRAAFGAEAAGDGNGRKRDEFIAIMQEFSKLFGAFSIGDFIPWLGWADPQGISVRLRAAGAALDDFMVKIMDEHIKRGKNPDDMDADMVDAMLAYLPEAKPEKAAGDDLQHTLRLNRDNIKAIIMDVMFGGTETVSSAIEWAMAEMMHSPDDLLQLQQEFADKVGLDRNVDEADLNNLSFLKCVIKETLRLHPPIPLLHRENAEDCVVGNYSVPQGSSVNINVFAMGRDDRVWKDADTFRPSRFMMGEGEAAGVDFKGGCFQFLPFGSGRRSCPGMALGLYSLELVIARLAHGFNWALPDGKKPSELDMGDIFGLTAPRATRLWVVPTPRLTCPLVVDVDAACQT

SEQ ID NO: 65851 - protein, 527 aa, Triticum aestivum
  peptide (1)..(527): Ceres Seq. ID no. 14308021
  misc_feature (35)..(505): Pfam Name: Cytochrome P450 Pfam Description: Cytochrome P450
  misc_feature (4)..(517): Homolog of NCBI NO: 5002354 NR Description: ferulate-5-hydroxylase
  misc_feature (14)..(515): Homolog of NCBI NO: 10197654 NR Description: cytochrome p450-dependent monooxygenase [Brassica
  misc_feature (14)..(515): Homolog of NCBI NO: 10197652 NR Description: cytochrome p450-dependent monooxygenase [Brassica
  misc_feature (7)..(517): Homolog of NCBI NO: 12578901 NR Description: ferulate-5-hydroxylase [Arabidopsis thaliana]
  misc_feature (14)..(515): Homolog of NCBI NO: 10197650 NR Description: cytochrome p450-dependent monooxygenase [Brassica
  misc_feature (14)..(517): Homolog of NCBI NO: 6688937 NR Description: ferulate-5-hydroxylase [Populus balsamifera
  misc_feature (7)..(517): Homolog of NCBI NO: 15234332 NR Description: cytochrome P450 84A1 / ferulate-5-hydroxylase
  misc_feature (7)..(517): Homolog of NCBI NO: 12578893 NR Description: ferulate-5-hydroxylase [Arabidopsis thaliana]
  misc_feature (5)..(517): Homolog of NCBI NO: 5731998 NR Description: aldehyde 5-hydroxylase [Liquidambar styraciflua]
  misc_feature (7)..(517): Homolog of NCBI NO: 27476080 NR Description: Hypothetical protein [Oryza sativa (japonica
MIDMEWLQEPLRWLFVASVIFVLLQRRRGKAPPLPPGPYSPPIVGNIFMMDQLTHRGFAGLAKQYGGLLHLRLGKVHTFAVSTPEYAQQVLQAQDAAFSHRPATIATTYLTYNRADMVFARYGPFWRQMRKLCVMKLFSRRRPGTWLAVRDESAALVRAVARRSGEPVNLGDLIFNLSMNVTFRAAFGAEAAGDGNGRKRDEFIAIMQEFSKLFGAFSIGDFIPWLGWADPQGISVRLRAAGAALDDFMVKIMDEHIKRGKNPDDMDADMVDAMLAYLPEAKPEKAAGDDLQHTLRLNRDNIKAIIMDVMFGGTETVSSAIEWAMAEMMHSPDDLLQLQQEFADKVGLDRNVDEADLNNLSFLKCVIKETLRLHPPIPLLHRENAEDCVVGNYSVPQGSSVNINVFAMGRDDRVWKDADTFRPSRFMMGEGEAAGVDFKGGCFQFLPFGSGRRSCPGMALGLYSLELVIARLAHGFNWALPDGKKPSELDMGDIFGLTAPRATRLWVVPTPRLTCPLVVDVDAACQT

SEQ ID NO: 65852 - protein, 524 aa, Triticum aestivum
  peptide (1)..(524): Ceres Seq. ID no. 14308022
  misc_feature (32)..(502): Pfam Name: Cytochrome P450 Pfam Description: Cytochrome P450
  misc_feature (1)..(514): Homolog of NCBI NO: 5002354 NR Description: ferulate-5-hydroxylase
  misc_feature (11)..(512): Homolog of NCBI NO: 10197654 NR Description: cytochrome p450-dependent monooxygenase [Brassica
  misc_feature (11)..(512): Homolog of NCBI NO: 10197652 NR Description: cytochrome p450-dependent monooxygenase [Brassica
  misc_feature (4)..(514): Homolog of NCBI NO: 12578901 NR Description: ferulate-5-hydroxylase [Arabidopsis thaliana]
  misc_feature (11)..(512): Homolog of NCBI NO: 10197650 NR Description: cytochrome p450-dependent monooxygenase [Brassica
  misc_feature (11)..(514): Homolog of NCBI NO: 6688937 NR Description: ferulate-5-hydroxylase [Populus balsamifera
  misc_feature (4)..(514): Homolog of NCBI NO: 15234332 NR Description: cytochrome P450 84A1 / ferulate-5-hydroxylase
  misc_feature (4)..(514): Homolog of NCBI NO: 12578893 NR Description: ferulate-5-hydroxylase [Arabidopsis thaliana]
  misc_feature (2)..(514): Homolog of NCBI NO: 5731998 NR Description: aldehyde 5-hydroxylase [Liquidambar styraciflua]
  misc_feature (4)..(514): Homolog of NCBI NO: 27476080 NR Description: Hypothetical protein [Oryza sativa (japonica
MEWLQEPLRWLFVASVIFVLLQRRRGKAPPLPPGPYSPPIVGNIFMMDQLTHRGFAGLAKQYGGLLHLRLGKVHTFAVSTPEYAQQVLQAQDAAFSHRPATIATTYLTYNRADMVFARYGPFWRQMRKLCVMKLFSRRRPGTWLAVRDESAALVRAVARRSGEPVNLGDLIFNLSMNVTFRAAFGAEAAGDGNGRKRDEFIAIMQEFSKLFGAFSIGDFIPWLGWADPQGISVRLRAAGAALDDFMVKIMDEHIKRGKNPDDMDADMVDAMLAYLPEAKPEKAAGDDLQHTLRLNRDNIKAIIMDVMFGGTETVSSAIEWAMAEMMHSPDDLLQLQQEFADKVGLDRNVDEADLNNLSFLKCVIKETLRLHPPIPLLHRENAEDCVVGNYSVPQGSSVNINVFAMGRDDRVWKDADTFRPSRFMMGEGEAAGVDFKGGCFQFLPFGSGRRSCPGMALGLYSLELVIARLAHGFNWALPDGKKPSELDMGDIFGLTAPRATRLWVVPTPRLTCPLVVDVDAACQT

SEQ ID NO: 65853 - DNA, 2073 bp, Triticum aestivum
  misc_feature (1)..(2073): Ceres Seq. ID no. 13656435
agaacatcctaatcgaaaaatagctcactctcactaccaccctcgccactcaccagctcgactccaccccactccactcgagccacgcgcacgcggagctgggccgtacagtacgtgagcccgtgagcgagcagggtacggactaaatgccgcacccgtcgtcgtcgtcttcctcggycagtgtggacgcggccgccaagggcgtcaagctggagcggtacgccagcggcggcggcgcgctgctgatgcggcgcgcggggagctccaagatcgtggcggcctcctcgcacctcctcttccgcgccaccgtcctcgccacgctcgcgctcgtctgcctcttcgccgtgcactacccttccctcctgtcccgctccttccggctctccgccgccgccgctgcttcctcctcttcttccccgccgcggcagacgtcgcggcaccggaacctgctcgggtcgtcgtcggcgtacgcgggcgccgcgtgggagcgggaggtgcggcgaagcgccacgccgcggcgggacggggggatgtcggtgctggtcacgggcgccgcggggttcgttggcgcgcactgcgcgctggcgctcagggcgcgcggcgacggcgtgctcggcctcgacaacttcaacgcgtactacgagccgggcctgaaacscscctscvgttccarctttattgtgytkctcagcgtcgcgcggggtggtggtgctcggcgccgacatcaacgacgcggccctgctcgagcggctcttcgccgccgtgcccttcacgcacgtgctgcacctcgccgcgcaggccggcgtgcggtacgcgatgcgggcgccgcagacgtacgtggcctccaacgtcgctggcctcgtcagcgtcttcgaggccgccgcccggcacgccgacccgcagccggcgatcgtgtgggcgtcgtcgtcgtcggtgtacgggctcaataccgacgcgccattctccgaggaccaccgcacggaccgaccggcgtcgctgtacgcggccaccaagaaggccggcgaggccatcgcgcacgcgtacaaccacatctacggtctctcgatcaccggcctccggttcttcacggtgtacggtccgtggggtcgccccgacatggcctacttctccttcgctcgcagcatcgtcgccggcgagcccatcacgctcttccgcgccgccgacggcacagacgtccgccgcgacttcacctacatcgacgacgtcgttaaggggtgcctcggctcgctcgacacggccggcaagagcacgggctccaagtccggcaagtagcgcgggccagcgcccctccgcgtctacaacctcggcaacacctcgccggtgcccgtcacccgcatggtggccatcctcgagaagctcctcggcaagaaagcgaacaagcgcgtcgtcaccatgcctagcaacggcgacgtgccgttcacgcacgccaatgtcagccacgccgcgcgcgacttcgggtaccaccccaccacctccctcgacgccggcctgcggaaattcgtcgaatggttcctccagtactacaagatcgaccccgcgaagctcgccaagggcagcagagtcggtaccaagactaccaagaagaaatccatgggcgccatatccgcggcatcgtgaggagagcgcgcgcgccgcgtgcgtcccggcccggatgtccagtccaccaagtgtgcaatctgttctcctcggaggctggcggttgtgttgcacaactttgtgagtgcatccccattgtttaagccattgccggtgcttttcccccttgatgatgcaaccatgctagagctcggtgggaagggaatcgtggaggtggcaaggcaaaggagaagcgattctttcttcgtagcataagcaaaaccaaactattttagggaaaaggggtggggggtataggtaagatgacatgagccgtggaaaggagcgaggaggacacgataaagatgaagtcctgggcttccttttgggacggttcaggttgtttttgcttagtttcatttttgttttgtcgtcactatcttgttcttgctcatttggttaatttgtcttgtgttt

SEQ ID NO: 65854 - protein, 361 aa, Triticum aestivum
  peptide (1)..(361): Ceres Seq. ID no. 15219220
  misc_feature (41)..(170): Homolog of NCBI NO: 15225451 NR Description: nucleotide sugar epimerase family [Arabidopsis
  misc_feature (86)..(170): Homolog of NCBI NO: 15236712 NR Description: nucleotide sugar epimerase family [Arabidopsis
  misc_feature (90)..(170): Homolog of NCBI NO: 21536982 NR Description: nucleotide sugar epimerase, putative [Arabidopsis
  misc_feature (90)..(170): Homolog of NCBI NO: 15217591 NR Description: nucleotide sugar epimerase family [Arabidopsis
  misc_feature (90)..(170): Homolog of NCBI NO: 15293119 NR Description: putative nucleotide sugar epimerase [Arabidopsis
  misc_feature (90)..(170): Homolog of NCBI NO: 15234486 NR Description: nucleotide sugar epimerase family [Arabidopsis
  misc_feature (105)..(175): Homolog of NCBI NO: 15234745 NR Description: nucleotide sugar epimerase family [Arabidopsis
  misc_feature (10)..(170): Homolog of NCBI NO: 24417280 NR Description: unknown [Arabidopsis thaliana]
  misc_feature (10)..(170): Homolog of NCBI NO: 15229524 NR Description: NAD-dependent epimerase/dehydratase family
  misc_feature (1)..(170): Homolog of NCBI NO: 29647497 NR Description: OJ1191_A10.21 [Oryza sativa (japonica
  misc_feature (11)..(11): Xaa is any aa, unknown or other
  misc_feature (171)..(171): Xaa is any aa, unknown or other
  misc_feature (172)..(172): Xaa is any aa, unknown or other
  misc_feature (173)..(173): Xaa is any aa, unknown or other
  misc_feature (174)..(174): Xaa is any aa, unknown or other
  misc_feature (176)..(176): Xaa is any aa, unknown or other
  misc_feature (180)..(180): Xaa is any aa, unknown or other
MPHPSSSSSSXSVDAAAKGVKLERYASGGGALLMRRAGSSKIVAASSHLLFRATVLATLALVCLFAVHYPSLLSRSFRLSAAAAASSSSSPPRQTSRHRNLLGSSSAYAGAAWEREVRRSATPRRDGGMSVLVTGAAGFVGAHCALALRARGDGVLGLDNFNAYYEPGLKXXXXSXFIVXLSVARGGGARRRHQRRGPARAALRRRALHARAAPRRAGRRAVRDAGAADVRGLQRRWPRQRLRGRRPARRPAAGDRVGVVVVGVRAQYRRAILRGPPHGPTGVAVRGHQEGRRGHRARVQPHLRSLDHRPPVLHGVRSVGSPRHGLLLLRSQHRRRRAHHALPRRRRHRRPPRLHLHRRRR

SEQ ID NO: 65855 - protein, 328 aa, Triticum aestivum
  peptide (1)..(328): Ceres Seq. ID no. 15219221
  misc_feature (8)..(137): Homolog of NCBI NO: 15225451 NR Description: nucleotide sugar epimerase family [Arabidopsis
  misc_feature (53)..(137): Homolog of NCBI NO: 15236712 NR Description: nucleotide sugar epimerase family [Arabidopsis
  misc_feature (57)..(137): Homolog of NCBI NO: 21536982 NR Description: nucleotide sugar epimerase, putative [Arabidopsis
  misc_feature (57)..(137): Homolog of NCBI NO: 15217591 NR Description: nucleotide sugar epimerase family [Arabidopsis
  misc_feature (57)..(137): Homolog of NCBI NO: 15293119 NR Description: putative nucleotide sugar epimerase [Arabidopsis
  misc_feature (57)..(137): Homolog of NCBI NO: 15234486 NR Description: nucleotide sugar epimerase family [Arabidopsis
  misc_feature (72)..(142): Homolog of NCBI NO: 15234745 NR Description: nucleotide sugar epimerase family [Arabidopsis
  misc_feature (1)..(137): Homolog of NCBI NO: 24417280 NR Description: unknown [Arabidopsis thaliana]
  misc_feature (1)..(137): Homolog of NCBI NO: 15229524 NR Description: NAD-dependent epimerase/dehydratase family
  misc_feature (1)..(137): Homolog of NCBI NO: 29647497 NR Description: OJ1191_A10.21 [Oryza sativa (japonica
  misc_feature (138)..(138): Xaa is any aa, unknown or other
  misc_feature (139)..(139): Xaa is any aa, unknown or other
  misc_feature (140)..(140): Xaa is any aa, unknown or other
  misc_feature (141)..(141): Xaa is any aa, unknown or other
  misc_feature (143)..(143): Xaa is any aa, unknown or other
  misc_feature (147)..(147): Xaa is any aa, unknown or other
MRRAGSSKIVAASSHLLFRATVLATLALVCLFAVHYPSLLSRSFRLSAAAAASSSSSPPRQTSRHRNLLGSSSAYAGAAWEREVRRSATPRRDGGMSVLVTGAAGFVGAHCALALRARGDGVLGLDNFNAYYEPGLKXXXXSXFIVXLSVARGGGARRRHQRRGPARAALRRRALHARAAPRRAGRRAVRDAGAADVRGLQRRWPRQRLRGRRPARRPAAGDRVGVVVVGVRAQYRRAILRGPPHGPTGVAVRGHQEGRRGHRARVQPHLRSLDHRPPVLHGVRSVGSPRHGLLLLRSQHRRRRAHHALPRRRRHRRPPRLHLHRRRR

SEQ ID NO: 65856 - protein, 233 aa, Triticum aestivum
  peptide (1)..(233): Ceres Seq. ID no. 15219222
  misc_feature (1)..(42): Homolog of NCBI NO: 15225451 NR Description: nucleotide sugar epimerase family [Arabidopsis
  misc_feature (1)..(42): Homolog of NCBI NO: 15236712 NR Description: nucleotide sugar epimerase family [Arabidopsis
  misc_feature (1)..(42): Homolog of NCBI NO: 21536982 NR Description: nucleotide sugar epimerase, putative [Arabidopsis
  misc_feature (1)..(42): Homolog of NCBI NO: 15217591 NR Description: nucleotide sugar epimerase family [Arabidopsis
  misc_feature (1)..(42): Homolog of NCBI NO: 15293119 NR Description: putative nucleotide sugar epimerase [Arabidopsis
  misc_feature (1)..(42): Homolog of NCBI NO: 15234486 NR Description: nucleotide sugar epimerase family [Arabidopsis
  misc_feature (1)..(47): Homolog of NCBI NO: 15234745 NR Description: nucleotide sugar epimerase family [Arabidopsis
  misc_feature (1)..(42): Homolog of NCBI NO: 24417280 NR Description: unknown [Arabidopsis thaliana]
  misc_feature (1)..(42): Homolog of NCBI NO: 15229524 NR Description: NAD-dependent epimerase/dehydratase family
  misc_feature (1)..(42): Homolog of NCBI NO: 29647497 NR Description: OJ1191_A10.21 [Oryza sativa (japonica
  misc_feature (43)..(43): Xaa is any aa, unknown or other
  misc_feature (44)..(44): Xaa is any aa, unknown or other
  misc_feature (45)..(45): Xaa is any aa, unknown or other
  misc_feature (46)..(46): Xaa is any aa, unknown or other
  misc_feature (48)..(48): Xaa is any aa, unknown or other
  misc_feature (52)..(52): Xaa is any aa, unknown or other
MSVLVTGAAGFVGAHCALALRARGDGVLGLDNFNAYYEPGLKXXXXSXFIVXLSVARGGGARRRHQRRGPARAALRRRALHARAAPRRAGRRAVRDAGAADVRGLQRRWPRQRLRGRRPARRPAAGDRVGVVVVGVRAQYRRAILRGPPHGPTGVAVRGHQEGRRGHRARVQPHLRSLDHRPPVLHGVRSVGSPRHGLLLLRSQHRRRRAHHALPRRRRHRRPPRLHLHRRRR

SEQ ID NO: 65857 - DNA, 691 bp, Triticum aestivum
  misc_feature (1)..(691): Ceres Seq. ID no. 13656456
ccatgctctcacagttcttcctaagtattagttccatcaaatatgaccatgataaaatgccccaaatcaaccgtgccgtggctcatgtaactgatagcatcttgggcacgaggaacccggaaatcaccatccgcaatctcaaaatcagattcattttgatggatcgtgactctctcaccattggaagatctgtcgcccacgccatgtcaacccagaaggttgaagcagctgagtttgagattataacggagaaggcttataggaactgcactcctgccgatctccgccagaatgctaagctgttcaataattttgttggtgcttgtccggatgcatttgctggcctcaggcgcctgtggctgcgtaatatgaggttcggtgaacaggacatcccaaacatcctcagcacttgcaagctcttggagtctttgcgtttaatccattgcgactcagggatccattctgtgctgcaagtagaacatgctcaacttattgagctcgaggttgaccttgggaaatttgagagagttgagttgatatgtctacccaaactccaacgggtgagctataataattggtgctcttctgaacatcctgtgtattttggtcttgtaccacagctttcaagactgagcctcactaaagttggcgtcagttctgataagattcttgagttaagtcagcttcttgc

SEQ ID NO: 65858 - protein, 229 aa, Triticum aestivum
  peptide (1)..(229): Ceres Seq. ID no. 13656457
  misc_feature (16)..(228): Homolog of NCBI NO: 34393595 NR Description: unknown protein [Oryza sativa (japonica
  misc_feature (36)..(187): Homolog of NCBI NO: 34904574 NR Description: B1008C01.20 [Oryza sativa (japonica
  misc_feature (18)..(212): Homolog of NCBI NO: 34898872 NR Description: hypothetical protein~similar to Oryza sativa
  misc_feature (1)..(228): Homolog of NCBI NO: 38345336 NR Description: OSJNBa0081L15.9 [Oryza sativa (japonica
  misc_feature (18)..(212): Homolog of NCBI NO: 34395313 NR Description: hypothetical protein [Oryza sativa (japonica
  misc_feature (19)..(228): Homolog of NCBI NO: 34904800 NR Description: hypothetical protein~predicted by GeneMark.hmm
  misc_feature (1)..(228): Homolog of NCBI NO: 38345335 NR Description: OSJNBa0081L15.8 [Oryza sativa (japonica
  misc_feature (23)..(228): Homolog of NCBI NO: 21741445 NR Description: OJ000223_09.1 [Oryza sativa (japonica
MLSQFFLSISSIKYDHDKMPQINRAVAHVTDSILGTRNPEITIRNLKIRFILMDRDSLTIGRSVAHAMSTQKVEAAEFEIITEKAYRNCTPADLRQNAKLFNNFVGACPDAFAGLRRLWLRNMRFGEQDIPNILSTCKLLESLRLIHCDSGIHSVLQVEHAQLIELEVDLGKFERVELICLPKLQRVSYNNWCSSEHPVYFGLVPQLSRLSLTKVGVSSDKILELSQLL

SEQ ID NO: 65859 - protein, 211 aa, Triticum aestivum
  peptide (1)..(211): Ceres Seq. ID no. 13656458
  misc_feature (1)..(210): Homolog of NCBI NO: 34393595 NR Description: unknown protein [Oryza sativa (japonica
  misc_feature (18)..(169): Homolog of NCBI NO: 34904574 NR Description: B1008C01.20 [Oryza sativa (japonica
  misc_feature (1)..(194): Homolog of NCBI NO: 34898872 NR Description: hypothetical protein~similar to Oryza sativa
  misc_feature (1)..(210): Homolog of NCBI NO: 38345336 NR Description: OSJNBa0081L15.9 [Oryza sativa (japonica
  misc_feature (1)..(194): Homolog of NCBI NO: 34395313 NR Description: hypothetical protein [Oryza sativa (japonica
  misc_feature (1)..(210): Homolog of NCBI NO: 34904800 NR Description: hypothetical protein~predicted by GeneMark.hmm
  misc_feature (1)..(210): Homolog of NCBI NO: 38345335 NR Description: OSJNBa0081L15.8 [Oryza sativa (japonica
  misc_feature (5)..(210): Homolog of NCBI NO: 21741445 NR Description: OJ000223_09.1 [Oryza sativa (japonica
MPQINRAVAHVTDSILGTRNPEITIRNLKIRFILMDRDSLTIGRSVAHAMSTQKVEAAEFEIITEKAYRNCTPADLRQNAKLFNNFVGACPDAFAGLRRLWLRNMRFGEQDIPNILSTCKLLESLRLIHCDSGIHSVLQVEHAQLIELEVDLGKFERVELICLPKLQRVSYNNWCSSEHPVYFGLVPQLSRLSLTKVGVSSDKILELSQLL

SEQ ID NO: 65860 - protein, 177 aa, Triticum aestivum
  peptide (1)..(177): Ceres Seq. ID no. 13656459
  misc_feature (1)..(176): Homolog of NCBI NO: 34393595 NR Description: unknown protein [Oryza sativa (japonica
  misc_feature (1)..(135): Homolog of NCBI NO: 34904574 NR Description: B1008C01.20 [Oryza sativa (japonica
  misc_feature (1)..(160): Homolog of NCBI NO: 34898872 NR Description: hypothetical protein~similar to Oryza sativa
  misc_feature (1)..(176): Homolog of NCBI NO: 38345336 NR Description: OSJNBa0081L15.9 [Oryza sativa (japonica
  misc_feature (1)..(160): Homolog of NCBI NO: 34395313 NR Description: hypothetical protein [Oryza sativa (japonica
  misc_feature (1)..(176): Homolog of NCBI NO: 34904800 NR Description: hypothetical protein~predicted by GeneMark.hmm
  misc_feature (1)..(176): Homolog of NCBI NO: 38345335 NR Description: OSJNBa0081L15.8 [Oryza sativa (japonica
  misc_feature (1)..(176): Homolog of NCBI NO: 21741445 NR Description: OJ000223_09.1 [Oryza sativa (japonica
MDRDSLTIGRSVAHAMSTQKVEAAEFEIITEKAYRNCTPADLRQNAKLFNNFVGACPDAFAGLRRLWLRNMRFGEQDIPNILSTCKLLESLRLIHCDSGIHSVLQVEHAQLIELEVDLGKFERVELICLPKLQRVSYNNWCSSEHPVYFGLVPQLSRLSLTKVGVSSDKILELSQLL

SEQ ID NO: 65861 - DNA, 1120 bp, Triticum aestivum
  misc_feature (1)..(1120): Ceres Seq. ID no. 13656460
atcaggtaaacacacaaccatacacaaggcgcacggttgcaaaacaagggagttatttagaagcaaggagtaaggaaccacctgaagccatgtgtatcgctgcatggatttggcaggctcaccctcagcaccagctcctgctgctgctcaacagagatgagttccatagcaggcctacaaaggcagtaggatggtggggggagggctcaatgaagattcttggtggcagggatgtacttggtggaggaacatggatggggagcaccaaagatggcagacttgccttcctgaccaatgtgctcgagcctgatgtgatgcctggcgcacgcactaggggagacctgcccctcaggttcctgcagggcaacaagagcccactggaggttgcaactgaagtcgcaaaagaagctgatgagtacaatggcttcaaccttatactagctgatctaaccaggaatgtcatggtttatgtgtcaaaccggccaaaggggcagcctgcgacgattcagctcgtctcaccaggactccatgtgttgtccaatgcaaggctagacagcccttggcagaaagcaattcgccttggtaaaaacttcagggagtttataaggaagcatggtgatgatgaagttgaagcgaaggatatagctgatagactaatgactgacaccacgagggctgataaagataggctgccaaacaccggttgtgatcccaactgggagcacggtctgagctccatcttcatcgaggtgcaaactgacgaagggctctatggtacaaggagcacagcagttctttcagtgaactatgatggagaagctagcttatatgagaagtacctcgagagtggtatatggaagaaccacacagtgcattaccagatagaattgccaatgcgcacctaaaggcaggagcctcaaataggaagaaagaatgaatagctaccattgtgcatgctgttatttccacagttgcgctttaagatcacataatgatctctaattatggcaattaaattatttactgtatgcggatctataaattcagagacagatcaagtcaaattgttgaatatatatacataataataatatgatatagtatgtttatttacagactt

SEQ ID NO: 65862 - protein, 300 aa, Triticum aestivum
  peptide (1)..(300): Ceres Seq. ID no. 13656461
  misc_feature (64)..(292): Pfam Name: Protein of unknown function (DUF833) Pfam Description: Protein of unknown function (DUF833)
  misc_feature (4)..(278): Homolog of NCBI NO: 33602043 NR Description: conserved hypothetical protein [Bordetella
  misc_feature (30)..(297): Homolog of NCBI NO: 21241540 NR Description: conserved hypothetical protein
  misc_feature (30)..(282): Homolog of NCBI NO: 22977012 NR Description: hypothetical protein [Ralstonia metallidurans]
  misc_feature (30)..(282): Homolog of NCBI NO: 17546499 NR Description: PUTATIVE SIGNAL PEPTIDE PROTEIN [Ralstonia
  misc_feature (30)..(289): Homolog of NCBI NO: 21230190 NR Description: conserved hypothetical protein
  misc_feature (30)..(296): Homolog of NCBI NO: 39995898 NR Description: conserved hypothetical protein [Geobacter
  misc_feature (59)..(272): Homolog of NCBI NO: 7485957 NR Description: hypothetical protein F22I13.30 - Arabidopsis
  misc_feature (64)..(294): Homolog of NCBI NO: 15451202 NR Description: putative protein [Arabidopsis thaliana]
  misc_feature (30)..(294): Homolog of NCBI NO: 18420207 NR Description: expressed protein [Arabidopsis thaliana]
  misc_feature (42)..(296): Homolog of NCBI NO: 38345399 NR Description: OSJNBa0017B10.5 [Oryza sativa (japonica
QVNTQPYTRRTVAKQGSYLEARSKEPPEAMCIAAWIWQAHPQHQLLLLLNRDEFHSRPTKAVGWWGEGSMKILGGRDVLGGGTWMGSTKDGRLAFLTNVLEPDVMPGARTRGDLPLRFLQGNKSPLEVATEVAKEADEYNGFNLILADLTRNVMVYVSNRPKGQPATIQLVSPGLHVLSNARLDSPWQKAIRLGKNFREFIRKHGDDEVEAKDIADRLMTDTTRADKDRLPNTGCDPNWEHGLSSIFIEVQTDEGLYGTRSTAVLSVNYDGEASLYEKYLESGIWKNHTVHYQIELPMRT

SEQ ID NO: 65863 - protein, 271 aa, Triticum aestivum
  peptide (1)..(271): Ceres Seq. ID no. 13656462
  misc_feature (35)..(263): Pfam Name: Protein of unknown function (DUF833) Pfam Description: Protein of unknown function (DUF833)
  misc_feature (1)..(249): Homolog of NCBI NO: 33602043 NR Description: conserved hypothetical protein [Bordetella
  misc_feature (1)..(268): Homolog of NCBI NO: 21241540 NR Description: conserved hypothetical protein
  misc_feature (1)..(253): Homolog of NCBI NO: 22977012 NR Description: hypothetical protein [Ralstonia metallidurans]
  misc_feature (1)..(253): Homolog of NCBI NO: 17546499 NR Description: PUTATIVE SIGNAL PEPTIDE PROTEIN [Ralstonia
  misc_feature (1)..(260): Homolog of NCBI NO: 21230190 NR Description: conserved hypothetical protein
  misc_feature (1)..(267): Homolog of NCBI NO: 39995898 NR Description: conserved hypothetical protein [Geobacter
  misc_feature (30)..(243): Homolog of NCBI NO: 7485957 NR Description: hypothetical protein F22I13.30 - Arabidopsis
  misc_feature (35)..(265): Homolog of NCBI NO: 15451202 NR Description: putative protein [Arabidopsis thaliana]
  misc_feature (1)..(265): Homolog of NCBI NO: 18420207 NR Description: expressed protein [Arabidopsis thaliana]
  misc_feature (13)..(267): Homolog of NCBI NO: 38345399 NR Description: OSJNBa0017B10.5 [Oryza sativa (japonica
MCIAAWIWQAHPQHQLLLLLNRDEFHSRPTKAVGWWGEGSMKILGGRDVLGGGTWMGSTKDGRLAFLTNVLEPDVMPGARTRGDLPLRFLQGNKSPLEVATEVAKEADEYNGFNLILADLTRNVMVYVSNRPKGQPATIQLVSPGLHVLSNARLDSPWQKAIRLGKNFREFIRKHGDDEVEAKDIADRLMTDTTRADKDRLPNTGCDPNWEHGLSSIFIEVQTDEGLYGTRSTAVLSVNYDGEASLYEKYLESGIWKNHTVHYQIELPMRT

SEQ ID NO: 65864 - protein, 231 aa, Triticum aestivum
  peptide (1)..(231): Ceres Seq. ID no. 13656463
  misc_feature (1)..(223): Pfam Name: Protein of unknown function (DUF833) Pfam Description: Protein of unknown function (DUF833)
  misc_feature (1)..(209): Homolog of NCBI NO: 33602043 NR Description: conserved hypothetical protein [Bordetella
  misc_feature (1)..(228): Homolog of NCBI NO: 21241540 NR Description: conserved hypothetical protein
  misc_feature (1)..(213): Homolog of NCBI NO: 22977012 NR Description: hypothetical protein [Ralstonia metallidurans]
  misc_feature (1)..(213): Homolog of NCBI NO: 17546499 NR Description: PUTATIVE SIGNAL PEPTIDE PROTEIN [Ralstonia
  misc_feature (1)..(220): Homolog of NCBI NO: 21230190 NR Description: conserved hypothetical protein
  misc_feature (1)..(227): Homolog of NCBI NO: 39995898 NR Description: conserved hypothetical protein [Geobacter
  misc_feature (1)..(203): Homolog of NCBI NO: 7485957 NR Description: hypothetical protein F22I13.30 - Arabidopsis
  misc_feature (1)..(225): Homolog of NCBI NO: 15451202 NR Description: putative protein [Arabidopsis thaliana]
  misc_feature (1)..(225): Homolog of NCBI NO: 18420207 NR Description: expressed protein [Arabidopsis thaliana]
  misc_feature (1)..(227): Homolog of NCBI NO: 38345399 NR Description: OSJNBa0017B10.5 [Oryza sativa (japonica
MKILGGRDVLGGGTWMGSTKDGRLAFLTNVLEPDVMPGARTRGDLPLRFLQGNKSPLEVATEVAKEADEYNGFNLILADLTRNVMVYVSNRPKGQPATIQLVSPGLHVLSNARLDSPWQKAIRLGKNFREFIRKHGDDEVEAKDIADRLMTDTTRADKDRLPNTGCDPNWEHGLSSIFIEVQTDEGLYGTRSTAVLSVNYDGEASLYEKYLESGIWKNHTVHYQIELPMRT

SEQ ID NO: 65865 - DNA, 1376 bp, Triticum aestivum
  misc_feature (1)..(1376): Ceres Seq. ID no. 14308023
acggctgggtttcagtgagatagaacctttgatcacacgccttaccagtctcttgtggcatggcggccctgcagcttgccgccctccttgccctgctgctcgcactgtggcgtctcgtgtggcggccgcgcgccatggcgcggtcgttcgtgaggcaggggatccgagggccgccctacacgttcctggccgggtccttgccggaggcgaagcggctgctgatcgctggccggagaggcgtgccgcccctcgacgccgggtgccacgacatcatgcccatcctgctgccgcagttccacagatgggttgccgattatggcaaaacgttcctgttctggatcgggctgatccccgccatcttctctatcgacctgcagctgataaagcaagtgctcacagacatgacgggcctgtatcagaaggacttcatgatccccgtgctcaaatccctcttcggcaacggcgtcatattgataaatggtgacgattggaagcggcaccggaaagtagtccttcctgctttcaactatgagcagatcaagagcatgtcagcggtgacggcagaggtcacaaggcagatgatacagcaatggggcgagcagatacaccaaagcaacagcgacaagaaagcagctgagatagacatgatccacgccttcaacgacctgactgccaagatcaacggccgtgtcgccttcggcactacccaccgggatgtcgaggaggtcatcgtcttgatgcaggagatgcaaaaggtcgccactgcggccatgctcgatgctccaatactctggtatctgccgactcggcgtaacttgcacgttcgacgcctgaacaaacagctgagaagcaagatcatgtcgatcatgcaggcacggctggccgcagatggagccaaatatggtcgaggagacaccggcggctgcggggacgacctgctcgggctgttgttagaggcgtggacaccgcaccggcaagtgaggggcggcgatacgctgacaactgacgaggtgattgatgagtgcaaaaccttcttcgccgcagggcaggaaaccacggccaccctcctcgtctgggccatgttcctgcttgccgtgcacccccagtggcaggacaaggtcagggaagaggtcctccgggagttccccggcggggacagcgacgatgtggtacccaacgcggatgttctcgccaaactgaagctggtgcgtacatttcaactgtcaatgtcatttttcctatattttcgtacgaatgtattcggtatcataaatgctcatattgtttctataaagttgatcaaagtttacaaaatttaactgttgagattttttgtatgtagtgtaattttgcaaagagggaataactaatgtgtt

SEQ ID NO: 65866 - protein, 419 aa, Triticum aestivum
  peptide (1)..(419): Ceres Seq. ID no. 14308024
  misc_feature (19)..(393): Homolog of NCBI NO: 15226472 NR Description: cytochrome P450 family [Arabidopsis thaliana]
  misc_feature (31)..(388): Homolog of NCBI NO: 34913350 NR Description: putative cytochrome P450 [Oryza sativa (japonica
  misc_feature (1)..(397): Homolog of NCBI NO: 34896952 NR Description: putative cytochrome P450-related protein [Oryza
  misc_feature (2)..(395): Homolog of NCBI NO: 14719280 NR Description: cytochrome P450 [Zea mays]
  misc_feature (2)..(388): Homolog of NCBI NO: 34913346 NR Description: putative cytochrome P450 [Oryza sativa (japonica
  misc_feature (1)..(388): Homolog of NCBI NO: 22324446 NR Description: putative cytochrome P450 [Oryza sativa (japonica
  misc_feature (1)..(388): Homolog of NCBI NO: 34913354 NR Description: putative cytochrome P450 [Oryza sativa (japonica
  misc_feature (6)..(418): Homolog of NCBI NO: 34895168 NR Description: putative cytochrome P450 [Oryza sativa (japonica
  misc_feature (6)..(388): Homolog of NCBI NO: 38112707 NR Description: cytochrome P450 [Triticum aestivum]
  misc_feature (6)..(388): Homolog of NCBI NO: 34913362 NR Description: putative cytochrome P450 [Oryza sativa (japonica
MAALQLAALLALLLALWRLVWRPRAMARSFVRQGIRGPPYTFLAGSLPEAKRLLIAGRRGVPPLDAGCHDIMPILLPQFHRWVADYGKTFLFWIGLIPAIFSIDLQLIKQVLTDMTGLYQKDFMIPVLKSLFGNGVILINGDDWKRHRKVVLPAFNYEQIKSMSAVTAEVTRQMIQQWGEQIHQSNSDKKAAEIDMIHAFNDLTAKINGRVAFGTTHRDVEEVIVLMQEMQKVATAAMLDAPILWYLPTRRNLHVRRLNKQLRSKIMSIMQARLAADGAKYGRGDTGGCGDDLLGLLLEAWTPHRQVRGGDTLTTDEVIDECKTFFAAGQETTATLLVWAMFLLAVHPQWQDKVREEVLREFPGGDSDDVVPNADVLAKLKLVRTFQLSMSFFLYFRTNVFGIINAHIVSIKLIKVYKI

SEQ ID NO: 65867 - protein, 394 aa, Triticum aestivum
  peptide (1)..(394): Ceres Seq. ID no. 14308025
  misc_feature (1)..(368): Homolog of NCBI NO: 15226472 NR Description: cytochrome P450 family [Arabidopsis thaliana]
  misc_feature (6)..(363): Homolog of NCBI NO: 34913350 NR Description: putative cytochrome P450 [Oryza sativa (japonica
  misc_feature (1)..(372): Homolog of NCBI NO: 34896952 NR Description: putative cytochrome P450-related protein [Oryza
  misc_feature (1)..(370): Homolog of NCBI NO: 14719280 NR Description: cytochrome P450 [Zea mays]
  misc_feature (1)..(363): Homolog of NCBI NO: 34913346 NR Description: putative cytochrome P450 [Oryza sativa (japonica
  misc_feature (1)..(363): Homolog of NCBI NO: 22324446 NR Description: putative cytochrome P450 [Oryza sativa (japonica
  misc_feature (1)..(363): Homolog of NCBI NO: 34913354 NR Description: putative cytochrome P450 [Oryza sativa (japonica
  misc_feature (1)..(393): Homolog of NCBI NO: 34895168 NR Description: putative cytochrome P450 [Oryza sativa (japonica
  misc_feature (1)..(363): Homolog of NCBI NO: 38112707 NR Description: cytochrome P450 [Triticum aestivum]
  misc_feature (1)..(363): Homolog of NCBI NO: 34913362 NR Description: putative cytochrome P450 [Oryza sativa (japonica
MARSFVRQGIRGPPYTFLAGSLPEAKRLLIAGRRGVPPLDAGCHDIMPILLPQFHRWVADYGKTFLFWIGLIPAIFSIDLQLIKQVLTDMTGLYQKDFMIPVLKSLFGNGVILINGDDWKRHRKVVLPAFNYEQIKSMSAVTAEVTRQMIQQWGEQIHQSNSDKKAAEIDMIHAFNDLTAKINGRVAFGTTHRDVEEVIVLMQEMQKVATAAMLDAPILWYLPTRRNLHVRRLNKQLRSKIMSIMQARLAADGAKYGRGDTGGCGDDLLGLLLEAWTPHRQVRGGDTLTTDEVIDECKTFFAAGQETTATLLVWAMFLLAVHPQWQDKVREEVLREFPGGDSDDVVPNADVLAKLKLVRTFQLSMSFFLYFRTNVFGIINAHIVSIKLIKVYKI

SEQ ID NO: 65868 - protein, 348 aa, Triticum aestivum
  peptide (1)..(348): Ceres Seq. ID no. 14308026
  misc_feature (1)..(322): Homolog of NCBI NO: 15226472 NR Description: cytochrome P450 family [Arabidopsis thaliana]
  misc_feature (1)..(317): Homolog of NCBI NO: 34913350 NR Description: putative cytochrome P450 [Oryza sativa (japonica
  misc_feature (1)..(326): Homolog of NCBI NO: 34896952 NR Description: putative cytochrome P450-related protein [Oryza
  misc_feature (1)..(324): Homolog of NCBI NO: 14719280 NR Description: cytochrome P450 [Zea mays]
  misc_feature (1)..(317): Homolog of NCBI NO: 34913346 NR Description: putative cytochrome P450 [Oryza sativa (japonica
  misc_feature (1)..(317): Homolog of NCBI NO: 22324446 NR Description: putative cytochrome P450 [Oryza sativa (japonica
  misc_feature (1)..(317): Homolog of NCBI NO: 34913354 NR Description: putative cytochrome P450 [Oryza sativa (japonica
  misc_feature (1)..(347): Homolog of NCBI NO: 34895168 NR Description: putative cytochrome P450 [Oryza sativa (japonica
  misc_feature (1)..(317): Homolog of NCBI NO: 38112707 NR Description: cytochrome P450 [Triticum aestivum]
  misc_feature (1)..(317): Homolog of NCBI NO: 34913362 NR Description: putative cytochrome P450 [Oryza sativa (japonica
MPILLPQFHRWVADYGKTFLFWIGLIPAIFSIDLQLIKQVLTDMTGLYQKDFMIPVLKSLFGNGVILINGDDWKRHRKVVLPAFNYEQIKSMSAVTAEVTRQMIQQWGEQIHQSNSDKKAAEIDMIHAFNDLTAKINGRVAFGTTHRDVEEVIVLMQEMQKVATAAMLDAPILWYLPTRRNLHVRRLNKQLRSKIMSIMQARLAADGAKYGRGDTGGCGDDLLGLLLEAWTPHRQVRGGDTLTTDEVIDECKTFFAAGQETTATLLVWAMFLLAVHPQWQDKVREEVLREFPGGDSDDVVPNADVLAKLKLVRTFQLSMSFFLYFRTNVFGIINAHIVSIKLIKVYKI

SEQ ID NO: 65869 - DNA, 848 bp, Triticum aestivum
  misc_feature (1)..(848): Ceres Seq. ID no. 12626306
cggtctcaccccaaacccattgtgcatctccatccccacctcctccgatcccatccacccccaccctcaccgccaccaagtcaaagatccaaccttcactccaccaccatgacgaagccatcgccatccccatcgccggcgccggccaagggcgcggggtcgctgcggggcagccagctgaagcagctgcgctccctcttcgaccgcttcgacatggacggcgacggcagcctcacccagctcgagctggcggccctgctccgctccctcggcctgcgccccacgggcgacgagtcgcgggccctcctcctcgccatcgacgccgacggcagcggcaccgtggagttcgacgagctggcgcgggccatcgcgccggtgctcaccgcccacgcgccgcggctcgtcgaccaggcgcagctgctcgaggtcttccgcgccttcgaccgcgacggcaacggctacatctccgccgccgagctcgcgcgttccatggccaagctgggccagccgctcacgttcgaggagctgcggaccatgatgcgggacgcggacgcggatggggacggcgtgattagctttggggagttcgccgccgtcatggccaggtccgcgctcgacttcctcggcgtccccgccgcctgagatgtgagatgatgaccggccgggctccggctggctctgatcggatggactggtagtatgattcttcttctttggtagaactagtcgtagtagggtggttcaaggcccggactggatcaactgtgacgaactcacacggagttgcaacgttgacctggaatgtgtataaattttggtaatttggtcaatcgatgcgtccgctgctg

SEQ ID NO: 65870 - protein, 213 aa, Triticum aestivum
  peptide (1)..(213): Ceres Seq. ID no. 12626307
  misc_feature (139)..(167): Pfam Name: EF hand Pfam Description: EF hand
  misc_feature (52)..(200): Homolog of NCBI NO: 4959162 NR Description: calmodulin mutant SYNCAM57A [synthetic construct]
  misc_feature (52)..(200): Homolog of NCBI NO: 4959148 NR Description: calmodulin mutant SYNCAM35 [synthetic construct]
  misc_feature (52)..(200): Homolog of NCBI NO: 4959171 NR Description: calmodulin mutant SYNCAM64B [synthetic construct]
  misc_feature (50)..(206): Homolog of NCBI NO: 15222618 NR Description: calmodulin, putative; protein id: At1g32250.1
  misc_feature (46)..(206): Homolog of NCBI NO: 15228441 NR Description: putative calmodulin
  misc_feature (55)..(206): Homolog of NCBI NO: 13359053 NR Description: P0436D06.14 [Oryza sativa (japonica
  misc_feature (59)..(213): Homolog of NCBI NO: 15230858 NR Description: calmodulin, putative; protein id: At3g25600.1
  misc_feature (59)..(213): Homolog of NCBI NO: 28393082 NR Description: putative calmodulin [Arabidopsis thaliana]
  misc_feature (59)..(210): Homolog of NCBI NO: 15221797 NR Description: calmodulin, putative; protein id: At1g18530.1
  misc_feature (43)..(212): Homolog of NCBI NO: 34912426 NR Description: P0681B11.17 [Oryza sativa (japonica
RSHPKPIVHLHPHLLRSHPPPPSPPPSQRSNLHSTTMTKPSPSPSPAPAKGAGSLRGSQLKQLRSLFDRFDMDGDGSLTQLELAALLRSLGLRPTGDESRALLLAIDADGSGTVEFDELARAIAPVLTAHAPRLVDQAQLLEVFRAFDRDGNGYISAAELARSMAKLGQPLTFEELRTMMRDADADGDGVISFGEFAAVMARSALDFLGVPAA

SEQ ID NO: 65871 - protein, 190 aa, Triticum aestivum
  peptide (1)..(190): Ceres Seq. ID no. 12626308
VSPQTHCASPSPPPPIPSTPTLTATKSKIQPSLHHHDEAIAIPIAGAGQGRGVAAGQPAEAAALPLRPLRHGRRRQPHPARAGGPAPLPRPAPHGRRVAGPPPRHRRRRQRHRGVRRAGAGHRAGAHRPRAAARRPGAAARGLPRLRPRRQRLHLRRRARAFHGQAGPAAHVRGAADHDAGRGRGWGRRD

SEQ ID NO: 65872 - protein, 177 aa, Triticum aestivum
  peptide (1)..(177): Ceres Seq. ID no. 12626309
  misc_feature (103)..(131): Pfam Name: EF hand Pfam Description: EF hand
  misc_feature (16)..(164): Homolog of NCBI NO: 4959162 NR Description: calmodulin mutant SYNCAM57A [synthetic construct]
  misc_feature (16)..(164): Homolog of NCBI NO: 4959148 NR Description: calmodulin mutant SYNCAM35 [synthetic construct]
  misc_feature (16)..(164): Homolog of NCBI NO: 4959171 NR Description: calmodulin mutant SYNCAM64B [synthetic construct]
  misc_feature (14)..(170): Homolog of NCBI NO: 15222618 NR Description: calmodulin, putative; protein id: At1g32250.1
  misc_feature (10)..(170): Homolog of NCBI NO: 15228441 NR Description: putative calmodulin
  misc_feature (19)..(170): Homolog of NCBI NO: 13359053 NR Description: P0436D06.14 [Oryza sativa (japonica
  misc_feature (23)..(177): Homolog of NCBI NO: 15230858 NR Description: calmodulin, putative; protein id: At3g25600.1
  misc_feature (23)..(177): Homolog of NCBI NO: 28393082 NR Description: putative calmodulin [Arabidopsis thaliana]
  misc_feature (23)..(174): Homolog of NCBI NO: 15221797 NR Description: calmodulin, putative; protein id: At1g18530.1
  misc_feature (7)..(176): Homolog of NCBI NO: 34912426 NR Description: P0681B11.17 [Oryza sativa (japonica
MTKPSPSPSPAPAKGAGSLRGSQLKQLRSLFDRFDMDGDGSLTQLELAALLRSLGLRPTGDESRALLLAIDADGSGTVEFDELARAIAPVLTAHAPRLVDQAQLLEVFRAFDRDGNGYISAAELARSMAKLGQPLTFEELRTMMRDADADGDGVISFGEFAAVMARSALDFLGVPAA

SEQ ID NO: 65873 - DNA, 1161 bp, Triticum aestivum
  misc_feature (1)..(1161): Ceres Seq. ID no. 12598265
agacacgagcggagcaccgagcaggcgcgcagcacatcatctgtcacaccggcggcggcggcggcatggggatgggcggtcgaggtgtggttggcgacaggtggtcgcagcgcgtcctctggatgtgcgccatcggcagcgccgtgagcctgtacttcgtggcggtggagaggcaggcgcagaaccgcgcgcgggcggtgtccgagggctttaagggcctggacggcgcagacggaggtggcagccgtggcggggaggacgtgtgactttggcggcgccgattccactaggttttccagctctcccgcacccgccgccgccacctccccactccccaccaccccctcagccatggcggtcgtcgagccggtgcccgggggcgacgtgaagctattcaaccgctggaccttcgaggatgttcaggtgagcgacatctcgctgaacgactacctcgcggtgacgtcgatgaagcactacaccttcctgccgcactcggccggccgctactcggccaagcgcttccgcaaggcgcagtgccccatcatcgagcgcctcaccaactccctcatgatgcacgggcgcaacaacggtaagaagatcatggccgtccgcatcatcaagcacaccatggagatcatccacctcctcaccgacgccaaccccatccagatcatcgttgacgccatcatcaacagtggtccacgtgaggatgctacccgtattgggtctgctggtgttgtgaggaggcaggctgtggatatctcccccctgaggagggtgaaccaggccatctaccttctgaccactggtgccagggagagcgccttcaggaatgtcaagaccattgctgagtgcctcgctgatgagctgatcaatgctgccaagggctcatccaacagctatgccatcaagaagaaggacgagattgagcgtgttgccaaggctaaccgttaagatggatgtgcatctgagggtctcatgcttttggctggagattttggactgaatgtgttttacaagatatctagaactgttttagctatgctttaagtttgtgatgaaagaacatttcgatgtagcggcaaggacttgcctgtctttatgaaaccaattcctgttcagacaaatttggagatgttgaatgtgtcgttgtgttctctc

SEQ ID NO: 65874 - protein, 200 aa, Triticum aestivum
  peptide (1)..(200): Ceres Seq. ID no. 12598266
  misc_feature (47)..(200): Pfam Name: Ribosomal protein S7p/S5e Pfam Description: Ribosomal protein S7p/S5e
  misc_feature (1)..(200): Homolog of NCBI NO: 34854534 NR Description: similar to ribosomal protein S5; 40S ribosomal
  misc_feature (1)..(200): Homolog of NCBI NO: 3717978 NR Description: 5S ribosomal protein [Mus musculus]
  misc_feature (1)..(200): Homolog of NCBI NO: 13904870 NR Description: ribosomal protein S5; 40S ribosomal protein S5
  misc_feature (1)..(200): Homolog of NCBI NO: 29825585 NR Description: 40S ribosomal protein S5 [Dermacentor variabilis]
  misc_feature (11)..(200): Homolog of NCBI NO: 40748265 NR Description: 40S ribosomal protein S5 [Capsicum annuum]
  misc_feature (11)..(200): Homolog of NCBI NO: 21617886 NR Description: 40S ribosomal protein S5 [Arabidopsis thaliana]
  misc_feature (11)..(200): Homolog of NCBI NO: 15228111 NR Description: 40S ribosomal protein S5
  misc_feature (1)..(200): Homolog of NCBI NO: 15229897 NR Description: 40S ribosomal protein S5, putative
  misc_feature (11)..(200): Homolog of NCBI NO: 6831665 NR Description: 40S RIBOSOMAL PROTEIN S5
  misc_feature (1)..(200): Homolog of NCBI NO: 34893994 NR Description: putative 40S ribosomal protein S5
MAVVEPVPGGDVKLFNRWTFEDVQVSDISLNDYLAVTSMKHYTFLPHSAGRYSAKRFRKAQCPIIERLTNSLMMHGRNNGKKIMAVRIIKHTMEIIHLLTDANPIQIIVDAIINSGPREDATRIGSAGVVRRQAVDISPLRRVNQAIYLLTTGARESAFRNVKTIAECLADELINAAKGSSNSYAIKKKDEIERVAKANR

SEQ ID NO: 65875 - protein, 162 aa, Triticum aestivum
  peptide (1)..(162): Ceres Seq. ID no. 12598267
  misc_feature (9)..(162): Pfam Name: Ribosomal protein S7p/S5e Pfam Description: Ribosomal protein S7p/S5e
  misc_feature (1)..(162): Homolog of NCBI NO: 34854534 NR Description: similar to ribosomal protein S5; 40S ribosomal
  misc_feature (1)..(162): Homolog of NCBI NO: 3717978 NR Description: 5S ribosomal protein [Mus musculus]
  misc_feature (1)..(162): Homolog of NCBI NO: 13904870 NR Description: ribosomal protein S5; 40S ribosomal protein S5
  misc_feature (1)..(162): Homolog of NCBI NO: 29825585 NR Description: 40S ribosomal protein S5 [Dermacentor variabilis]
  misc_feature (1)..(162): Homolog of NCBI NO: 40748265 NR Description: 40S ribosomal protein S5 [Capsicum annuum]
  misc_feature (1)..(162): Homolog of NCBI NO: 21617886 NR Description: 40S ribosomal protein S5 [Arabidopsis thaliana]
  misc_feature (1)..(162): Homolog of NCBI NO: 15228111 NR Description: 40S ribosomal protein S5
  misc_feature (1)..(162): Homolog of NCBI NO: 15229897 NR Description: 40S ribosomal protein S5, putative
  misc_feature (1)..(162): Homolog of NCBI NO: 6831665 NR Description: 40S RIBOSOMAL PROTEIN S5
  misc_feature (1)..(162): Homolog of NCBI NO: 34893994 NR Description: putative 40S ribosomal protein S5
MKHYTFLPHSAGRYSAKRFRKAQCPIIERLTNSLMMHGRNNGKKIMAVRIIKHTMEIIHLLTDANPIQIIVDAIINSGPREDATRIGSAGVVRRQAVDISPLRRVNQAIYLLTTGARESAFRNVKTIAECLADELINAAKGSSNSYAIKKKDEIERVAKANR

SEQ ID NO: 65876 - protein, 128 aa, Triticum aestivum
  peptide (1)..(128): Ceres Seq. ID no. 12598268
  misc_feature (1)..(128): Pfam Name: Ribosomal protein S7p/S5e Pfam Description: Ribosomal protein S7p/S5e
  misc_feature (1)..(128): Homolog of NCBI NO: 34854534 NR Description: similar to ribosomal protein S5; 40S ribosomal
  misc_feature (1)..(128): Homolog of NCBI NO: 3717978 NR Description: 5S ribosomal protein [Mus musculus]
  misc_feature (1)..(128): Homolog of NCBI NO: 13904870 NR Description: ribosomal protein S5; 40S ribosomal protein S5
  misc_feature (1)..(128): Homolog of NCBI NO: 29825585 NR Description: 40S ribosomal protein S5 [Dermacentor variabilis]
  misc_feature (1)..(128): Homolog of NCBI NO: 40748265 NR Description: 40S ribosomal protein S5 [Capsicum annuum]
  misc_feature (1)..(128): Homolog of NCBI NO: 21617886 NR Description: 40S ribosomal protein S5 [Arabidopsis thaliana]
  misc_feature (1)..(128): Homolog of NCBI NO: 15228111 NR Description: 40S ribosomal protein S5
  misc_feature (1)..(128): Homolog of NCBI NO: 15229897 NR Description: 40S ribosomal protein S5, putative
  misc_feature (1)..(128): Homolog of NCBI NO: 6831665 NR Description: 40S RIBOSOMAL PROTEIN S5
  misc_feature (1)..(128): Homolog of NCBI NO: 34893994 NR Description: putative 40S ribosomal protein S5
MMHGRNNGKKIMAVRIIKHTMEIIHLLTDANPIQIIVDAIINSGPREDATRIGSAGVVRRQAVDISPLRRVNQAIYLLTTGARESAFRNVKTIAECLADELINAAKGSSNSYAIKKKDEIERVAKANR

SEQ ID NO: 65877 - DNA, 787 bp, Triticum aestivum
  misc_feature (1)..(787): Ceres Seq. ID no. 12780295
tttgattgtcggtactgccccctaatcactagaggaggaggtgcaacccgctttagggagcaccttggaggtataccaggtgatgtgaaacagagtatcacagcatactttgacaaggaattgtcgaccaacaaagtatcaatgcagccaaagatcagcactgctttgaatgttgagtcaaaagatgtacttggccaagcttgggaaaagttttttcatgctaatgacattgctggtctgaaagcaaattgtccctattttcgttcggctgtcaagataactcaaaaccttggcccagctcctgttccaactgccaaggagattgatgggatatatttggacaagaattatgaagaagctgagcagtggctgaagatgttcaagcaagactggaggaactatggtgtaactgtgatgtgtgactcatggacagggcctactggtatgagtctcatcaatttcatggtgtattgcaatgcacggatgttctttcataaatccattgatgcttctggtcaaactcagactgcagatacgtgctgaagaagaacaaggccctgcaggcagggtgaagagaaagaaccagaagaaggcaagtggtggcggcgacgccggtggtgatgaggaagaggaatgaggaactagtagctatcaccttatatttatcaaatgttggtgttatgagtactttagctgagaggcctgagactttcatgggttatcctcttgtcattttgtcactttatcactgttgttagcatgtatgcacttctttatgtttggagct

SEQ ID NO: 65878 - protein, 180 aa, Triticum aestivum
  peptide (1)..(180): Ceres Seq. ID no. 12780296
  misc_feature (103)..(178): Pfam Name: Protein of unknown function (DUF 659) Pfam Description: Protein of unknown function (DUF 659)
  misc_feature (101)..(144): Homolog of NCBI NO: 20805053 NR Description: B1108H10.13 [Oryza sativa (japonica
  misc_feature (47)..(177): Homolog of NCBI NO: 11994683 NR Description: emb|CAB39405.1~gene_id:MTO12.4~strong similarity
  misc_feature (47)..(177): Homolog of NCBI NO: 15229049 NR Description: unknown protein; protein id: At3g17450.1
  misc_feature (52)..(177): Homolog of NCBI NO: 4538624 NR Description: hypothetical protein [Nicotiana tabacum]
  misc_feature (64)..(119): Homolog of NCBI NO: 37530924 NR Description: unknown protein [Oryza sativa (japonica
  misc_feature (38)..(171): Homolog of NCBI NO: 5852176 NR Description: zhb0006.1 [Oryza sativa (indica cultivar-group)]
  misc_feature (38)..(178): Homolog of NCBI NO: 15451569 NR Description: Putative transposable element [Oryza sativa]
FDCRYCPLITRGGGATRFREHLGGIPGDVKQSITAYFDKELSTNKVSMQPKISTALNVESKDVLGQAWEKFFHANDIAGLKANCPYFRSAVKITQNLGPAPVPTAKEIDGIYLDKNYEEAEQWLKMFKQDWRNYGVTVMCDSWTGPTGMSLINFMVYCNARMFFHKSIDASGQTQTADTC

SEQ ID NO: 65879 - protein, 133 aa, Triticum aestivum
  peptide (1)..(133): Ceres Seq. ID no. 12780297
  misc_feature (56)..(131): Pfam Name: Protein of unknown function (DUF 659) Pfam Description: Protein of unknown function (DUF 659)
  misc_feature (54)..(97): Homolog of NCBI NO: 20805053 NR Description: B1108H10.13 [Oryza sativa (japonica
  misc_feature (1)..(130): Homolog of NCBI NO: 11994683 NR Description: emb|CAB39405.1~gene_id:MTO12.4~strong similarity
  misc_feature (1)..(130): Homolog of NCBI NO: 15229049 NR Description: unknown protein; protein id: At3g17450.1
  misc_feature (5)..(130): Homolog of NCBI NO: 4538624 NR Description: hypothetical protein [Nicotiana tabacum]
  misc_feature (17)..(72): Homolog of NCBI NO: 37530924 NR Description: unknown protein [Oryza sativa (japonica
  misc_feature (1)..(124): Homolog of NCBI NO: 5852176 NR Description: zhb0006.1 [Oryza sativa (indica cultivar-group)]
  misc_feature (1)..(131): Homolog of NCBI NO: 15451569 NR Description: Putative transposable element [Oryza sativa]
MQPKISTALNVESKDVLGQAWEKFFHANDIAGLKANCPYFRSAVKITQNLGPAPVPTAKEIDGIYLDKNYEEAEQWLKMFKQDWRNYGVTVMCDSWTGPTGMSLINFMVYCNARMFFHKSIDASGQTQTADTC

SEQ ID NO: 65880 - DNA, 1281 bp, Triticum aestivum
  misc_feature (1)..(1281): Ceres Seq. ID no. 12780298
ccaccttatgcaagaggggtttcatcatttaggcatctcattgctagattgcctgcaagggcccactctatttattacagagatgaaatcggtaatatttcaacatcacacttatggagtgattcgaagaagacccaactggaaattgaaccgaggtttcccttgtttggtggttggcaaacaacctttactattggttatggtttacctcttcaagactttgttttcagtgctgatggaaagagatttctcaatatcacatttggttctccaatggaggagattctcatagaaaagctcatcgtaaaggtggttctacctgaaggttcaaaggatattgatgtttcagctccatttccaacaaatcaatggcaagaggtgaagtattcacaccttgacattgctggaaggccagttcttgtcttggaaaagcctgatgttattccagagcataatttgcatttccaggtgtactacaaattcaataacatctcgttgctcatagagccgatgatgttgattactggcttcttcctcctgtttgttgcatgtattgcctacatgcacactgacatgtcaatctctaagaactctccttcttatctggcaaagctgcaatgggatgaggtgcaagccactgttcagcaaatccagggcatctttcaccagtgcttagctgttcatgataagctagagacatcattgcacgatttgtctaggtctggagacgctaaatcttgcaaagcagctcgtaaagccgctgatgcacagtttaaggaattagcgaaagagctgaagccgctgttgttatctgtacagtcatcccctcagtcttatcagatatggccaaagctagaggacttggttgcgaaggagagggagatgcaggagaagctcatggcgaggcatgccaccgtggttgacagcgtcgagaagaagcagcgcgggcaagacatagaaaaccggatttcctcccagcagcagaagatcgctgcgctgaggcaagaggtcgaatctcttctagagtaccttagcgagatatgagcgaatccggtctcatcttacatgattagtgattagactgaaggtcatcttctgcactttgtgtagatgttgtgttggtaacccattatcctagttcctgaggctaggtttcctagactctgtaatgtgatataagcgccttaatcattttggaactgattaatttttttgcatcatctaaaaagaaatcatggggaaccacccccttgggactccttttgcttaagtggttattgt

SEQ ID NO: 65881 - protein, 347 aa, Triticum aestivum
  peptide (1)..(347): Ceres Seq. ID no. 12780299
  misc_feature (2)..(189): Pfam Name: Ribophorin I Pfam Description: Ribophorin I
  misc_feature (6)..(330): Homolog of NCBI NO: 28175644 NR Description: Similar to ribophorin I [Xenopus laevis]
  misc_feature (6)..(344): Homolog of NCBI NO: 38512106 NR Description: Ribophorin I [Rattus norvegicus]
  misc_feature (6)..(344): Homolog of NCBI NO: 9857227 NR Description: ribophorin I [Sus scrofa]
  misc_feature (6)..(344): Homolog of NCBI NO: 14124942 NR Description: Similar to ribophorin I [Homo sapiens]
  misc_feature (6)..(344): Homolog of NCBI NO: 4506675 NR Description: ribophorin I [Homo sapiens]
  misc_feature (172)..(347): Homolog of NCBI NO: 24417456 NR Description: unknown [Arabidopsis thaliana]
  misc_feature (6)..(194): Homolog of NCBI NO: 15226341 NR Description: putative ribophorin I; protein id: At2g01720.1
  misc_feature (2)..(209): Homolog of NCBI NO: 7489438 NR Description: ribophorin I homolog - barley (fragment)
  misc_feature (2)..(347): Homolog of NCBI NO: 15223039 NR Description: putative ribophorin I
  misc_feature (83)..(347): Homolog of NCBI NO: 5918187 NR Description: ribophorin I [Hordeum vulgare]
PPYARGVSSFRHLIARLPARAHSIYYRDEIGNISTSHLWSDSKKTQLEIEPRFPLFGGWQTTFTIGYGLPLQDFVFSADGKRFLNITFGSPMEEILIEKLIVKVVLPEGSKDIDVSAPFPTNQWQEVKYSHLDIAGRPVLVLEKPDVIPEHNLHFQVYYKFNNISLLIEPMMLITGFFLLFVACIAYMHTDMSISKNSPSYLAKLQWDEVQATVQQIQGIFHQCLAVHDKLETSLHDLSRSGDAKSCKAARKAADAQFKELAKELKPLLLSVQSSPQSYQIWPKLEDLVAKEREMQEKLMARHATVVDSVEKKQRGQDIENRISSQQQKIAALRQEVESLLEYLSEI

SEQ ID NO: 65882 - protein, 256 aa, Triticum aestivum
  peptide (1)..(256): Ceres Seq. ID no. 12780300
  misc_feature (1)..(98): Pfam Name: Ribophorin I Pfam Description: Ribophorin I
  misc_feature (1)..(239): Homolog of NCBI NO: 28175644 NR Description: Similar to ribophorin I [Xenopus laevis]
  misc_feature (1)..(253): Homolog of NCBI NO: 38512106 NR Description: Ribophorin I [Rattus norvegicus]
  misc_feature (1)..(253): Homolog of NCBI NO: 9857227 NR Description: ribophorin I [Sus scrofa]
  misc_feature (1)..(253): Homolog of NCBI NO: 14124942 NR Description: Similar to ribophorin I [Homo sapiens]
  misc_feature (1)..(253): Homolog of NCBI NO: 4506675 NR Description: ribophorin I [Homo sapiens]
  misc_feature (81)..(256): Homolog of NCBI NO: 24417456 NR Description: unknown [Arabidopsis thaliana]
  misc_feature (1)..(103): Homolog of NCBI NO: 15226341 NR Description: putative ribophorin I; protein id: At2g01720.1
  misc_feature (1)..(118): Homolog of NCBI NO: 7489438 NR Description: ribophorin I homolog - barley (fragment)
  misc_feature (1)..(256): Homolog of NCBI NO: 15223039 NR Description: putative ribophorin I
  misc_feature (1)..(256): Homolog of NCBI NO: 5918187 NR Description: ribophorin I [Hordeum vulgare]
MEEILIEKLIVKVVLPEGSKDIDVSAPFPTNQWQEVKYSHLDIAGRPVLVLEKPDVIPEHNLHFQVYYKFNNISLLIEPMMLITGFFLLFVACIAYMHTDMSISKNSPSYLAKLQWDEVQATVQQIQGIFHQCLAVHDKLETSLHDLSRSGDAKSCKAARKAADAQFKELAKELKPLLLSVQSSPQSYQIWPKLEDLVAKEREMQEKLMARHATVVDSVEKKQRGQDIENRISSQQQKIAALRQEVESLLEYLSEI

SEQ ID NO: 65883 - protein, 177 aa, Triticum aestivum
  peptide (1)..(177): Ceres Seq. ID no. 12780301
  misc_feature (1)..(160): Homolog of NCBI NO: 28175644 NR Description: Similar to ribophorin I [Xenopus laevis]
  misc_feature (1)..(174): Homolog of NCBI NO: 38512106 NR Description: Ribophorin I [Rattus norvegicus]
  misc_feature (1)..(174): Homolog of NCBI NO: 9857227 NR Description: ribophorin I [Sus scrofa]
  misc_feature (1)..(174): Homolog of NCBI NO: 14124942 NR Description: Similar to ribophorin I [Homo sapiens]
  misc_feature (1)..(174): Homolog of NCBI NO: 4506675 NR Description: ribophorin I [Homo sapiens]
  misc_feature (2)..(177): Homolog of NCBI NO: 24417456 NR Description: unknown [Arabidopsis thaliana]
  misc_feature (1)..(24): Homolog of NCBI NO: 15226341 NR Description: putative ribophorin I; protein id: At2g01720.1
  misc_feature (1)..(39): Homolog of NCBI NO: 7489438 NR Description: ribophorin I homolog - barley (fragment)
  misc_feature (1)..(177): Homolog of NCBI NO: 15223039 NR Description: putative ribophorin I
  misc_feature (1)..(177): Homolog of NCBI NO: 5918187 NR Description: ribophorin I [Hordeum vulgare]
MMLITGFFLLFVACIAYMHTDMSISKNSPSYLAKLQWDEVQATVQQIQGIFHQCLAVHDKLETSLHDLSRSGDAKSCKAARKAADAQFKELAKELKPLLLSVQSSPQSYQIWPKLEDLVAKEREMQEKLMARHATVVDSVEKKQRGQDIENRISSQQQKIAALRQEVESLLEYLSEI

SEQ ID NO: 65884 - DNA, 826 bp, Triticum aestivum
  misc_feature (1)..(826): Ceres Seq. ID no. 13656871
tagaacatcataatcgaaaacccgatcgcatcctggtcacggactcacgggcccttgtgacgcgatgctgcgcagcttccctcaggcccgtccgctcctcaggaggatggggttcgacaagagggatgcctacttctttaagcagattggcaagggcatgctctgcacctacgcgcttttcggcgcagcatggctctggaatgagacgtcgccgcttggttggtggacgctcaagccactccccaaggaagaaaaagaaatggcacatctttatgagcgcagggagtttccctaccctggtgatgaagaggcagttgaggagttcataaaaagtgagggtgctctaggtaccacgatcgggcccaaaggttttgcggatacaaatgtggactctgataaaatgcagaagcaactacagtcgaaaaagtttgaccaggaggcacaaaacctctggttccgaatgaggaatgaggttgcacatgaactacaagagaagggatttggtgttgaatgaagttttattcttctgaaaggagaagtgaaatggtgtcatgctagagttatctttggaccgtctcagctctgctaattgacacatcagctagtaacttagaataaatgcaaataggaaacatggagcttatgctacgattatcctcctttttcccgctctctgcctgggctctatcttattctatggcaaatgtctttgcagagcatctacgttgtgtcatgtcatgccaatattaatcttgttggcttgttccatttcttctgttactgatttctgatctttaagacatgttatcaaccagttgttgagtcc

SEQ ID NO: 65885 - protein, 149 aa, Triticum aestivum
  peptide (1)..(149): Ceres Seq. ID no. 15220594
  misc_feature (2)..(149): Homolog of NCBI NO: 15237778 NR Description: expressed protein [Arabidopsis thaliana]
  misc_feature (2)..(149): Homolog of NCBI NO: 21592650 NR Description: unknown [Arabidopsis thaliana]
  misc_feature (1)..(149): Homolog of NCBI NO: 14587335 NR Description: P0460H02.16 [Oryza sativa (japonica
MLRSFPQARPLLRRMGFDKRDAYFFKQIGKGMLCTYALFGAAWLWNETSPLGWWTLKPLPKEEKEMAHLYERREFPYPGDEEAVEEFIKSEGALGTTIGPKGFADTNVDSDKMQKQLQSKKFDQEAQNLWFRMRNEVAHELQEKGFGVE

SEQ ID NO: 65886 - protein, 135 aa, Triticum aestivum
  peptide (1)..(135): Ceres Seq. ID no. 15220595
  misc_feature (1)..(135): Homolog of NCBI NO: 15237778 NR Description: expressed protein [Arabidopsis thaliana]
  misc_feature (1)..(135): Homolog of NCBI NO: 21592650 NR Description: unknown [Arabidopsis thaliana]
  misc_feature (1)..(135): Homolog of NCBI NO: 14587335 NR Description: P0460H02.16 [Oryza sativa (japonica
MGFDKRDAYFFKQIGKGMLCTYALFGAAWLWNETSPLGWWTLKPLPKEEKEMAHLYERREFPYPGDEEAVEEFIKSEGALGTTIGPKGFADTNVDSDKMQKQLQSKKFDQEAQNLWFRMRNEVAHELQEKGFGVE

SEQ ID NO: 65887 - protein, 118 aa, Triticum aestivum
  peptide (1)..(118): Ceres Seq. ID no. 15220596
  misc_feature (1)..(118): Homolog of NCBI NO: 15237778 NR Description: expressed protein [Arabidopsis thaliana]
  misc_feature (1)..(118): Homolog of NCBI NO: 21592650 NR Description: unknown [Arabidopsis thaliana]
  misc_feature (1)..(118): Homolog of NCBI NO: 14587335 NR Description: P0460H02.16 [Oryza sativa (japonica
MLCTYALFGAAWLWNETSPLGWWTLKPLPKEEKEMAHLYERREFPYPGDEEAVEEFIKSEGALGTTIGPKGFADTNVDSDKMQKQLQSKKFDQEAQNLWFRMRNEVAHELQEKGFGVE

SEQ ID NO: 65888 - DNA, 943 bp, Triticum aestivum
  misc_feature (1)..(943): Ceres Seq. ID no. 12619560
acatacgctaaaaaaaaacacatgcgccgtaatggcccttaggtgcgcggccggcggcggcggcggcggcggcgcctacctgacgccgcggaggagcagatgctgcggcgtcggctctgcgcgaccctcagccacgaccagggggacacgagggctcagcctcctcctgaggatcccgtcctcacaatactccgaagctccatgggcgttgcgctgctcgcctgattcccctcctctggagggtgaccagcattcagatcgaactggggcgctgggggcgctgaaggccatggtgtgcgacatgttcaggcccctggcgcgcaacatctcggatatccgatcccttcgcactgtctttgacctcgaggattatcaagtcggcatgctgtttggtgcttttcttggctgcgtcgggtgctaccagctgtggaaggctgctccttccatctttgttgatgctgcccttgcctatgcattctataaactgagcgttatgtcctcggaggtgcgccggcagggcaaatgcaatgatttgctgactcgcttgaaatttggtattgtggttattatggctactaaggacttcaggaagaactatgaactcttggatattgtcaagatgcctgttttctttctttatctttcgacattcatctttgatgtggcacgcatgaagaaatatgcaaagcattatctgattctcacagttaatttattgagaatgaagggcggagctcaagaattgttcagaataatgttttatccgagctatacatctccatatgatgattgcttccgtaggaaataaaatgtagacccctgagattgtgtggatctgtttatgtgagatttttatataagaatttttagtataatgtgtaataacatttatgtaatgctagtttacttgcccatggttgtgtacagttttgcggcattcttc

SEQ ID NO: 65889 - protein, 268 aa, Triticum aestivum
  peptide (1)..(268): Ceres Seq. ID no. 12619561
  misc_feature (13)..(244): Homolog of NCBI NO: 38344913 NR Description: OSJNBb0079B02.16 [Oryza sativa (japonica
HTLKKNTCAVMALRCAAGGGGGGGAYLTPRRSRCCGVGSARPSATTRGTRGLSLLLRIPSSQYSEAPWALRCSPDSPPLEGDQHSDRTGALGALKAMVCDMFRPLARNISDIRSLRTVFDLEDYQVGMLFGAFLGCVGCYQLWKAAPSIFVDAALAYAFYKLSVMSSEVRRQGKCNDLLTRLKFGIVVIMATKDFRKNYELLDIVKMPVFFLYLSTFIFDVARMKKYAKHYLILTVNLLRMKGGAQELFRIMFYPSYTSPYDDCFRRK

SEQ ID NO: 65890 - protein, 258 aa, Triticum aestivum; identical to SEQ ID NO: 64952
  peptide (1)..(258): Ceres Seq. ID no. 12619562
  misc_feature (3)..(234): Homolog of NCBI NO: 38344913 NR Description: OSJNBb0079B02.16 [Oryza sativa (japonica

SEQ ID NO: 65891 - protein, 172 aa, Triticum aestivum; identical to SEQ ID NO: 64953
  peptide (1)..(172): Ceres Seq. ID no. 12619563
  misc_feature (1)..(148): Homolog of NCBI NO: 38344913 NR Description: OSJNBb0079B02.16 [Oryza sativa (japonica

SEQ ID NO: 65892 - DNA, 1504 bp, Triticum aestivum
  misc_feature (1)..(1504): Ceres Seq. ID no. 14303664
ataaaatcggagaaacccagaaaaaaaaggactaaacgagatactgagagccgaagacctaaattccgtagagaaaactcgcatcgccgccgctgcctagatcgccgggcgccgccatgtcgaccccgggcgccgcctactacgcttccctcgcgcgcaagcagtacttctgctaccaatgcaaccgcaccgtcctcatcgccgcctccgccgcggccgccggcgagctctcatgccccgactgccgcggcgacttcctggaggaggtcaccgtccccgcccccaccatcctccccttcccctttgccttcccccctatgatgcccaccgcctcctccccgtcccgatcctcctcctcctccaccgccgcgcccccctccagcgacctctccaacttcctcaccagcatcctcgacctccaggagggccgccgcgttaggtccaggagcgggagcggtgccgcctcggccgctggcacggccacgcctgagaacgagccggagtccttcgacccgctcgtgtttttccagaactacatccacaccctcatggaggggggcgccaacatccaggtgctcctcgacgacgccagcgtcaacctcgcccccggcctaggcggccgtgccggtgggacaagctacggggactacttcgtcggcccgggactggagcaactcatcgagcagctcgccgagaacgatcccaaccgctatggcacgccgccggctgccaagtccgccctgaccactcttcctgacgtcgttgtcaccgatgccatggttgcggcggcagagggcgccgagtgtgctgtgtgcaaggaagatttctcacctggagatggggccaagcagatgccctgcaagcatatctaccacgcagattgcatcgtaccctggttggagctccacaattcgtgccccatttgtcgctttgagctgcccaccgatgatcctgattatgagggcaataaggcctcaaacgcacagtcagctgttggtatcgctgctgctgctgcatctgggagctctggtgctgctgaggaaggaggggaggagagtggggaggctgcaagggtggtggaaaggagattcaatgtgtcattggcttggccgtttggtggattggcaggtcaaacaccacagcaagatgggaacaatgccggtgctggcagtagctcacaggacagcggttcgcaggatggagctggtggcagtaacaaaaattgaacacaaatctgtgatcagttggaggtctccttgtcggcgatgcgtccagaggtcgacaatgttgatgcgccaccgtgagttatactacagacaatcgaaagaccaaaggaatttacagcctgtttatttggtggaacaaaacagtgttggttttagttgtcgttgtcgctgtccgttagggcgtgtacgcaaggcacagagactgccgtggcaggaagttgtgcgttgcgtagactctttgtgcagatttgttaaattgattctcgtttatggacccc

SEQ ID NO: 65893 - protein, 369 aa, Triticum aestivum
  peptide (1)..(369): Ceres Seq. ID no. 14303665
  misc_feature (230)..(270): Pfam Name: Zinc finger, C3HC4 type (RING finger) Pfam Description: Zinc finger, C3HC4 type (RING finger)
  misc_feature (174)..(304): Homolog of NCBI NO: 15231238 NR Description: expressed protein [Arabidopsis thaliana]
  misc_feature (174)..(353): Homolog of NCBI NO: 18405411 NR Description: expressed protein [Arabidopsis thaliana]
  misc_feature (75)..(276): Homolog of NCBI NO: 18410530 NR Description: expressed protein [Arabidopsis thaliana]
  misc_feature (90)..(356): Homolog of NCBI NO: 18405518 NR Description: RING-H2 finger protein (RHC1a) [Arabidopsis
  misc_feature (17)..(51): Homolog of NCBI NO: 34903272 NR Description: unnamed protein product [Oryza sativa (japonica
  misc_feature (136)..(311): Homolog of NCBI NO: 34903272 NR Description: unnamed protein product [Oryza sativa (japonica
  misc_feature (173)..(368): Homolog of NCBI NO: 15241188 NR Description: expressed protein [Arabidopsis thaliana]
  misc_feature (28)..(292): Homolog of NCBI NO: 15231003 NR Description: expressed protein [Arabidopsis thaliana]
  misc_feature (28)..(292): Homolog of NCBI NO: 11994207 NR Description: gene_id:MPN9.20~unknown protein [Arabidopsis
  misc_feature (1)..(368): Homolog of NCBI NO: 37535546 NR Description: putative zinc finger protein
MSTPGAAYYASLARKQYFCYQCNRTVLIAASAAAAGELSCPDCRGDFLEEVTVPAPTILPFPFAFPPMMPTASSPSRSSSSSTAAPPSSDLSNFLTSILDLQEGRRVRSRSGSGAASAAGTATPENEPESFDPLVFFQNYIHTLMEGGANIQVLLDDASVNLAPGLGGRAGGTSYGDYFVGPGLEQLIEQLAENDPNRYGTPPAAKSALTTLPDVVVTDAMVAAAEGAECAVCKEDFSPGDGAKQMPCKHIYHADCIVPWLELHNSCPICRFELPTDDPDYEGNKASNAQSAVGIAAAAASGSSGAAEEGGEESGEAARVVERRFNVSLAWPFGGLAGQTPQQDGNNAGAGSSSQDSGSQDGAGGSNKN

SEQ ID NO: 65894 - protein, 302 aa, Triticum aestivum
  peptide (1)..(302): Ceres Seq. ID no. 14303666
  misc_feature (163)..(203): Pfam Name: Zinc finger, C3HC4 type (RING finger) Pfam Description: Zinc finger, C3HC4 type (RING finger)
  misc_feature (107)..(237): Homolog of NCBI NO: 38454178 NR Description: At3g13430 [Arabidopsis thaliana]
  misc_feature (107)..(237): Homolog of NCBI NO: 15231238 NR Description: expressed protein [Arabidopsis thaliana]
  misc_feature (107)..(286): Homolog of NCBI NO: 18405411 NR Description: expressed protein [Arabidopsis thaliana]
  misc_feature (8)..(209): Homolog of NCBI NO: 18410530 NR Description: expressed protein [Arabidopsis thaliana]
  misc_feature (23)..(289): Homolog of NCBI NO: 18405518 NR Description: RING-H2 finger protein (RHC1a) [Arabidopsis
  misc_feature (69)..(244): Homolog of NCBI NO: 34903272 NR Description: unnamed protein product [Oryza sativa (japonica
  misc_feature (106)..(301): Homolog of NCBI NO: 15241188 NR Description: expressed protein [Arabidopsis thaliana]
  misc_feature (1)..(225): Homolog of NCBI NO: 15231003 NR Description: expressed protein [Arabidopsis thaliana]
  misc_feature (1)..(225): Homolog of NCBI NO: 11994207 NR Description: gene_id:MPN9.20~unknown protein [Arabidopsis
  misc_feature (1)..(301): Homolog of NCBI NO: 37535546 NR Description: putative zinc finger protein
MMPTASSPSRSSSSSTAAPPSSDLSNFLTSILDLQEGRRVRSRSGSGAASAAGTATPENEPESFDPLVFFQNYIHTLMEGGANIQVLLDDASVNLAPGLGGRAGGTSYGDYFVGPGLEQLIEQLAENDPNRYGTPPAAKSALTTLPDVVVTDAMVAAAEGAECAVCKEDFSPGDGAKQMPCKHIYHADCIVPWLELHNSCPICRFELPTDDPDYEGNKASNAQSAVGIAAAAASGSSGAAEEGGEESGEAARVVERRFNVSLAWPFGGLAGQTPQQDGNNAGAGSSSQDSGSQDGAGGSNKN

SEQ ID NO: 65895 - protein, 301 aa, Triticum aestivum
  peptide (1)..(301): Ceres Seq. ID no. 14303667
  misc_feature (162)..(202): Pfam Name: Zinc finger, C3HC4 type (RING finger) Pfam Description: Zinc finger, C3HC4 type (RING finger)
  misc_feature (106)..(236): Homolog of NCBI NO: 38454178 NR Description: At3g13430 [Arabidopsis thaliana]
  misc_feature (106)..(236): Homolog of NCBI NO: 15231238 NR Description: expressed protein [Arabidopsis thaliana]
  misc_feature (106)..(285): Homolog of NCBI NO: 18405411 NR Description: expressed protein [Arabidopsis thaliana]
  misc_feature (7)..(208): Homolog of NCBI NO: 18410530 NR Description: expressed protein [Arabidopsis thaliana]
  misc_feature (22)..(288): Homolog of NCBI NO: 18405518 NR Description: RING-H2 finger protein (RHC1a) [Arabidopsis
  misc_feature (68)..(243): Homolog of NCBI NO: 34903272 NR Description: unnamed protein product [Oryza sativa (japonica
  misc_feature (105)..(300): Homolog of NCBI NO: 15241188 NR Description: expressed protein [Arabidopsis thaliana]
  misc_feature (1)..(224): Homolog of NCBI NO: 15231003 NR Description: expressed protein [Arabidopsis thaliana]
  misc_feature (1)..(224): Homolog of NCBI NO: 11994207 NR Description: gene_id:MPN9.20~unknown protein [Arabidopsis
  misc_feature (1)..(300): Homolog of NCBI NO: 37535546 NR Description: putative zinc finger protein
MPTASSPSRSSSSSTAAPPSSDLSNFLTSILDLQEGRRVRSRSGSGAASAAGTATPENEPESFDPLVFFQNYIHTLMEGGANIQVLLDDASVNLAPGLGGRAGGTSYGDYFVGPGLEQLIEQLAENDPNRYGTPPAAKSALTTLPDVVVTDAMVAAAEGAECAVCKEDFSPGDGAKQMPCKHIYHADCIVPWLELHNSCPICRFELPTDDPDYEGNKASNAQSAVGIAAAAASGSSGAAEEGGEESGEAARVVERRFNVSLAWPFGGLAGQTPQQDGNNAGAGSSSQDSGSQDGAGGSNKN

SEQ ID NO: 65896 - DNA, 759 bp, Triticum aestivum
  misc_feature (1)..(759): Ceres Seq. ID no. 13657166
cttagaggtttaccgagtatcggacatggagctggtaagagttcttcctagtgctgaagatgaagtcaatgttgcatgctttcatccttcccctggaggtggtcttgtttatgggactaaggaagggaagctcaggatcctacaacacaatggcgcagacgctgcaagcatggcgctgaattgctttatcgaggaaaatatgcttgaggttcagaggtatgcgttggaaggctgaatgatcatttgcgtcatgagcttatatgtgtccttccctgcaggaacttttgtctgcaagctccatttttgtttaggagagcctcatggactaaattacaagatatcatcagggcctccgactaaatctttcgagcggcagatgattctccacgagtttgttcaagtgcaatgtactgatctattgctggtttccagagaatgctgtgggccgactctaatcgtgcatcgttttgcaacttttaactcaggtctgtgcacaggcggtgtgatgatgtaaatttggcatggtcatcgttgctgtcaagttcccacgaccctgtaattataaaactgtacatgtaatctccaatcagcttaaaacaaccgctgttgtattttagaaagctcgcaatcctaatcctcaagtttcttttacgtgggaaatgtttgtactatttctgtcctgaccaatgccagtgatttgcattaagatgaatgaaaaaaaaaaaaaccaaccgctaccaaagaaggaagagaatgacg

SEQ ID NO: 65897 - protein, 92 aa, Triticum aestivum
  peptide (1)..(92): Ceres Seq. ID no. 13657167
MIICVMSLYVSFPAGTFVCKLHFCLGEPHGLNYKISSGPPTKSFERQMILHEFVQVQCTDLLLVSRECCGPTLIVHRFATFNSGLCTGGVMM

SEQ ID NO: 65898 - protein, 87 aa, Triticum aestivum
  peptide (1)..(87): Ceres Seq. ID no. 13657168
MSLYVSFPAGTFVCKLHFCLGEPHGLNYKISSGPPTKSFERQMILHEFVQVQCTDLLLVSRECCGPTLIVHRFATFNSGLCTGGVMM

SEQ ID NO: 65899 - protein, 77 aa, Triticum aestivum
  peptide (1)..(77): Ceres Seq. ID no. 13657169
  misc_feature (1)..(52): Homolog of NCBI NO: 9758552 NR Description: contains similarity to unknown
  misc_feature (1)..(52): Homolog of NCBI NO: 15240053 NR Description: transducin / WD-40 repeat protein family
  misc_feature (1)..(69): Homolog of NCBI NO: 7485877 NR Description: hypothetical protein F20D22.9 - Arabidopsis
  misc_feature (1)..(71): Homolog of NCBI NO: 30678798 NR Description: transducin / WD-40 repeat protein family
  misc_feature (1)..(76): Homolog of NCBI NO: 18379250 NR Description: transducin / WD-40 repeat protein family
LEVYRVSDMELVRVLPSAEDEVNVACFHPSPGGGLVYGTKEGKLRILQHNGADAASMALNCFIEENMLEVQRYALEG

SEQ ID NO: 65900 - DNA, 1349 bp, Triticum aestivum
  misc_feature (1)..(1349): Ceres Seq. ID no. 13657515
atcggttagatattttctaggccacaaaaaaaaggttggtcgcaaaattagagaaggttgaggcgggcgtctggcatggaggcggaggcaaaggcgacctgggcggcggcgcctggctcgggagcggcgactgccgacgggggcttccctgtagatccggtgtgcagcgaaggttgccaatcttcccaggcgtggcggtctcggcgggttcggtccaagatgaagtcagcgatggtgctggctggaggagacgttgggttgttgcctcttctgtggctgcccatgacagctgtgccgccggcgctgccgaatgcagtggagagagcgccccagcggagtcgggagagtcagctgtgaaacctgatccgaaatctgtaggctggataagaagggtgcgagtgggcgcaaatccgatagagcgtatgccttgccctggcaggatgggagcgcttgagaagactatcaggggcttcgtggacagggagggtgatgaagtagtcaagccagagttagggaccactttcgattccctgacagaggcttatgatttttacaatatgtattcgtgggaacatggcttcggcattagatacgggaaaaccaggctaaatcctgataagaggaagaccatgcaggagattgtgtgcggatgctcggggaaaccccttcgagaaaatacaagaccgtgtaggtgcaagtgccctgcaatgattaggctgttgaggacatcggacaacgggtggtacatcacagagcatcgtgtcaagcataatcatgtcatgacgccaaattgtggtgaaatgttgcactggccgtcacacaagcacattgacgtgtacacgagagaccttgttcgtaacctaaggaagaacaacatcaacctgagcaaggtgtacaacataattggagggttctttgggacagtggagaatgtgccttttacgaaaagatctcttcggagcctgtgtgggcaaattagcagggacgaggcagaggacgacgtgaggaatacaagttttcgatgaactaggtgcaaaggacccggctaaatggcccaactccgcgatggacggccctcttaaacaccgtaacgggaggaccgtactgaaccttgcccccctgggcctcatcaatgagtacagacaacacactcatgcactgttcaaaaaagcctgcactaattgaatacatgggccaatacattcatgagctcgaatctccaggaggaccaaccgctgggataatagtaccatatgccagtacaacccatatgtaattttcgtatttgttgacatataaacaaactattgagacgataacgttctaaaagcatgtagtcaaacttttgt

SEQ ID NO: 65901 - protein, 200 aa, Triticum aestivum
  peptide (1)..(200): Ceres Seq. ID no. 13657516
  misc_feature (42)..(197): Pfam Name: FAR1 family Pfam Description: FAR1 family
  misc_feature (79)..(197): Homolog of NCBI NO: 34904846 NR Description: OJ1484_G09.16 [Oryza sativa (japonica
  misc_feature (13)..(118): Homolog of NCBI NO: 18397514 NR Description: expressed protein [Arabidopsis thaliana]
  misc_feature (23)..(194): Homolog of NCBI NO: 34899212 NR Description: similar to FAR1 domain [Oryza sativa (japonica
  misc_feature (25)..(161): Homolog of NCBI NO: 38346788 NR Description: OSJNBa0095H06.13 [Oryza sativa (japonica
  misc_feature (24)..(147): Homolog of NCBI NO: 32490045 NR Description: OSJNBa0063C18.5 [Oryza sativa (japonica
  misc_feature (25)..(200): Homolog of NCBI NO: 34902304 NR Description: Unknown protein [Oryza sativa (japonica
  misc_feature (24)..(197): Homolog of NCBI NO: 34894408 NR Description: P0702D12.15 [Oryza sativa (japonica
  misc_feature (24)..(197): Homolog of NCBI NO: 38346868 NR Description: OSJNBb0002N06.8 [Oryza sativa (japonica
  misc_feature (25)..(197): Homolog of NCBI NO: 34394693 NR Description: far-red impaired response protein-like protein
  misc_feature (6)..(141): Homolog of NCBI NO: 37533034 NR Description: hypothetical protein [Oryza sativa (japonica
MPCPGRMGALEKTIRGFVDREGDEVVKPELGTTFDSLTEAYDFYNMYSWEHGFGIRYGKTRLNPDKRKTMQEIVCGCSGKPLRENTRPCRCKCPAMIRLLRTSDNGWYITEHRVKHNHVMTPNCGEMLHWPSHKHIDVYTRDLVRNLRKNNINLSKVYNIIGGFFGTVENVPFTKRSLRSLCGQISRDEAEDDVRNTSFR

SEQ ID NO: 65902 - protein, 194 aa, Triticum aestivum
  peptide (1)..(194): Ceres Seq. ID no. 13657517
  misc_feature (36)..(191): Pfam Name: FAR1 family Pfam Description: FAR1 family
  misc_feature (73)..(191): Homolog of NCBI NO: 34904846 NR Description: OJ1484_G09.16 [Oryza sativa (japonica
  misc_feature (7)..(112): Homolog of NCBI NO: 18397514 NR Description: expressed protein [Arabidopsis thaliana]
  misc_feature (17)..(188): Homolog of NCBI NO: 34899212 NR Description: similar to FAR1 domain [Oryza sativa (japonica
  misc_feature (19)..(155): Homolog of NCBI NO: 38346788 NR Description: OSJNBa0095H06.13 [Oryza sativa (japonica
  misc_feature (18)..(141): Homolog of NCBI NO: 32490045 NR Description: OSJNBa0063C18.5 [Oryza sativa (japonica
  misc_feature (19)..(194): Homolog of NCBI NO: 34902304 NR Description: Unknown protein [Oryza sativa (japonica
  misc_feature (18)..(191): Homolog of NCBI NO: 34894408 NR Description: P0702D12.15 [Oryza sativa (japonica
  misc_feature (18)..(191): Homolog of NCBI NO: 38346868 NR Description: OSJNBb0002N06.8 [Oryza sativa (japonica
  misc_feature (19)..(191): Homolog of NCBI NO: 34394693 NR Description: far-red impaired response protein-like protein
  misc_feature (1)..(135): Homolog of NCBI NO: 37533034 NR Description: hypothetical protein [Oryza sativa (japonica
MGALEKTIRGFVDREGDEVVKPELGTTFDSLTEAYDFYNMYSWEHGFGIRYGKTRLNPDKRKTMQEIVCGCSGKPLRENTRPCRCKCPAMIRLLRTSDNGWYITEHRVKHNHVMTPNCGEMLHWPSHKHIDVYTRDLVRNLRKNNINLSKVYNIIGGFFGTVENVPFTKRSLRSLCGQISRDEAEDDVRNTSFR

SEQ ID NO: 65903 - protein, 155 aa, Triticum aestivum
  peptide (1)..(155): Ceres Seq. ID no. 13657518
  misc_feature (1)..(152): Pfam Name: FAR1 family Pfam Description: FAR1 family
  misc_feature (34)..(152): Homolog of NCBI NO: 34904846 NR Description: OJ1484_G09.16 [Oryza sativa (japonica
  misc_feature (1)..(73): Homolog of NCBI NO: 18397514 NR Description: expressed protein [Arabidopsis thaliana]
  misc_feature (1)..(149): Homolog of NCBI NO: 34899212 NR Description: similar to FAR1 domain [Oryza sativa (japonica
  misc_feature (1)..(116): Homolog of NCBI NO: 38346788 NR Description: OSJNBa0095H06.13 [Oryza sativa (japonica
  misc_feature (1)..(102): Homolog of NCBI NO: 32490045 NR Description: OSJNBa0063C18.5 [Oryza sativa (japonica
  misc_feature (1)..(155): Homolog of NCBI NO: 34902304 NR Description: Unknown protein [Oryza sativa (japonica
  misc_feature (1)..(152): Homolog of NCBI NO: 34894408 NR Description: P0702D12.15 [Oryza sativa (japonica
  misc_feature (1)..(152): Homolog of NCBI NO: 38346868 NR Description: OSJNBb0002N06.8 [Oryza sativa (japonica
  misc_feature (1)..(152): Homolog of NCBI NO: 34394693 NR Description: far-red impaired response protein-like protein
  misc_feature (1)..(96): Homolog of NCBI NO: 37533034 NR Description: hypothetical protein [Oryza sativa (japonica
MYSWEHGFGIRYGKTRLNPDKRKTMQEIVCGCSGKPLRENTRPCRCKCPAMIRLLRTSDNGWYITEHRVKHNHVMTPNCGEMLHWPSHKHIDVYTRDLVRNLRKNNINLSKVYNIIGGFFGTVENVPFTKRSLRSLCGQISRDEAEDDVRNTSFR

SEQ ID NO: 65904 - DNA, 1452 bp, Triticum aestivum
  misc_feature (1)..(1452): Ceres Seq. ID no. 13591273
ccagtccacctccccccctatccccaccgcctccacaaccccaccccccccctccgctgcccctcccatcgcattcgcatccacctccgcgccccaagcacagcacaggggaagaagcgatcggcaatggcgtcctccacccagggccaggtcatcacctgcaaagcggcggtggcgtacgaggcgaacaagccgctggtggtggaggacgtgcaggtggcgccgccgcaggccggcgaggtccgcatcaagatcctctccaccgcgctctgccacaccgactactacacctggagcggcaaggatcctgagggtctctttccttgcattctcggtcatgaggctgctggaatcgttgagagcgttggcgaaggggtgaccgatgtgcagcctggggaccatgtcatcccttgctaccaagcggaatgcaagaactgcaagatgtgcaacagcgggaagaccaacctctgcggcaaagttcgtggcgccacaggggtaggggtcatgatgagcgaccgcaagagccgcttctcggtgaatgggaagcccatctaccatttcatggggacgtcgacgttcagtcagtacactgttgtgcatgacgtcagtgttgcgaagatcaacccgcaggcgcccctggataaggtctgcctgctcggctgtggtgtttccactggtcttggagcagtatggaatactgcaaaggttgaagcaggttcagttgttgctgtttttgggcttggcacagttggacttgcagttgctgagggggcaaaatcagctggtgcttctcggattattggcattgacattgatgccaagaagtttgatgttgctaagaactttggagtcacagagtttgtgaacccaaaagaccatgacaaaccaatccagcaggtcctagttgaccttacagatggtggtgtggattacagttttgagtgcatcggaaatgtttctatcatgagggctgcactcgaatgctgccacaagggctggggtacctctgttgtcgttggtgtagctgcatctggccaggagattgccacacggccattccagcttgtcactggccgtgtctggaagggaacagcttttggtggcttcaagagtcggagccaggttccatggctcgtcgagaagtacatgaacaaggaaatcaaggtggacgagtacatcacccacaacatgaaccttaccgatatcaacaaggcgttcgacctgctgcacgaaggcggctgcctgcggtgcgtgctggccatggagcactgaggatcctgctatgtgtctcgccctgcctcgaagcggagcagtttgtgtcgtgtgaagttgtaatgcagatctatcctccgccctgggactatagaactcgtttggcctagaaactcttgaacacgaaccgctgctataataatatgttgtgttggatggttgcctctggttggggtcatt

SEQ ID NO: 65905 - protein, 423 aa, Triticum aestivum
  peptide (1)..(423): Ceres Seq. ID no. 13591274
  misc_feature (46)..(419): Homolog of NCBI NO: 5902740 NR Description: ALCOHOL DEHYDROGENASE CLASS III H CHAIN
  misc_feature (47)..(419): Homolog of NCBI NO: 5902742 NR Description: ALCOHOL DEHYDROGENASE CLASS III
  misc_feature (47)..(419): Homolog of NCBI NO: 25283011 NR Description: alcohol dehydrogenase (EC 1.1.1.1) 3 - zebra fish
  misc_feature (47)..(419): Homolog of NCBI NO: 18858257 NR Description: alcohol dehydrogenase 5 [Danio rerio]
  misc_feature (46)..(421): Homolog of NCBI NO: 3121727 NR Description: ALCOHOL DEHYDROGENASE CLASS III
  misc_feature (46)..(419): Homolog of NCBI NO: 1498024 NR Description: glutathione-dependent formaldehyde dehydrogenase
  misc_feature (46)..(419): Homolog of NCBI NO: 15240054 NR Description: alcohol dehydrogenase class III
  misc_feature (46)..(419): Homolog of NCBI NO: 2129562 NR Description: alcohol dehydrogenase (EC 1.1.1.1) class III -
  misc_feature (43)..(422): Homolog of NCBI NO: 6225010 NR Description: ALCOHOL DEHYDROGENASE CLASS III
  misc_feature (43)..(422): Homolog of NCBI NO: 3023271 NR Description: ALCOHOL DEHYDROGENASE CLASS III
PVHLPPYPHRLHNPTPPLRCPSHRIRIHLRAPSTAQGKKRSAMASSTQGQVITCKAAVAYEANKPLVVEDVQVAPPQAGEVRIKILSTALCHTDYYTWSGKDPEGLFPCILGHEAAGIVESVGEGVTDVQPGDHVIPCYQAECKNCKMCNSGKTNLCGKVRGATGVGVMMSDRKSRFSVNGKPIYHFMGTSTFSQYTVVHDVSVAKINPQAPLDKVCLLGCGVSTGLGAVWNTAKVEAGSVVAVFGLGTVGLAVAEGAKSAGASRIIGIDIDAKKFDVAKNFGVTEFVNPKDHDKPIQQVLVDLTDGGVDYSFECIGNVSIMRAALECCHKGWGTSVVVGVAASGQEIATRPFQLVTGRVWKGTAFGGFKSRSQVPWLVEKYMNKEIKVDEYITHNMNLTDINKAFDLLHEGGCLRCVLAMEH

SEQ ID NO: 65906 - protein, 381 aa, Triticum aestivum
  peptide (1)..(381): Ceres Seq. ID no. 13591275
  misc_feature (4)..(377): Homolog of NCBI NO: 5902740 NR Description: ALCOHOL DEHYDROGENASE CLASS III H CHAIN
  misc_feature (5)..(377): Homolog of NCBI NO: 5902742 NR Description: ALCOHOL DEHYDROGENASE CLASS III
  misc_feature (5)..(377): Homolog of NCBI NO: 25283011 NR Description: alcohol dehydrogenase (EC 1.1.1.1) 3 - zebra fish
  misc_feature (5)..(377): Homolog of NCBI NO: 18858257 NR Description: alcohol dehydrogenase 5 [Danio rerio]
  misc_feature (4)..(379): Homolog of NCBI NO: 3121727 NR Description: ALCOHOL DEHYDROGENASE CLASS III
  misc_feature (4)..(377): Homolog of NCBI NO: 1498024 NR Description: glutathione-dependent formaldehyde dehydrogenase
  misc_feature (4)..(377): Homolog of NCBI NO: 15240054 NR Description: alcohol dehydrogenase class III
  misc_feature (4)..(377): Homolog of NCBI NO: 2129562 NR Description: alcohol dehydrogenase (EC 1.1.1.1) class III -
  misc_feature (1)..(380): Homolog of NCBI NO: 6225010 NR Description: ALCOHOL DEHYDROGENASE CLASS III
  misc_feature (1)..(380): Homolog of NCBI NO: 3023271 NR Description: ALCOHOL DEHYDROGENASE CLASS III
MASSTQGQVITCKAAVAYEANKPLVVEDVQVAPPQAGEVRIKILSTALCHTDYYTWSGKDPEGLFPCILGHEAAGIVESVGEGVTDVQPGDHVIPCYQAECKNCKMCNSGKTNLCGKVRGATGVGVMMSDRKSRFSVNGKPIYHFMGTSTFSQYTVVHDVSVAKINPQAPLDKVCLLGCGVSTGLGAVWNTAKVEAGSVVAVFGLGTVGLAVAEGAKSAGASRIIGIDIDAKKFDVAKNFGVTEFVNPKDHDKPIQQVLVDLTDGGVDYSFECIGNVSIMRAALECCHKGWGTSVVVGVAASGQEIATRPFQLVTGRVWKGTAFGGFKSRSQVPWLVEKYMNKEIKVDEYITHNMNLTDINKAFDLLHEGGCLRCVLAMEH

SEQ ID NO: 65907 - protein, 276 aa, Triticum aestivum
  peptide (1)..(276): Ceres Seq. ID no. 13591276
  misc_feature (1)..(272): Homolog of NCBI NO: 5902740 NR Description: ALCOHOL DEHYDROGENASE CLASS III H CHAIN
  misc_feature (1)..(272): Homolog of NCBI NO: 5902742 NR Description: ALCOHOL DEHYDROGENASE CLASS III
  misc_feature (1)..(272): Homolog of NCBI NO: 25283011 NR Description: alcohol dehydrogenase (EC 1.1.1.1) 3 - zebra fish
  misc_feature (1)..(272): Homolog of NCBI NO: 18858257 NR Description: alcohol dehydrogenase 5 [Danio rerio]
  misc_feature (1)..(274): Homolog of NCBI NO: 3121727 NR Description: ALCOHOL DEHYDROGENASE CLASS III
  misc_feature (1)..(272): Homolog of NCBI NO: 1498024 NR Description: glutathione-dependent formaldehyde dehydrogenase
  misc_feature (1)..(272): Homolog of NCBI NO: 15240054 NR Description: alcohol dehydrogenase class III
  misc_feature (1)..(272): Homolog of NCBI NO: 2129562 NR Description: alcohol dehydrogenase (EC 1.1.1.1) class III -
  misc_feature (1)..(275): Homolog of NCBI NO: 6225010 NR Description: ALCOHOL DEHYDROGENASE CLASS III
  misc_feature (1)..(275): Homolog of NCBI NO: 3023271 NR Description: ALCOHOL DEHYDROGENASE CLASS III
MCNSGKTNLCGKVRGATGVGVMMSDRKSRFSVNGKPIYHFMGTSTFSQYTVVHDVSVAKINPQAPLDKVCLLGCGVSTGLGAVWNTAKVEAGSVVAVFGLGTVGLAVAEGAKSAGASRIIGIDIDAKKFDVAKNFGVTEFVNPKDHDKPIQQVLVDLTDGGVDYSFECIGNVSIMRAALECCHKGWGTSVVVGVAASGQEIATRPFQLVTGRVWKGTAFGGFKSRSQVPWLVEKYMNKEIKVDEYITHNMNLTDINKAFDLLHEGGCLRCVLAMEH

SEQ ID NO: 65908 - DNA, 802 bp, Triticum aestivum
  misc_feature (1)..(802): Ceres Seq. ID no. 13657519
ccgtgtcctttttgaagaggaacaatcagcatataaccaagccatgcttcagaatatttgtgatgggaagatgcacccacttacatctatgcaccatacctccacatataatgcttctctatgcaaactgatggaatactgcttgagccctgctataactgtgcttcaggaccgtgtgaaagaaaacgaacttcggttagctatgctagtggaggaggctaaacaactggaggccgagcagagcacgaaaactggctctcctcgccgtgcgatgcccggagggactaccagtggcatcacttcgccaaggggccaggacaagtacccttccggcagacaagggggccctataagccctagcagcagcggccggaggaaggctccttgactcggaccttgctcgccattatgtcatgatggatagtccgattctgggccctgcctgatgctttctggaaccccaaacctgtcccttggcgcgaggggtgaagtcgcaatgcaaatgtacatacccatctcctttcagtgcctcgccgccgccgacgtcgacgtcgacggtatgttgcccgtcgtcgactagctcccgagacgctcgcatactacagtagcacaggatggatcatttaactgtgtgatggattcatctgtaacaatgttctaaattatgttcgtttgcgttttattctcagaagaagcgaacctgcgcagtgtgctagagccagcgtcgtcaattcgtcatgtttcgtagatagtgtctgtaatgatgtaatttctgtctctttttccaaggaaagacctaaat

SEQ ID NO: 65909 - protein, 128 aa, Triticum aestivum
  peptide (1)..(128): Ceres Seq. ID no. 13657520
  misc_feature (1)..(97): Homolog of NCBI NO: 20147355 NR Description: At1g80210/F18B13_28 [Arabidopsis thaliana]
  misc_feature (1)..(104): Homolog of NCBI NO: 30680023 NR Description: expressed protein [Arabidopsis thaliana]
  misc_feature (1)..(104): Homolog of NCBI NO: 19715647 NR Description: AT3g06820/F3E22_4 [Arabidopsis thaliana]
RVLFEEEQSAYNQAMLQNICDGKMHPLTSMHHTSTYNASLCKLMEYCLSPAITVLQDRVKENELRLAMLVEEAKQLEAEQSTKTGSPRRAMPGGTTSGITSPRGQDKYPSGRQGGPISPSSSGRRKAP

SEQ ID NO: 65910 - protein, 114 aa, Triticum aestivum
  peptide (1)..(114): Ceres Seq. ID no. 13657521
  misc_feature (1)..(83): Homolog of NCBI NO: 20147355 NR Description: At1g80210/F18B13_28 [Arabidopsis thaliana]
  misc_feature (1)..(90): Homolog of NCBI NO: 30680023 NR Description: expressed protein [Arabidopsis thaliana]
  misc_feature (1)..(90): Homolog of NCBI NO: 19715647 NR Description: AT3g06820/F3E22_4 [Arabidopsis thaliana]
MLQNICDGKMHPLTSMHHTSTYNASLCKLMEYCLSPAITVLQDRVKENELRLAMLVEEAKQLEAEQSTKTGSPRRAMPGGTTSGITSPRGQDKYPSGRQGGPISPSSSGRRKAP

SEQ ID NO: 65911 - protein, 105 aa, Triticum aestivum
  peptide (1)..(105): Ceres Seq. ID no. 13657522
  misc_feature (1)..(74): Homolog of NCBI NO: 20147355 NR Description: At1g80210/F18B13_28 [Arabidopsis thaliana]
  misc_feature (1)..(81): Homolog of NCBI NO: 30680023 NR Description: expressed protein [Arabidopsis thaliana]
  misc_feature (1)..(81): Homolog of NCBI NO: 19715647 NR Description: AT3g06820/F3E22_4 [Arabidopsis thaliana]
MHPLTSMHHTSTYNASLCKLMEYCLSPAITVLQDRVKENELRLAMLVEEAKQLEAEQSTKTGSPRRAMPGGTTSGITSPRGQDKYPSGRQGGPISPSSSGRRKAP

SEQ ID NO: 65912 - DNA, 757 bp, Triticum aestivum
  misc_feature (1)..(757): Ceres Seq. ID no. 12443653
aatggagcttctccggcggcagatgctgaagcacccggcaggagagccccagcgctgggagaagatcgctgcagtgttcggcggccgccgcacgccggagagcgtcatccgcgcagcaaagtcgggcggcgccacggcggctggtggctcgttcgagcagttcctgcgcaagcgaaagccgctggacccaagggccggggccgctgacgcagacacaggtggcaatgctggaggaggggacggtggttggagtgctggcgaggaccgttctctgctgaacgcgctcaaggagttccctaaggacacggcaatgaggtgggagaaggtggccgcagcagtgcctgggaagacaaaggctgggtgcatgaagagggtcactgagctcaagcgtgactttcggagcagcaaggagccataggaggcagcgccatagcttgaacgttgtcttccttgcctggtaccggacttgatgcagcaaatcattgtgatcatttcccttcctgaagaagaagcgaatcaccattggtctcgctgaatcgggaatcatgatgatgttggatgaaggaaacaataccgttaaacaacatatggtgtagttttattgttttatataccagaatcaagattcgccaaacagaacaacactaacctgtagaaaaaacggtccatacggaaaaggaacagcagtccctgatggtttgggtgttaatgtcaagctccaaattttatgctagtcagttgtcgatgtgtcantgtc

SEQ ID NO: 65913 - protein, 138 aa, Triticum aestivum
  peptide (1)..(138): Ceres Seq. ID no. 12443654
  misc_feature (83)..(129): Pfam Name: Myb-like DNA-binding domain Pfam Description: Myb-like DNA-binding domain
  misc_feature (1)..(136): Homolog of NCBI NO: 32481976 NR Description: zuotin related factor 2 [Rattus norvegicus]
  misc_feature (1)..(60): Homolog of NCBI NO: 15239928 NR Description: cell division related protein-like; protein id:
  misc_feature (76)..(136): Homolog of NCBI NO: 15239928 NR Description: cell division related protein-like; protein id:
  misc_feature (1)..(60): Homolog of NCBI NO: 15229761 NR Description: putative cell division related protein; protein
  misc_feature (65)..(136): Homolog of NCBI NO: 15229761 NR Description: putative cell division related protein; protein
  misc_feature (1)..(60): Homolog of NCBI NO: 39546277 NR Description: OSJNBa0083D01.10 [Oryza sativa (japonica
  misc_feature (59)..(136): Homolog of NCBI NO: 39546277 NR Description: OSJNBa0083D01.10 [Oryza sativa (japonica
  misc_feature (1)..(138): Homolog of NCBI NO: 18422552 NR Description: expressed protein
  misc_feature (1)..(138): Homolog of NCBI NO: 9758732 NR Description: gene_id:MFC19.9~unknown protein [Arabidopsis
  misc_feature (1)..(138): Homolog of NCBI NO: 34905190 NR Description: P0498E12.13 [Oryza sativa (japonica
MELLRRQMLKHPAGEPQRWEKIAAVFGGRRTPESVIRAAKSGGATAAGGSFEQFLRKRKPLDPRAGAADADTGGNAGGGDGGWSAGEDRSLLNALKEFPKDTAMRWEKVAAAVPGKTKAGCMKRVTELKRDFRSSKEP

SEQ ID NO: 65914 - protein, 131 aa, Triticum aestivum
  peptide (1)..(131): Ceres Seq. ID no. 12443655
  misc_feature (76)..(122): Pfam Name: Myb-like DNA-binding domain Pfam Description: Myb-like DNA-binding domain
  misc_feature (1)..(129): Homolog of NCBI NO: 32481976 NR Description: zuotin related factor 2 [Rattus norvegicus]
  misc_feature (1)..(53): Homolog of NCBI NO: 15239928 NR Description: cell division related protein-like; protein id:
  misc_feature (69)..(129): Homolog of NCBI NO: 15239928 NR Description: cell division related protein-like; protein id:
  misc_feature (1)..(53): Homolog of NCBI NO: 15229761 NR Description: putative cell division related protein; protein
  misc_feature (58)..(129): Homolog of NCBI NO: 15229761 NR Description: putative cell division related protein; protein
  misc_feature (1)..(53): Homolog of NCBI NO: 39546277 NR Description: OSJNBa0083D01.10 [Oryza sativa (japonica
  misc_feature (52)..(129): Homolog of NCBI NO: 39546277 NR Description: OSJNBa0083D01.10 [Oryza sativa (japonica
  misc_feature (1)..(131): Homolog of NCBI NO: 18422552 NR Description: expressed protein
  misc_feature (1)..(131): Homolog of NCBI NO: 9758732 NR Description: gene_id:MFC19.9~unknown protein [Arabidopsis
  misc_feature (1)..(131): Homolog of NCBI NO: 34905190 NR Description: P0498E12.13 [Oryza sativa (japonica
MLKHPAGEPQRWEKIAAVFGGRRTPESVIRAAKSGGATAAGGSFEQFLRKRKPLDPRAGAADADTGGNAGGGDGGWSAGEDRSLLNALKEFPKDTAMRWEKVAAAVPGKTKAGCMKRVTELKRDFRSSKEP

SEQ ID NO: 65915 - DNA, 955 bp, Triticum aestivum
  misc_feature (1)..(955): Ceres Seq. ID no. 13657523
aaaagaaaacaagtaagggcccaaatgcaaacgaggaaaccaacctcctcctcccctgtaacaactccgccgcgcgcccacctcccctcgccggtatcgtgtcctcgttcacgcccaacccaacccaccccatttccccgacctccgatgccggagcgccgcaacgtagccggagacccgccgtactggtgatccccggataacaacgatggaccgcctcttgctgtcccgccccccgatgcccacccccgtccacggcgctgccacggccgcagatggcgacctcctcgagctcgacgtcctctggcccgcctcttcagctccgggactcctcgccgcgcttcccgatgacgaggctaagaagaagcagaagcgcgcgggcggccctgccgtccgatccgccgcccgcgccgtcccggagaaggccgcgttgaccccgtcttcggtggcgaggtcggctccggtgcgcataccttcggatgctgcggcgcggagagggaggtggccccacgtcgtcggtggcggcgacgacggggacgccatggtcccgccgcacgagatcgtcgcgcggcgcgcggcagcgcacagctcggtgctggagggagccgggaggacgctcaagggccgcgacctccgccgcgtacgcaacaccgtcctgcgccgcaccggcttcctcgactgagaggcggaggcgagtcgcctcgtcgctttcgcgataaagttttgacttctgttaattcctccctttagttccatccgttgcgtttccggcagttttgatttcattccccgatgggaaggggatgaaaagtaaagtggtgaggtgagatgagtgaccgaggattataacacgacaataacagtgctgttccattccatcacattatatatatggaatttttggccattaaaaaaaaaataaaaaaaaaaaaaaaaaagcttatcgataccgtcg

SEQ ID NO: 65916 - protein, 157 aa, Triticum aestivum
  peptide (1)..(157): Ceres Seq. ID no. 13657524
  misc_feature (82)..(157): Pfam Name: Protein of unknown function, DUF584 Pfam Description: Protein of unknown function, DUF584
  misc_feature (64)..(155): Homolog of NCBI NO: 15234679 NR Description: hypothetical protein [Arabidopsis thaliana]
  misc_feature (48)..(157): Homolog of NCBI NO: 15230636 NR Description: expressed protein [Arabidopsis thaliana]
  misc_feature (82)..(157): Homolog of NCBI NO: 18400614 NR Description: expressed protein [Arabidopsis thaliana]
  misc_feature (82)..(157): Homolog of NCBI NO: 15983450 NR Description: AT3g15040/K15M2_18 [Arabidopsis thaliana]
  misc_feature (50)..(157): Homolog of NCBI NO: 21594619 NR Description: unknown [Arabidopsis thaliana]
  misc_feature (12)..(157): Homolog of NCBI NO: 37535426 NR Description: hypothetical protein [Oryza sativa (japonica
  misc_feature (64)..(157): Homolog of NCBI NO: 38346328 NR Description: OJ000126_13.10 [Oryza sativa (japonica
  misc_feature (33)..(157): Homolog of NCBI NO: 21741306 NR Description: OSJNBb0103I08.8 [Oryza sativa (japonica
  misc_feature (56)..(157): Homolog of NCBI NO: 27476087 NR Description: Hypothetical protein [Oryza sativa (japonica
  misc_feature (82)..(157): Homolog of NCBI NO: 34902966 NR Description: unnamed protein product [Oryza sativa (japonica
MDRLLLSRPPMPTPVHGAATAADGDLLELDVLWPASSAPGLLAALPDDEAKKKQKRAGGPAVRSAARAVPEKAALTPSSVARSAPVRIPSDAAARRGRWPHVVGGGDDGDAMVPPHEIVARRAAAHSSVLEGAGRTLKGRDLRRVRNTVLRRTGFLD

SEQ ID NO: 65917 - protein, 147 aa, Triticum aestivum
  peptide (1)..(147): Ceres Seq. ID no. 13657525
  misc_feature (72)..(147): Pfam Name: Protein of unknown function, DUF584 Pfam Description: Protein of unknown function, DUF584
  misc_feature (54)..(145): Homolog of NCBI NO: 15234679 NR Description: hypothetical protein [Arabidopsis thaliana]
  misc_feature (38)..(147): Homolog of NCBI NO: 15230636 NR Description: expressed protein [Arabidopsis thaliana]
  misc_feature (72)..(147): Homolog of NCBI NO: 18400614 NR Description: expressed protein [Arabidopsis thaliana]
  misc_feature (72)..(147): Homolog of NCBI NO: 15983450 NR Description: AT3g15040/K15M2_18 [Arabidopsis thaliana]
  misc_feature (40)..(147): Homolog of NCBI NO: 21594619 NR Description: unknown [Arabidopsis thaliana]
  misc_feature (2)..(147): Homolog of NCBI NO: 37535426 NR Description: hypothetical protein [Oryza sativa (japonica
  misc_feature (54)..(147): Homolog of NCBI NO: 38346328 NR Description: OJ000126_13.10 [Oryza sativa (japonica
  misc_feature (23)..(147): Homolog of NCBI NO: 21741306 NR Description: OSJNBb0103I08.8 [Oryza sativa (japonica
  misc_feature (46)..(147): Homolog of NCBI NO: 27476087 NR Description: Hypothetical protein [Oryza sativa (japonica
  misc_feature (72)..(147): Homolog of NCBI NO: 34902966 NR Description: unnamed protein product [Oryza sativa (japonica
MPTPVHGAATAADGDLLELDVLWPASSAPGLLAALPDDEAKKKQKRAGGPAVRSAARAVPEKAALTPSSVARSAPVRIPSDAAARRGRWPHVVGGGDDGDAMVPPHEIVARRAAAHSSVLEGAGRTLKGRDLRRVRNTVLRRTGFLD

SEQ ID NO: 65918 - protein, 79 aa, Triticum aestivum
  peptide (1)..(79): Ceres Seq. ID no. 13657526
MLRRGEGGGPTSSVAATTGTPWSRRTRSSRGARQRTARCWREPGGRSRAATSAAYATPSCAAPASSTERRRRVASSLSR

SEQ ID NO: 65919 - DNA, 1695 bp, Triticum aestivum
  misc_feature (1)..(1695): Ceres Seq. ID no. 14308003
acacccaaaataagatcacatttttttgctcttcccttctccaattcaaggagccggggcagccatggacgccgccacgggcacgggcatggaggagctgtcatggtgcgcgcggtgcgtcggcctggcattccttgtcttctccgtgtgcgtggtggcgctcggcgcggcgctcttcctcgcccgccggtggccgtggtgcagctgccacgtctgccgttcgtacctcacgggatcgtgggcgcgggacttcaccaacctcggcgactggtacgcacacctgctccgctgctccccgaccggcaccgtggccgtccacgtcctcggctgtaccatcaccgccaacccggccaacgtcgagcacatgctccacacccgcttcgacaacttccccaaagggaagcccttcgccgccgtcctcggcgacctcctcggcggcggcatcttcaacgtcgacggcgacgcctggcgccaccagcgcaagatggccagcctcgagctcggcagcgtcgcggtgcgctcctacgcgtacggcatcgtcgccgaggaagtggaggcgcgcctcctgccactgctcgccgacgccgccgacaatggcagggtggtcgacctgcaggacgtgttccggcgtttcgctttcgacaccatctgcaagatctccttcggactagaccccggctgcctcgagctcgacatgcccatgtccaagctcgccgccgcgttcgacaccgcctcgcggctatccgccatgcgcggcgcggcggcgtcgcccctggtgtggagggcaaagcggctgctgaacttcggctccgagagggagctcaggaagtccatccacctcgtcgacgagctcgcggcggccatgataaggcagcgccggaagctgggcgtcgccgggagccacgacctcctgtcccggttcatggcctcggaggcgcacggcaccgccgtcgacgacaagtacctccgcgacatcgtggtcagcttcctcctcgccggacgggacacggtgtcctccgcgctcaccaccatcttcatgctgctctccaagaaccccgctgtggcggccgccatgcgctcggaggccgccgccggcgagaagacaaggacatcgtcgaagaccacgtacgagcacctcaagtccctccactacacccacgcggtgctgcacgagaacatgcggctgttcccgcctgtgcagttcgactccaagttctgcgccgccgatgacgtgctcccggacggcacgtacgtgaccgccggggctcgtgtgatgtaccacccctacgccatggggcgcatgccccgcatttggggcgacgactgcgagaagttccgaccggagcggtggctgacgggccccggggggacgttcgtgccggagagcctgtacaggtacccggtgttccaggccgggctccgcgtgtgcctcggcaaggagctcgccgtgatggagatgaaggcggtgaccgtggccgtggtgaagcagttcgacgtggaggtggttgggcaaaagggcgccgtgcccaggttcgcgccgggtctgacggcgtccatcagcggcgggctcccggtgagggtcaggcgcatctagagacatgttgagtactgtagtagctagacactgtttctgtactgtacatagggatattataagagaagaaattaatgagaagggaagttgtttgtggcgac

SEQ ID NO: 65920 - protein, 509 aa, Triticum aestivum
  peptide (1)..(509): Ceres Seq. ID no. 14308004
  misc_feature (68)..(507): Homolog of NCBI NO: 15228981 NR Description: cytochrome P450, putative [Arabidopsis thaliana]
  misc_feature (69)..(506): Homolog of NCBI NO: 34909022 NR Description: cytochrome P450-like protein
  misc_feature (47)..(506): Homolog of NCBI NO: 18000066 NR Description: cytochrome P450-dependent fatty acid hydroxylase
  misc_feature (58)..(508): Homolog of NCBI NO: 21536522 NR Description: cytochrome P450-like protein [Arabidopsis
  misc_feature (58)..(508): Homolog of NCBI NO: 26452145 NR Description: putative cytochrome P450 [Arabidopsis thaliana]
  misc_feature (58)..(508): Homolog of NCBI NO: 15242759 NR Description: cytochrome P450, putative [Arabidopsis thaliana]
  misc_feature (47)..(506): Homolog of NCBI NO: 18000072 NR Description: cytochrome P450-dependent fatty acid hydroxylase
  misc_feature (58)..(508): Homolog of NCBI NO: 15228396 NR Description: cytochrome P450 family [Arabidopsis thaliana]
  misc_feature (26)..(507): Homolog of NCBI NO: 15226228 NR Description: cytochrome P450, putative [Arabidopsis thaliana]
  misc_feature (19)..(508): Homolog of NCBI NO: 34908446 NR Description: putative cytochrome P450 [Oryza sativa (japonica
MDAATGTGMEELSWCARCVGLAFLVFSVCVVALGAALFLARRWPWCSCHVCRSYLTGSWARDFTNLGDWYAHLLRCSPTGTVAVHVLGCTITANPANVEHMLHTRFDNFPKGKPFAAVLGDLLGGGIFNVDGDAWRHQRKMASLELGSVAVRSYAYGIVAEEVEARLLPLLADAADNGRVVDLQDVFRRFAFDTICKISFGLDPGCLELDMPMSKLAAAFDTASRLSAMRGAAASPLVWRAKRLLNFGSERELRKSIHLVDELAAAMIRQRRKLGVAGSHDLLSRFMASEAHGTAVDDKYLRDIVVSFLLAGRDTVSSALTTIFMLLSKNPAVAAAMRSEAAAGEKTRTSSKTTYEHLKSLHYTHAVLHENMRLFPPVQFDSKFCAADDVLPDGTYVTAGARVMYHPYAMGRMPRIWGDDCEKFRPERWLTGPGGTFVPESLYRYPVFQAGLRVCLGKELAVMEMKAVTVAVVKQFDVEVVGQKGAVPRFAPGLTASISGGLPVRVRRI

SEQ ID NO: 65921 - protein, 501 aa, Triticum aestivum
  peptide (1)..(501): Ceres Seq. ID no. 14308005
  misc_feature (60)..(499): Homolog of NCBI NO: 15228981 NR Description: cytochrome P450, putative [Arabidopsis thaliana]
  misc_feature (61)..(498): Homolog of NCBI NO: 34909022 NR Description: cytochrome P450-like protein
  misc_feature (39)..(498): Homolog of NCBI NO: 18000066 NR Description: cytochrome P450-dependent fatty acid hydroxylase
  misc_feature (50)..(500): Homolog of NCBI NO: 26452145 NR Description: putative cytochrome P450 [Arabidopsis thaliana]
  misc_feature (50)..(500): Homolog of NCBI NO: 21536522 NR Description: cytochrome P450-like protein [Arabidopsis
  misc_feature (50)..(500): Homolog of NCBI NO: 15242759 NR Description: cytochrome P450, putative [Arabidopsis thaliana]
  misc_feature (39)..(498): Homolog of NCBI NO: 18000072 NR Description: cytochrome P450-dependent fatty acid hydroxylase
  misc_feature (50)..(500): Homolog of NCBI NO: 15228396 NR Description: cytochrome P450 family [Arabidopsis thaliana]
  misc_feature (18)..(499): Homolog of NCBI NO: 15226228 NR Description: cytochrome P450, putative [Arabidopsis thaliana]
  misc_feature (11)..(500): Homolog of NCBI NO: 34908446 NR Description: putative cytochrome P450 [Oryza sativa (japonica
MEELSWCARCVGLAFLVFSVCVVALGAALFLARRWPWCSCHVCRSYLTGSWARDFTNLGDWYAHLLRCSPTGTVAVHVLGCTITANPANVEHMLHTRFDNFPKGKPFAAVLGDLLGGGIFNVDGDAWRHQRKMASLELGSVAVRSYAYGIVAEEVEARLLPLLADAADNGRVVDLQDVFRRFAFDTICKISFGLDPGCLELDMPMSKLAAAFDTASRLSAMRGAAASPLVWRAKRLLNFGSERELRKSIHLVDELAAAMIRQRRKLGVAGSHDLLSRFMASEAHGTAVDDKYLRDIVVSFLLAGRDTVSSALTTIFMLLSKNPAVAAAMRSEAAAGEKTRTSSKTTYEHLKSLHYTHAVLHENMRLFPPVQFDSKFCAADDVLPDGTYVTAGARVMYHPYAMGRMPRIWGDDCEKFRPERWLTGPGGTFVPESLYRYPVFQAGLRVCLGKELAVMEMKAVTVAVVKQFDVEVVGQKGAVPRFAPGLTASISGGLPVRVRRI

SEQ ID NO: 65922 - protein, 409 aa, Triticum aestivum
  peptide (1)..(409): Ceres Seq. ID no. 14308006
  misc_feature (1)..(407): Homolog of NCBI NO: 15228981 NR Description: cytochrome P450, putative [Arabidopsis thaliana]
  misc_feature (1)..(406): Homolog of NCBI NO: 34909022 NR Description: cytochrome P450-like protein
  misc_feature (1)..(406): Homolog of NCBI NO: 18000066 NR Description: cytochrome P450-dependent fatty acid hydroxylase
  misc_feature (1)..(408): Homolog of NCBI NO: 26452145 NR Description: putative cytochrome P450 [Arabidopsis thaliana]
  misc_feature (1)..(408): Homolog of NCBI NO: 21536522 NR Description: cytochrome P450-like protein [Arabidopsis
  misc_feature (1)..(408): Homolog of NCBI NO: 15242759 NR Description: cytochrome P450, putative [Arabidopsis thaliana]
  misc_feature (1)..(406): Homolog of NCBI NO: 18000072 NR Description: cytochrome P450-dependent fatty acid hydroxylase
  misc_feature (1)..(408): Homolog of NCBI NO: 15228396 NR Description: cytochrome P450 family [Arabidopsis thaliana]
  misc_feature (1)..(407): Homolog of NCBI NO: 15226228 NR Description: cytochrome P450, putative [Arabidopsis thaliana]
  misc_feature (1)..(408): Homolog of NCBI NO: 34908446 NR Description: putative cytochrome P450 [Oryza sativa (japonica
MLHTRFDNFPKGKPFAAVLGDLLGGGIFNVDGDAWRHQRKMASLELGSVAVRSYAYGIVAEEVEARLLPLLADAADNGRVVDLQDVFRRFAFDTICKISFGLDPGCLELDMPMSKLAAAFDTASRLSAMRGAAASPLVWRAKRLLNFGSERELRKSIHLVDELAAAMIRQRRKLGVAGSHDLLSRFMASEAHGTAVDDKYLRDIVVSFLLAGRDTVSSALTTIFMLLSKNPAVAAAMRSEAAAGEKTRTSSKTTYEHLKSLHYTHAVLHENMRLFPPVQFDSKFCAADDVLPDGTYVTAGARVMYHPYAMGRMPRIWGDDCEKFRPERWLTGPGGTFVPESLYRYPVFQAGLRVCLGKELAVMEMKAVTVAVVKQFDVEVVGQKGAVPRFAPGLTASISGGLPVRVRRI

SEQ ID NO: 65923 - DNA, 1507 bp, Triticum aestivum
  misc_feature (1)..(1507): Ceres Seq. ID no. 13657138
gttacgtagcactctgtctgacgcatcaatagccccccagccacttcctacaccacttcgtctccctccacttccttccctccctagtctgagtctctacccgagaccagagctcgcacgcgtcgccggcgcgccgatcagtcaagaagccgcgcaacggcgttggcgcattgccccggagaggccggccggccgatgaagccgctgtacctgcggggcagcggcagcttcaagaggctgctgctctccctctcgccccaccgcgccaagcgcgtccacgcgccccccggggacgcgcacgccgagtcgccgcagtcaccgccgccgacggagcggaggcccgagtgggagtgcttctcgtacgaggaggtccggcgcgccacggacggcttccgcgcggccaacctggtgggccggggcgggtcgtcggaggtgtaccgcggcgagctggcggacgggcgcgccgtggcggtgaagcggctcatgggcgcgtccgcctgcgagcgccgggagcgggacttcctggcggagctcggcaccgtgggccacgccaggcaccccaacgtgtgcccgctcctcggctgctgcgtcgaccgcgacctctacctcgtcttcgccttctccgcccgcggctccgtctccgccaacctccacgacggcgaggagggggcgccggcgatggggtgggaggcgcggtacggcgtggcggtgggcacggcgagggggctggagtacctgcacaaggggtgccggcggcggatcatccaccgggacatcaaggcctccaacgtgctgctcaccgacgacttccagccccagatctccgacttcgggctggccaagtggctgccgacggagtggacgcaccgggcgatcgcgccgatcgagggcaccttcgggtgcctggcgccggagtactacacgcgcggcatcgtggacgagaagacggacgtgttcgccttcggcgtcttcctgctggagctcatggccggccggaagccggtggacggcacccacaggagcctcctcggctgggcgaggcccctgctcaacgagggcaagacggaggcgctgctggacccgaggatcgtcgccggcggcgatggcggctacgacgccgagcaggcccggcggctggcgttcgtggcgtcgctctgcgtccgcgcgtcggcgacgtggaggccgtccatgacagaggtcctggagctgctggagggcgtggagatcaaggaggagcggtgggcgatgccggagccggcggccggcgacgacgagggggaggaaatgtggggcttcgacgacctcgacgacgacgacgatgaggaatccggcacgccgtcccctttgtcaacatcctcagccttgagcacttagcacgggctaagattgcgtcagacgagtgtgatgcttgctgaaatttttgctccttcccacctgccccgccccacatgtaaaggcttttcgttgtcgaggttgtgaatacaaaggttatctgtgagaggcaagt

SEQ ID NO: 65924 - protein, 392 aa, Triticum aestivum
  peptide (1)..(392): Ceres Seq. ID no. 13657139
  misc_feature (66)..(269): Pfam Name: Protein kinase domain Pfam Description: Protein kinase domain
  misc_feature (48)..(341): Homolog of NCBI NO: 18416299 NR Description: protein kinase family [Arabidopsis thaliana]
  misc_feature (48)..(341): Homolog of NCBI NO: 15810235 NR Description: putative Pto kinase interactor [Arabidopsis
  misc_feature (54)..(343): Homolog of NCBI NO: 22330852 NR Description: protein kinase family [Arabidopsis thaliana]
  misc_feature (48)..(378): Homolog of NCBI NO: 30698132 NR Description: protein kinase, putative [Arabidopsis thaliana]
  misc_feature (48)..(378): Homolog of NCBI NO: 26452369 NR Description: unknown protein [Arabidopsis thaliana]
  misc_feature (48)..(341): Homolog of NCBI NO: 30687061 NR Description: protein kinase family [Arabidopsis thaliana]
  misc_feature (36)..(369): Homolog of NCBI NO: 15242821 NR Description: protein kinase family [Arabidopsis thaliana]
  misc_feature (46)..(358): Homolog of NCBI NO: 40253745 NR Description: SERK1 protein-like [Oryza sativa (japonica
  misc_feature (47)..(392): Homolog of NCBI NO: 15224251 NR Description: protein kinase family [Arabidopsis thaliana]
  misc_feature (5)..(335): Homolog of NCBI NO: 38343967 NR Description: OSJNBb0022F16.6 [Oryza sativa (japonica
MKPLYLRGSGSFKRLLLSLSPHRAKRVHAPPGDAHAESPQSPPPTERRPEWECFSYEEVRRATDGFRAANLVGRGGSSEVYRGELADGRAVAVKRLMGASACERRERDFLAELGTVGHARHPNVCPLLGCCVDRDLYLVFAFSARGSVSANLHDGEEGAPAMGWEARYGVAVGTARGLEYLHKGCRRRIIHRDIKASNVLLTDDFQPQISDFGLAKWLPTEWTHRAIAPIEGTFGCLAPEYYTRGIVDEKTDVFAFGVFLLELMAGRKPVDGTHRSLLGWARPLLNEGKTEALLDPRIVAGGDGGYDAEQARRLAFVASLCVRASATWRPSMTEVLELLEGVEIKEERWAMPEPAAGDDEGEEMWGFDDLDDDDDEESGTPSPLSTSSALST

SEQ ID NO: 65925 - protein, 296 aa, Triticum aestivum
  peptide (1)..(296): Ceres Seq. ID no. 13657140
  misc_feature (1)..(173): Pfam Name: Protein kinase domain Pfam Description: Protein kinase domain
  misc_feature (1)..(245): Homolog of NCBI NO: 18416299 NR Description: protein kinase family [Arabidopsis thaliana]
  misc_feature (1)..(245): Homolog of NCBI NO: 15810235 NR Description: putative Pto kinase interactor [Arabidopsis
  misc_feature (1)..(247): Homolog of NCBI NO: 22330852 NR Description: protein kinase family [Arabidopsis thaliana]
  misc_feature (1)..(282): Homolog of NCBI NO: 30698132 NR Description: protein kinase, putative [Arabidopsis thaliana]
  misc_feature (1)..(282): Homolog of NCBI NO: 26452369 NR Description: unknown protein [Arabidopsis thaliana]
  misc_feature (1)..(245): Homolog of NCBI NO: 30687061 NR Description: protein kinase family [Arabidopsis thaliana]
  misc_feature (1)..(273): Homolog of NCBI NO: 15242821 NR Description: protein kinase family [Arabidopsis thaliana]
  misc_feature (1)..(262): Homolog of NCBI NO: 40253745 NR Description: SERK1 protein-like [Oryza sativa (japonica
  misc_feature (1)..(296): Homolog of NCBI NO: 15224251 NR Description: protein kinase family [Arabidopsis thaliana]
  misc_feature (1)..(239): Homolog of NCBI NO: 38343967 NR Description: OSJNBb0022F16.6 [Oryza sativa (japonica
MGASACERRERDFLAELGTVGHARHPNVCPLLGCCVDRDLYLVFAFSARGSVSANLHDGEEGAPAMGWEARYGVAVGTARGLEYLHKGCRRRIIHRDIKASNVLLTDDFQPQISDFGLAKWLPTEWTHRAIAPIEGTFGCLAPEYYTRGIVDEKTDVFAFGVFLLELMAGRKPVDGTHRSLLGWARPLLNEGKTEALLDPRIVAGGDGGYDAEQARRLAFVASLCVRASATWRPSMTEVLELLEGVEIKEERWAMPEPAAGDDEGEEMWGFDDLDDDDDEESGTPSPLSTSSALST

SEQ ID NO: 65926 - protein, 231 aa, Triticum aestivum
  peptide (1)..(231): Ceres Seq. ID no. 13657141
  misc_feature (1)..(108): Pfam Name: Protein kinase domain Pfam Description: Protein kinase domain
  misc_feature (1)..(180): Homolog of NCBI NO: 18416299 NR Description: protein kinase family [Arabidopsis thaliana]
  misc_feature (1)..(180): Homolog of NCBI NO: 15810235 NR Description: putative Pto kinase interactor [Arabidopsis
  misc_feature (1)..(182): Homolog of NCBI NO: 22330852 NR Description: protein kinase family [Arabidopsis thaliana]
  misc_feature (1)..(217): Homolog of NCBI NO: 30698132 NR Description: protein kinase, putative [Arabidopsis thaliana]
  misc_feature (1)..(217): Homolog of NCBI NO: 26452369 NR Description: unknown protein [Arabidopsis thaliana]
  misc_feature (1)..(180): Homolog of NCBI NO: 30687061 NR Description: protein kinase family [Arabidopsis thaliana]
  misc_feature (1)..(208): Homolog of NCBI NO: 15242821 NR Description: protein kinase family [Arabidopsis thaliana]
  misc_feature (1)..(197): Homolog of NCBI NO: 40253745 NR Description: SERK1 protein-like [Oryza sativa (japonica
  misc_feature (1)..(231): Homolog of NCBI NO: 15224251 NR Description: protein kinase family [Arabidopsis thaliana]
  misc_feature (1)..(174): Homolog of NCBI NO: 38343967 NR Description: OSJNBb0022F16.6 [Oryza sativa (japonica
MGWEARYGVAVGTARGLEYLHKGCRRRIIHRDIKASNVLLTDDFQPQISDFGLAKWLPTEWTHRAIAPIEGTFGCLAPEYYTRGIVDEKTDVFAFGVFLLELMAGRKPVDGTHRSLLGWARPLLNEGKTEALLDPRIVAGGDGGYDAEQARRLAFVASLCVRASATWRPSMTEVLELLEGVEIKEERWAMPEPAAGDDEGEEMWGFDDLDDDDDEESGTPSPLSTSSALST

SEQ ID NO: 65927 - DNA, 1863 bp, Triticum aestivum
  misc_feature (1)..(1863): Ceres Seq. ID no. 15169511
ttactggtagtacatctgttccgtctttcgccgaacacgcctcgcgcgccgaagcacgctacctggaactggaaggtgttcttcctcctccgctctactgtgctcccgtggcgcggagatccaaccggagctggaccgactccttttgccgaaccagtgtgctagctactgaagcggccatggaagtggtttcttccagtcactcttgcttggcatttcatcaaacacctaccagtgctcggaggtctctgggcactggtcttggtctgcggcataccaagtttgctcggccaagaaaaagcgcagttctctgtgttgggagagcttcaaatcctggtgattcaggaaagctgcatgtcagccgcagcttcgatgtaagcgatgtcgatgctgccctccagggcatctccaagaaggtaggccagatcgagaaagtgtccattcctggtctgccagaagggccagacagttctcaaatcagcactggtttgtgggagtggaagccgaagctgacggtatactacgagaagtctggcaccaagaatagcaaggcgccagcagtgctttttctaccaggttttggggtgggcacgttccattttgagaagcaattgatggatcttggccgtgattacaaggtgtggacgatggattttctgggacagggaatgtcattggcgtgtgaagatcccgctcctaaggccatggcggaggaggatgaggaatcatattggggttttggacaagattcacaaccatgggcagatgaattggtgtactctgtagacttgtggcgtgaccaggtccagcacttcattgaagaggttatcggtgagccagtttatatcgtgggaaactctcttggaggttttgttgctctatatttagctgcatccagcccacaccttgtaaagggggtcacattgcttaacgcaacgccattttggggtttccttcccaatcctgcaagatctcctcgtttgtcaaagatttttccatgggctgggacatttcctcttccatcagttgtgaggaaacttactgaaacagtgtggcagaagataagcgacccaagaagtatacagaagatactcaggcaagtatatgctgaccactcaacaaatgttgacaaggtgttctcgcgtattatagagacaacagaacacccggcagctgctgcatcatttgcctccattatgtttgctccaatgggccagatatcctttcaggaggcactgtctaggtgccaaaggcaggacattcccatttcccttatgtatgggaaagaagacccgtgggttacaccttattggggtatcagagtcaagcaacaggtgccagaagcaccctattatgaaattagccctgccggtcactgtcctcacgacgaggttcctgaggttataaactatttgctccgaggatggcttaagaatgtggagtctgagggttcagttgacctcccatttcttgaagattccagctttcaagaacatggtgtgtcgaaggagctggagtttgtcaggacagggtccaagaaatcagttagtgtgcggctcttcggttcccaaatttccctgtggagccaactgagctcattcttgaagcggcatgcctccaacataagggtagtgtccagatgattcgtccgtagttcgttagatagtagaagcttcaattgtatattgtattcattattctttatgtaaagtagtcaggttgatgcctagatgtacgaaatagagacaagttcaaatattttagtgaatgtgaatatgtgtagtacagagttagcattgggcgtcaaacatctgtcgtggttgtattcataggaattcaagatcacatattttcctgctcggt

SEQ ID NO: 65928 - protein, 546 aa, Triticum aestivum
  peptide (1)..(546): Ceres Seq. ID no. 15169512
  misc_feature (211)..(474): Pfam Name: alpha/beta hydrolase fold Pfam Description: alpha/beta hydrolase fold
  misc_feature (245)..(479): Homolog of NCBI NO: 17229548 NR Description: hypothetical protein [Nostoc sp. PCC 7120]
  misc_feature (154)..(224): Homolog of NCBI NO: 23126297 NR Description: hypothetical protein [Nostoc punctiforme]
  misc_feature (245)..(481): Homolog of NCBI NO: 23126297 NR Description: hypothetical protein [Nostoc punctiforme]
  misc_feature (156)..(224): Homolog of NCBI NO: 16330114 NR Description: unknown protein [Synechocystis sp. PCC 6803]
  misc_feature (245)..(479): Homolog of NCBI NO: 16330114 NR Description: unknown protein [Synechocystis sp. PCC 6803]
  misc_feature (164)..(224): Homolog of NCBI NO: 23040754 NR Description: hypothetical protein [Trichodesmium erythraeum
  misc_feature (245)..(476): Homolog of NCBI NO: 23040754 NR Description: hypothetical protein [Trichodesmium erythraeum
  misc_feature (164)..(222): Homolog of NCBI NO: 37521904 NR Description: hypothetical protein gll2335 [Gloeobacter
  misc_feature (245)..(479): Homolog of NCBI NO: 37521904 NR Description: hypothetical protein gll2335 [Gloeobacter
  misc_feature (92)..(543): Homolog of NCBI NO: 15240707 NR Description: hydrolase, alpha/beta fold family [Arabidopsis
TGSTSVPSFAEHASRAEARYLELEGVLPPPLYCAPVARRSNRSWTDSFCRTSVLATEAAMEVVSSSHSCLAFHQTPTSARRSLGTGLGLRHTKFARPRKSAVLCVGRASNPGDSGKLHVSRSFDVSDVDAALQGISKKVGQIEKVSIPGLPEGPDSSQISTGLWEWKPKLTVYYEKSGTKNSKAPAVLFLPGFGVGTFHFEKQLMDLGRDYKVWTMDFLGQGMSLACEDPAPKAMAEEDEESYWGFGQDSQPWADELVYSVDLWRDQVQHFIEEVIGEPVYIVGNSLGGFVALYLAASSPHLVKGVTLLNATPFWGFLPNPARSPRLSKIFPWAGTFPLPSVVRKLTETVWQKISDPRSIQKILRQVYADHSTNVDKVFSRIIETTEHPAAAASFASIMFAPMGQISFQEALSRCQRQDIPISLMYGKEDPWVTPYWGIRVKQQVPEAPYYEISPAGHCPHDEVPEVINYLLRGWLKNVESEGSVDLPFLEDSSFQEHGVSKELEFVRTGSKKSVSVRLFGSQISLWSQLSSFLKRHASNIRVVSR

SEQ ID NO: 65929 - protein, 487 aa, Triticum aestivum
  peptide (1)..(487): Ceres Seq. ID no. 15169513
  misc_feature (152)..(415): Pfam Name: alpha/beta hydrolase fold Pfam Description: alpha/beta hydrolase fold
  misc_feature (186)..(420): Homolog of NCBI NO: 17229548 NR Description: hypothetical protein [Nostoc sp. PCC 7120]
  misc_feature (95)..(165): Homolog of NCBI NO: 23126297 NR Description: hypothetical protein [Nostoc punctiforme]
  misc_feature (186)..(422): Homolog of NCBI NO: 23126297 NR Description: hypothetical protein [Nostoc punctiforme]
  misc_feature (97)..(165): Homolog of NCBI NO: 16330114 NR Description: unknown protein [Synechocystis sp. PCC 6803]
  misc_feature (186)..(420): Homolog of NCBI NO: 16330114 NR Description: unknown protein [Synechocystis sp. PCC 6803]
  misc_feature (105)..(165): Homolog of NCBI NO: 23040754 NR Description: hypothetical protein [Trichodesmium erythraeum
  misc_feature (186)..(417): Homolog of NCBI NO: 23040754 NR Description: hypothetical protein [Trichodesmium erythraeum
  misc_feature (105)..(163): Homolog of NCBI NO: 37521904 NR Description: hypothetical protein gll2335 [Gloeobacter
  misc_feature (186)..(420): Homolog of NCBI NO: 37521904 NR Description: hypothetical protein gll2335 [Gloeobacter
  misc_feature (33)..(484): Homolog of NCBI NO: 15240707 NR Description: hydrolase, alpha/beta fold family [Arabidopsis
MEVVSSSHSCLAFHQTPTSARRSLGTGLGLRHTKFARPRKSAVLCVGRASNPGDSGKLHVSRSFDVSDVDAALQGISKKVGQIEKVSIPGLPEGPDSSQISTGLWEWKPKLTVYYEKSGTKNSKAPAVLFLPGFGVGTFHFEKQLMDLGRDYKVWTMDFLGQGMSLACEDPAPKAMAEEDEESYWGFGQDSQPWADELVYSVDLWRDQVQHFIEEVIGEPVYIVGNSLGGFVALYLAASSPHLVKGVTLLNATPFWGFLPNPARSPRLSKIFPWAGTFPLPSVVRKLTETVWQKISDPRSIQKILRQVYADHSTNVDKVFSRIIETTEHPAAAASFASIMFAPMGQISFQEALSRCQRQDIPISLMYGKEDPWVTPYWGIRVKQQVPEAPYYEISPAGHCPHDEVPEVINYLLRGWLKNVESEGSVDLPFLEDSSFQEHGVSKELEFVRTGSKKSVSVRLFGSQISLWSQLSSFLKRHASNIRVVSR

SEQ ID NO: 65930 - protein, 342 aa, Triticum aestivum
  peptide (1)..(342): Ceres Seq. ID no. 15169514
  misc_feature (7)..(270): Pfam Name: alpha/beta hydrolase fold Pfam Description: alpha/beta hydrolase fold
  misc_feature (41)..(275): Homolog of NCBI NO: 17229548 NR Description: hypothetical protein [Nostoc sp. PCC 7120]
  misc_feature (1)..(20): Homolog of NCBI NO: 23126297 NR Description: hypothetical protein [Nostoc punctiforme]
  misc_feature (41)..(277): Homolog of NCBI NO: 23126297 NR Description: hypothetical protein [Nostoc punctiforme]
  misc_feature (1)..(20): Homolog of NCBI NO: 16330114 NR Description: unknown protein [Synechocystis sp. PCC 6803]
  misc_feature (41)..(275): Homolog of NCBI NO: 16330114 NR Description: unknown protein [Synechocystis sp. PCC 6803]
  misc_feature (1)..(20): Homolog of NCBI NO: 23040754 NR Description: hypothetical protein [Trichodesmium erythraeum
  misc_feature (41)..(272): Homolog of NCBI NO: 23040754 NR Description: hypothetical protein [Trichodesmium erythraeum
  misc_feature (1)..(18): Homolog of NCBI NO: 37521904 NR Description: hypothetical protein gll2335 [Gloeobacter
  misc_feature (41)..(275): Homolog of NCBI NO: 37521904 NR Description: hypothetical protein gll2335 [Gloeobacter
  misc_feature (1)..(339): Homolog of NCBI NO: 15240707 NR Description: hydrolase, alpha/beta fold family [Arabidopsis
MDLGRDYKVWTMDFLGQGMSLACEDPAPKAMAEEDEESYWGFGQDSQPWADELVYSVDLWRDQVQHFIEEVIGEPVYIVGNSLGGFVALYLAASSPHLVKGVTLLNATPFWGFLPNPARSPRLSKIFPWAGTFPLPSVVRKLTETVWQKISDPRSIQKILRQVYADHSTNVDKVFSRIIETTEHPAAAASFASIMFAPMGQISFQEALSRCQRQDIPISLMYGKEDPWVTPYWGIRVKQQVPEAPYYEISPAGHCPHDEVPEVINYLLRGWLKNVESEGSVDLPFLEDSSFQEHGVSKELEFVRTGSKKSVSVRLFGSQISLWSQLSSFLKRHASNIRVVSR

SEQ ID NO: 65931 - DNA, 1344 bp, Triticum aestivum
  misc_feature (1)..(1344): Ceres Seq. ID no. 13657142
ccattacctagaacatcctagtcgaaaattcgaccaaacctcccacctcgcacctcgccgcccgatccgacgcgccggcgacccgccgccgctctcgagcgtcgccgatccgcggcgcagatccctcacgaggttttctcaccttattagctcgctggtgcaggactgccacggctcgccggctcttgaatttcagcgcacgcggatctggtgggaggagccccgtgggcgccgctgccttggcgatgtcgagggtccgggacaggacggaggacttcaaggagtccgttcgcgtcgccgcgctctcccatggctacacggagtcgcaattggccgcgctcatgtcgtctttcatcatccggaagccgtcgcccaaatcgccgttcacaaatgcagcaatcaagacgcttgagagcatcagggagctcgagaagtttatagtgaagcacaggagggactatgtggacatgcatcgcaccacggagcaagagagggacaacattgagcatgaagttggtatttttgtaaaagcatgcaaggaacagatagatatcctaaagaacaggatccttgaagatgagaggaatagaagagcgaacacatggcttggcacaagagatgagacttcccggttagacttgatagctcaccagcatggtgtggttttgattttgagcgagcgtctccactcagtaactgcacaatttgatcgccttaggtccctgcgctttcaagaagctattaatagggtgatgccaagaaagaagattaagaagaagccagaaataaaacctactgaaccatccaagtcaaaccttgtattgaaatctgatgtctcgaaggttgaagatcgggaggtatcaactgcgcccttaagagttcaagaacaactcttggacgatgaaacacgagctctccagatggagttgaccaatcttcttgatactgtccaagaaacggagacaaagatgatagagatgtcagcacttaatcatcttatgtcaacacatgttctacagcaagctcagcagattcaatatttatacgaccaggcagtggaagcaacgaacaacgtggagcgtgggaacaaggagctatcccaggcgatccagcggaacaacagcagtagaacctttctcctgcttttcttctttgttcttactttctctgttctgtttcttgactggtacaaaaactgaattagcagctcatgtaaccgtactattgcgcaaatggattgagctattgatgtgtcatctcttgtgggatgattatcacttgtcatgcatattggtcagtgttactctgttaagattctaagattttgccgccgttggcaaacat

SEQ ID NO: 65932 - protein, 317 aa, Triticum aestivum
  peptide (1)..(317): Ceres Seq. ID no. 13657143
  misc_feature (39)..(286): Homolog of NCBI NO: 21312682 NR Description: syntaxin 18 [Mus musculus]
  misc_feature (262)..(315): Homolog of NCBI NO: 34878414 NR Description: similar to Syntaxin 18 [Rattus norvegicus]
  misc_feature (39)..(260): Homolog of NCBI NO: 34878414 NR Description: similar to Syntaxin 18 [Rattus norvegicus]
  misc_feature (39)..(315): Homolog of NCBI NO: 18203931 NR Description: Stx18 protein [Mus musculus]
  misc_feature (39)..(315): Homolog of NCBI NO: 30585223 NR Description: Homo sapiens syntaxin 18 [synthetic construct]
  misc_feature (39)..(315): Homolog of NCBI NO: 8394376 NR Description: syntaxin 18 [Homo sapiens]
  misc_feature (1)..(294): Homolog of NCBI NO: 25405495 NR Description: hypothetical protein F19C24.5 [imported] -
  misc_feature (1)..(315): Homolog of NCBI NO: 18403653 NR Description: expressed protein [Arabidopsis thaliana]
  misc_feature (1)..(315): Homolog of NCBI NO: 28380152 NR Description: Syntaxin 81 (AtSYP81)
  misc_feature (1)..(315): Homolog of NCBI NO: 38346626 NR Description: OSJNBa0074L08.20 [Oryza sativa (japonica
MSRVRDRTEDFKESVRVAALSHGYTESQLAALMSSFIIRKPSPKSPFTNAAIKTLESIRELEKFIVKHRRDYVDMHRTTEQERDNIEHEVGIFVKACKEQIDILKNRILEDERNRRANTWLGTRDETSRLDLIAHQHGVVLILSERLHSVTAQFDRLRSLRFQEAINRVMPRKKIKKKPEIKPTEPSKSNLVLKSDVSKVEDREVSTAPLRVQEQLLDDETRALQMELTNLLDTVQETETKMIEMSALNHLMSTHVLQQAQQIQYLYDQAVEATNNVERGNKELSQAIQRNNSSRTFLLLFFFVLTFSVLFLDWYKN

SEQ ID NO: 65933 - protein, 285 aa, Triticum aestivum
  peptide (1)..(285): Ceres Seq. ID no. 13657144
  misc_feature (7)..(254): Homolog of NCBI NO: 21312682 NR Description: syntaxin 18 [Mus musculus]
  misc_feature (230)..(283): Homolog of NCBI NO: 34878414 NR Description: similar to Syntaxin 18 [Rattus norvegicus]
  misc_feature (7)..(228): Homolog of NCBI NO: 34878414 NR Description: similar to Syntaxin 18 [Rattus norvegicus]
  misc_feature (7)..(283): Homolog of NCBI NO: 18203931 NR Description: Stx18 protein [Mus musculus]
  misc_feature (7)..(283): Homolog of NCBI NO: 30585223 NR Description: Homo sapiens syntaxin 18 [synthetic construct]
  misc_feature (7)..(283): Homolog of NCBI NO: 8394376 NR Description: syntaxin 18 [Homo sapiens]
  misc_feature (1)..(262): Homolog of NCBI NO: 25405495 NR Description: hypothetical protein F19C24.5 [imported] -
  misc_feature (1)..(283): Homolog of NCBI NO: 18403653 NR Description: expressed protein [Arabidopsis thaliana]
  misc_feature (1)..(283): Homolog of NCBI NO: 28380152 NR Description: Syntaxin 81 (AtSYP81)
  misc_feature (1)..(283): Homolog of NCBI NO: 38346626 NR Description: OSJNBa0074L08.20 [Oryza sativa (japonica
MSSFIIRKPSPKSPFTNAAIKTLESIRELEKFIVKHRRDYVDMHRTTEQERDNIEHEVGIFVKACKEQIDILKNRILEDERNRRANTWLGTRDETSRLDLIAHQHGVVLILSERLHSVTAQFDRLRSLRFQEAINRVMPRKKIKKKPEIKPTEPSKSNLVLKSDVSKVEDREVSTAPLRVQEQLLDDETRALQMELTNLLDTVQETETKMIEMSALNHLMSTHVLQQAQQIQYLYDQAVEATNNVERGNKELSQAIQRNNSSRTFLLLFFFVLTFSVLFLDWYKN

SEQ ID NO: 65934 - protein, 243 aa, Triticum aestivum
  peptide (1)..(243): Ceres Seq. ID no. 13657145
  misc_feature (1)..(212): Homolog of NCBI NO: 21312682 NR Description: syntaxin 18 [Mus musculus]
  misc_feature (188)..(241): Homolog of NCBI NO: 34878414 NR Description: similar to Syntaxin 18 [Rattus norvegicus]
  misc_feature (1)..(186): Homolog of NCBI NO: 34878414 NR Description: similar to Syntaxin 18 [Rattus norvegicus]
  misc_feature (1)..(241): Homolog of NCBI NO: 18203931 NR Description: Stx18 protein [Mus musculus]
  misc_feature (1)..(241): Homolog of NCBI NO: 30585223 NR Description: Homo sapiens syntaxin 18 [synthetic construct]
  misc_feature (1)..(241): Homolog of NCBI NO: 8394376 NR Description: syntaxin 18 [Homo sapiens]
  misc_feature (1)..(220): Homolog of NCBI NO: 25405495 NR Description: hypothetical protein F19C24.5 [imported] -
  misc_feature (1)..(241): Homolog of NCBI NO: 18403653 NR Description: expressed protein [Arabidopsis thaliana]
  misc_feature (1)..(241): Homolog of NCBI NO: 28380152 NR Description: Syntaxin 81 (AtSYP81)
  misc_feature (1)..(241): Homolog of NCBI NO: 38346626 NR Description: OSJNBa0074L08.20 [Oryza sativa (japonica
MHRTTEQERDNIEHEVGIFVKACKEQIDILKNRILEDERNRRANTWLGTRDETSRLDLIAHQHGVVLILSERLHSVTAQFDRLRSLRFQEAINRVMPRKKIKKKPEIKPTEPSKSNLVLKSDVSKVEDREVSTAPLRVQEQLLDDETRALQMELTNLLDTVQETETKMIEMSALNHLMSTHVLQQAQQIQYLYDQAVEATNNVERGNKELSQAIQRNNSSRTFLLLFFFVLTFSVLFLDWYKN

SEQ ID NO: 65935 - DNA, 1618 bp, Triticum aestivum
  misc_feature (1)..(1618): Ceres Seq. ID no. 13656547
acataaatcatttgatcagcctctcgcctcttcataaggtagctagctcgctcaatccatactaccactatccctctcgaccgtctccgctttatccaatttaggcacttgtgttcagctatctatcgagaaggataggagtagaaggaaggcgaccatggcaagcagcaccagcatcccagccaccaccttgggcgagatccgtgttgctcagcgtgcggatgggccggcggcgatgctggccatcggcacggctaacccgccccactgcgtgccccaggaagactaccccgactactacttcggcgtcaccaagagcgaccacctcaccgacctcaagcgcaccttcgccaaactatgcgggatgacgggcatcggcaggcgtttcttccaccacacggacgaactgctcgccacacacccggacttgtccctcgacgcccggctggacgtcgtggctactgccgccccagagctcgctgcgtcggctgcggcgaacgccatcgccgagtggggccgtccggcgggcgacatcacccatctcgtcgtcagcacgaacgctgggtcgcatgccccgggcaccgacgtccgcttggtctccctcctcggcctccgccatgatgtcctgcgcactgtgctccagctcaacggctgcgcttccggatgcgccgccctgcgcctagccaaagaccttgccgagaacaaccatggcgcgcgcgtcctcgtggcctgcgtcgagctcactatcaccgccttccgcgggcccgatgaggcggactccttcgacaccctcatcccccaggggctcttcggtgacggtgcaggcgccgccatcgtgggtgctgaaccctacgtccacgagcgcccgctgtttgagatggtgtcagcctcccagtacgtgataccagacaccgagcacatgctcaccatgcagctcggcagcggtggcatcggcgggaccattgccaccggactgccaagactggcggcgggcatcgttgagaagtgcttgctggatgcgtttggcgaccgcctagccggcatcggaggtgtcgtcgaatggaacaacctcttctgggccgtgcatcccggcagcagtgcgatgttggaccacatcgtcagggcactccggcttgctccggcgaagctggcggcgagcagaaccgtggtgagagagtacgggaacatgctgggcgccacggtgatcttcgtgctcgatgaggtcaggcgccaaagagaagatcctgaaggagagggagctagccatgatgaaggttggggggttatgatgggatttggaccggggttcactgtggagacgatgctgctgcatgccgctacctaggtaattagaaagaaggaataaaaaaacacatagcatatatatgttcaataaagtgcatgcaatgcaaccttttatatttccatatccacatatcacctatatatacgtacgtgtaagagatgtgaacatgtggtgtgacagtggtcaagtcctgtaagagtgatctgcagtatatggttataaataccacttcagctacttgtaggtttcaaaaaaaaaaaaaaaaaaaaaaaaaaccaaaaaaaaaaaaaaaaaagcttatcgataccgtcg

SEQ ID NO: 65936 - protein, 395 aa, Triticum aestivum
  peptide (1)..(395): Ceres Seq. ID no. 13656548
  misc_feature (12)..(230): Pfam Name: Chalcone and stilbene synthases, N-terminal domain Pfam Description: Chalcone and stilbene synthases, N-terminal
  misc_feature (11)..(393): Homolog of NCBI NO: 7433777 NR Description: naringenin-chalcone synthase (EC 2.3.1.74) -
  misc_feature (10)..(393): Homolog of NCBI NO: 6684423 NR Description: chalcone synthase [Arabis pauciflora]
  misc_feature (9)..(393): Homolog of NCBI NO: 5921758 NR Description: CHALCONE SYNTHASE 3 (NARINGENIN-CHALCONE SYNTHASE
  misc_feature (9)..(393): Homolog of NCBI NO: 5921759 NR Description: CHALCONE SYNTHASE 4 (NARINGENIN-CHALCONE SYNTHASE
  misc_feature (9)..(393): Homolog of NCBI NO: 5921766 NR Description: CHALCONE SYNTHASE 8 (NARINGENIN-CHALCONE SYNTHASE
  misc_feature (16)..(391): Homolog of NCBI NO: 37531256 NR Description: putative chalcone synthase
  misc_feature (9)..(391): Homolog of NCBI NO: 37531436 NR Description: putative chalcone synthase
  misc_feature (1)..(395): Homolog of NCBI NO: 34393320 NR Description: putative Chalcone synthase
  misc_feature (1)..(393): Homolog of NCBI NO: 34393972 NR Description: putative chalcone synthase 1
  misc_feature (1)..(395): Homolog of NCBI NO: 33146463 NR Description: putative chalcone synthase
MASSTSIPATTLGEIRVAQRADGPAAMLAIGTANPPHCVPQEDYPDYYFGVTKSDHLTDLKRTFAKLCGMTGIGRRFFHHTDELLATHPDLSLDARLDVVATAAPELAASAAANAIAEWGRPAGDITHLVVSTNAGSHAPGTDVRLVSLLGLRHDVLRTVLQLNGCASGCAALRLAKDLAENNHGARVLVACVELTITAFRGPDEADSFDTLIPQGLFGDGAGAAIVGAEPYVHERPLFEMVSASQYVIPDTEHMLTMQLGSGGIGGTIATGLPRLAAGIVEKCLLDAFGDRLAGIGGVVEWNNLFWAVHPGSSAMLDHIVRALRLAPAKLAASRTVVREYGNMLGATVIFVLDEVRRQREDPEGEGASHDEGWGVMMGFGPGFTVETMLLHAAT

SEQ ID NO: 65937 - protein, 369 aa, Triticum aestivum
  peptide (1)..(369): Ceres Seq. ID no. 13656549
  misc_feature (1)..(204): Pfam Name: Chalcone and stilbene synthases, N-terminal domain Pfam Description: Chalcone and stilbene synthases, N-terminal
  misc_feature (1)..(367): Homolog of NCBI NO: 7433777 NR Description: naringenin-chalcone synthase (EC 2.3.1.74) -
  misc_feature (1)..(367): Homolog of NCBI NO: 6684423 NR Description: chalcone synthase [Arabis pauciflora]
  misc_feature (1)..(367): Homolog of NCBI NO: 5921758 NR Description: CHALCONE SYNTHASE 3 (NARINGENIN-CHALCONE SYNTHASE
  misc_feature (1)..(367): Homolog of NCBI NO: 5921759 NR Description: CHALCONE SYNTHASE 4 (NARINGENIN-CHALCONE SYNTHASE
  misc_feature (1)..(367): Homolog of NCBI NO: 5921766 NR Description: CHALCONE SYNTHASE 8 (NARINGENIN-CHALCONE SYNTHASE
  misc_feature (1)..(365): Homolog of NCBI NO: 37531256 NR Description: putative chalcone synthase
  misc_feature (1)..(365): Homolog of NCBI NO: 37531436 NR Description: putative chalcone synthase
  misc_feature (1)..(369): Homolog of NCBI NO: 34393320 NR Description: putative Chalcone synthase
  misc_feature (1)..(367): Homolog of NCBI NO: 34393972 NR Description: putative chalcone synthase 1
  misc_feature (1)..(369): Homolog of NCBI NO: 33146463 NR Description: putative chalcone synthase
MLAIGTANPPHCVPQEDYPDYYFGVTKSDHLTDLKRTFAKLCGMTGIGRRFFHHTDELLATHPDLSLDARLDVVATAAPELAASAAANAIAEWGRPAGDITHLVVSTNAGSHAPGTDVRLVSLLGLRHDVLRTVLQLNGCASGCAALRLAKDLAENNHGARVLVACVELTITAFRGPDEADSFDTLIPQGLFGDGAGAAIVGAEPYVHERPLFEMVSASQYVIPDTEHMLTMQLGSGGIGGTIATGLPRLAAGIVEKCLLDAFGDRLAGIGGVVEWNNLFWAVHPGSSAMLDHIVRALRLAPAKLAASRTVVREYGNMLGATVIFVLDEVRRQREDPEGEGASHDEGWGVMMGFGPGFTVETMLLHAAT

SEQ ID NO: 65938 - protein, 326 aa, Triticum aestivum
  peptide (1)..(326): Ceres Seq. ID no. 13656550
  misc_feature (1)..(161): Pfam Name: Chalcone and stilbene synthases, N-terminal domain Pfam Description: Chalcone and stilbene synthases, N-terminal
  misc_feature (1)..(324): Homolog of NCBI NO: 7433777 NR Description: naringenin-chalcone synthase (EC 2.3.1.74) -
  misc_feature (1)..(324): Homolog of NCBI NO: 6684423 NR Description: chalcone synthase [Arabis pauciflora]
  misc_feature (1)..(324): Homolog of NCBI NO: 5921758 NR Description: CHALCONE SYNTHASE 3 (NARINGENIN-CHALCONE SYNTHASE
  misc_feature (1)..(324): Homolog of NCBI NO: 5921759 NR Description: CHALCONE SYNTHASE 4 (NARINGENIN-CHALCONE SYNTHASE
  misc_feature (1)..(324): Homolog of NCBI NO: 5921766 NR Description: CHALCONE SYNTHASE 8 (NARINGENIN-CHALCONE SYNTHASE
  misc_feature (1)..(322): Homolog of NCBI NO: 37531256 NR Description: putative chalcone synthase
  misc_feature (1)..(322): Homolog of NCBI NO: 37531436 NR Description: putative chalcone synthase
  misc_feature (1)..(326): Homolog of NCBI NO: 34393320 NR Description: putative Chalcone synthase
  misc_feature (1)..(324): Homolog of NCBI NO: 34393972 NR Description: putative chalcone synthase 1
  misc_feature (1)..(326): Homolog of NCBI NO: 33146463 NR Description: putative chalcone synthase
MTGIGRRFFHHTDELLATHPDLSLDARLDVVATAAPELAASAAANAIAEWGRPAGDITHLVVSTNAGSHAPGTDVRLVSLLGLRHDVLRTVLQLNGCASGCAALRLAKDLAENNHGARVLVACVELTITAFRGPDEADSFDTLIPQGLFGDGAGAAIVGAEPYVHERPLFEMVSASQYVIPDTEHMLTMQLGSGGIGGTIATGLPRLAAGIVEKCLLDAFGDRLAGIGGVVEWNNLFWAVHPGSSAMLDHIVRALRLAPAKLAASRTVVREYGNMLGATVIFVLDEVRRQREDPEGEGASHDEGWGVMMGFGPGFTVETMLLHAAT

SEQ ID NO: 65939 - DNA, 1802 bp, Triticum aestivum
  misc_feature (1)..(1802): Ceres Seq. ID no. 15169611
agaacatcctaatcgaaaaatccaatcagtcagccacctcaagacagatccccacagaccacggagcagtcagccatggataaggcatacattgccgtcctctccttcgccttcctcttcctgctccactacattctgggcaagaagagcaatggcagcaagggcgccgtgcagctgccgccgagccctccggccatcccgttcttcggccacctccacctcgtggagaagccgctgcacgccgcgctgtgccgtctgggggcgcgctacgggccggtcttctcgctgcggctcggcgcgcgcaacgccgtggtggtgtcctcgccggcgtgcgccagggagtgcttcacggagcacgacgtggccttcgccaaccggccgcagttcccctcgcagatgctcgtctcctacggcggcacctcgctcgtcagctccagctacggcccgcactggcgcaacctccgccgcgtggccgccgtgcggctgctctccgcgcaccgcgtcgccggcatgtcgggcgtcatcgccgctgaggtgcgcgccatggcgcgccggctgtgccgcgccgccgcggcgtccaccggcggcggcgccgcccgggtggagctcaagcggagtctcttcgagctctccctcagcgtgctcatggagaccatcgcgcagaccaaggggacccgcccggaggcggacggcgacacggacatgtccctggaggcgcaggagttcaagcaggtggtggacgagatcatcccgctcattggcgcggccaacgtgtgggactacctgccggtgatgcggtggttcgacgtgtccggcgtgaggagcaggatcctggccacggtgagcaggagggacgccttcctccatcggctcatcgacgcggagcgacggaggatggacgagggcggcgccggcgacgagggcgagaaaaagagcatgattgccgtgctcctcactctgcagaagacagagccggagctgtacactgatcagatgatcatcgctctgtgtgcgaatctctttgtggccggaacggagaccacctcaaccacgatagaatgggccatgtcgctcctgctgaaccacccggcggcgctcaagaaggcccaggccgagatggacgcgtccatcggggcctcccgcatggtcgccgccgacgacgtgccccgcctcagctacctccagtgcatcatcaacgagacgctacgcctgtacccggcggcgccgctgctgctgccgcacgagtcctccgccgactgcaaggtcggcggctacgacgtgccaagcggcacgatgctgatcgtgaacgcgtacgccatccacagggacccggccgtgtgggaggacccggcggcgttccggccggagcggttcgaggacggcaaggccgacgggctgctgctgatgccgttcgggatggggcggcggaggtgccccggcgagacgctggcgctgcagacggtcggggtggttctcgggacgctggtgcagtgcttcgactgggatcgggtggacggcgcggaggtggacatgacggagggggtggggatcaccatgcccaaggccgtggctttggaggccgtgtgtaggcctcgcgcggccatgggcgatgtccttcagaagctctgaggatcgaacttgttggcatcctatatgtacagtagtttccagtagcatcgtcccgtatgcatggcccgataccgttttgatgtagtactgtagtaccgaataaacttttttttaactacttggcgcactttattaaactcatatcaaagttacatcattcacaatgtccgaac

SEQ ID NO: 65940 - protein, 517 aa, Triticum aestivum
  peptide (1)..(517): Ceres Seq. ID no. 15169612
  misc_feature (35)..(502): Pfam Name: Cytochrome P450 Pfam Description: Cytochrome P450
  misc_feature (26)..(510): Homolog of NCBI NO: 38344454 NR Description: OSJNBa0017P10.2 [Oryza sativa (japonica
  misc_feature (14)..(517): Homolog of NCBI NO: 3059131 NR Description: cytochrome P450 [Helianthus tuberosus]
  misc_feature (1)..(517): Homolog of NCBI NO: 7430635 NR Description: cytochrome P450 (EC 1.14.-.-) 81B1c - Jerusalem
  misc_feature (1)..(516): Homolog of NCBI NO: 14488358 NR Description: putative cytochrome P450 [Oryza sativa (japonica
  misc_feature (1)..(517): Homolog of NCBI NO: 14488355 NR Description: putative cytochrome P450 [Oryza sativa (japonica
  misc_feature (1)..(517): Homolog of NCBI NO: 14488373 NR Description: putative cytochrome P450 [Oryza sativa (japonica
  misc_feature (1)..(517): Homolog of NCBI NO: 14488353 NR Description: putative cytochrome P450 [Oryza sativa (japonica
  misc_feature (1)..(517): Homolog of NCBI NO: 13661744 NR Description: putative cytochrome P450 [Lolium rigidum]
  misc_feature (1)..(517): Homolog of NCBI NO: 13661748 NR Description: putative cytochrome P450 [Lolium rigidum]
  misc_feature (1)..(517): Homolog of NCBI NO: 13661746 NR Description: putative cytochrome P450 [Lolium rigidum]
MDKAYIAVLSFAFLFLLHYILGKKSNGSKGAVQLPPSPPAIPFFGHLHLVEKPLHAALCRLGARYGPVFSLRLGARNAVVVSSPACARECFTEHDVAFANRPQFPSQMLVSYGGTSLVSSSYGPHWRNLRRVAAVRLLSAHRVAGMSGVIAAEVRAMARRLCRAAAASTGGGAARVELKRSLFELSLSVLMETIAQTKGTRPEADGDTDMSLEAQEFKQVVDEIIPLIGAANVWDYLPVMRWFDVSGVRSRILATVSRRDAFLHRLIDAERRRMDEGGAGDEGEKKSMIAVLLTLQKTEPELYTDQMIIALCANLFVAGTETTSTTIEWAMSLLLNHPAALKKAQAEMDASIGASRMVAADDVPRLSYLQCIINETLRLYPAAPLLLPHESSADCKVGGYDVPSGTMLIVNAYAIHRDPAVWEDPAAFRPERFEDGKADGLLLMPFGMGRRRCPGETLALQTVGVVLGTLVQCFDWDRVDGAEVDMTEGVGITMPKAVALEAVCRPRAAMGDVLQKL

SEQ ID NO: 65941 - protein, 410 aa, Triticum aestivum
  peptide (1)..(410): Ceres Seq. ID no. 15169613
  misc_feature (1)..(395): Pfam Name: Cytochrome P450 Pfam Description: Cytochrome P450
  misc_feature (1)..(403): Homolog of NCBI NO: 38344454 NR Description: OSJNBa0017P10.2 [Oryza sativa (japonica
  misc_feature (1)..(410): Homolog of NCBI NO: 3059131 NR Description: cytochrome P450 [Helianthus tuberosus]
  misc_feature (1)..(410): Homolog of NCBI NO: 7430635 NR Description: cytochrome P450 (EC 1.14.-.-) 81B1c - Jerusalem
  misc_feature (1)..(409): Homolog of NCBI NO: 14488358 NR Description: putative cytochrome P450 [Oryza sativa (japonica
  misc_feature (1)..(410): Homolog of NCBI NO: 14488355 NR Description: putative cytochrome P450 [Oryza sativa (japonica
  misc_feature (1)..(410): Homolog of NCBI NO: 14488373 NR Description: putative cytochrome P450 [Oryza sativa (japonica
  misc_feature (1)..(410): Homolog of NCBI NO: 14488353 NR Description: putative cytochrome P450 [Oryza sativa (japonica
  misc_feature (1)..(410): Homolog of NCBI NO: 13661744 NR Description: putative cytochrome P450 [Lolium rigidum]
  misc_feature (1)..(410): Homolog of NCBI NO: 13661748 NR Description: putative cytochrome P450 [Lolium rigidum]
  misc_feature (1)..(410): Homolog of NCBI NO: 13661746 NR Description: putative cytochrome P450 [Lolium rigidum]
MLVSYGGTSLVSSSYGPHWRNLRRVAAVRLLSAHRVAGMSGVIAAEVRAMARRLCRAAAASTGGGAARVELKRSLFELSLSVLMETIAQTKGTRPEADGDTDMSLEAQEFKQVVDEIIPLIGAANVWDYLPVMRWFDVSGVRSRILATVSRRDAFLHRLIDAERRRMDEGGAGDEGEKKSMIAVLLTLQKTEPELYTDQMIIALCANLFVAGTETTSTTIEWAMSLLLNHPAALKKAQAEMDASIGASRMVAADDVPRLSYLQCIINETLRLYPAAPLLLPHESSADCKVGGYDVPSGTMLIVNAYAIHRDPAVWEDPAAFRPERFEDGKADGLLLMPFGMGRRRCPGETLALQTVGVVLGTLVQCFDWDRVDGAEVDMTEGVGITMPKAVALEAVCRPRAAMGDVLQKL

SEQ ID NO: 65942 - protein, 372 aa, Triticum aestivum
  peptide (1)..(372): Ceres Seq. ID no. 15169614
  misc_feature (1)..(357): Pfam Name: Cytochrome P450 Pfam Description: Cytochrome P450
  misc_feature (1)..(365): Homolog of NCBI NO: 38344454 NR Description: OSJNBa0017P10.2 [Oryza sativa (japonica
  misc_feature (1)..(372): Homolog of NCBI NO: 3059131 NR Description: cytochrome P450 [Helianthus tuberosus]
  misc_feature (1)..(372): Homolog of NCBI NO: 7430635 NR Description: cytochrome P450 (EC 1.14.-.-) 81B1c - Jerusalem
  misc_feature (1)..(371): Homolog of NCBI NO: 14488358 NR Description: putative cytochrome P450 [Oryza sativa (japonica
  misc_feature (1)..(372): Homolog of NCBI NO: 14488355 NR Description: putative cytochrome P450 [Oryza sativa (japonica
  misc_feature (1)..(372): Homolog of NCBI NO: 14488373 NR Description: putative cytochrome P450 [Oryza sativa (japonica
  misc_feature (1)..(372): Homolog of NCBI NO: 14488353 NR Description: putative cytochrome P450 [Oryza sativa (japonica
  misc_feature (1)..(372): Homolog of NCBI NO: 13661744 NR Description: putative cytochrome P450 [Lolium rigidum]
  misc_feature (1)..(372): Homolog of NCBI NO: 13661748 NR Description: putative cytochrome P450 [Lolium rigidum]
  misc_feature (1)..(372): Homolog of NCBI NO: 13661746 NR Description: putative cytochrome P450 [Lolium rigidum]
MSGVIAAEVRAMARRLCRAAAASTGGGAARVELKRSLFELSLSVLMETIAQTKGTRPEADGDTDMSLEAQEFKQVVDEIIPLIGAANVWDYLPVMRWFDVSGVRSRILATVSRRDAFLHRLIDAERRRMDEGGAGDEGEKKSMIAVLLTLQKTEPELYTDQMIIALCANLFVAGTETTSTTIEWAMSLLLNHPAALKKAQAEMDASIGASRMVAADDVPRLSYLQCIINETLRLYPAAPLLLPHESSADCKVGGYDVPSGTMLIVNAYAIHRDPAVWEDPAAFRPERFEDGKADGLLLMPFGMGRRRCPGETLALQTVGVVLGTLVQCFDWDRVDGAEVDMTEGVGITMPKAVALEAVCRPRAAMGDVLQKL

SEQ ID NO: 65943 - DNA, 691 bp, Triticum aestivum
  misc_feature (1)..(691): Ceres Seq. ID no. 13597970
acacactgcagacaatggcgtctccagccagaagcgcgagcgcctctccagtcctcctcttgctcgtcgtcctcgccgccggggcaagcgcggcaccgctcaccatcacgaaccggtgccacttcacggtgtggccggcggtggcgctcgtgctccaccaagggggcggcggcaccgagctccacccaggggccagctggagcctcgacacgccggtgatcggctcccagtacatatgggggcgcacgggctgctccttcgaccgggccggcaaggggcggtgccagaccggcgactgcggtggcagctcgctgacttgcgggggcaacccggcggtgccggtgaccatggccgaggtgtccgtgctccaaggcaactatacctacggcgtcacgtcgacgctcaaggggttcaacctgcccatggacctgaagtgcagctccggcgacgcgctcccgtgccggaaggctgggtgcgacgttgtccagccgtacgcgaagagctgcagcgcggctggaagccggctccagatcgtcttctgcccatgatgagcggcagaacatatatagcacgtatacgcatgtaataaccaccgcacgtacgggtagtagtacctccgtataccgtacacgtgtgtcaggtattcccagccgcagtgcatacactcgagcgagattccaataaaggtgcc

SEQ ID NO: 65944 - protein, 194 aa, Triticum aestivum
  peptide (1)..(194): Ceres Seq. ID no. 13597971
HTADNGVSSQKRERLSSPPLARRPRRRGKRGTAHHHEPVPLHGVAGGGARAPPRGRRHRAPPRGQLEPRHAGDRLPVHMGAHGLLLRPGRQGAVPDRRLRWQLADLRGQPGGAGDHGRGVRAPRQLYLRRHVDAQGVQPAHGPEVQLRRRAPVPEGWVRRCPAVREELQRGWKPAPDRLLPMMSGRTYIARIRM

SEQ ID NO: 65945 - protein, 181 aa, Triticum aestivum
  peptide (1)..(181): Ceres Seq. ID no. 13597972
  misc_feature (37)..(181): Pfam Name: Thaumatin family Pfam Description: Thaumatin family
  misc_feature (12)..(181): Homolog of NCBI NO: 1710785 NR Description: Thaumatin-like pathogenesis-related protein 3
  misc_feature (12)..(181): Homolog of NCBI NO: 1710783 NR Description: Thaumatin-like pathogenesis-related protein 1
  misc_feature (13)..(181): Homolog of NCBI NO: 417526 NR Description: Pathogenesis-related protein 1C precursor
  misc_feature (13)..(181): Homolog of NCBI NO: 417525 NR Description: Pathogenesis-related protein 1A/1B precursor
  misc_feature (13)..(181): Homolog of NCBI NO: 135917 NR Description: Thaumatin-like protein PWIR2 precursor
  misc_feature (12)..(181): Homolog of NCBI NO: 7442164 NR Description: pathogenesis related protein-5 - maize
  misc_feature (11)..(181): Homolog of NCBI NO: 444344 NR Description: thaumatin-like protein
  misc_feature (12)..(181): Homolog of NCBI NO: 1710786 NR Description: Thaumatin-like pathogenesis-related protein 4
  misc_feature (11)..(181): Homolog of NCBI NO: 14164977 NR Description: thaumatin-like protein TLP4 [Hordeum vulgare]
  misc_feature (5)..(181): Homolog of NCBI NO: 401190 NR Description: Thaumatin-like protein precursor
TLQTMASPARSASASPVLLLLVVLAAGASAAPLTITNRCHFTVWPAVALVLHQGGGGTELHPGASWSLDTPVIGSQYIWGRTGCSFDRAGKGRCQTGDCGGSSLTCGGNPAVPVTMAEVSVLQGNYTYGVTSTLKGFNLPMDLKCSSGDALPCRKAGCDVVQPYAKSCSAAGSRLQIVFCP

SEQ ID NO: 65946 - protein, 177 aa, Triticum aestivum
  peptide (1)..(177): Ceres Seq. ID no. 13597973
  misc_feature (33)..(177): Pfam Name: Thaumatin family Pfam Description: Thaumatin family
  misc_feature (8)..(177): Homolog of NCBI NO: 1710785 NR Description: Thaumatin-like pathogenesis-related protein 3
  misc_feature (8)..(177): Homolog of NCBI NO: 1710783 NR Description: Thaumatin-like pathogenesis-related protein 1
  misc_feature (9)..(177): Homolog of NCBI NO: 417526 NR Description: Pathogenesis-related protein 1C precursor
  misc_feature (9)..(177): Homolog of NCBI NO: 417525 NR Description: Pathogenesis-related protein 1A/1B precursor
  misc_feature (9)..(177): Homolog of NCBI NO: 135917 NR Description: Thaumatin-like protein PWIR2 precursor
  misc_feature (8)..(177): Homolog of NCBI NO: 7442164 NR Description: pathogenesis related protein-5 - maize
  misc_feature (7)..(177): Homolog of NCBI NO: 444344 NR Description: thaumatin-like protein
  misc_feature (8)..(177): Homolog of NCBI NO: 1710786 NR Description: Thaumatin-like pathogenesis-related protein 4
  misc_feature (7)..(177): Homolog of NCBI NO: 14164977 NR Description: thaumatin-like protein TLP4 [Hordeum vulgare]
  misc_feature (1)..(177): Homolog of NCBI NO: 401190 NR Description: Thaumatin-like protein precursor
MASPARSASASPVLLLLVVLAAGASAAPLTITNRCHFTVWPAVALVLHQGGGGTELHPGASWSLDTPVIGSQYIWGRTGCSFDRAGKGRCQTGDCGGSSLTCGGNPAVPVTMAEVSVLQGNYTYGVTSTLKGFNLPMDLKCSSGDALPCRKAGCDVVQPYAKSCSAAGSRLQIVFCP

SEQ ID NO: 65947 - DNA, 1126 bp, Triticum aestivum
  misc_feature (1)..(1126): Ceres Seq. ID no. 12465091
gagtcgaaccgtccgagaaggcagtgcacgccgccgccgccccctcctcaatcccccggccccgccgccccctcctcaatcccccggccccgccgcccaactccctccgcctctcacgcgcgtcgccgcccaccgcgcccctgctgtctccaccccgtccgcaatctctcgccactgggtttcgaggggaacatggcgagagatggcggacgggctggcggtctggcacgcgatcgagcagtgggtgacagactacctgaccatctactacccgaacgacggcgtgctgcagggcgacgtggagctgcaggcgtggtggaaggaggtgcgggaggtcgggcacggcgacctcaaggacgcggcgtggtggcccaagatgcacaccgtggcggagctgatcaaggcctgcgccaccatcatctggacggggtcggcgctgcacgcggccgtcaacttcgggcagtacccctactcggggtaccaccccaacaagccgtcggcgagccggcggccgatgccgtcgccgggcagcgaggagtacgccctgctggagcgcgccccggagaaggcattcatcctcaccatcaccaaccagttccaggcgctggtgggcatctcgctgatggagatcctgtccaagcactcctccgacgaggtgtacctggggcagcacgacacgccggcgtggacgtcggacgccaaggcgcaggaggcgttcaggcggttcggggcgaggctggagggcatcgagaagcaggtggtggccatgaacggggacccgcggctcaagaaccgcaccgggccggccaagttcccctacatgctgctctaccccaacacctccgaccacacgggccaggccgaggggctcacggccaggggcatccccaacagcatctccatctgaggacctccatctctgcttgcttgcttgcttgcaccggatactagctactagctactgtgggtgttctgccggtgcatatgcttgccatgatctcaataataataaggcaataatgcgtgcgtgcacgacgggtccgatcggcatgcggtgcgtgtgcgtcgtcgtgtagagaaaaattcccttcatttgcccaataataaagtcgatgttgtgatgttc

SEQ ID NO: 65948 - protein, 316 aa, Triticum aestivum
  peptide (1)..(316): Ceres Seq. ID no. 12465092
ESNRPRRQCTPPPPPPQSPGPAAPSSIPRPRRPTPSASHARRRPPRPCCLHPVRNLSPLGFEGNMARDGGRAGGLARDRAVGDRLPDHLLPERRRAAGRRGAAGVVEGGAGGRARRPQGRGVVAQDAHRGGADQGLRHHHLDGVGAARGRQLRAVPLLGVPPQQAVGEPAADAVAGQRGVRPAGARPGEGIHPHHHQPVPGAGGHLADGDPVQALLRRGVPGAARHAGVDVGRQGAGGVQAVRGEAGGHREAGGGHERGPAAQEPHRAGQVPLHAALPQHLRPHGPGRGAHGQGHPQQHLHLRTSISACLLACTGY

SEQ ID NO: 65949 - protein, 301 aa, Triticum aestivum
  peptide (1)..(301): Ceres Seq. ID no. 12465093
  misc_feature (70)..(279): Pfam Name: Lipoxygenase Pfam Description: Lipoxygenase
  misc_feature (45)..(301): Homolog of NCBI NO: 12620877 NR Description: lipoxygenase [Zea mays]
  misc_feature (45)..(301): Homolog of NCBI NO: 4887227 NR Description: lipoxygenase [Zea mays]
  misc_feature (45)..(301): Homolog of NCBI NO: 38636549 NR Description: 9-lipoxigenase [Oryza sativa (japonica
  misc_feature (45)..(301): Homolog of NCBI NO: 19033550 NR Description: putative lipoxygenase [Oryza sativa (japonica
  misc_feature (70)..(301): Homolog of NCBI NO: 126401 NR Description: Lipoxygenase L-2
  misc_feature (45)..(301): Homolog of NCBI NO: 30025164 NR Description: lipoxygenase 1 protein [Hordeum vulgare]
  misc_feature (45)..(301): Homolog of NCBI NO: 2506825 NR Description: Lipoxygenase 1
  misc_feature (70)..(301): Homolog of NCBI NO: 31126788 NR Description: lipoxygenase L-2; lipoxygenase
  misc_feature (45)..(301): Homolog of NCBI NO: 8515851 NR Description: lipoxygenase [Zea mays]
  misc_feature (70)..(301): Homolog of NCBI NO: 7433148 NR Description: lipoxygenase (EC 1.13.11.12) 2 - barley
SRTVREGSARRRRPLLNPPAPPPPPQSPGPAAQLPPPLTRVAAHRAPAVSTPSAISRHWVSRGTWREMADGLAVWHAIEQWVTDYLTIYYPNDGVLQGDVELQAWWKEVREVGHGDLKDAAWWPKMHTVAELIKACATIIWTGSALHAAVNFGQYPYSGYHPNKPSASRRPMPSPGSEEYALLERAPEKAFILTITNQFQALVGISLMEILSKHSSDEVYLGQHDTPAWTSDAKAQEAFRRFGARLEGIEKQVVAMNGDPRLKNRTGPAKFPYMLLYPNTSDHTGQAEGLTARGIPNSISI

SEQ ID NO: 65950 - protein, 252 aa, Triticum aestivum
  peptide (1)..(252): Ceres Seq. ID no. 12465094
MARDGGRAGGLARDRAVGDRLPDHLLPERRRAAGRRGAAGVVEGGAGGRARRPQGRGVVAQDAHRGGADQGLRHHHLDGVGAARGRQLRAVPLLGVPPQQAVGEPAADAVAGQRGVRPAGARPGEGIHPHHHQPVPGAGGHLADGDPVQALLRRGVPGAARHAGVDVGRQGAGGVQAVRGEAGGHREAGGGHERGPAAQEPHRAGQVPLHAALPQHLRPHGPGRGAHGQGHPQQHLHLRTSISACLLACTGY

SEQ ID NO: 65951 - protein, 234 aa, Triticum aestivum
  peptide (1)..(234): Ceres Seq. ID no. 12465095
  misc_feature (3)..(212): Pfam Name: Lipoxygenase Pfam Description: Lipoxygenase
  misc_feature (1)..(234): Homolog of NCBI NO: 12620877 NR Description: lipoxygenase [Zea mays]
  misc_feature (1)..(234): Homolog of NCBI NO: 4887227 NR Description: lipoxygenase [Zea mays]
  misc_feature (1)..(234): Homolog of NCBI NO: 38636549 NR Description: 9-lipoxigenase [Oryza sativa (japonica
  misc_feature (1)..(234): Homolog of NCBI NO: 19033550 NR Description: putative lipoxygenase [Oryza sativa (japonica
  misc_feature (3)..(234): Homolog of NCBI NO: 126401 NR Description: Lipoxygenase L-2
  misc_feature (1)..(234): Homolog of NCBI NO: 30025164 NR Description: lipoxygenase 1 protein [Hordeum vulgare]
  misc_feature (1)..(234): Homolog of NCBI NO: 2506825 NR Description: Lipoxygenase 1
  misc_feature (3)..(234): Homolog of NCBI NO: 31126788 NR Description: lipoxygenase L-2; lipoxygenase
  misc_feature (1)..(234): Homolog of NCBI NO: 8515851 NR Description: lipoxygenase [Zea mays]
  misc_feature (3)..(234): Homolog of NCBI NO: 7433148 NR Description: lipoxygenase (EC 1.13.11.12) 2 - barley
MADGLAVWHAIEQWVTDYLTIYYPNDGVLQGDVELQAWWKEVREVGHGDLKDAAWWPKMHTVAELIKACATIIWTGSALHAAVNFGQYPYSGYHPNKPSASRRPMPSPGSEEYALLERAPEKAFILTITNQFQALVGISLMEILSKHSSDEVYLGQHDTPAWTSDAKAQEAFRRFGARLEGIEKQVVAMNGDPRLKNRTGPAKFPYMLLYPNTSDHTGQAEGLTARGIPNSISI

SEQ ID NO: 65952 - DNA, 1016 bp, Triticum aestivum
  misc_feature (1)..(1016): Ceres Seq. ID no. 12619453
ctcccatctcccacttctccgccccctcgccccctccgccgttgacctcgtcggccgccgccgacgaggcctcctgtcgccggatgcccatcctctagacacccgctccgtcacaacctgaaccccgctcctctcccagacgagccgtgtcagcatccgactccaccgatcctccgaaccctagatcccctggcggaaccgaggtccatcccttcgaaatcaatgtatccaacatttgatgttggtgaccggattctcgccgagagggtttcatatattttccgggagccgcaagttttggacattgtgatcttccgtgcacccctagtccttcaggcattgggctacagctcaagtgatgtgttcatcaagagggttgtggccaagggcggggacatcgttgaagtgactgatggtcaattattagttaatggagtcgtccaagatgaggactttgtgctcgagccacccgattatgaaatggacccggtgagtgtgcctgaaggctacgtgtttgtgctgggggacaacagaaacaacagcttcgattcccataactggggaccgctacccgtgaagaacattcttgggagatctgtgcttcgatactggccaccatcgaaaataacagacacaatttatgatcacattgaccatgatgtggttcatggcatggcaggcatctcctgagatgcacagttgattcggcaatgctaaaccaacccaatttttttttgctgatgatctctgctgcattttttttctcctctagctatttatttgattgatgtcgccttgcacgtaatgcctggctgactcagtttttcccctgccctaccagcagatgcttgtttagaggcaacaattcttgtactgtaaccaaaggtctggctcgcctgtcgaatgagcatccatggcagcgcatggaaattttgttatgtttggcacaaggagagttggttgatctgtttcagatcttaatgtataagaagcagaaagcatatgccatattgtcc

SEQ ID NO: 65953 - protein, 155 aa, Triticum aestivum
  peptide (1)..(155): Ceres Seq. ID no. 12619454
  misc_feature (1)..(123): Pfam Name: Signal peptidase I Pfam Description: Signal peptidase I
  misc_feature (1)..(131): Homolog of NCBI NO: 22297948 NR Description: signal peptidase I [Thermosynechococcus elongatus
  misc_feature (1)..(134): Homolog of NCBI NO: 16329254 NR Description: leader peptidase I [Synechocystis sp. PCC 6803]
  misc_feature (1)..(135): Homolog of NCBI NO: 17230467 NR Description: signal peptidase I [Nostoc sp. PCC 7120]
  misc_feature (1)..(141): Homolog of NCBI NO: 25082936 NR Description: chloroplast thylakoidal processing peptidase,
  misc_feature (1)..(141): Homolog of NCBI NO: 30687572 NR Description: chloroplast thylakoidal processing peptidase
  misc_feature (1)..(141): Homolog of NCBI NO: 9294054 NR Description: contains similarity to signal peptidase (leader
  misc_feature (1)..(140): Homolog of NCBI NO: 21553622 NR Description: chloroplast thylakoidal processing peptidase,
  misc_feature (1)..(140): Homolog of NCBI NO: 15222236 NR Description: chloroplast thylakoidal processing peptidase,
  misc_feature (1)..(155): Homolog of NCBI NO: 30684587 NR Description: signal peptidase I -related [Arabidopsis
  misc_feature (1)..(155): Homolog of NCBI NO: 25408074 NR Description: probable signal peptidase I [imported] -
MYPTFDVGDRILAERVSYIFREPQVLDIVIFRAPLVLQALGYSSSDVFIKRVVAKGGDIVEVTDGQLLVNGVVQDEDFVLEPPDYEMDPVSVPEGYVFVLGDNRNNSFDSHNWGPLPVKNILGRSVLRYWPPSKITDTIYDHIDHDVVHGMAGIS

SEQ ID NO: 65954 - DNA, 984 bp, Triticum aestivum
  misc_feature (1)..(984): Ceres Seq. ID no. 12619787
gaccgggtggcacgctgcccccaactcgcagttccagaatcgtcttccctttcctcggcgacccatgaaggaccccttcgaggcggccgttgaggagcaggactccccgccggattcgccggcgccgcccgaggaggaccctgccacagcggtcccccacacagccgccgaggactatgacggcagcgccggcgccggtggttcgcgcgccccgccgccgcggccgcggccttcggcgctagccgcgccctcgacctccgtagccccggcggcggcgaaggccaaggttcggccccataaggagcaggatgacgaccacgacgaggaagaccccatggaggtcgacctcgacaagctgccctccggcaccagcgatcccgacaagctcgccaagatgaatgctttgttatcccaatttacagaagaccagatgaaccggtatgagtcctttcgtagatctggattccagaaatctaacatgaaaaagctattggcgagtatcactggcagtcaaaagatatctatgccaacgaccatcgtagtatcaggaatagcaaagatgtttgtcggcgaggtcattgaaacagcaagaatagttatgagtgaaaggaaagattctggacccatcaggccttgccacatcagagaagcatacagaagattgaagcttgaagggaagatcccaaagcgatccgttcctagactctttcgctagagtcgaatcatcgctgttgatgtaagtcaggcgtcgtatgattctctctcggaggcaaaaggttatggtaactgtaatggaacttccgctttgcaatctcaatgcgttccgacacttctacttgccatcgcacggaaggtgattgttgggagaacaaagaaaaatagtagccgcagcgtgatggtattttatggtgcttgctactcattggaatttgcatctataagctgtaagttgtgactgtttcatgcttatttactagtggttct

SEQ ID NO: 65955 - protein, 237 aa, Triticum aestivum
  peptide (1)..(237): Ceres Seq. ID no. 12619788
  misc_feature (132)..(221): Pfam Name: hTAFII28-like protein conserved region Pfam Description: hTAFII28-like protein conserved region
  misc_feature (127)..(228): Homolog of NCBI NO: 12835252 NR Description: unnamed protein product [Mus musculus]
  misc_feature (125)..(228): Homolog of NCBI NO: 27704824 NR Description: similar to Transcription initiation factor TFIID
  misc_feature (125)..(228): Homolog of NCBI NO: 27674899 NR Description: similar to Transcription initiation factor TFIID
  misc_feature (125)..(228): Homolog of NCBI NO: 5032151 NR Description: TBP-associated factor 11
  misc_feature (125)..(228): Homolog of NCBI NO: 30794436 NR Description: TAF11 RNA polymerase II, TATA box binding protein
  misc_feature (113)..(237): Homolog of NCBI NO: 25316525 NR Description: T20H2.22 protein - Arabidopsis thaliana
  misc_feature (113)..(237): Homolog of NCBI NO: 15223727 NR Description: hypothetical protein; protein id: At1g20000.1
  misc_feature (23)..(237): Homolog of NCBI NO: 7447999 NR Description: hypothetical protein F1C12.195 - Arabidopsis
  misc_feature (23)..(237): Homolog of NCBI NO: 15235369 NR Description: putative protein
  misc_feature (22)..(208): Homolog of NCBI NO: 34911174 NR Description: B1144G04.34 [Oryza sativa (japonica
TGWHAAPNSQFQNRLPFPRRPMKDPFEAAVEEQDSPPDSPAPPEEDPATAVPHTAAEDYDGSAGAGGSRAPPPRPRPSALAAPSTSVAPAAAKAKVRPHKEQDDDHDEEDPMEVDLDKLPSGTSDPDKLAKMNALLSQFTEDQMNRYESFRRSGFQKSNMKKLLASITGSQKISMPTTIVVSGIAKMFVGEVIETARIVMSERKDSGPIRPCHIREAYRRLKLEGKIPKRSVPRLFR

SEQ ID NO: 65956 - protein, 216 aa, Triticum aestivum
  peptide (1)..(216): Ceres Seq. ID no. 12619789
  misc_feature (111)..(200): Pfam Name: hTAFII28-like protein conserved region Pfam Description: hTAFII28-like protein conserved region
  misc_feature (106)..(207): Homolog of NCBI NO: 12835252 NR Description: unnamed protein product [Mus musculus]
  misc_feature (104)..(207): Homolog of NCBI NO: 27674899 NR Description: similar to Transcription initiation factor TFIID
  misc_feature (104)..(207): Homolog of NCBI NO: 27704824 NR Description: similar to Transcription initiation factor TFIID
  misc_feature (104)..(207): Homolog of NCBI NO: 5032151 NR Description: TBP-associated factor 11
  misc_feature (104)..(207): Homolog of NCBI NO: 30794436 NR Description: TAF11 RNA polymerase II, TATA box binding protein
  misc_feature (92)..(216): Homolog of NCBI NO: 25316525 NR Description: T20H2.22 protein - Arabidopsis thaliana
  misc_feature (92)..(216): Homolog of NCBI NO: 15223727 NR Description: hypothetical protein; protein id: At1g20000.1
  misc_feature (2)..(216): Homolog of NCBI NO: 7447999 NR Description: hypothetical protein F1C12.195 - Arabidopsis
  misc_feature (2)..(216): Homolog of NCBI NO: 15235369 NR Description: putative protein
  misc_feature (1)..(187): Homolog of NCBI NO: 34911174 NR Description: B1144G04.34 [Oryza sativa (japonica
MKDPFEAAVEEQDSPPDSPAPPEEDPATAVPHTAAEDYDGSAGAGGSRAPPPRPRPSALAAPSTSVAPAAAKAKVRPHKEQDDDHDEEDPMEVDLDKLPSGTSDPDKLAKMNALLSQFTEDQMNRYESFRRSGFQKSNMKKLLASITGSQKISMPTTIVVSGIAKMFVGEVIETARIVMSERKDSGPIRPCHIREAYRRLKLEGKIPKRSVPRLFR

SEQ ID NO: 65957 - protein, 126 aa, Triticum aestivum
  peptide (1)..(126): Ceres Seq. ID no. 12619790
  misc_feature (21)..(110): Pfam Name: hTAFII28-like protein conserved region Pfam Description: hTAFII28-like protein conserved region
  misc_feature (16)..(117): Homolog of NCBI NO: 12835252 NR Description: unnamed protein product [Mus musculus]
  misc_feature (14)..(117): Homolog of NCBI NO: 27674899 NR Description: similar to Transcription initiation factor TFIID
  misc_feature (14)..(117): Homolog of NCBI NO: 27704824 NR Description: similar to Transcription initiation factor TFIID
  misc_feature (14)..(117): Homolog of NCBI NO: 5032151 NR Description: TBP-associated factor 11
  misc_feature (14)..(117): Homolog of NCBI NO: 30794436 NR Description: TAF11 RNA polymerase II, TATA box binding protein
  misc_feature (2)..(126): Homolog of NCBI NO: 25316525 NR Description: T20H2.22 protein - Arabidopsis thaliana
  misc_feature (2)..(126): Homolog of NCBI NO: 15223727 NR Description: hypothetical protein; protein id: At1g20000.1
  misc_feature (1)..(126): Homolog of NCBI NO: 7447999 NR Description: hypothetical protein F1C12.195 - Arabidopsis
  misc_feature (1)..(126): Homolog of NCBI NO: 15235369 NR Description: putative protein
  misc_feature (1)..(97): Homolog of NCBI NO: 34911174 NR Description: B1144G04.34 [Oryza sativa (japonica
MEVDLDKLPSGTSDPDKLAKMNALLSQFTEDQMNRYESFRRSGFQKSNMKKLLASITGSQKISMPTTIVVSGIAKMFVGEVIETARIVMSERKDSGPIRPCHIREAYRRLKLEGKIPKRSVPRLFR

SEQ ID NO: 65958 - DNA, 727 bp, Triticum aestivum
  misc_feature (1)..(727): Ceres Seq. ID no. 12619015
tccgcctttccctcccccattcgcgtcgcgtctccaccccacctcccctcgcctcctcctccacctccccgtgtcgcgagaaaccctcgtcccttcctcccctctcctccctcgtccctcctcccatggcggagtcgcccgagaacgccgccgcggcgcccgccgctcctcccgcccccgccccggccccggcgccggcgccgaagccgtccccgcccgccaggtccgggatcccgccgcggtacgacctcgacgccaagtgggacgcctgcctcgacctctccatccgccgcgtcgcctactcctccctcgccggcgccttcgggggcctcatcctcttccgtagcccaacaacccgctgggcatcagttgcacttggagctggtgtggggataggggctgcgttcactgaatgctcatacatattcaatggttctcctccaaagtggtcggccaatgcttcgactgttgctgctcattctgaagggggagacaattaaaacagtgtcgggcgggatgagtagcccaatcttggcggagttttggagcgtttgttgattgaacctagctgtttggtgtctgatgatatcgccacttgtcatagtatgtcctgaaagttagcgtgtgccccctcgtgaatttcttcacacattacgcggaaaccattcgtgactgcggtctgatgatatgaccctatggctccgtaagttgggtctgtcgtgaggtt

SEQ ID NO: 65959 - protein, 165 aa, Triticum aestivum
  peptide (1)..(165): Ceres Seq. ID no. 12619016
  misc_feature (74)..(143): Pfam Name: Domain of unknown function (DUF543) Pfam Description: Domain of unknown function (DUF543)
  misc_feature (74)..(152): Homolog of NCBI NO: 25406151 NR Description: unknown protein T9N14.2 [imported] - Arabidopsis
  misc_feature (82)..(158): Homolog of NCBI NO: 18395129 NR Description: expressed protein
  misc_feature (74)..(152): Homolog of NCBI NO: 21553491 NR Description: unknown [Arabidopsis thaliana]
  misc_feature (74)..(152): Homolog of NCBI NO: 18410008 NR Description: unknown protein
RLSLPHSRRVSTPPPLASSSTSPCREKPSSLPPLSSLVPPPMAESPENAAAAPAAPPAPAPAPAPAPKPSPPARSGIPPRYDLDAKWDACLDLSIRRVAYSSLAGAFGGLILFRSPTTRWASVALGAGVGIGAAFTECSYIFNGSPPKWSANASTVAAHSEGGDN

SEQ ID NO: 65960 - protein, 131 aa, Triticum aestivum
  peptide (1)..(131): Ceres Seq. ID no. 12619017
  misc_feature (4)..(107): Pfam Name: Extensin-like region Pfam Description: Extensin-like region
  misc_feature (4)..(107): Homolog of NCBI NO: 6523547 NR Description: hydroxyproline-rich glycoprotein DZ-HRGP
  misc_feature (4)..(107): Homolog of NCBI NO: 6523547 NR Description: hydroxyproline-rich glycoprotein DZ-HRGP
  misc_feature (11)..(120): Homolog of NCBI NO: 2129478 NR Description: chitinase (EC 3.2.1.14) precursor - beet
  misc_feature (4)..(130): Homolog of NCBI NO: 20138131 NR Description: Vegetative cell wall protein gp1 precursor
  misc_feature (4)..(107): Homolog of NCBI NO: 2129478 NR Description: chitinase (EC 3.2.1.14) precursor - beet
  misc_feature (4)..(108): Homolog of NCBI NO: 6523547 NR Description: hydroxyproline-rich glycoprotein DZ-HRGP
  misc_feature (12)..(131): Homolog of NCBI NO: 28279905 NR Description: Similar to Wiskott-Aldrich syndrome-like (human)
  misc_feature (4)..(120): Homolog of NCBI NO: 20138131 NR Description: Vegetative cell wall protein gp1 precursor
  misc_feature (4)..(119): Homolog of NCBI NO: 81286 NR Description: extensin - Volvox carteri (fragment)
  misc_feature (4)..(107): Homolog of NCBI NO: 6523547 NR Description: hydroxyproline-rich glycoprotein DZ-HRGP
SAFPSPIRVASPPHLPSPPPPPPRVARNPRPFLPSPPSSLLPWRSRPRTPPRRPPLLPPPPRPRRRRRSRPRPPGPGSRRGTTSTPSGTPASTSPSAASPTPPSPAPSGASSSSVAQQPAGHQLHLELVWG

SEQ ID NO: 65961 - protein, 124 aa, Triticum aestivum
  peptide (1)..(124): Ceres Seq. ID no. 12619018
  misc_feature (33)..(102): Pfam Name: Domain of unknown function (DUF543) Pfam Description: Domain of unknown function (DUF543)
  misc_feature (33)..(111): Homolog of NCBI NO: 25406151 NR Description: unknown protein T9N14.2 [imported] - Arabidopsis
  misc_feature (41)..(117): Homolog of NCBI NO: 18395129 NR Description: expressed protein
  misc_feature (33)..(111): Homolog of NCBI NO: 21553491 NR Description: unknown [Arabidopsis thaliana]
  misc_feature (33)..(111): Homolog of NCBI NO: 18410008 NR Description: unknown protein
MAESPENAAAAPAAPPAPAPAPAPAPKPSPPARSGIPPRYDLDAKWDACLDLSIRRVAYSSLAGAFGGLILFRSPTTRWASVALGAGVGIGAAFTECSYIFNGSPPKWSANASTVAAHSEGGDN

SEQ ID NO: 65962 - DNA, 1022 bp, Triticum aestivum
  misc_feature (1)..(1022): Ceres Seq. ID no. 15224382
ttcctcccctcccctcccctccatccatcctcagccgccccttcgccggccggccatggcaaatgcttccctccagtccttcctcccccagcaccaccattccttcctcaacagcaacacccacgacggctcccctcccgcgctcctcaagctcaccaccaacagcaccaacgccagcaacagcatttccttcaagctcttcgccagcagctcctcctcggtgaccacaaccgccaactcgccggctccgactccggtcgccgccgccgccgcggcgacaacctcgccgcccaccccctccctggagctcctgggccagcagctcgcggcgggggactaccggcaggccgacgagaccacgcgcgccctcctcatcgtcctcgcgggcgaggccgcgcgccgccgagggtacgtcttcttctcggaggtccagttcatctccgtcgaggacctccgcgccgtggacgcgctctggctggagcacagcggcggcaggttcgggtacagcgtgcagcgccgggtttgggacaagtcgctgcgcgagttcacccgattcttcatcaagatcggctggatgaagaagctggacaccgaggtggagcagttcaactacagggccttccccgacgagttcatctgggagctcaccgacgacacgccggagggccacctgcccctcaccaatgccctcagggggacgcggctcctggagaacatcttcacccaccccgccttcgactgcgaagaagatgaagcagcaggggcagatgaggaggctgacaagggcagtgccactggtcagaataataaggatgacaacaaaggcaggggcaggccaaagagtttgacagatttcaagcccgactactccttttaaggagcgtgcaagtttgtgatgatgctgccatggggcagctgattttaaaaaaaagtcatgtttctgtagttcgttttggctgtttttgtactgaacatgcatgcaaatttgtgaccatatatattactataaagataagtgtttg

SEQ ID NO: 65963 - protein, 291 aa, Triticum aestivum
  peptide (1)..(291): Ceres Seq. ID no. 15224383
  misc_feature (116)..(246): Homolog of NCBI NO: 11465668 NR Description: ORF238 [Porphyra purpurea]
  misc_feature (93)..(244): Homolog of NCBI NO: 33861481 NR Description: conserved hypothetical protein
  misc_feature (104)..(245): Homolog of NCBI NO: 17229318 NR Description: hypothetical protein [Nostoc sp. PCC 7120]
  misc_feature (104)..(245): Homolog of NCBI NO: 22299137 NR Description: ORF_ID:tlr1594~hypothetical protein
  misc_feature (101)..(242): Homolog of NCBI NO: 30468073 NR Description: ORF155 [Cyanidioschyzon merolae]
  misc_feature (107)..(245): Homolog of NCBI NO: 23042866 NR Description: hypothetical protein [Trichodesmium erythraeum
  misc_feature (73)..(245): Homolog of NCBI NO: 16329174 NR Description: hypothetical protein [Synechocystis sp. PCC 6803]
  misc_feature (31)..(291): Homolog of NCBI NO: 17380924 NR Description: unknown protein [Arabidopsis thaliana]
  misc_feature (31)..(291): Homolog of NCBI NO: 32816239 NR Description: GUN4 mutant [Arabidopsis thaliana]
  misc_feature (31)..(291): Homolog of NCBI NO: 15231674 NR Description: expressed protein [Arabidopsis thaliana]
SSPPLPSIHPQPPLRRPAMANASLQSFLPQHHHSFLNSNTHDGSPPALLKLTTNSTNASNSISFKLFASSSSSVTTTANSPAPTPVAAAAAATTSPPTPSLELLGQQLAAGDYRQADETTRALLIVLAGEAARRRGYVFFSEVQFISVEDLRAVDALWLEHSGGRFGYSVQRRVWDKSLREFTRFFIKIGWMKKLDTEVEQFNYRAFPDEFIWELTDDTPEGHLPLTNALRGTRLLENIFTHPAFDCEEDEAAGADEEADKGSATGQNNKDDNKGRGRPKSLTDFKPDYSF

SEQ ID NO: 65964 - protein, 273 aa, Triticum aestivum
  peptide (1)..(273): Ceres Seq. ID no. 15224384
  misc_feature (98)..(228): Homolog of NCBI NO: 11465668 NR Description: ORF238 [Porphyra purpurea]
  misc_feature (75)..(226): Homolog of NCBI NO: 33861481 NR Description: conserved hypothetical protein
  misc_feature (86)..(227): Homolog of NCBI NO: 17229318 NR Description: hypothetical protein [Nostoc sp. PCC 7120]
  misc_feature (86)..(227): Homolog of NCBI NO: 22299137 NR Description: ORF_ID:tlr1594~hypothetical protein
  misc_feature (83)..(224): Homolog of NCBI NO: 30468073 NR Description: ORF155 [Cyanidioschyzon merolae]
  misc_feature (89)..(227): Homolog of NCBI NO: 23042866 NR Description: hypothetical protein [Trichodesmium erythraeum
  misc_feature (55)..(227): Homolog of NCBI NO: 16329174 NR Description: hypothetical protein [Synechocystis sp. PCC 6803]
  misc_feature (13)..(273): Homolog of NCBI NO: 17380924 NR Description: unknown protein [Arabidopsis thaliana]
  misc_feature (13)..(273): Homolog of NCBI NO: 32816239 NR Description: GUN4 mutant [Arabidopsis thaliana]
  misc_feature (13)..(273): Homolog of NCBI NO: 15231674 NR Description: expressed protein [Arabidopsis thaliana]
MANASLQSFLPQHHHSFLNSNTHDGSPPALLKLTTNSTNASNSISFKLFASSSSSVTTTANSPAPTPVAAAAAATTSPPTPSLELLGQQLAAGDYRQADETTRALLIVLAGEAARRRGYVFFSEVQFISVEDLRAVDALWLEHSGGRFGYSVQRRVWDKSLREFTRFFIKIGWMKKLDTEVEQFNYRAFPDEFIWELTDDTPEGHLPLTNALRGTRLLENIFTHPAFDCEEDEAAGADEEADKGSATGQNNKDDNKGRGRPKSLTDFKPDYSF

SEQ ID NO: 65965 - protein, 250 aa, Triticum aestivum
  peptide (1)..(250): Ceres Seq. ID no. 15224385
FLPSPPLHPSSAAPSPAGHGKCFPPVLPPPAPPFLPQQQHPRRLPSRAPQAHHQQHQRQQQHFLQALRQQLLLGDHNRQLAGSDSGRRRRRGDNLAAHPLPGAPGPAARGGGLPAGRRDHARPPHRPRGRGRAPPRVRLLLGGPVHLRRGPPRRGRALAGAQRRQVRVQRAAPGLGQVAARVHPILHQDRLDEEAGHRGGAVQLQGLPRRVHLGAHRRHAGGPPAPHQCPQGDAAPGEHLHPPRLRLRRR

SEQ ID NO: 65966 - DNA, 738 bp, Triticum aestivum
  misc_feature (1)..(738): Ceres Seq. ID no. 12619201
gttccacttccacagcgggcgccatggacgcggccgtgtccctgcaccaccacggggcgctccccgccgccgcagcctccctccagccccaccaccaccaccgcgcgctccacctcaggcacccgcctccggcctcctccatctccgcgcgcctgaccgtgaccgcgccgccccgccgctcctcctcctcctcgtctgtctccgccgctccgccggcgcacccggcgcgtgccagcaccaaaaccatcaccagcagccgcgccgccacgggctacgcggccgcgctagccgacgcgtcgctccgcgcgggcacgctgcccggggccgcccgccacgcgcgcgccctgctccggcgcctgaaggagcctccccgcgggcagcgcctggaggagcccgacgcgcgggtgggcgcgctggtgcggctgctcgtcggcaagggcaaggccggcatggtctccgacgtcatggccgagttcgccgccctctgcgaccacctgctcgccccgccgccgtcttcagcctcgtcgagcaagcgcgcccagtgcgcccccgcctactagcgcctgatgcacgtaacgtacgtgccatgctagcttttcggttttgcacttcaggattactggctgatgcatgcacgtacgtaacgccacgccggtatcaactgcagatgcccaactgcttgctactgtactatgactgtataattaactgtgagcactgtccatgcgcgtacgcatc

SEQ ID NO: 65967 - protein, 245 aa, Triticum aestivum
  peptide (1)..(245): Ceres Seq. ID no. 12619202
  misc_feature (12)..(190): Homolog of NCBI NO: 22962211 NR Description: hypothetical protein [Rhodopseudomonas palustris]
FHFHSGRHGRGRVPAPPRGAPRRRSLPPAPPPPPRAPPQAPASGLLHLRAPDRDRAAPPLLLLLVCLRRSAGAPGACQHQNHHQQPRRHGLRGRASRRVAPRGHAARGRPPRARPAPAPEGASPRAAPGGARRAGGRAGAAARRQGQGRHGLRRHGRVRRPLRPPARPAAVFSLVEQARPVRPRLLAPDARNVRAMLAFRFCTSGLLADACTYVTPRRYQLQMPNCLLLYYDCIINCEHCPCAYA

SEQ ID NO: 65968 - protein, 185 aa, Triticum aestivum
  peptide (1)..(185): Ceres Seq. ID no. 12619203
STSTAGAMDAAVSLHHHGALPAAAASLQPHHHHRALHLRHPPPASSISARLTVTAPPRRSSSSSSVSAAPPAHPARASTKTITSSRAATGYAAALADASLRAGTLPGAARHARALLRRLKEPPRGQRLEEPDARVGALVRLLVGKGKAGMVSDVMAEFAALCDHLLAPPPSSASSSKRAQCAPAY

SEQ ID NO: 65969 - protein, 178 aa, Triticum aestivum
  peptide (1)..(178): Ceres Seq. ID no. 12619204
MDAAVSLHHHGALPAAAASLQPHHHHRALHLRHPPPASSISARLTVTAPPRRSSSSSSVSAAPPAHPARASTKTITSSRAATGYAAALADASLRAGTLPGAARHARALLRRLKEPPRGQRLEEPDARVGALVRLLVGKGKAGMVSDVMAEFAALCDHLLAPPPSSASSSKRAQCAPAY

SEQ ID NO: 65970 - DNA, 1393 bp, Triticum aestivum
  misc_feature (1)..(1393): Ceres Seq. ID no. 15224772
gccgtggtttgttgccagaaaaacaatctatcttcgttccttgcttcgtctacctccgtccctcaaaactagttcgagctagctagggttagacccaacaattggtatcagagcctcgtttgttcatgtgctcgtggccatgacgatcgtccagcacggcgcagggggtagcacggtgtcgatgccaatgccgatgctcacaccggaaaactacacggtgtgggcgatcaaggccgaagccatcctcgacgcccagaacctctgggaagcggtgtcgccggcaggcgacgcggcggtcgacgcggggaaaaacaagacggcgagggtggtgctgttcggtgtgctctccgaagacttgttgatgcaggtatcgacgaagaagacggccgctgaggtgtgggccagcttgaagacgaggttcgtcggtgctgatcgggtccaggcggcgcggctctccactctccgtggcgagtttgacaacctgcgcatggaggagggggaggcgctttacgcgtacgccggcaaaatcggcggcatggcagcaaggtatgctggcctcggctcgacgctcgacgacaccgccatggtgaaaaaactgctcgacacggtgcccgatcggttgtatgccgcggtggccgggattgagcagttctgcgacgtggagacgatggtgttcgaggaggcgttgagcaggctcaaggagttcgacgaacgcttacgtcggcgcacgcaggacaacggcggacgaggcggcgatcagctgatgttcgcggcggcccagtgggaggcacggcagtgtcagcgcggcggcaacctcgaccatgacgacggtgcgagcagcgtggcttcgggcacgagatgacggcgcgggaagtgctacaactgtggcgttcgtggccacttctcccgtgactgccggcagccgaaggagaaggcgctcctcgccaacatcgacgacgagccgaccttactgtaggtcgtgtcttagggggagattcttaggaataagacacggcggtggtggtgaccagtgtgtgcgtgcgtgttggtcgtgccagacgccgtggcgagtgtgcgtgtgtgcgtgcgttgtgtgcgtgtcgagtctgtgctcataattgagtcgtagtcggttagcagcagtagctggacgcgttagaacgcgtcgtagaggcggtgtaggtgagcaggttgttgggcgctcgtacgtgcttgcgtaggaaaacaatggcttgggcgctacgtctcgtaggctacaaagccggccaggatttggtttgttagtgcgtcagattgatatacgtaggtggttaggagtccagatatgttttgatttgtccagctatatatatgacagagaaaagaggcgttcggcgccgtggtttgttgctac

SEQ ID NO: 65971 - protein, 240 aa, Triticum aestivum
  peptide (1)..(240): Ceres Seq. ID no. 15224773
  misc_feature (103)..(155): Pfam Name: Retrotransposon gag protein Pfam Description: Retrotransposon gag protein
  misc_feature (14)..(240): Homolog of NCBI NO: 6598588 NR Description: F5J5.14 [Arabidopsis thaliana]
  misc_feature (14)..(240): Homolog of NCBI NO: 34902098 NR Description: hypothetical protein [Oryza sativa (japonica
  misc_feature (8)..(240): Homolog of NCBI NO: 37534096 NR Description: putative retroelement [Oryza sativa (japonica
  misc_feature (212)..(240): Homolog of NCBI NO: 29150404 NR Description: gag-pol polyprotein [Oryza sativa (japonica
  misc_feature (51)..(224): Homolog of NCBI NO: 29150404 NR Description: gag-pol polyprotein [Oryza sativa (japonica
  misc_feature (9)..(240): Homolog of NCBI NO: 30017513 NR Description: putative gag-pol polyprotein
  misc_feature (222)..(240): Homolog of NCBI NO: 37534104 NR Description: putative retroelement [Oryza sativa (japonica
  misc_feature (7)..(224): Homolog of NCBI NO: 37534104 NR Description: putative retroelement [Oryza sativa (japonica
  misc_feature (1)..(240): Homolog of NCBI NO: 34910624 NR Description: putative copia-type polyprotein
  misc_feature (1)..(240): Homolog of NCBI NO: 34907386 NR Description: P0471B04.27 [Oryza sativa (japonica
MTIVQHGAGGSTVSMPMPMLTPENYTVWAIKAEAILDAQNLWEAVSPAGDAAVDAGKNKTARVVLFGVLSEDLLMQVSTKKTAAEVWASLKTRFVGADRVQAARLSTLRGEFDNLRMEEGEALYAYAGKIGGMAARYAGLGSTLDDTAMVKKLLDTVPDRLYAAVAGIEQFCDVETMVFEEALSRLKEFDERLRRRTQDNGGRGGDQLMFAAAQWEARQCQRGGNLDHDDGASSVASGTR

SEQ ID NO: 65972 - protein, 226 aa, Triticum aestivum
  peptide (1)..(226): Ceres Seq. ID no. 15224774
  misc_feature (89)..(141): Pfam Name: Retrotransposon gag protein Pfam Description: Retrotransposon gag protein
  misc_feature (1)..(226): Homolog of NCBI NO: 6598588 NR Description: F5J5.14 [Arabidopsis thaliana]
  misc_feature (1)..(226): Homolog of NCBI NO: 34902098 NR Description: hypothetical protein [Oryza sativa (japonica
  misc_feature (1)..(226): Homolog of NCBI NO: 37534096 NR Description: putative retroelement [Oryza sativa (japonica
  misc_feature (198)..(226): Homolog of NCBI NO: 29150404 NR Description: gag-pol polyprotein [Oryza sativa (japonica
  misc_feature (37)..(210): Homolog of NCBI NO: 29150404 NR Description: gag-pol polyprotein [Oryza sativa (japonica
  misc_feature (1)..(226): Homolog of NCBI NO: 30017513 NR Description: putative gag-pol polyprotein
  misc_feature (208)..(226): Homolog of NCBI NO: 37534104 NR Description: putative retroelement [Oryza sativa (japonica
  misc_feature (1)..(210): Homolog of NCBI NO: 37534104 NR Description: putative retroelement [Oryza sativa (japonica
  misc_feature (1)..(226): Homolog of NCBI NO: 34910624 NR Description: putative copia-type polyprotein
  misc_feature (1)..(226): Homolog of NCBI NO: 34907386 NR Description: P0471B04.27 [Oryza sativa (japonica
MPMPMLTPENYTVWAIKAEAILDAQNLWEAVSPAGDAAVDAGKNKTARVVLFGVLSEDLLMQVSTKKTAAEVWASLKTRFVGADRVQAARLSTLRGEFDNLRMEEGEALYAYAGKIGGMAARYAGLGSTLDDTAMVKKLLDTVPDRLYAAVAGIEQFCDVETMVFEEALSRLKEFDERLRRRTQDNGGRGGDQLMFAAAQWEARQCQRGGNLDHDDGASSVASGTR

SEQ ID NO: 65973 - protein, 224 aa, Triticum aestivum
  peptide (1)..(224): Ceres Seq. ID no. 15224775
  misc_feature (87)..(139): Pfam Name: Retrotransposon gag protein Pfam Description: Retrotransposon gag protein
  misc_feature (1)..(224): Homolog of NCBI NO: 6598588 NR Description: F5J5.14 [Arabidopsis thaliana]
  misc_feature (1)..(224): Homolog of NCBI NO: 34902098 NR Description: hypothetical protein [Oryza sativa (japonica
  misc_feature (1)..(224): Homolog of NCBI NO: 37534096 NR Description: putative retroelement [Oryza sativa (japonica
  misc_feature (196)..(224): Homolog of NCBI NO: 29150404 NR Description: gag-pol polyprotein [Oryza sativa (japonica
  misc_feature (35)..(208): Homolog of NCBI NO: 29150404 NR Description: gag-pol polyprotein [Oryza sativa (japonica
  misc_feature (1)..(224): Homolog of NCBI NO: 30017513 NR Description: putative gag-pol polyprotein
  misc_feature (206)..(224): Homolog of NCBI NO: 37534104 NR Description: putative retroelement [Oryza sativa (japonica
  misc_feature (1)..(208): Homolog of NCBI NO: 37534104 NR Description: putative retroelement [Oryza sativa (japonica
  misc_feature (1)..(224): Homolog of NCBI NO: 34910624 NR Description: putative copia-type polyprotein
  misc_feature (1)..(224): Homolog of NCBI NO: 34907386 NR Description: P0471B04.27 [Oryza sativa (japonica
MPMLTPENYTVWAIKAEAILDAQNLWEAVSPAGDAAVDAGKNKTARVVLFGVLSEDLLMQVSTKKTAAEVWASLKTRFVGADRVQAARLSTLRGEFDNLRMEEGEALYAYAGKIGGMAARYAGLGSTLDDTAMVKKLLDTVPDRLYAAVAGIEQFCDVETMVFEEALSRLKEFDERLRRRTQDNGGRGGDQLMFAAAQWEARQCQRGGNLDHDDGASSVASGTR

SEQ ID NO: 65974 - DNA, 1329 bp, Triticum aestivum
  misc_feature (1)..(1329): Ceres Seq. ID no. 15225131
aaaaactgcaagtccgcacctgtccggggaacccgtcccgatccgttccgcaaccagacccggccagttttcccccagcaagcatgggagtaattgcgttgacgacggggacgctgcacggggaatcggggagatattaaccgattccttttcctctggattccggccgtccttttcccgcactataaattccggggcagcggcaagaatccgcagagaccgctgtcagaaggccctgcactcaaactcagcaggtggaggggggcgatagaggcaacgggccgccggcgatgtcgtcgtcgtggaactcggtggggctggaggtgctctaccaggtcatcgggtggatcgccttcgtcgcctggtccttcagcttctacccgcaggtcgtcctcaactacaggcgcaagagtgtcgtcggtctgaacttcgattttctggtgctgaatttcacaaagcattcttcctacctcatatacaatgctgctctattcttcagccccttcatccagcaacagtatcatgacaagtttggtgataaagagatgattcctgttgctgcaaatgatgttgctttctctctacatgcagtggccttgacatcttttaccctttaccaagtttttatttatgagcgtggaaaccagaaagtctccaaagtgtgcatatcaatctctgctgttgtctggtcagctgctattgtttgcctcattgtagcttggccaaaaagtaactggctatggcttattgatgtattcaattcaatacaggttgcgatgacaacagtcaagtacatccctcaggctgtgatgaacttcaggcggaagagtacagttggttggagtattggcaatattttacttgatcttacagggggggtgctgaactttggtcagatgggtgtgcaatctattgatcagcacactttagtgaatttctatggaaatatcggcaagactcttctttcattggaaactgttttcttcgatgttctcttcataattcaacactatgtgttgtaccctgtcaaacgggatgagaatggtaaggccatcatttctgagagggtagctcctctgatcaggccctcagataagcctgaagaagatagtgtatgatatatgtacagtacacacagtgctgtctcaatttctatctgttttaacaaagataaaccacgattatttttcatgtattgtgaattaactgctgtacatatttcttcacggattactgtaaaaatttaaatattgcagaccttcagttttgtccttgacatttatactttgtgtaaagatttacaaaaaacaatatataattgatttggct

SEQ ID NO: 65975 - protein, 275 aa, Triticum aestivum
  peptide (1)..(275): Ceres Seq. ID no. 15225132
  misc_feature (10)..(76): Pfam Name: PQ loop repeat Pfam Description: PQ loop repeat
  misc_feature (10)..(245): Homolog of NCBI NO: 32565006 NR Description: Cystinosin/ERS1p repeat (42.2 kD) (2I426)
  misc_feature (10)..(245): Homolog of NCBI NO: 17532373 NR Description: Cystinosin/ERS1p repeat (45.4 kD) (2I426)
  misc_feature (1)..(244): Homolog of NCBI NO: 31208053 NR Description: ENSANGP00000020331 [Anopheles gambiae]
  misc_feature (10)..(247): Homolog of NCBI NO: 13752577 NR Description: cystinosis, nephropathic [Mus musculus]
  misc_feature (10)..(247): Homolog of NCBI NO: 34872731 NR Description: similar to cystinosin [Rattus norvegicus]
  misc_feature (1)..(244): Homolog of NCBI NO: 4826682 NR Description: cystinosis, nephropathic; Cystinosis [Homo
  misc_feature (1)..(275): Homolog of NCBI NO: 23273064 NR Description: CTNS protein [Homo sapiens]
  misc_feature (6)..(244): Homolog of NCBI NO: 31208055 NR Description: ENSANGP00000020402 [Anopheles gambiae]
  misc_feature (3)..(267): Homolog of NCBI NO: 21553944 NR Description: unknown [Arabidopsis thaliana]
  misc_feature (3)..(267): Homolog of NCBI NO: 15237468 NR Description: expressed protein [Arabidopsis thaliana]
MSSSWNSVGLEVLYQVIGWIAFVAWSFSFYPQVVLNYRRKSVVGLNFDFLVLNFTKHSSYLIYNAALFFSPFIQQQYHDKFGDKEMIPVAANDVAFSLHAVALTSFTLYQVFIYERGNQKVSKVCISISAVVWSAAIVCLIVAWPKSNWLWLIDVFNSIQVAMTTVKYIPQAVMNFRRKSTVGWSIGNILLDLTGGVLNFGQMGVQSIDQHTLVNFYGNIGKTLLSLETVFFDVLFIIQHYVLYPVKRDENGKAIISERVAPLIRPSDKPEEDSV

SEQ ID NO: 65976 - protein, 190 aa, Triticum aestivum
  peptide (1)..(190): Ceres Seq. ID no. 15225133
  misc_feature (1)..(160): Homolog of NCBI NO: 32565006 NR Description: Cystinosin/ERS1p repeat (42.2 kD) (2I426)
  misc_feature (1)..(160): Homolog of NCBI NO: 17532373 NR Description: Cystinosin/ERS1p repeat (45.4 kD) (2I426)
  misc_feature (1)..(159): Homolog of NCBI NO: 31208053 NR Description: ENSANGP00000020331 [Anopheles gambiae]
  misc_feature (1)..(162): Homolog of NCBI NO: 13752577 NR Description: cystinosis, nephropathic [Mus musculus]
  misc_feature (1)..(162): Homolog of NCBI NO: 34872731 NR Description: similar to cystinosin [Rattus norvegicus]
  misc_feature (1)..(159): Homolog of NCBI NO: 4826682 NR Description: cystinosis, nephropathic; Cystinosis [Homo
  misc_feature (1)..(190): Homolog of NCBI NO: 23273064 NR Description: CTNS protein [Homo sapiens]
  misc_feature (1)..(159): Homolog of NCBI NO: 31208055 NR Description: ENSANGP00000020402 [Anopheles gambiae]
  misc_feature (1)..(182): Homolog of NCBI NO: 21553944 NR Description: unknown [Arabidopsis thaliana]
  misc_feature (1)..(182): Homolog of NCBI NO: 15237468 NR Description: expressed protein [Arabidopsis thaliana]
MIPVAANDVAFSLHAVALTSFTLYQVFIYERGNQKVSKVCISISAVVWSAAIVCLIVAWPKSNWLWLIDVFNSIQVAMTTVKYIPQAVMNFRRKSTVGWSIGNILLDLTGGVLNFGQMGVQSIDQHTLVNFYGNIGKTLLSLETVFFDVLFIIQHYVLYPVKRDENGKAIISERVAPLIRPSDKPEEDSV

SEQ ID NO: 65977 - DNA, 597 bp, Triticum aestivum
  misc_feature (1)..(597): Ceres Seq. ID no. 12619336
acacccatctgaagccatctttgcagaagccactagctcactactagtcgatcaattagttgtttcagagagagacgccatgaagtacttggcccagttggtggtggcgctcctggccttctcggcggtggtgttgatggtggcgccgacgggagcggaggcggcgacctgcaatgcgctgcagctgaccccgtgcgcgggggccattatggggaacgcggcgcccacggcgtcgtgctgcagcaagatgaaggagcagcagccgtgcatgtgccagtacgcgcgcgaccccaacctgaagcagtacgtcgactcccccaacggcaagaaggtcatggccgcctgcaaggtgcccgtgccctcctgctaagtccatattactgattcgcacgagagagcccagcgcgcacgcgcgcctctggtctctcgctctcccagcatgttccatgtgtgttgttgtacgctcgatcgtatgccgtgtggtgtgatcgccaatgtcgttagtcgtcgccgttaccctctgccgatcggcgatctatgtggaccgatgtgtatctgaaattctgaatatatgcaataatgatgatgtgtccagct

SEQ ID NO: 65978 - protein, 122 aa, Triticum aestivum
  peptide (1)..(122): Ceres Seq. ID no. 12619337
  misc_feature (57)..(122): Pfam Name: Protease inhibitor/seed storage/LTP family Pfam Description: Protease inhibitor/seed storage/LTP family
  misc_feature (48)..(122): Homolog of NCBI NO: 7488524 NR Description: lipid transfer like protein - turnip (fragment)
  misc_feature (27)..(122): Homolog of NCBI NO: 7489543 NR Description: probable lipid transfer protein - rice
  misc_feature (27)..(122): Homolog of NCBI NO: 24745959 NR Description: putative lipid transfer protein [Solanum
  misc_feature (27)..(122): Homolog of NCBI NO: 3183088 NR Description: Probable nonspecific lipid-transfer protein AKCS9
  misc_feature (40)..(122): Homolog of NCBI NO: 543650 NR Description: P48h-10 protein precursor - Zinnia elegans (cv.
  misc_feature (36)..(122): Homolog of NCBI NO: 498036 NR Description: lipid transfer protein
  misc_feature (40)..(122): Homolog of NCBI NO: 543565 NR Description: hypothetical 10.0K protein - Zinnia elegans
  misc_feature (35)..(122): Homolog of NCBI NO: 18402345 NR Description: lipid transfer protein, putative
  misc_feature (27)..(122): Homolog of NCBI NO: 15229614 NR Description: lipid transfer protein, putative
  misc_feature (27)..(122): Homolog of NCBI NO: 7489428 NR Description: probable lipid transfer protein - barley
HPSEAIFAEATSSLLVDQLVVSERDAMKYLAQLVVALLAFSAVVLMVAPTGAEAATCNALQLTPCAGAIMGNAAPTASCCSKMKEQQPCMCQYARDPNLKQYVDSPNGKKVMAACKVPVPSC

SEQ ID NO: 65979 - protein, 96 aa, Triticum aestivum
  peptide (1)..(96): Ceres Seq. ID no. 12619338
  misc_feature (31)..(96): Pfam Name: Protease inhibitor/seed storage/LTP family Pfam Description: Protease inhibitor/seed storage/LTP family
  misc_feature (22)..(96): Homolog of NCBI NO: 7488524 NR Description: lipid transfer like protein - turnip (fragment)
  misc_feature (1)..(96): Homolog of NCBI NO: 7489543 NR Description: probable lipid transfer protein - rice
  misc_feature (1)..(96): Homolog of NCBI NO: 24745959 NR Description: putative lipid transfer protein [Solanum
  misc_feature (1)..(96): Homolog of NCBI NO: 3183088 NR Description: Probable nonspecific lipid-transfer protein AKCS9
  misc_feature (14)..(96): Homolog of NCBI NO: 543650 NR Description: P48h-10 protein precursor - Zinnia elegans (cv.
  misc_feature (10)..(96): Homolog of NCBI NO: 498036 NR Description: lipid transfer protein
  misc_feature (14)..(96): Homolog of NCBI NO: 543565 NR Description: hypothetical 10.0K protein - Zinnia elegans
  misc_feature (9)..(96): Homolog of NCBI NO: 18402345 NR Description: lipid transfer protein, putative
  misc_feature (1)..(96): Homolog of NCBI NO: 15229614 NR Description: lipid transfer protein, putative
  misc_feature (1)..(96): Homolog of NCBI NO: 7489428 NR Description: probable lipid transfer protein - barley
MKYLAQLVVALLAFSAVVLMVAPTGAEAATCNALQLTPCAGAIMGNAAPTASCCSKMKEQQPCMCQYARDPNLKQYVDSPNGKKVMAACKVPVPSC

SEQ ID NO: 65980 - protein, 77 aa, Triticum aestivum
  peptide (1)..(77): Ceres Seq. ID no. 12619339
  misc_feature (12)..(77): Pfam Name: Protease inhibitor/seed storage/LTP family Pfam Description: Protease inhibitor/seed storage/LTP family
  misc_feature (3)..(77): Homolog of NCBI NO: 7488524 NR Description: lipid transfer like protein - turnip (fragment)
  misc_feature (1)..(77): Homolog of NCBI NO: 7489543 NR Description: probable lipid transfer protein - rice
  misc_feature (1)..(77): Homolog of NCBI NO: 24745959 NR Description: putative lipid transfer protein [Solanum
  misc_feature (1)..(77): Homolog of NCBI NO: 3183088 NR Description: Probable nonspecific lipid-transfer protein AKCS9
  misc_feature (1)..(77): Homolog of NCBI NO: 543650 NR Description: P48h-10 protein precursor - Zinnia elegans (cv.
  misc_feature (1)..(77): Homolog of NCBI NO: 498036 NR Description: lipid transfer protein
  misc_feature (1)..(77): Homolog of NCBI NO: 543565 NR Description: hypothetical 10.0K protein - Zinnia elegans
  misc_feature (1)..(77): Homolog of NCBI NO: 18402345 NR Description: lipid transfer protein, putative
  misc_feature (1)..(77): Homolog of NCBI NO: 15229614 NR Description: lipid transfer protein, putative
  misc_feature (1)..(77): Homolog of NCBI NO: 7489428 NR Description: probable lipid transfer protein - barley
MVAPTGAEAATCNALQLTPCAGAIMGNAAPTASCCSKMKEQQPCMCQYARDPNLKQYVDSPNGKKVMAACKVPVPSC

SEQ ID NO: 65981 - DNA, 575 bp, Triticum aestivum
  misc_feature (1)..(575): Ceres Seq. ID no. 13656565
agagcttgcatccaggcacatataccgagtacaccaatcagcaaccttcaagtatcctagtttaatctcgccgcgagcccgcgaagatgaagatggtgcttaaggtgccgatggtctgcaagaagtgcaagtcttgcgtccttacgattgtgtccaaggtcaaaggggtcaagtcgatggcatacgacgaggagaagagcacgctgacggtggtgggggatgtggacgtggtggtggtcgtcgacgcgctgcgcaaggggaagcacccggcgacggtggtgacggtgggcgacgagaagaaggagnnngaggannngaagaagaaggaggaagaggagaagaagaagaaggaggccgaggagaagaagaaaaaggaatgcatgcagaagcactgcctcaaggcttgctcgccgccactctactgccccaaggcttgctcgccgccacgccactgcccgccgccaccccactgcccgccgcaatcctactgctacgtcgacgactcggnnncctgcaccatcatgtgagcgagagggcagatcatcgacccggcgccgccgtatatatacagccga

SEQ ID NO: 65982 - protein, 146 aa, Triticum aestivum
  peptide (1)..(146): Ceres Seq. ID no. 13656566
  misc_feature (2)..(101): Homolog of NCBI NO: 13543783 NR Description: Unknown (protein for MGC:7642) [Mus musculus]
  misc_feature (1)..(145): Homolog of NCBI NO: 32488374 NR Description: OSJNBa0043A12.4 [Oryza sativa (japonica
  misc_feature (1)..(97): Homolog of NCBI NO: 37535864 NR Description: hypothetical protein [Oryza sativa (japonica
  misc_feature (2)..(107): Homolog of NCBI NO: 21537113 NR Description: unknown [Arabidopsis thaliana]
  misc_feature (2)..(107): Homolog of NCBI NO: 18397408 NR Description: heavy-metal-associated domain-containing protein
  misc_feature (2)..(136): Homolog of NCBI NO: 34902772 NR Description: unnamed protein product [Oryza sativa (japonica
  misc_feature (1)..(146): Homolog of NCBI NO: 38606530 NR Description: OSJNBa0016O02.18 [Oryza sativa (japonica
  misc_feature (2)..(145): Homolog of NCBI NO: 28927689 NR Description: hypothetical protein [Oryza sativa (japonica
  misc_feature (2)..(130): Homolog of NCBI NO: 34902774 NR Description: unnamed protein product [Oryza sativa (japonica
  misc_feature (1)..(119): Homolog of NCBI NO: 34911150 NR Description: B1144G04.22 [Oryza sativa (japonica
  misc_feature (74)..(74): Xaa is any aa, unknown or other
  misc_feature (76)..(76): Xaa is any aa, unknown or other
  misc_feature (77)..(77): Xaa is any aa, unknown or other
  misc_feature (141)..(141): Xaa is any aa, unknown or other
  misc_feature (142)..(142): Xaa is any aa, unknown or other
MKMVLKVPMVCKKCKSCVLTIVSKVKGVKSMAYDEEKSTLTVVGDVDVVVVVDALRKGKHPATVVTVGDEKKEXEXXKKKEEEEKKKKEAEEKKKKECMQKHCLKACSPPLYCPKACSPPRHCPPPPHCPPQSYCYVDDSXXCTIM

SEQ ID NO: 65983 - protein, 144 aa, Triticum aestivum
  peptide (1)..(144): Ceres Seq. ID no. 13656567
  misc_feature (1)..(99): Homolog of NCBI NO: 13543783 NR Description: Unknown (protein for MGC:7642) [Mus musculus]
  misc_feature (1)..(143): Homolog of NCBI NO: 32488374 NR Description: OSJNBa0043A12.4 [Oryza sativa (japonica
  misc_feature (1)..(95): Homolog of NCBI NO: 37535864 NR Description: hypothetical protein [Oryza sativa (japonica
  misc_feature (1)..(105): Homolog of NCBI NO: 21537113 NR Description: unknown [Arabidopsis thaliana]
  misc_feature (1)..(105): Homolog of NCBI NO: 18397408 NR Description: heavy-metal-associated domain-containing protein
  misc_feature (1)..(134): Homolog of NCBI NO: 34902772 NR Description: unnamed protein product [Oryza sativa (japonica
  misc_feature (1)..(144): Homolog of NCBI NO: 38606530 NR Description: OSJNBa0016O02.18 [Oryza sativa (japonica
  misc_feature (1)..(143): Homolog of NCBI NO: 28927689 NR Description: hypothetical protein [Oryza sativa (japonica
  misc_feature (1)..(128): Homolog of NCBI NO: 34902774 NR Description: unnamed protein product [Oryza sativa (japonica
  misc_feature (1)..(117): Homolog of NCBI NO: 34911150 NR Description: B1144G04.22 [Oryza sativa (japonica
  misc_feature (72)..(72): Xaa is any aa, unknown or other
  misc_feature (74)..(74): Xaa is any aa, unknown or other
  misc_feature (75)..(75): Xaa is any aa, unknown or other
  misc_feature (139)..(139): Xaa is any aa, unknown or other
  misc_feature (140)..(140): Xaa is any aa, unknown or other
MVLKVPMVCKKCKSCVLTIVSKVKGVKSMAYDEEKSTLTVVGDVDVVVVVDALRKGKHPATVVTVGDEKKEXEXXKKKEEEEKKKKEAEEKKKKECMQKHCLKACSPPLYCPKACSPPRHCPPPPHCPPQSYCYVDDSXXCTIM

SEQ ID NO: 65984 - protein, 138 aa, Triticum aestivum
  peptide (1)..(138): Ceres Seq. ID no. 13656568
  misc_feature (1)..(93): Homolog of NCBI NO: 13543783 NR Description: Unknown (protein for MGC:7642) [Mus musculus]
  misc_feature (1)..(137): Homolog of NCBI NO: 32488374 NR Description: OSJNBa0043A12.4 [Oryza sativa (japonica
  misc_feature (1)..(89): Homolog of NCBI NO: 37535864 NR Description: hypothetical protein [Oryza sativa (japonica
  misc_feature (1)..(99): Homolog of NCBI NO: 21537113 NR Description: unknown [Arabidopsis thaliana]
  misc_feature (1)..(99): Homolog of NCBI NO: 18397408 NR Description: heavy-metal-associated domain-containing protein
  misc_feature (1)..(128): Homolog of NCBI NO: 34902772 NR Description: unnamed protein product [Oryza sativa (japonica
  misc_feature (1)..(138): Homolog of NCBI NO: 38606530 NR Description: OSJNBa0016O02.18 [Oryza sativa (japonica
  misc_feature (1)..(137): Homolog of NCBI NO: 28927689 NR Description: hypothetical protein [Oryza sativa (japonica
  misc_feature (1)..(122): Homolog of NCBI NO: 34902774 NR Description: unnamed protein product [Oryza sativa (japonica
  misc_feature (1)..(111): Homolog of NCBI NO: 34911150 NR Description: B1144G04.22 [Oryza sativa (japonica
  misc_feature (66)..(66): Xaa is any aa, unknown or other
  misc_feature (68)..(68): Xaa is any aa, unknown or other
  misc_feature (69)..(69): Xaa is any aa, unknown or other
  misc_feature (133)..(133): Xaa is any aa, unknown or other
  misc_feature (134)..(134): Xaa is any aa, unknown or other
MVCKKCKSCVLTIVSKVKGVKSMAYDEEKSTLTVVGDVDVVVVVDALRKGKHPATVVTVGDEKKEXEXXKKKEEEEKKKKEAEEKKKKECMQKHCLKACSPPLYCPKACSPPRHCPPPPHCPPQSYCYVDDSXXCTIM

SEQ ID NO: 65985 - DNA, 1044 bp, Triticum aestivum
  misc_feature (1)..(1044): Ceres Seq. ID no. 13656651
cattgtattctcataggctccccttctctgagctagccgtaataacctactatcactagccatcaaaccgtgcagacgcataggttagtatatctaagatgtcgtcacgctctacctccgtcatcgtcgccagagcagtgagcgggcaccatttgctcaagatcgatgggtactcgcaaaccaaggtggtcacccatggtagaggcatcaaatcctacacttttaaggtcggaggccacagttggcttctccagtattaccccaatggcgagccctcgggtcctgacacttacatagatgatgtcttcattcagcttgtcagtgtaagcagggacatgccggtcaagcctgacaagggcatctcagctcaaggctcgctcagtttactggacagggctgggaagccagtgccatcatataccagcaccttcaatagaagtttcacaaccactgggatcttggtctggtacacctcaaggacgaccctagagaactcaggttatctcaaggacgattgcttcactctcaggtgcgacatcaccgtcacggagctgcgtgccgagaaaacagaggattgcgatttcgcctatctcctgtggaaggagggggcagatgtggccttccatgtgggaggtgagacaaccgccgcccatcaatgggtgctggctgcccggtctccgatcttgaaggcagcagccgaagcagagctccttggcgtgccagaaagggagaagaaagacgcccacggccaccgtaaggattgacgacatggaggcaaaagtgttcaaggctttgatccactacatatatattgatgcattgcctgatgagatagacaagggctgagactgggagaagcaaggataccatgatcacggtcatggtggccatttctatttgtcaatgctgtgttggtcaatgtaagaagtactactggtgacaatcaactatgctccatactaataatatgctgatgtacattcgtttatgtttggggattgtagttgtatttgctatacaattataatgcttatgatttctttt

SEQ ID NO: 65986 - protein, 221 aa, Triticum aestivum
  peptide (1)..(221): Ceres Seq. ID no. 13656652
  misc_feature (168)..(198): Homolog of NCBI NO: 37534556 NR Description: putative speckle-type protein
  misc_feature (3)..(158): Homolog of NCBI NO: 37534556 NR Description: putative speckle-type protein
  misc_feature (3)..(198): Homolog of NCBI NO: 37534644 NR Description: unknown protein [Oryza sativa (japonica
  misc_feature (3)..(198): Homolog of NCBI NO: 37534574 NR Description: putative speckle-type protein
  misc_feature (118)..(198): Homolog of NCBI NO: 37534476 NR Description: hypothetical protein [Oryza sativa (japonica
  misc_feature (5)..(108): Homolog of NCBI NO: 37534476 NR Description: hypothetical protein [Oryza sativa (japonica
  misc_feature (2)..(198): Homolog of NCBI NO: 37534522 NR Description: putative speckle-type protein
  misc_feature (1)..(199): Homolog of NCBI NO: 21740758 NR Description: OSJNBa0088K19.10 [Oryza sativa (japonica
  misc_feature (168)..(211): Homolog of NCBI NO: 37534480 NR Description: hypothetical protein [Oryza sativa (japonica
  misc_feature (3)..(179): Homolog of NCBI NO: 37534480 NR Description: hypothetical protein [Oryza sativa (japonica
MSSRSTSVIVARAVSGHHLLKIDGYSQTKVVTHGRGIKSYTFKVGGHSWLLQYYPNGEPSGPDTYIDDVFIQLVSVSRDMPVKPDKGISAQGSLSLLDRAGKPVPSYTSTFNRSFTTTGILVWYTSRTTLENSGYLKDDCFTLRCDITVTELRAEKTEDCDFAYLLWKEGADVAFHVGGETTAAHQWVLAARSPILKAAAEAELLGVPEREKKDAHGHRKD

SEQ ID NO: 65987 - protein, 142 aa, Triticum aestivum
  peptide (1)..(142): Ceres Seq. ID no. 13656653
  misc_feature (89)..(119): Homolog of NCBI NO: 37534556 NR Description: putative speckle-type protein
  misc_feature (1)..(79): Homolog of NCBI NO: 37534556 NR Description: putative speckle-type protein
  misc_feature (1)..(119): Homolog of NCBI NO: 37534644 NR Description: unknown protein [Oryza sativa (japonica
  misc_feature (1)..(119): Homolog of NCBI NO: 37534574 NR Description: putative speckle-type protein
  misc_feature (39)..(119): Homolog of NCBI NO: 37534476 NR Description: hypothetical protein [Oryza sativa (japonica
  misc_feature (1)..(29): Homolog of NCBI NO: 37534476 NR Description: hypothetical protein [Oryza sativa (japonica
  misc_feature (1)..(119): Homolog of NCBI NO: 37534522 NR Description: putative speckle-type protein
  misc_feature (1)..(120): Homolog of NCBI NO: 21740758 NR Description: OSJNBa0088K19.10 [Oryza sativa (japonica
  misc_feature (89)..(132): Homolog of NCBI NO: 37534480 NR Description: hypothetical protein [Oryza sativa (japonica
  misc_feature (1)..(100): Homolog of NCBI NO: 37534480 NR Description: hypothetical protein [Oryza sativa (japonica
MPVKPDKGISAQGSLSLLDRAGKPVPSYTSTFNRSFTTTGILVWYTSRTTLENSGYLKDDCFTLRCDITVTELRAEKTEDCDFAYLLWKEGADVAFHVGGETTAAHQWVLAARSPILKAAAEAELLGVPEREKKDAHGHRKD

SEQ ID NO: 65988 - DNA, 719 bp, Triticum aestivum
  misc_feature (1)..(719): Ceres Seq. ID no. 13657174
agttcttgtacccttccttagcccgcaagcagagtatgcattccttccttgtccctcgccgacgcatccaccgccaagcaacctcgctacatatgcgccgttccttcgtctacccccattgttctaccaaactcgtcggccggtgagcccatacatacacacgcacaggtcggatcagaggtcggagctcgtgcacagtttgatagctgcagcctggaggctggtggcgagaggatcatcggtagccatgaacgggggcatcgggggcacggcggagggggcgcctcgcccgagcacggactggggcccgatcatcgtggcggtgatcctgttcgtggtgctgtcgccggggctgctgttccagctgccggccaggacccgggtggtggagctcggcaacatggccaccagcgccatcgccatcctcgtccacgccgtcatcttcttctgcatcctcaccctcgtcgtcgtggccatcggcgtccacgtgtacgccgcctagctatctcatatagtactccagatcaagatgggttttgtctttcttcagtgctgccctgcccctgtttgcctgtttgatttggccggctgtaaactgcggaaacactgctggctgaaaacagtacgtatataattgtgttcttggatgaggaattagttgcttgtaattacttctctgtgtcgataattgatgaaatgcctttgaaattgattccggc

SEQ ID NO: 65989 - protein, 166 aa, Triticum aestivum
  peptide (1)..(166): Ceres Seq. ID no. 13657175
  misc_feature (99)..(164): Homolog of NCBI NO: 21592550 NR Description: unknown [Arabidopsis thaliana]
  misc_feature (100)..(165): Homolog of NCBI NO: 32487809 NR Description: OSJNBa0053B21.1 [Oryza sativa (japonica
  misc_feature (100)..(164): Homolog of NCBI NO: 15228422 NR Description: hypothetical protein [Arabidopsis thaliana]
  misc_feature (100)..(165): Homolog of NCBI NO: 15242790 NR Description: expressed protein [Arabidopsis thaliana]
  misc_feature (100)..(164): Homolog of NCBI NO: 33327288 NR Description: hypothetical protein [Phaseolus vulgaris]
  misc_feature (100)..(164): Homolog of NCBI NO: 18395991 NR Description: hypothetical protein [Arabidopsis thaliana]
  misc_feature (100)..(164): Homolog of NCBI NO: 1532168 NR Description: localized according to blastn similarity to EST
  misc_feature (98)..(164): Homolog of NCBI NO: 15237529 NR Description: expressed protein [Arabidopsis thaliana]
  misc_feature (98)..(165): Homolog of NCBI NO: 34394315 NR Description: hypothetical protein [Oryza sativa (japonica
  misc_feature (95)..(166): Homolog of NCBI NO: 20161910 NR Description: P0592G05.7 [Oryza sativa (japonica
VLVPFLSPQAEYAFLPCPSPTHPPPSNLATYAPFLRLPPLFYQTRRPVSPYIHTHRSDQRSELVHSLIAAAWRLVARGSSVAMNGGIGGTAEGAPRPSTDWGPIIVAVILFVVLSPGLLFQLPARTRVVELGNMATSAIAILVHAVIFFCILTLVVVAIGVHVYAA

SEQ ID NO: 65990 - protein, 84 aa, Triticum aestivum
  peptide (1)..(84): Ceres Seq. ID no. 13657176
  misc_feature (17)..(82): Homolog of NCBI NO: 21592550 NR Description: unknown [Arabidopsis thaliana]
  misc_feature (18)..(83): Homolog of NCBI NO: 32487809 NR Description: OSJNBa0053B21.1 [Oryza sativa (japonica
  misc_feature (18)..(82): Homolog of NCBI NO: 15228422 NR Description: hypothetical protein [Arabidopsis thaliana]
  misc_feature (18)..(83): Homolog of NCBI NO: 15242790 NR Description: expressed protein [Arabidopsis thaliana]
  misc_feature (18)..(82): Homolog of NCBI NO: 33327288 NR Description: hypothetical protein [Phaseolus vulgaris]
  misc_feature (18)..(82): Homolog of NCBI NO: 18395991 NR Description: hypothetical protein [Arabidopsis thaliana]
  misc_feature (18)..(82): Homolog of NCBI NO: 1532168 NR Description: localized according to blastn similarity to EST
  misc_feature (16)..(82): Homolog of NCBI NO: 15237529 NR Description: expressed protein [Arabidopsis thaliana]
  misc_feature (16)..(83): Homolog of NCBI NO: 34394315 NR Description: hypothetical protein [Oryza sativa (japonica
  misc_feature (13)..(84): Homolog of NCBI NO: 20161910 NR Description: P0592G05.7 [Oryza sativa (japonica
MNGGIGGTAEGAPRPSTDWGPIIVAVILFVVLSPGLLFQLPARTRVVELGNMATSAIAILVHAVIFFCILTLVVVAIGVHVYAA

SEQ ID NO: 65991 - DNA, 678 bp, Triticum aestivum
  misc_feature (1)..(678): Ceres Seq. ID no. 12619649
gtactaccgcaagtgcaaagtagctcacacatccatcggcgccagactactgactcagatcctccaccgaccaccagacccagaccgatggcttcttcttccgtgctgctcggaggaggcgcgggcgcgggcgccgccgccttcaccggcgccgctgccggcaaggctcttcccaggccgtgtttcctcgccgctcgtccgcacactgtcagcggtggccgcctctgcctgcaaacccctcctagagcgactcctgctaacgacgccgtcgagaccgtgaagggggcggccggggaagccggagacaaggtctcggaaggggcggacagcgtgacgaaggcggccagcgacgcggcgggcaaggtacaggaggcggtagagggcgccgtggagggagccaaggacctgggcgagaaggcgaagcaggcgacggaggaggcgtgggacgccaccaaagacgccgcacagggcgtcgccgacgacgtcaccgccgcggttgaggatgtgagcaaatgagctcaacatttgcgtatcagattgaatatttaacatgcatgatgtgcacgcgagtgtcttttgtgggtcacgttattaatgatgtatgctttgtataagagctacaacgttggtcaaaagttgtgctaaaagagcatctacaatcgcacacccgtacccgtc

SEQ ID NO: 65992 - protein, 171 aa, Triticum aestivum
  peptide (1)..(171): Ceres Seq. ID no. 12619650
  misc_feature (98)..(167): Pfam Name: Late embryogenesis abundant protein Pfam Description: Late embryogenesis abundant protein
  misc_feature (88)..(171): Homolog of NCBI NO: 7484462 NR Description: late embryonic abundant protein - white spruce
  misc_feature (9)..(156): Homolog of NCBI NO: 419793 NR Description: cold-regulated protein 1 - barley (fragment)
  misc_feature (30)..(167): Homolog of NCBI NO: 28273091 NR Description: chloroplast-targeted COR protein [Triticum
  misc_feature (30)..(167): Homolog of NCBI NO: 19352333 NR Description: cold acclimation protein WCS19 [Triticum aestivum]
  misc_feature (28)..(167): Homolog of NCBI NO: 481813 NR Description: leaf-specific protein Wcs19 - wheat
  misc_feature (30)..(171): Homolog of NCBI NO: 24528340 NR Description: cor14b [Hordeum vulgare]
  misc_feature (30)..(171): Homolog of NCBI NO: 20067231 NR Description: REP13 [Secale cereale]
  misc_feature (30)..(146): Homolog of NCBI NO: 6561861 NR Description: cold-responsive protein COR14b [Triticum aestivum]
  misc_feature (30)..(171): Homolog of NCBI NO: 6561859 NR Description: cold-responsive protein COR14a [Triticum
  misc_feature (30)..(171): Homolog of NCBI NO: 20067227 NR Description: WCOR14c [Triticum aestivum]
VLPQVQSSSHIHRRQTTDSDPPPTTRPRPMASSSVLLGGGAGAGAAAFTGAAAGKALPRPCFLAARPHTVSGGRLCLQTPPRATPANDAVETVKGAAGEAGDKVSEGADSVTKAASDAAGKVQEAVEGAVEGAKDLGEKAKQATEEAWDATKDAAQGVADDVTAAVEDVSK

SEQ ID NO: 65993 - protein, 142 aa, Triticum aestivum
  peptide (1)..(142): Ceres Seq. ID no. 12619651
  misc_feature (69)..(138): Pfam Name: Late embryogenesis abundant protein Pfam Description: Late embryogenesis abundant protein
  misc_feature (59)..(142): Homolog of NCBI NO: 7484462 NR Description: late embryonic abundant protein - white spruce
  misc_feature (1)..(127): Homolog of NCBI NO: 419793 NR Description: cold-regulated protein 1 - barley (fragment)
  misc_feature (1)..(138): Homolog of NCBI NO: 28273091 NR Description: chloroplast-targeted COR protein [Triticum
  misc_feature (1)..(138): Homolog of NCBI NO: 19352333 NR Description: cold acclimation protein WCS19 [Triticum aestivum]
  misc_feature (1)..(138): Homolog of NCBI NO: 481813 NR Description: leaf-specific protein Wcs19 - wheat
  misc_feature (1)..(142): Homolog of NCBI NO: 24528340 NR Description: cor14b [Hordeum vulgare]
  misc_feature (1)..(142): Homolog of NCBI NO: 20067231 NR Description: REP13 [Secale cereale]
  misc_feature (1)..(117): Homolog of NCBI NO: 6561861 NR Description: cold-responsive protein COR14b [Triticum aestivum]
  misc_feature (1)..(142): Homolog of NCBI NO: 6561859 NR Description: cold-responsive protein COR14a [Triticum
  misc_feature (1)..(142): Homolog of NCBI NO: 20067227 NR Description: WCOR14c [Triticum aestivum]
MASSSVLLGGGAGAGAAAFTGAAAGKALPRPCFLAARPHTVSGGRLCLQTPPRATPANDAVETVKGAAGEAGDKVSEGADSVTKAASDAAGKVQEAVEGAVEGAKDLGEKAKQATEEAWDATKDAAQGVADDVTAAVEDVSK

SEQ ID NO: 65994 - protein, 92 aa, Triticum aestivum
  peptide (1)..(92): Ceres Seq. ID no. 12619652
  misc_feature (5)..(92): Homolog of NCBI NO: 419793 NR Description: cold-regulated protein 1 - barley (fragment)
  misc_feature (5)..(92): Homolog of NCBI NO: 6226576 NR Description: COLD-REGULATED PROTEIN 1
YYRKCKVAHTSIGARLLTQILHRPPDPDRWLLLPCCSEEARARAPPPSPAPLPARLFPGRVSSPLVRTLSAVAASACKPLLERLLLTTPSRP

SEQ ID NO: 65995 - DNA, 1067 bp, Triticum aestivum
  misc_feature (1)..(1067): Ceres Seq. ID no. 13662959
aaaacccccaccgcacgccccacccgcgtcgcaggcatgcctctctcgctcggcgccgaccacctcgccgcgcccggcgcgcgcgctccgcctgcgcgggtgggcacgggcatgggcatggacacgtccctctcgctgggcggtgccgccgcctacctcccgctcaacgagaacgactccctcgacatgctcctcttcgacgtcctccgcgaggcctccgccgtggccgccgcctcgccctcctcgtcctcctctcccccgacgaagacggcgacggccattgccgccgctggcgccgacgcgatcgagagcggcggggcatgcgcggccgggagggccgcggagcgcccgcactaccgcggggtgaggcggcggccgtggggcaagtacgcggcggagatccgggacccgtcgcggcccggcacgcgcctgtggctcggcaccttcggcacggccgaggaggcggccgtcgcgtacgaccgcgccgcgttccgcctgcgcggcgccaaggcgctgctcaacttcccgccggccgtgggggcgcacgaggcgcgccgcggcggcgccaatgaggcgaggtgaatgctacgtgcgttcgttctctcgccgatcgttcctctctctcttagctgcgtgttgttagcttcttagtttaggcatcgaaacattgaattcccattctgtaaccgttcattcatgcgtggtgtggtctgtggtggaccaatttgcatttcgtgggtatcgtctctagcttcgggcgaaggtgctattttggtgatctctctacggttatcaacagatatcaatcatcaattgtacagtagtactactaccagtctcgtctgaaattttacgaaatctggagaaatgtgtgaaccggtaatgagaagacagattccctcgacaaaccttgtattcatctacgattcctcggctcctttgatttaaaggaattttataggatttctgaaggactgagatccttagaattttttttttcctatgtttgttctttgatttataggattggattctataggaatttttcctatggattcttttgtgct

SEQ ID NO: 65996 - protein, 193 aa, Triticum aestivum
  peptide (1)..(193): Ceres Seq. ID no. 13662960
  misc_feature (118)..(179): Pfam Name: AP2 domain Pfam Description: AP2 domain
  misc_feature (53)..(183): Homolog of NCBI NO: 15238041 NR Description: ethylene responsive element binding factor 2
  misc_feature (79)..(192): Homolog of NCBI NO: 38346167 NR Description: OSJNBa0079A21.14 [Oryza sativa (japonica
  misc_feature (53)..(183): Homolog of NCBI NO: 28274828 NR Description: ethylene response factor 1 [Lycopersicon
  misc_feature (53)..(183): Homolog of NCBI NO: 7489123 NR Description: ethylene-responsive transcription factor ERF1 -
  misc_feature (53)..(183): Homolog of NCBI NO: 7489077 NR Description: transcription factor Pti4 - tomato (fragment)
  misc_feature (53)..(183): Homolog of NCBI NO: 25350257 NR Description: EREBP-2 protein [imported] - Arabidopsis thaliana
  misc_feature (53)..(183): Homolog of NCBI NO: 25350258 NR Description: ethylene responsive element binding factor 1
  misc_feature (53)..(183): Homolog of NCBI NO: 21264420 NR Description: Ethylene responsive element binding factor 1
  misc_feature (53)..(183): Homolog of NCBI NO: 7528276 NR Description: AP2-related transcription factor
  misc_feature (17)..(193): Homolog of NCBI NO: 34909594 NR Description: P0046E05.31 [Oryza sativa (japonica
KTPTARPTRVAGMPLSLGADHLAAPGARAPPARVGTGMGMDTSLSLGGAAAYLPLNENDSLDMLLFDVLREASAVAAASPSSSSSPPTKTATAIAAAGADAIESGGACAAGRAAERPHYRGVRRRPWGKYAAEIRDPSRPGTRLWLGTFGTAEEAAVAYDRAAFRLRGAKALLNFPPAVGAHEARRGGANEAR

SEQ ID NO: 65997 - protein, 189 aa, Triticum aestivum
  peptide (1)..(189): Ceres Seq. ID no. 13662961
NPHRTPHPRRRHASLARRRPPRRARRARSACAGGHGHGHGHVPLAGRCRRLPPAQRERLPRHAPLRRPPRGLRRGRRLALLVLLSPDEDGDGHCRRWRRRDRERRGMRGREGRGAPALPRGEAAAVGQVRGGDPGPVAARHAPVARHLRHGRGGGRRVRPRRVPPARRQGAAQLPAGRGGARGAPRRRQ

SEQ ID NO: 65998 - protein, 181 aa, Triticum aestivum
  peptide (1)..(181): Ceres Seq. ID no. 13662962
  misc_feature (106)..(167): Pfam Name: AP2 domain Pfam Description: AP2 domain
  misc_feature (41)..(171): Homolog of NCBI NO: 15238041 NR Description: ethylene responsive element binding factor 2
  misc_feature (67)..(180): Homolog of NCBI NO: 38346167 NR Description: OSJNBa0079A21.14 [Oryza sativa (japonica
  misc_feature (41)..(171): Homolog of NCBI NO: 28274828 NR Description: ethylene response factor 1 [Lycopersicon
  misc_feature (41)..(171): Homolog of NCBI NO: 7489123 NR Description: ethylene-responsive transcription factor ERF1 -
  misc_feature (41)..(171): Homolog of NCBI NO: 7489077 NR Description: transcription factor Pti4 - tomato (fragment)
  misc_feature (41)..(171): Homolog of NCBI NO: 25350258 NR Description: ethylene responsive element binding factor 1
  misc_feature (41)..(171): Homolog of NCBI NO: 25350257 NR Description: EREBP-2 protein [imported] - Arabidopsis thaliana
  misc_feature (41)..(171): Homolog of NCBI NO: 21264420 NR Description: Ethylene responsive element binding factor 1
  misc_feature (41)..(171): Homolog of NCBI NO: 7528276 NR Description: AP2-related transcription factor
  misc_feature (5)..(181): Homolog of NCBI NO: 34909594 NR Description: P0046E05.31 [Oryza sativa (japonica
MPLSLGADHLAAPGARAPPARVGTGMGMDTSLSLGGAAAYLPLNENDSLDMLLFDVLREASAVAAASPSSSSSPPTKTATAIAAAGADAIESGGACAAGRAAERPHYRGVRRRPWGKYAAEIRDPSRPGTRLWLGTFGTAEEAAVAYDRAAFRLRGAKALLNFPPAVGAHEARRGGANEAR

SEQ ID NO: 65999 - DNA, 845 bp, Triticum aestivum
  misc_feature (1)..(845): Ceres Seq. ID no. 12620302
ggctcactgctaagaacacactcccgccccacccccaccgacagcagtaatgaaggccctcgccggcgacagcaacgcctccgcgccgcttctgcaggaggccaagatcagcatccccgcctcctccacgggcggggccgcggaggcggcgctcctcgggaagggccggtacaaggtgtgggccctcgccgccatcgcgctcctcgcgctctggtccatgtccgccgcctccgtctccctccgctggtcggccggcgacctggcagccgttatttcaggggacctcgacgcgccactccgcgacgatctagattccctcgagatggaggaaagggagaaattagttggtcggatgtgggacatgtacacacgcaccagcgacgaggtacgccttccacggttctggcaagaagcattcgaggctgcatacgaggagcttgctggtgatgatatgcaggtccgcgacacggccatctttgagattgctcgaatgtcagcccacagacttgagcttgagcagcctgtgaatgcgaacgaggaagagggcaaggtaagcatcaggaataatgatcatggcagagcgaagcagtagcttcaaaactgaagatctataacggttgcggacaacaaatatcagcagctgaacttgaagtttgatgtaaactgaaattttctgtatgggagggcaagcaaaagcttaccatgatgcaaagttttaacttccccgcagtaaagcgttgtattatacgtgtattattcataggtcctgattagaaatgtcatgccatttgctatatgtagtaacgtggaatagaggaagtctagcaagatcatgctgtttttgt

SEQ ID NO: 66000 - protein, 180 aa, Triticum aestivum
  peptide (1)..(180): Ceres Seq. ID no. 12620303
  misc_feature (41)..(161): Homolog of NCBI NO: 15222008 NR Description: hypothetical protein; protein id: At1g19380.1
  misc_feature (24)..(158): Homolog of NCBI NO: 15234477 NR Description: hypothetical protein; protein id: At4g36660.1
  misc_feature (21)..(180): Homolog of NCBI NO: 18424975 NR Description: putative protein
  misc_feature (34)..(158): Homolog of NCBI NO: 9858772 NR Description: BAC19.4 [Lycopersicon esculentum]
  misc_feature (1)..(179): Homolog of NCBI NO: 28209490 NR Description: unknown protein [Oryza sativa (japonica
MKALAGDSNASAPLLQEAKISIPASSTGGAAEAALLGKGRYKVWALAAIALLALWSMSAASVSLRWSAGDLAAVISGDLDAPLRDDLDSLEMEEREKLVGRMWDMYTRTSDEVRLPRFWQEAFEAAYEELAGDDMQVRDTAIFEIARMSAHRLELEQPVNANEEEGKVSIRNNDHGRAKQ

SEQ ID NO: 66001 - protein, 148 aa, Triticum aestivum
  peptide (1)..(148): Ceres Seq. ID no. 12620304
GSLLRTHSRPTPTDSSNEGPRRRQQRLRAASAGGQDQHPRLLHGRGRGGGAPREGPVQGVGPRRHRAPRALVHVRRLRLPPLVGRRPGSRYFRGPRRATPRRSRFPRDGGKGEISWSDVGHVHTHQRRGTPSTVLARSIRGCIRGACW

SEQ ID NO: 66002 - protein, 124 aa, Triticum aestivum
  peptide (1)..(124): Ceres Seq. ID no. 12620305
  misc_feature (1)..(105): Homolog of NCBI NO: 15222008 NR Description: hypothetical protein; protein id: At1g19380.1
  misc_feature (1)..(102): Homolog of NCBI NO: 15234477 NR Description: hypothetical protein; protein id: At4g36660.1
  misc_feature (1)..(124): Homolog of NCBI NO: 18424975 NR Description: putative protein
  misc_feature (1)..(102): Homolog of NCBI NO: 9858772 NR Description: BAC19.4 [Lycopersicon esculentum]
  misc_feature (1)..(123): Homolog of NCBI NO: 28209490 NR Description: unknown protein [Oryza sativa (japonica
MSAASVSLRWSAGDLAAVISGDLDAPLRDDLDSLEMEEREKLVGRMWDMYTRTSDEVRLPRFWQEAFEAAYEELAGDDMQVRDTAIFEIARMSAHRLELEQPVNANEEEGKVSIRNNDHGRAKQ

SEQ ID NO: 66003 - DNA, 1062 bp, Triticum aestivum
  misc_feature (1)..(1062): Ceres Seq. ID no. 13657064
ccattacctagaacatcctaatcgaaaaatgttccatctcatctcgcccctccctttccaccatctccagtaagtttgggcctcgctttccttcccgacccgacccagctcgcaatcgcaagccacacgcatcgggtttccctcagcgcagcgatctcacctccctgacccgctccctcctcccgcgtcacgtgtcctcacagctcaccccgccggcggccggccgcagcggcgcgcccccgacccccgacccccgaccaggcggagcgcggccagggcaggcgagatggtcttcgtctggctcgccgccttcttcctcgtcgtcacgctcatcgtgctcgtcatcttccagttgatgtgcttggcagatctggagttcgattatatcaacccgtttgattcatcctctcgaatcaataaagtggttatgccagaatttatagtgcaagcacttctaagtgcattattcctcttatctgggcactgggcgatgtttctgctttctgccccaatggtgtactataattatacattgtacgagcggcggcagcatcttgtagatgtgacagagatatttaaccatctttcacgggagaagaagcgccgtctttttaagatagctgctcttatcgtcctcctattcttgtccttgttctggatgatttggagtgtactggaggagcacgagtagaatgagagaaaacactgtgattgtgatagctcaacctggttctgcagccgttagttaggtattacgacgtggtcctcgtggcctgctgaacacctactccgatgccgttattgttcatatgaaagcccttttggataaatttagggtgtcatggagaaacgatgcaagcagaagggcgaagactacgtgtccgaggtgctgtttgttgctcgcgcctagtgtgaaatctcctgctgttgtagcgtgtaacataacatgtaagttaggagccactccctcctgtttatttgatcgtgcatccgttcatatggggcaaagtaactgctgcgcccaactgtgcatggttttattatgaccgacattctgtgttt

SEQ ID NO: 66004 - protein, 134 aa, Triticum aestivum
  peptide (1)..(134): Ceres Seq. ID no. 13657065
  misc_feature (2)..(124): Pfam Name: Cornichon protein Pfam Description: Cornichon protein
  misc_feature (5)..(132): Homolog of NCBI NO: 6321384 NR Description: ER-derived vesicles; Erv14p [Saccharomyces
  misc_feature (22)..(130): Homolog of NCBI NO: 15234412 NR Description: hypothetical protein [Arabidopsis thaliana]
  misc_feature (2)..(123): Homolog of NCBI NO: 9294117 NR Description: gene_id:T23B7.14~pir||T06616~similar to unknown
  misc_feature (2)..(130): Homolog of NCBI NO: 15230426 NR Description: expressed protein [Arabidopsis thaliana]
  misc_feature (20)..(114): Homolog of NCBI NO: 8778623 NR Description: F5O11.7 [Arabidopsis thaliana]
  misc_feature (2)..(124): Homolog of NCBI NO: 8778625 NR Description: F5O11.11 [Arabidopsis thaliana]
  misc_feature (20)..(124): Homolog of NCBI NO: 18391380 NR Description: hypothetical protein [Arabidopsis thaliana]
  misc_feature (1)..(124): Homolog of NCBI NO: 25336823 NR Description: hypothetical protein F16P17.3 [imported] -
  misc_feature (1)..(134): Homolog of NCBI NO: 15221614 NR Description: expressed protein [Arabidopsis thaliana]
  misc_feature (2)..(134): Homolog of NCBI NO: 30682747 NR Description: expressed protein [Arabidopsis thaliana]
MVFVWLAAFFLVVTLIVLVIFQLMCLADLEFDYINPFDSSSRINKVVMPEFIVQALLSALFLLSGHWAMFLLSAPMVYYNYTLYERRQHLVDVTEIFNHLSREKKRRLFKIAALIVLLFLSLFWMIWSVLEEHE

SEQ ID NO: 66005 - protein, 111 aa, Triticum aestivum
  peptide (1)..(111): Ceres Seq. ID no. 13657066
  misc_feature (1)..(101): Pfam Name: Cornichon protein Pfam Description: Cornichon protein
  misc_feature (1)..(109): Homolog of NCBI NO: 6321384 NR Description: ER-derived vesicles; Erv14p [Saccharomyces
  misc_feature (1)..(107): Homolog of NCBI NO: 15234412 NR Description: hypothetical protein [Arabidopsis thaliana]
  misc_feature (1)..(100): Homolog of NCBI NO: 9294117 NR Description: gene_id:T23B7.14~pir||T06616~similar to unknown
  misc_feature (1)..(107): Homolog of NCBI NO: 15230426 NR Description: expressed protein [Arabidopsis thaliana]
  misc_feature (1)..(91): Homolog of NCBI NO: 8778623 NR Description: F5O11.7 [Arabidopsis thaliana]
  misc_feature (1)..(101): Homolog of NCBI NO: 8778625 NR Description: F5O11.11 [Arabidopsis thaliana]
  misc_feature (1)..(101): Homolog of NCBI NO: 18391380 NR Description: hypothetical protein [Arabidopsis thaliana]
  misc_feature (1)..(101): Homolog of NCBI NO: 25336823 NR Description: hypothetical protein F16P17.3 [imported] -
  misc_feature (1)..(111): Homolog of NCBI NO: 15221614 NR Description: expressed protein [Arabidopsis thaliana]
  misc_feature (1)..(111): Homolog of NCBI NO: 30682747 NR Description: expressed protein [Arabidopsis thaliana]
MCLADLEFDYINPFDSSSRINKVVMPEFIVQALLSALFLLSGHWAMFLLSAPMVYYNYTLYERRQHLVDVTEIFNHLSREKKRRLFKIAALIVLLFLSLFWMIWSVLEEHE

SEQ ID NO: 66006 - protein, 87 aa, Triticum aestivum
  peptide (1)..(87): Ceres Seq. ID no. 13657067
  misc_feature (1)..(77): Pfam Name: Cornichon protein Pfam Description: Cornichon protein
  misc_feature (1)..(85): Homolog of NCBI NO: 6321384 NR Description: ER-derived vesicles; Erv14p [Saccharomyces
  misc_feature (1)..(83): Homolog of NCBI NO: 15234412 NR Description: hypothetical protein [Arabidopsis thaliana]
  misc_feature (1)..(76): Homolog of NCBI NO: 9294117 NR Description: gene_id:T23B7.14~pir||T06616~similar to unknown
  misc_feature (1)..(83): Homolog of NCBI NO: 15230426 NR Description: expressed protein [Arabidopsis thaliana]
  misc_feature (1)..(67): Homolog of NCBI NO: 8778623 NR Description: F5O11.7 [Arabidopsis thaliana]
  misc_feature (1)..(77): Homolog of NCBI NO: 8778625 NR Description: F5O11.11 [Arabidopsis thaliana]
  misc_feature (1)..(77): Homolog of NCBI NO: 18391380 NR Description: hypothetical protein [Arabidopsis thaliana]
  misc_feature (1)..(77): Homolog of NCBI NO: 25336823 NR Description: hypothetical protein F16P17.3 [imported] -
  misc_feature (1)..(87): Homolog of NCBI NO: 15221614 NR Description: expressed protein [Arabidopsis thaliana]
  misc_feature (1)..(87): Homolog of NCBI NO: 30682747 NR Description: expressed protein [Arabidopsis thaliana]
MPEFIVQALLSALFLLSGHWAMFLLSAPMVYYNYTLYERRQHLVDVTEIFNHLSREKKRRLFKIAALIVLLFLSLFWMIWSVLEEHE

SEQ ID NO: 66007 - DNA, 1735 bp, Triticum aestivum
  misc_feature (1)..(1735): Ceres Seq. ID no. 14313220
ccggtagttaagcgccccgcgccaccaccactactactagtagcagcggcactcccgctgccatccccactgcccccccgaacccccctccgcgctccgcacattgggtgggaggagctgctccagctcggttgtcggtgccgggtggatcgccctgccgcgccatggacggcgacgcggacgccctgaagtccgggaggcacggggccggggacgtgtgccagatctgcgccgacgggctgggcaccacggtggacggcgaggtcttcaccgcctgcgacgtctgccgcttcccggtctgccgcccctgctacgagcacgagcgcaaggagggcacccaggcctgcctccagtgcaagaccaagtacaagcgccacagagggagccctccgatccgcggggaggaaggcgatgacaccgatgccgatgatggcagtgacttcaactaccctgcatctggcactgaggaccagaagcagaagattgctgataggatgcgcagctggcgcatgaacaccgggggtagtggcaatgttggccaccccaagtatgacagtggcgagatcggcctctccaagtatgacagtggagagatccctaggggatacgtcccttcagtcaccaacagccagatgtcaggagaaatccctggagcttcccctgatcatcatatgatgtcccctacagggaacatcagcagacgtgctccctttccctatgtgaatcattcaccaaatccgtcaagggagttctctggcagtattgggaatgttgcctggaaagagagagtcgatggctggaaaatgaagcaggacaagggtgcaattcccatgactaatgggacaagtattgctccctctgaaggtcgggcagctactgacattgatgcatctactgaatacaacatggaagacgctttactgaatgatgaaactcgccagcctctatctagaaaagtccccattgcttcatccaaaataaatccctacagaatggtcattgttctgcggttggttgttctaagcatcttcctgcactaccgtctcacaaatcctgtgcgtaatgcatacccactgtggcttttatctgttatatgtgagatttggtttgctttatcctggatactggatcagttcccgaagtggtttccaatcaaccgggagacctaccttgatagactggctttaaggtatgaccgagaaggtgaaccgtctcagttggctgctgttgacatatttgtcagtacagtcgaccccttgaaggagccacctatcgtcactgccaacactgtgctatccattcttgctgttgattatcccgtggacaaggtctcttgctatgtatctgatgacggagcttcaatgctgacttttgatgcattggctgagacttcagagtttgctaggaaatgggtaccatttgtgaagaagtatgacattgaacccagagctcctgagttttacttttgccagaaaattgattacctgaaagacaaagtccagccttcatttgttaaagaccgccggaccagagaaggagagcagcggaaggtggaggatgggattgtggagaaggccatcttggtgaaagatttcgcgtgagcttttcttctagcttgatgagaagacatctccctagtatttgttgtttctttgacttgcaatgtataccttgattttaagatcagatgacattatgctaatctctttggtccgggggcaagtttcttggcctc

SEQ ID NO: 66008 - protein, 478 aa, Triticum aestivum
  peptide (1)..(478): Ceres Seq. ID no. 14313221
  misc_feature (260)..(471): Pfam Name: Cellulose synthase Pfam Description: Cellulose synthase
  misc_feature (122)..(471): Homolog of NCBI NO: 39726035 NR Description: putative cellulose synthase catalytic subunit
  misc_feature (2)..(471): Homolog of NCBI NO: 39933010 NR Description: cellulose synthase [Populus tremuloides]
  misc_feature (16)..(471): Homolog of NCBI NO: 39726027 NR Description: putative cellulose synthase catalytic subunit
  misc_feature (6)..(471): Homolog of NCBI NO: 30103013 NR Description: putative cellulose synthase catalytic subunit
  misc_feature (1)..(471): Homolog of NCBI NO: 9622882 NR Description: cellulose synthase-5 [Zea mays]
  misc_feature (1)..(471): Homolog of NCBI NO: 9622880 NR Description: cellulose synthase-4 [Zea mays]
  misc_feature (1)..(471): Homolog of NCBI NO: 9622890 NR Description: cellulose synthase-9 [Zea mays]
  misc_feature (1)..(471): Homolog of NCBI NO: 28411807 NR Description: cellulose synthase-4 [Oryza sativa (japonica
  misc_feature (1)..(476): Homolog of NCBI NO: 39726025 NR Description: putative cellulose synthase catalytic subunit
  misc_feature (1)..(476): Homolog of NCBI NO: 40363755 NR Description: putative cellulose synthase [Triticum aestivum]
MDGDADALKSGRHGAGDVCQICADGLGTTVDGEVFTACDVCRFPVCRPCYEHERKEGTQACLQCKTKYKRHRGSPPIRGEEGDDTDADDGSDFNYPASGTEDQKQKIADRMRSWRMNTGGSGNVGHPKYDSGEIGLSKYDSGEIPRGYVPSVTNSQMSGEIPGASPDHHMMSPTGNISRRAPFPYVNHSPNPSREFSGSIGNVAWKERVDGWKMKQDKGAIPMTNGTSIAPSEGRAATDIDASTEYNMEDALLNDETRQPLSRKVPIASSKINPYRMVIVLRLVVLSIFLHYRLTNPVRNAYPLWLLSVICEIWFALSWILDQFPKWFPINRETYLDRLALRYDREGEPSQLAAVDIFVSTVDPLKEPPIVTANTVLSILAVDYPVDKVSCYVSDDGASMLTFDALAETSEFARKWVPFVKKYDIEPRAPEFYFCQKIDYLKDKVQPSFVKDRRTREGEQRKVEDGIVEKAILVKDFA

SEQ ID NO: 66009 - protein, 368 aa, Triticum aestivum
  peptide (1)..(368): Ceres Seq. ID no. 14313222
  misc_feature (150)..(361): Pfam Name: Cellulose synthase Pfam Description: Cellulose synthase
  misc_feature (12)..(361): Homolog of NCBI NO: 39726035 NR Description: putative cellulose synthase catalytic subunit
  misc_feature (1)..(361): Homolog of NCBI NO: 39933010 NR Description: cellulose synthase [Populus tremuloides]
  misc_feature (1)..(361): Homolog of NCBI NO: 39726027 NR Description: putative cellulose synthase catalytic subunit
  misc_feature (1)..(361): Homolog of NCBI NO: 30103013 NR Description: putative cellulose synthase catalytic subunit
  misc_feature (1)..(361): Homolog of NCBI NO: 9622882 NR Description: cellulose synthase-5 [Zea mays]
  misc_feature (1)..(361): Homolog of NCBI NO: 9622880 NR Description: cellulose synthase-4 [Zea mays]
  misc_feature (1)..(361): Homolog of NCBI NO: 9622890 NR Description: cellulose synthase-9 [Zea mays]
  misc_feature (1)..(361): Homolog of NCBI NO: 28411807 NR Description: cellulose synthase-4 [Oryza sativa (japonica
  misc_feature (1)..(366): Homolog of NCBI NO: 39726025 NR Description: putative cellulose synthase catalytic subunit
  misc_feature (1)..(366): Homolog of NCBI NO: 40363755 NR Description: putative cellulose synthase [Triticum aestivum]
MRSWRMNTGGSGNVGHPKYDSGEIGLSKYDSGEIPRGYVPSVTNSQMSGEIPGASPDHHMMSPTGNISRRAPFPYVNHSPNPSREFSGSIGNVAWKERVDGWKMKQDKGAIPMTNGTSIAPSEGRAATDIDASTEYNMEDALLNDETRQPLSRKVPIASSKINPYRMVIVLRLVVLSIFLHYRLTNPVRNAYPLWLLSVICEIWFALSWILDQFPKWFPINRETYLDRLALRYDREGEPSQLAAVDIFVSTVDPLKEPPIVTANTVLSILAVDYPVDKVSCYVSDDGASMLTFDALAETSEFARKWVPFVKKYDIEPRAPEFYFCQKIDYLKDKVQPSFVKDRRTREGEQRKVEDGIVEKAILVKDFA

SEQ ID NO: 66010 - protein, 363 aa, Triticum aestivum
  peptide (1)..(363): Ceres Seq. ID no. 14313223
  misc_feature (145)..(356): Pfam Name: Cellulose synthase Pfam Description: Cellulose synthase
  misc_feature (7)..(356): Homolog of NCBI NO: 39726035 NR Description: putative cellulose synthase catalytic subunit
  misc_feature (1)..(356): Homolog of NCBI NO: 39933010 NR Description: cellulose synthase [Populus tremuloides]
  misc_feature (1)..(356): Homolog of NCBI NO: 39726027 NR Description: putative cellulose synthase catalytic subunit
  misc_feature (1)..(356): Homolog of NCBI NO: 30103013 NR Description: putative cellulose synthase catalytic subunit
  misc_feature (1)..(356): Homolog of NCBI NO: 9622882 NR Description: cellulose synthase-5 [Zea mays]
  misc_feature (1)..(356): Homolog of NCBI NO: 9622880 NR Description: cellulose synthase-4 [Zea mays]
  misc_feature (1)..(356): Homolog of NCBI NO: 9622890 NR Description: cellulose synthase-9 [Zea mays]
  misc_feature (1)..(356): Homolog of NCBI NO: 28411807 NR Description: cellulose synthase-4 [Oryza sativa (japonica
  misc_feature (1)..(361): Homolog of NCBI NO: 39726025 NR Description: putative cellulose synthase catalytic subunit
  misc_feature (1)..(361): Homolog of NCBI NO: 40363755 NR Description: putative cellulose synthase [Triticum aestivum]
MNTGGSGNVGHPKYDSGEIGLSKYDSGEIPRGYVPSVTNSQMSGEIPGASPDHHMMSPTGNISRRAPFPYVNHSPNPSREFSGSIGNVAWKERVDGWKMKQDKGAIPMTNGTSIAPSEGRAATDIDASTEYNMEDALLNDETRQPLSRKVPIASSKINPYRMVIVLRLVVLSIFLHYRLTNPVRNAYPLWLLSVICEIWFALSWILDQFPKWFPINRETYLDRLALRYDREGEPSQLAAVDIFVSTVDPLKEPPIVTANTVLSILAVDYPVDKVSCYVSDDGASMLTFDALAETSEFARKWVPFVKKYDIEPRAPEFYFCQKIDYLKDKVQPSFVKDRRTREGEQRKVEDGIVEKAILVKDFA

SEQ ID NO: 66011 - DNA, 634 bp, Triticum aestivum
  misc_feature (1)..(634): Ceres Seq. ID no. 12620202
cccaacatccccggcgccggggggaaaagctaccagggatgcgtctcgtcagcctcgcgcgcgcggcccctcgcgtccgcgcggcgtcgacggcggccacccccaccctggcggcggcgctgaaggtgggcgacgcgctgcgcccgcgccggcggcggttcacggaggaggccgtgccggcgtacgcgggggtgagcggcgaccgcaaccccgtgcacctagacgacgccttcgcgcgcgggacgggcggcttccagcgcggccgcgtggtgcacggcatgctcgtcgcctccctcttccccgccctcatcgcctcccacttccctggagccgtgtacgcgagccagtccctcaagttcgcggcgccggtgcacgtcggggacgaggtggtcgcgcaggtgcaggcgctccacatcaaggccaccggcgcaaggcacatcgtcaagttcgccaccaggtgcttcatggacgacgaggagactctcgccatcgacggcgaggccatggcttttctgcccacactgcagctcagcacagaggcaatcgagtgacaagtatgttatgttgattagaaccatttggaataggacgacttttatctcatgatgaaacattttgcctccgcataagcggg

SEQ ID NO: 66012 - protein, 188 aa, Triticum aestivum
  peptide (1)..(188): Ceres Seq. ID no. 12620203
  misc_feature (25)..(169): Homolog of NCBI NO: 29830710 NR Description: putative oxidoreductase [Streptomyces avermitilis
PTSPAPGGKATRDASRQPRARGPSRPRGVDGGHPHPGGGAEGGRRAAPAPAAVHGGGRAGVRGGERRPQPRAPRRRLRARDGRLPARPRGARHARRLPLPRPHRLPLPWSRVREPVPQVRGAGARRGRGGRAGAGAPHQGHRRKAHRQVRHQVLHGRRGDSRHRRRGHGFSAHTAAQHRGNRVTSMLC

SEQ ID NO: 66013 - protein, 182 aa, Triticum aestivum
  peptide (1)..(182): Ceres Seq. ID no. 12620204
  misc_feature (40)..(154): Pfam Name: MaoC like domain Pfam Description: MaoC like domain
  misc_feature (40)..(172): Homolog of NCBI NO: 20807052 NR Description: predicted acyl dehydratase [Thermoanaerobacter
  misc_feature (38)..(182): Homolog of NCBI NO: 15598498 NR Description: conserved hypothetical protein [Pseudomonas
  misc_feature (54)..(173): Homolog of NCBI NO: 23016355 NR Description: hypothetical protein [Magnetospirillum
  misc_feature (54)..(179): Homolog of NCBI NO: 23060433 NR Description: hypothetical protein [Pseudomonas fluorescens
  misc_feature (40)..(172): Homolog of NCBI NO: 7469146 NR Description: conserved hypothetical protein - Rhodobacter
  misc_feature (40)..(173): Homolog of NCBI NO: 22958771 NR Description: hypothetical protein [Rhodobacter sphaeroides]
  misc_feature (37)..(172): Homolog of NCBI NO: 28948376 NR Description: Chain A, (R)-Hydratase From A. Caviae Involved In
  misc_feature (37)..(172): Homolog of NCBI NO: 18652297 NR Description: enoyl-CoA hydrotase [Aeromonas hydrophila]
  misc_feature (25)..(176): Homolog of NCBI NO: 15239296 NR Description: putative protein; protein id: At5g60340.1
  misc_feature (25)..(176): Homolog of NCBI NO: 10177725 NR Description: gene_id:K9B18.4~unknown protein [Arabidopsis
QHPRRRGEKLPGMRLVSLARAAPRVRAASTAATPTLAAALKVGDALRPRRRRFTEEAVPAYAGVSGDRNPVHLDDAFARGTGGFQRGRVVHGMLVASLFPALIASHFPGAVYASQSLKFAAPVHVGDEVVAQVQALHIKATGARHIVKFATRCFMDDEETLAIDGEAMAFLPTLQLSTEAIE

SEQ ID NO: 66014 - protein, 170 aa, Triticum aestivum
  peptide (1)..(170): Ceres Seq. ID no. 12620205
  misc_feature (28)..(142): Pfam Name: MaoC like domain Pfam Description: MaoC like domain
  misc_feature (28)..(160): Homolog of NCBI NO: 20807052 NR Description: predicted acyl dehydratase [Thermoanaerobacter
  misc_feature (26)..(170): Homolog of NCBI NO: 15598498 NR Description: conserved hypothetical protein [Pseudomonas
  misc_feature (42)..(161): Homolog of NCBI NO: 23016355 NR Description: hypothetical protein [Magnetospirillum
  misc_feature (42)..(167): Homolog of NCBI NO: 23060433 NR Description: hypothetical protein [Pseudomonas fluorescens
  misc_feature (28)..(160): Homolog of NCBI NO: 7469146 NR Description: conserved hypothetical protein - Rhodobacter
  misc_feature (28)..(161): Homolog of NCBI NO: 22958771 NR Description: hypothetical protein [Rhodobacter sphaeroides]
  misc_feature (25)..(160): Homolog of NCBI NO: 28948376 NR Description: Chain A, (R)-Hydratase From A. Caviae Involved In
  misc_feature (25)..(160): Homolog of NCBI NO: 18652297 NR Description: enoyl-CoA hydrotase [Aeromonas hydrophila]
  misc_feature (13)..(164): Homolog of NCBI NO: 15239296 NR Description: putative protein; protein id: At5g60340.1
  misc_feature (13)..(164): Homolog of NCBI NO: 10177725 NR Description: gene_id:K9B18.4~unknown protein [Arabidopsis
MRLVSLARAAPRVRAASTAATPTLAAALKVGDALRPRRRRFTEEAVPAYAGVSGDRNPVHLDDAFARGTGGFQRGRVVHGMLVASLFPALIASHFPGAVYASQSLKFAAPVHVGDEVVAQVQALHIKATGARHIVKFATRCFMDDEETLAIDGEAMAFLPTLQLSTEAIE

SEQ ID NO: 66015 - DNA, 556 bp, Triticum aestivum
  misc_feature (1)..(556): Ceres Seq. ID no. 13656166
atcttcatttcacatcaaaatttctcctctttctatccatggccacggacgcacagcaccagcgacacagccgcaacggcggcgtgcacaccggccaccacttcctcatcgtggcctacggcatccagagccacctcaacccgtgccgcgtcctcgcgcaccgcctcgcgcgcctccacggcgtcgacggctccggggccgtcctcgccacggtctccctcccggtgtccgctcaccgccgcatgttcccttcgtccggagacgtcgacaatgatgataaagccaccgacggcgtcgtctcttacgctccatactccgacggcctcgacgacggctccatggccagggacggcgaggcgagggcgcgcagccgccaggccacctttgagagcctgtcagccgtcgtcgccaccctcgccgcacgtggccggccggtgacgtgtgtcgtttgcagcatggttctccccgcggcgctggacgtcgcgcgtgagcacggcatcccgctggccgtgtactggatccaaccggccaccgtgctcgccgcgtactaccacta

SEQ ID NO: 66016 - protein, 184 aa, Triticum aestivum
  peptide (1)..(184): Ceres Seq. ID no. 13656167
  misc_feature (52)..(183): Pfam Name: UDP-glucoronosyl and UDP-glucosyl transferase Pfam Description: UDP-glucoronosyl and UDP-glucosyl transferase
  misc_feature (33)..(183): Homolog of NCBI NO: 18390540 NR Description: UDP-glucose transferase(UGT1) [Arabidopsis
  misc_feature (33)..(183): Homolog of NCBI NO: 6683052 NR Description: anthocyanin 5-O-glucosyltransferase [Petunia x
  misc_feature (27)..(183): Homolog of NCBI NO: 15236407 NR Description: UDP-glycosyltransferase family [Arabidopsis
  misc_feature (23)..(183): Homolog of NCBI NO: 18414478 NR Description: UDP-glucose:indole-3-acetate
  misc_feature (23)..(183): Homolog of NCBI NO: 2149127 NR Description: UDP-glucose:indole-3-acetate
  misc_feature (13)..(183): Homolog of NCBI NO: 18491183 NR Description: putative glucosyltransferase [Arabidopsis
  misc_feature (33)..(183): Homolog of NCBI NO: 14192682 NR Description: cold-induced glucosyl transferase [Solanum
  misc_feature (33)..(183): Homolog of NCBI NO: 20146093 NR Description: glucosyltransferase NTGT2 [Nicotiana tabacum]
  misc_feature (33)..(183): Homolog of NCBI NO: 40714353 NR Description: anthocyanin 5-O-glucosyltransferase [Iris
  misc_feature (32)..(183): Homolog of NCBI NO: 34906162 NR Description: putative anthocyanin 5-O-glucosyltransferase
LHFTSKFLLFLSMATDAQHQRHSRNGGVHTGHHFLIVAYGIQSHLNPCRVLAHRLARLHGVDGSGAVLATVSLPVSAHRRMFPSSGDVDNDDKATDGVVSYAPYSDGLDDGSMARDGEARARSRQATFESLSAVVATLAARGRPVTCVVCSMVLPAALDVAREHGIPLAVYWIQPATVLAAYYH

SEQ ID NO: 66017 - protein, 172 aa, Triticum aestivum
  peptide (1)..(172): Ceres Seq. ID no. 13656168
  misc_feature (40)..(171): Pfam Name: UDP-glucoronosyl and UDP-glucosyl transferase Pfam Description: UDP-glucoronosyl and UDP-glucosyl transferase
  misc_feature (21)..(171): Homolog of NCBI NO: 18390540 NR Description: UDP-glucose transferase(UGT1) [Arabidopsis
  misc_feature (21)..(171): Homolog of NCBI NO: 6683052 NR Description: anthocyanin 5-O-glucosyltransferase [Petunia x
  misc_feature (15)..(171): Homolog of NCBI NO: 15236407 NR Description: UDP-glycosyltransferase family [Arabidopsis
  misc_feature (11)..(171): Homolog of NCBI NO: 18414478 NR Description: UDP-glucose:indole-3-acetate
  misc_feature (11)..(171): Homolog of NCBI NO: 2149127 NR Description: UDP-glucose:indole-3-acetate
  misc_feature (1)..(171): Homolog of NCBI NO: 18491183 NR Description: putative glucosyltransferase [Arabidopsis
  misc_feature (21)..(171): Homolog of NCBI NO: 14192682 NR Description: cold-induced glucosyl transferase [Solanum
  misc_feature (21)..(171): Homolog of NCBI NO: 20146093 NR Description: glucosyltransferase NTGT2 [Nicotiana tabacum]
  misc_feature (21)..(171): Homolog of NCBI NO: 40714353 NR Description: anthocyanin 5-O-glucosyltransferase [Iris
  misc_feature (20)..(171): Homolog of NCBI NO: 34906162 NR Description: putative anthocyanin 5-O-glucosyltransferase
MATDAQHQRHSRNGGVHTGHHFLIVAYGIQSHLNPCRVLAHRLARLHGVDGSGAVLATVSLPVSAHRRMFPSSGDVDNDDKATDGVVSYAPYSDGLDDGSMARDGEARARSRQATFESLSAVVATLAARGRPVTCVVCSMVLPAALDVAREHGIPLAVYWIQPATVLAAYYH

SEQ ID NO: 66018 - protein, 145 aa, Triticum aestivum
  peptide (1)..(145): Ceres Seq. ID no. 13656169
  misc_feature (15)..(145): Pfam Name: Glycoprotein GG/GX Pfam Description: Glycoprotein GG/GX
  misc_feature (17)..(145): Homolog of NCBI NO: 23510008 NR Description: hypothetical protein [Plasmodium falciparum 3D7]
  misc_feature (15)..(145): Homolog of NCBI NO: 2136504 NR Description: gastric mucin (clone PGM-2A) - pig (fragment)
  misc_feature (15)..(145): Homolog of NCBI NO: 6322611 NR Description: Delayed Anaerobic Gene; Dan4p [Saccharomyces
  misc_feature (15)..(145): Homolog of NCBI NO: 111978 NR Description: mucin - rat
  misc_feature (15)..(143): Homolog of NCBI NO: 2136504 NR Description: gastric mucin (clone PGM-2A) - pig (fragment)
  misc_feature (15)..(128): Homolog of NCBI NO: 14041184 NR Description: mucus-like protein [Geodia cydonium]
  misc_feature (16)..(145): Homolog of NCBI NO: 7248459 NR Description: arabinogalactan protein [Zea mays]
  misc_feature (9)..(145): Homolog of NCBI NO: 6322611 NR Description: Delayed Anaerobic Gene; Dan4p [Saccharomyces
  misc_feature (15)..(145): Homolog of NCBI NO: 23510008 NR Description: hypothetical protein [Plasmodium falciparum 3D7]
  misc_feature (14)..(145): Homolog of NCBI NO: 38175466 NR Description: putative high-affinity potassium transporter
IFISHQNFSSFYPWPRTHSTSDTAATAACTPATTSSSWPTASRATSTRAASSRTASRASTASTAPGPSSPRSPSRCPLTAACSLRPETSTMMIKPPTASSLTLHTPTASTTAPWPGTARRGRAAARPPLRACQPSSPPSPHVAGR

SEQ ID NO: 66019 - DNA, 2544 bp, Triticum aestivum
  misc_feature (1)..(2544): Ceres Seq. ID no. 14303680
atttcaaatcactctccctcccctgctctcctctcctcctcctcctccgccctctcgctcgcgtcccaggacccagccgcgcgaccccgaccccgaccccctcggcggccaccaccgcgcgctcccaccgccggcctgccgataccgcgccgagagattgctcctgacgatgggtggcgcggtgagagaccagcagcagcagctccacccgtgcgattcgcttctcctcgagctcaacgtgatctgggatgaggtcggtgagcccgacacggtgcgggacaagacgctgctggagctcgagcaggaatgcctcgatgtctacaggaggaaggtcgaccaggccaaccgctgcagggctcagctgcggcaatccatcgccgaggccgaggctgagctcgccggcatctgctcggccataggcgagccgccggttcacgtcaggcagtcaaaccagaaattgcatggtttaagggaggagttgaatgcaattatcccatatttagaggagatgcggactaaaaaggttgaaagatggagccagttcgttcatgtcctcgaggagattaagaaaatctcatccgaaatcaggccttcagactttgtgccatttaaaactcctgtggatcagtctgatctgtcgttaagaaagtttgaggagttaacgaaggagctagaatctcttcagaaagagaagagggaaagattaaagcaagtgatggatcatttgaacacattacattccttatgtgaggtgcttggcattgactttaaacaaacagtgcatgaggtgcaccctagcctggacgaagctgaaggatcaaagaacctgagcaacactacaatcgagagactagcattggctgtggatagacttcgtgaaataaaaattcagaggatgcaaaagcttcaagactttgcatcgacaatgctagaactatggaatcttatggatacaccaattgaagagcagcagatgttccagaatgtaacgtgcaatattgctgcctcggagcatgaaataacagaacccaacaccctgtcgatcgacttcctcagctatgtggaagctgaggttttaaggcttgagcaactgaaaggaagcaaaatgaaggacctcgttttgaaaaagaaatcggagctggaggagcacagaagacgtgcgcatctaattggcgaggaaggatattcagatgaatttaacattgaggctattgagtcgggagctattgatcctgcattggtgctggaacaaattgaggctcacattgcaacagtgaaagatgaagctttcagtcgaaaggatattcttgagaaggttgaaagatttctgaatgcatgtgaggaggaagcctggctggaagattacaacaaagatgacaatcgttacaatgctgggaagggggcacatctgacgctcaagagggctgagaaagctcgcattttggttaacaagattccgggaatggtagatgttttgaccacaaaaatcattgcttgggagaatgaaagaggaaaagagttcacatatgatggcgtacgccttctctcaatgctggatgaatacatgattgttcgccaggagaaagaacaagagaagaagagacaaagggatcagaagaagctccacgatcagctcaaagccgagcaggaagctctctacggttcaaagccaagtccatccaagcctcaaagcataaagaaggcgcctagacactcgatgggtggtgtaaaccgcagggtgtccatgggtggagccacgatgcaagcacccaaaacagacatactgcattccaagaatgttcgtgctgccaagagaactgaagacattgcccatttgtcccctgccagcagaggcttggacattggcgatcttcccatcaagaagctatctttcaatgccactgccttgcgtgaaaccgagacacctcgcaagccatttgcgcagatcatgccgccgccaagcagtgtcccctccactcctgcgcgctctgtcaccaatgacaccgaggatgagaaccggacccccaaccccaagacatttggagcagcactgaatctcaagaccccgatgaccgtggcggctccgatgcagctggcaatgacgcccgctgtggctagcaaggtcacggctgctcctgtctcccttgtctacgagaagccagagccaacattgctggaggcgatcgagtattccttcgaagaaaggcggctggccgtctatttgtcaagagaagtttaagctctctttgcgtaggcgaaagttggaaacctgacggctgttacttgtgagagactggctgctgcctagtatgttggtcgacgacagtcgtccagtgctgttctgattgttcccctctgccacatttgattgtttccatactcagcaaaggaagcttgcgcttcagcagcttccgttcagtactgccattggttagatataattaatgtgtataggtttctttctcggcactgaatcatcttgaatctgtttgattaatatagatcggtattgtgttttaatcctcatgcgatgatgtgtttctg

SEQ ID NO: 66020 - protein, 745 aa, Triticum aestivum
  peptide (1)..(745): Ceres Seq. ID no. 14303681
  misc_feature (92)..(669): Pfam Name: Microtubule associated protein (MAP65/ASE1 family) Pfam Description: Microtubule associated protein (MAP65/ASE1
  misc_feature (71)..(617): Homolog of NCBI NO: 18416818 NR Description: microtubule associated protein (MAP65/ASE1)
  misc_feature (71)..(617): Homolog of NCBI NO: 11558256 NR Description: microtubule-associated protein MAP65-1c
  misc_feature (71)..(617): Homolog of NCBI NO: 11558254 NR Description: microtubule-associated protein MAP65-1b
  misc_feature (71)..(582): Homolog of NCBI NO: 28200790 NR Description: 65kD microtubule associated protein [Daucus
  misc_feature (71)..(582): Homolog of NCBI NO: 15240485 NR Description: microtubule associated protein (MAP65/ASE1)
  misc_feature (71)..(582): Homolog of NCBI NO: 11558252 NR Description: microtubule-associated protein MAP65-1a
  misc_feature (57)..(353): Homolog of NCBI NO: 34911266 NR Description: cytokinesis regulating protein - like
  misc_feature (73)..(597): Homolog of NCBI NO: 15241762 NR Description: microtubule associated protein (MAP65/ASE1)
  misc_feature (85)..(736): Homolog of NCBI NO: 15232967 NR Description: microtubule associated protein (MAP65/ASE1)
  misc_feature (57)..(744): Homolog of NCBI NO: 15242132 NR Description: microtubule associated protein (MAP65/ASE1)
FQITLPPLLSSPPPPPPSRSRPRTQPRDPDPDPLGGHHRALPPPACRYRAERLLLTMGGAVRDQQQQLHPCDSLLLELNVIWDEVGEPDTVRDKTLLELEQECLDVYRRKVDQANRCRAQLRQSIAEAEAELAGICSAIGEPPVHVRQSNQKLHGLREELNAIIPYLEEMRTKKVERWSQFVHVLEEIKKISSEIRPSDFVPFKTPVDQSDLSLRKFEELTKELESLQKEKRERLKQVMDHLNTLHSLCEVLGIDFKQTVHEVHPSLDEAEGSKNLSNTTIERLALAVDRLREIKIQRMQKLQDFASTMLELWNLMDTPIEEQQMFQNVTCNIAASEHEITEPNTLSIDFLSYVEAEVLRLEQLKGSKMKDLVLKKKSELEEHRRRAHLIGEEGYSDEFNIEAIESGAIDPALVLEQIEAHIATVKDEAFSRKDILEKVERFLNACEEEAWLEDYNKDDNRYNAGKGAHLTLKRAEKARILVNKIPGMVDVLTTKIIAWENERGKEFTYDGVRLLSMLDEYMIVRQEKEQEKKRQRDQKKLHDQLKAEQEALYGSKPSPSKPQSIKKAPRHSMGGVNRRVSMGGATMQAPKTDILHSKNVRAAKRTEDIAHLSPASRGLDIGDLPIKKLSFNATALRETETPRKPFAQIMPPPSSVPSTPARSVTNDTEDENRTPNPKTFGAALNLKTPMTVAAPMQLAMTPAVASKVTAAPVSLVYEKPEPTLLEAIEYSFEERRLAVYLSREV

SEQ ID NO: 66021 - protein, 689 aa, Triticum aestivum
  peptide (1)..(689): Ceres Seq. ID no. 14303682
  misc_feature (36)..(613): Pfam Name: Microtubule associated protein (MAP65/ASE1 family) Pfam Description: Microtubule associated protein (MAP65/ASE1
  misc_feature (15)..(561): Homolog of NCBI NO: 18416818 NR Description: microtubule associated protein (MAP65/ASE1)
  misc_feature (15)..(561): Homolog of NCBI NO: 11558256 NR Description: microtubule-associated protein MAP65-1c
  misc_feature (15)..(561): Homolog of NCBI NO: 11558254 NR Description: microtubule-associated protein MAP65-1b
  misc_feature (15)..(526): Homolog of NCBI NO: 28200790 NR Description: 65kD microtubule associated protein [Daucus
  misc_feature (15)..(526): Homolog of NCBI NO: 15240485 NR Description: microtubule associated protein (MAP65/ASE1)
  misc_feature (15)..(526): Homolog of NCBI NO: 11558252 NR Description: microtubule-associated protein MAP65-1a
  misc_feature (1)..(297): Homolog of NCBI NO: 34911266 NR Description: cytokinesis regulating protein - like
  misc_feature (17)..(541): Homolog of NCBI NO: 15241762 NR Description: microtubule associated protein (MAP65/ASE1)
  misc_feature (29)..(680): Homolog of NCBI NO: 15232967 NR Description: microtubule associated protein (MAP65/ASE1)
  misc_feature (1)..(688): Homolog of NCBI NO: 15242132 NR Description: microtubule associated protein (MAP65/ASE1)
MGGAVRDQQQQLHPCDSLLLELNVIWDEVGEPDTVRDKTLLELEQECLDVYRRKVDQANRCRAQLRQSIAEAEAELAGICSAIGEPPVHVRQSNQKLHGLREELNAIIPYLEEMRTKKVERWSQFVHVLEEIKKISSEIRPSDFVPFKTPVDQSDLSLRKFEELTKELESLQKEKRERLKQVMDHLNTLHSLCEVLGIDFKQTVHEVHPSLDEAEGSKNLSNTTIERLALAVDRLREIKIQRMQKLQDFASTMLELWNLMDTPIEEQQMFQNVTCNIAASEHEITEPNTLSIDFLSYVEAEVLRLEQLKGSKMKDLVLKKKSELEEHRRRAHLIGEEGYSDEFNIEAIESGAIDPALVLEQIEAHIATVKDEAFSRKDILEKVERFLNACEEEAWLEDYNKDDNRYNAGKGAHLTLKRAEKARILVNKIPGMVDVLTTKIIAWENERGKEFTYDGVRLLSMLDEYMIVRQEKEQEKKRQRDQKKLHDQLKAEQEALYGSKPSPSKPQSIKKAPRHSMGGVNRRVSMGGATMQAPKTDILHSKNVRAAKRTEDIAHLSPASRGLDIGDLPIKKLSFNATALRETETPRKPFAQIMPPPSSVPSTPARSVTNDTEDENRTPNPKTFGAALNLKTPMTVAAPMQLAMTPAVASKVTAAPVSLVYEKPEPTLLEAIEYSFEERRLAVYLSREV

SEQ ID NO: 66022 - protein, 576 aa, Triticum aestivum
  peptide (1)..(576): Ceres Seq. ID no. 14303683
  misc_feature (1)..(500): Pfam Name: Microtubule associated protein (MAP65/ASE1 family) Pfam Description: Microtubule associated protein (MAP65/ASE1
  misc_feature (1)..(448): Homolog of NCBI NO: 18416818 NR Description: microtubule associated protein (MAP65/ASE1)
  misc_feature (1)..(448): Homolog of NCBI NO: 11558256 NR Description: microtubule-associated protein MAP65-1c
  misc_feature (1)..(448): Homolog of NCBI NO: 11558254 NR Description: microtubule-associated protein MAP65-1b
  misc_feature (1)..(413): Homolog of NCBI NO: 28200790 NR Description: 65kD microtubule associated protein [Daucus
  misc_feature (1)..(413): Homolog of NCBI NO: 15240485 NR Description: microtubule associated protein (MAP65/ASE1)
  misc_feature (1)..(413): Homolog of NCBI NO: 11558252 NR Description: microtubule-associated protein MAP65-1a
  misc_feature (1)..(184): Homolog of NCBI NO: 34911266 NR Description: cytokinesis regulating protein - like
  misc_feature (1)..(428): Homolog of NCBI NO: 15241762 NR Description: microtubule associated protein (MAP65/ASE1)
  misc_feature (1)..(567): Homolog of NCBI NO: 15232967 NR Description: microtubule associated protein (MAP65/ASE1)
  misc_feature (1)..(575): Homolog of NCBI NO: 15242132 NR Description: microtubule associated protein (MAP65/ASE1)
MRTKKVERWSQFVHVLEEIKKISSEIRPSDFVPFKTPVDQSDLSLRKFEELTKELESLQKEKRERLKQVMDHLNTLHSLCEVLGIDFKQTVHEVHPSLDEAEGSKNLSNTTIERLALAVDRLREIKIQRMQKLQDFASTMLELWNLMDTPIEEQQMFQNVTCNIAASEHEITEPNTLSIDFLSYVEAEVLRLEQLKGSKMKDLVLKKKSELEEHRRRAHLIGEEGYSDEFNIEAIESGAIDPALVLEQIEAHIATVKDEAFSRKDILEKVERFLNACEEEAWLEDYNKDDNRYNAGKGAHLTLKRAEKARILVNKIPGMVDVLTTKIIAWENERGKEFTYDGVRLLSMLDEYMIVRQEKEQEKKRQRDQKKLHDQLKAEQEALYGSKPSPSKPQSIKKAPRHSMGGVNRRVSMGGATMQAPKTDILHSKNVRAAKRTEDIAHLSPASRGLDIGDLPIKKLSFNATALRETETPRKPFAQIMPPPSSVPSTPARSVTNDTEDENRTPNPKTFGAALNLKTPMTVAAPMQLAMTPAVASKVTAAPVSLVYEKPEPTLLEAIEYSFEERRLAVYLSREV

SEQ ID NO: 66023 - DNA, 1057 bp, Triticum aestivum
  misc_feature (1)..(1057): Ceres Seq. ID no. 13657258
ataatatcctgactttgaagtcattttttcatttacatcagcccagcctatgcaaactccattctgtgatggatgaaatatccattatatttaaggctgtattgtcttgttattttttgttttcatacctataatttacatccagattactacatcggattttgttcaactctgctgaacatctgtaacacttattttcttcacaggtgaagactatatatgtgaagaacctgccggagaatgtttctaaagagaaagttaaggatctctttgaagttcatggagaggtcacaaaaattgttttaccgcctgctaaggccgggcataagagggattttgggtttgttcactttgctgaaagatcaagtgcactgaaggcagttaaaggaagtgaaaaatacgaaatcgatgggcaagtgcttgaagtttccatggccaaacctttgagtgataagaaacctgaccactcgttcaagcctggtggagctcccagctatcctcttccaccttatggtggctacatgggagacccatatggtgcctatggtggcggccctggattcaaccagcctatgatctatggtagaggaccagcaccagctggaatgaggatggtgccgatggtgctccctgatggtcgccttggctatgttctgtaagactttttttctgcatactagtgtcgatgcatacacatcttcagttccttgacaacgtgttactaatgttgataggcaacaacctggtggaatgccgcctccaccccctccgcgacgtggtgaccggcgggatggcggtggccgaggtggcgaaggaagccagcggcgttatcggccctactagtttgtcccttgccttgcatttttcgtcgtgctaggtgatggatttgttaactttgatggagtgcgtttaggagcgtgtgttgtttttgccctgtaagacttctatagccttagacttggtactcttctgttttgttatttgataaacacccgagacgtgtactgttgcgccgtccttttcaataacttgtgtatcatgcagtgctcgtgactcc

SEQ ID NO: 66024 - protein, 75 aa, Triticum aestivum
  peptide (1)..(75): Ceres Seq. ID no. 13657259
  misc_feature (1)..(58): Homolog of NCBI NO: 39545835 NR Description: OSJNBb0060E08.6 [Oryza sativa (japonica
  misc_feature (1)..(53): Homolog of NCBI NO: 32476441 NR Description: RNA-binding protein [Pirellula sp.]
  misc_feature (1)..(53): Homolog of NCBI NO: 9502153 NR Description: contains similarity to Pfam family PF00076 (RNA motif. (a.k.a. RRM, RBD, or RNP domain)), score=42.1, E=1.3e-08,
  misc_feature (44)..(75): Homolog of NCBI NO: 15241771 NR Description: RNA recognition motif (RRM)-containing protein
  misc_feature (44)..(75): Homolog of NCBI NO: 22327128 NR Description: RNA recognition motif (RRM)-containing protein
  misc_feature (1)..(75): Homolog of NCBI NO: 15231284 NR Description: RNA recognition motif (RRM)-containing protein
  misc_feature (1)..(75): Homolog of NCBI NO: 29371361 NR Description: putative RNA-binding protein
  misc_feature (1)..(75): Homolog of NCBI NO: 18411454 NR Description: RNA recognition motif (RRM)-containing protein
  misc_feature (1)..(75): Homolog of NCBI NO: 7485284 NR Description: hypothetical protein A_TM018A10.14 - Arabidopsis
  misc_feature (1)..(75): Homolog of NCBI NO: 37531112 NR Description: putative RNA-binding protein
MAKPLSDKKPDHSFKPGGAPSYPLPPYGGYMGDPYGAYGGGPGFNQPMIYGRGPAPAGMRMVPMVLPDGRLGYVL

SEQ ID NO: 66025 - protein, 63 aa, Triticum aestivum
  peptide (1)..(63): Ceres Seq. ID no. 13657260
MHTHLQFLDNVLLMLIGNNLVECRLHPLRDVVTGGMAVAEVAKEASGVIGPTSLSLALHFSSC

SEQ ID NO: 66026 - protein, 50 aa, Triticum aestivum
  peptide (1)..(50): Ceres Seq. ID no. 13657261
MLIGNNLVECRLHPLRDVVTGGMAVAEVAKEASGVIGPTSLSLALHFSSC

SEQ ID NO: 66027 - DNA, 851 bp, Triticum aestivum
  misc_feature (1)..(851): Ceres Seq. ID no. 13657832
gaacccccagcagttcactccactcctagtcctgctaccaccagcaagaggctggctgtgggctgatccatgaggcgcctcgtgttcgcggagctcgtggtcctcctcgccgcggcgctcctgctccccgtcgtgatctgctgccggcgctcgagcggcggcgccacgcggccgctgcccgtctcggagcagcccggcgccggtgccaacgccagcaggaagaagcgccgcgtcgagcggctgcggcgggcgctccacgccctgcgcgtctggtgccgccgctcccgcgtcgagccggcggcctccgcgtccgcgtctccggacgacggcgcgcaggcgcagggggaggttcagctggagcagatcgccgccccggcggcggcggcggagcaggcggggcacgaggaggagggtgtggcggcgtggcgcgagcgctggttcggcggccccgggtcgcgcgcgctctacaccatcgaggaggcgtcggagacggagggcgacgtggagagccagtacggcgccgagcccgagacgccgttctacacgccgccggcctcgccgccgcacgatggagagcaagcagaccagccggagcacggcgaggccagttagttagccggcgatgcgccgctcgttccctgtgtgtcatagattcgacaattttctttgggttctttcgcgcatcagcagcagcagaaagcagcggctgttgaagcaaggcgtgcatgataggattggctagtcagtactaattctttctttcccctccttgtttccggaggcaggagtggatggatggacatgcatgcagattaatactactacggcgaatctgcatgtattaatctgct

SEQ ID NO: 66028 - protein, 180 aa, Triticum aestivum
  peptide (1)..(180): Ceres Seq. ID no. 13657833
  misc_feature (1)..(175): Homolog of NCBI NO: 34905880 NR Description: P0458E05.16 [Oryza sativa (japonica
MRRLVFAELVVLLAAALLLPVVICCRRSSGGATRPLPVSEQPGAGANASRKKRRVERLRRALHALRVWCRRSRVEPAASASASPDDGAQAQGEVQLEQIAAPAAAAEQAGHEEEGVAAWRERWFGGPGSRALYTIEEASETEGDVESQYGAEPETPFYTPPASPPHDGEQADQPEHGEAS

SEQ ID NO: 66029 - DNA, 1613 bp, Triticum aestivum
  misc_feature (1)..(1613): Ceres Seq. ID no. 14307952
aaatcattcactcaacaatggaattcgttatgctcctggccgctctcttttgcctcctagccggagtggtctttctgcggagctacaccaggagatcccaggccaccacccaccacatcggggaccccgatgttgctcatcgagcgctcattgggaacgccgacgacttcttaaaccggccggcagcaagcttccccacctccctggccacctggcgccatggcgaacggaacgacaacatagccactgtgacctacggcccgcagtggcgagtgctccggtgcaacctcacggctgagatcctctcacgcctcggttccttagccccgcttcatgaggaggccgcccaggcactcgtcgcagacttctcggcccgatgcggcggaggaggtgacgtggccgtccgtgagcccgtcaccaaagccgtgttcacgctggccacgcgcctgtgcttcggcgacattgtggacgacggccagagacacgccataggacgcgtgatacgggactccatcgtcgccgcaggtaagctcagccccgggttcgatggctcgatgctatccaagctcgcgaactggagggggtttcgccggatctccgccgtgctcaaacggcagaccgagctgtacctccctctgatcgcggcacggaggcagtcgcagtctcagctctgtggcggcatcgtccatccttacgaggactcgctcctggatctccgtgtccccgacaatggtgatgcctccggccccggccgtcctcttcaagacggcgagctggtgggccttgtgttcgagttcctgggtgcagccactgggtcaaccgcagcctgcctcgagtggaccctcgcccatctcatcgaccagcaggagaccctggacaggctgcgccgggagatcgaagacgaggccgacgccggcgggatactctccagcaagagccttcgcagcggcatgccctacctgaacgcggtagtccttgaatgcctccgcatgcaccagccggtgccggtcatcttgagcagcgcccacggggacggcgccaaagcgatcggtggaatgagagctgtgccgctggacggcttgagcgtgcagttcaatttagccgacattggaagagatgcgaagcggtggacccatcctgacaagttctggccggagcggttccttgccggaggcgaggcggaagacatcgggccggcgccgggccccaaggagatcaggatgatgccgttcggtgcgggacatcggcactgccctggcgtgaacatgggaatgttgcacatcaagtgcttcttagcggcgctcgtgcacaacttcgactgggcactgtccgccgaagactgcagcagcggtgtcgacatgacggagcaggacggcttcataaaaataatgaagaagccgctctccgcgcgtgtcactggacgcacttgagttcttctaaaatctttgacaaacttgtgtccggtttctgaatgtgtgtggtcctatttttcatgcacgtcttgttctgctttcctgttgaagtttgtttgagcttgcttaccacacggaccgtgtggtatgtgtgattgtacttgcatcaaataataagaaatcgtgtgcttcttgcttttc

SEQ ID NO: 66030 - protein, 475 aa, Triticum aestivum
  peptide (1)..(475): Ceres Seq. ID no. 14307953
  misc_feature (39)..(471): Pfam Name: Cytochrome P450 Pfam Description: Cytochrome P450
  misc_feature (39)..(474): Homolog of NCBI NO: 15217771 NR Description: cytochrome P450, putative [Arabidopsis thaliana]
  misc_feature (39)..(474): Homolog of NCBI NO: 37530946 NR Description: putative cytochrome P450 [Oryza sativa (japonica
  misc_feature (11)..(470): Homolog of NCBI NO: 37536016 NR Description: putative cytochrome P450 [Oryza sativa (japonica
  misc_feature (39)..(467): Homolog of NCBI NO: 37536046 NR Description: putative cytochrome P450 [Oryza sativa (japonica
  misc_feature (79)..(469): Homolog of NCBI NO: 28971944 NR Description: putative cytochrome P450 [Oryza sativa (japonica
  misc_feature (3)..(474): Homolog of NCBI NO: 37536020 NR Description: putative cytochrome P450 [Oryza sativa (japonica
  misc_feature (27)..(474): Homolog of NCBI NO: 34895180 NR Description: putative cytochrome P450 [Oryza sativa (japonica
  misc_feature (39)..(474): Homolog of NCBI NO: 37536044 NR Description: putative cytochrome P450 [Oryza sativa (japonica
  misc_feature (9)..(474): Homolog of NCBI NO: 38346511 NR Description: OSJNBa0027H09.6 [Oryza sativa (japonica
  misc_feature (9)..(474): Homolog of NCBI NO: 38346509 NR Description: OSJNBa0027H09.4 [Oryza sativa (japonica
IIHSTMEFVMLLAALFCLLAGVVFLRSYTRRSQATTHHIGDPDVAHRALIGNADDFLNRPAASFPTSLATWRHGERNDNIATVTYGPQWRVLRCNLTAEILSRLGSLAPLHEEAAQALVADFSARCGGGGDVAVREPVTKAVFTLATRLCFGDIVDDGQRHAIGRVIRDSIVAAGKLSPGFDGSMLSKLANWRGFRRISAVLKRQTELYLPLIAARRQSQSQLCGGIVHPYEDSLLDLRVPDNGDASGPGRPLQDGELVGLVFEFLGAATGSTAACLEWTLAHLIDQQETLDRLRREIEDEADAGGILSSKSLRSGMPYLNAVVLECLRMHQPVPVILSSAHGDGAKAIGGMRAVPLDGLSVQFNLADIGRDAKRWTHPDKFWPERFLAGGEAEDIGPAPGPKEIRMMPFGAGHRHCPGVNMGMLHIKCFLAALVHNFDWALSAEDCSSGVDMTEQDGFIKIMKKPLSARVTGRT

SEQ ID NO: 66031 - protein, 470 aa, Triticum aestivum
  peptide (1)..(470): Ceres Seq. ID no. 14307954
  misc_feature (34)..(466): Pfam Name: Cytochrome P450 Pfam Description: Cytochrome P450
  misc_feature (34)..(469): Homolog of NCBI NO: 15217771 NR Description: cytochrome P450, putative [Arabidopsis thaliana]
  misc_feature (34)..(469): Homolog of NCBI NO: 37530946 NR Description: putative cytochrome P450 [Oryza sativa (japonica
  misc_feature (6)..(465): Homolog of NCBI NO: 37536016 NR Description: putative cytochrome P450 [Oryza sativa (japonica
  misc_feature (34)..(462): Homolog of NCBI NO: 37536046 NR Description: putative cytochrome P450 [Oryza sativa (japonica
  misc_feature (74)..(464): Homolog of NCBI NO: 28971944 NR Description: putative cytochrome P450 [Oryza sativa (japonica
  misc_feature (1)..(469): Homolog of NCBI NO: 37536020 NR Description: putative cytochrome P450 [Oryza sativa (japonica
  misc_feature (22)..(469): Homolog of NCBI NO: 34895180 NR Description: putative cytochrome P450 [Oryza sativa (japonica
  misc_feature (34)..(469): Homolog of NCBI NO: 37536044 NR Description: putative cytochrome P450 [Oryza sativa (japonica
  misc_feature (4)..(469): Homolog of NCBI NO: 38346511 NR Description: OSJNBa0027H09.6 [Oryza sativa (japonica
  misc_feature (4)..(469): Homolog of NCBI NO: 38346509 NR Description: OSJNBa0027H09.4 [Oryza sativa (japonica
MEFVMLLAALFCLLAGVVFLRSYTRRSQATTHHIGDPDVAHRALIGNADDFLNRPAASFPTSLATWRHGERNDNIATVTYGPQWRVLRCNLTAEILSRLGSLAPLHEEAAQALVADFSARCGGGGDVAVREPVTKAVFTLATRLCFGDIVDDGQRHAIGRVIRDSIVAAGKLSPGFDGSMLSKLANWRGFRRISAVLKRQTELYLPLIAARRQSQSQLCGGIVHPYEDSLLDLRVPDNGDASGPGRPLQDGELVGLVFEFLGAATGSTAACLEWTLAHLIDQQETLDRLRREIEDEADAGGILSSKSLRSGMPYLNAVVLECLRMHQPVPVILSSAHGDGAKAIGGMRAVPLDGLSVQFNLADIGRDAKRWTHPDKFWPERFLAGGEAEDIGPAPGPKEIRMMPFGAGHRHCPGVNMGMLHIKCFLAALVHNFDWALSAEDCSSGVDMTEQDGFIKIMKKPLSARVTGRT

SEQ ID NO: 66032 - protein, 466 aa, Triticum aestivum
  peptide (1)..(466): Ceres Seq. ID no. 14307955
  misc_feature (30)..(462): Pfam Name: Cytochrome P450 Pfam Description: Cytochrome P450
  misc_feature (30)..(465): Homolog of NCBI NO: 15217771 NR Description: cytochrome P450, putative [Arabidopsis thaliana]
  misc_feature (30)..(465): Homolog of NCBI NO: 37530946 NR Description: putative cytochrome P450 [Oryza sativa (japonica
  misc_feature (2)..(461): Homolog of NCBI NO: 37536016 NR Description: putative cytochrome P450 [Oryza sativa (japonica
  misc_feature (30)..(458): Homolog of NCBI NO: 37536046 NR Description: putative cytochrome P450 [Oryza sativa (japonica
  misc_feature (70)..(460): Homolog of NCBI NO: 28971944 NR Description: putative cytochrome P450 [Oryza sativa (japonica
  misc_feature (1)..(465): Homolog of NCBI NO: 37536020 NR Description: putative cytochrome P450 [Oryza sativa (japonica
  misc_feature (18)..(465): Homolog of NCBI NO: 34895180 NR Description: putative cytochrome P450 [Oryza sativa (japonica
  misc_feature (30)..(465): Homolog of NCBI NO: 37536044 NR Description: putative cytochrome P450 [Oryza sativa (japonica
  misc_feature (1)..(465): Homolog of NCBI NO: 38346511 NR Description: OSJNBa0027H09.6 [Oryza sativa (japonica
  misc_feature (1)..(465): Homolog of NCBI NO: 38346509 NR Description: OSJNBa0027H09.4 [Oryza sativa (japonica
MLLAALFCLLAGVVFLRSYTRRSQATTHHIGDPDVAHRALIGNADDFLNRPAASFPTSLATWRHGERNDNIATVTYGPQWRVLRCNLTAEILSRLGSLAPLHEEAAQALVADFSARCGGGGDVAVREPVTKAVFTLATRLCFGDIVDDGQRHAIGRVIRDSIVAAGKLSPGFDGSMLSKLANWRGFRRISAVLKRQTELYLPLIAARRQSQSQLCGGIVHPYEDSLLDLRVPDNGDASGPGRPLQDGELVGLVFEFLGAATGSTAACLEWTLAHLIDQQETLDRLRREIEDEADAGGILSSKSLRSGMPYLNAVVLECLRMHQPVPVILSSAHGDGAKAIGGMRAVPLDGLSVQFNLADIGRDAKRWTHPDKFWPERFLAGGEAEDIGPAPGPKEIRMMPFGAGHRHCPGVNMGMLHIKCFLAALVHNFDWALSAEDCSSGVDMTEQDGFIKIMKKPLSARVTGRT

SEQ ID NO: 66033 - DNA, 759 bp, Triticum aestivum
  misc_feature (1)..(759): Ceres Seq. ID no. 12619615
cttccttgtgcttcttcattcacctgcgactgcgagtgagtgcgagtgcgagtgcggggtgggtcaaaggctcaaagcaagtgcgtgggattggaggagaaggagatggagctggtgtcctcctcccgctccaccctatcctcttgcagccgactggttgctccctccaggtccagttccacgacggcatccgcagctgctaggcgccacgggaagaggctattatgtgtcttgggtggagacaggaatgatgagctcaagatcgggaggcgggcggttcttgctctgctcctggctacgcccacactctcactgcctttctccgcccacgccaagaccaagaccataaatccttatgatgaaagacgcttgcttcagcagaacaagaaaatccaggaagccaaccgtgcacctgatgatttcccaaacttcatcagagaaggttttcaggtcaaagtagtgacacccgacaactacataactcgggactccggattaatatatgaggacgtcaaagttggtacaggcgattgcccaaaggatggtcagcaggttatatttcactatgtgggctacaacgaatcaggacgaaggatagatagcacctacatccagggttcgcctgccaactttgtgcccggcaagtaaacacatgagaatcgacttctcaggagtatatgtgtgctctggatgtatgattaatatctgatcgttgatgttgtacactatcaaagatgtttacaaatagcgcccatctgg

SEQ ID NO: 66034 - protein, 180 aa, Triticum aestivum
  peptide (1)..(180): Ceres Seq. ID no. 12619616
  misc_feature (139)..(179): Pfam Name: FKBP-type peptidyl-prolyl cis-trans isomerase Pfam Description: FKBP-type peptidyl-prolyl cis-trans isomerase
  misc_feature (53)..(179): Homolog of NCBI NO: 11283515 NR Description: hypothetical protein T8B10.30 - Arabidopsis
  misc_feature (34)..(179): Homolog of NCBI NO: 30695188 NR Description: immunophilin / FKBP-type peptidyl-prolyl
  misc_feature (1)..(180): Homolog of NCBI NO: 33146997 NR Description: putative FKBP-type peptidyl-prolyl cis-trans
MELVSSSRSTLSSCSRLVAPSRSSSTTASAAARRHGKRLLCVLGGDRNDELKIGRRAVLALLLATPTLSLPFSAHAKTKTINPYDERRLLQQNKKIQEANRAPDDFPNFIREGFQVKVVTPDNYITRDSGLIYEDVKVGTGDCPKDGQQVIFHYVGYNESGRRIDSTYIQGSPANFVPGK

SEQ ID NO: 66035 - protein, 115 aa, Triticum aestivum
  peptide (1)..(115): Ceres Seq. ID no. 12619617
FLVLLHSPATASECECECGVGQRLKASAWDWRRRRWSWCPPPAPPYPLAADWLLPPGPVPRRHPQLLGATGRGYYVSWVETGMMSSRSGGGRFLLCSWLRPHSHCLSPPTPRPRP

SEQ ID NO: 66036 - DNA, 2115 bp, Triticum aestivum
  misc_feature (1)..(2115): Ceres Seq. ID no. 15169470
tgaaaaatcgccgtcccgtctcgtcgccacccaccaaatcccccgccctgcctcgccaccaaccccacgccaccacccctccccgccggccgcccggtatataaaccccgaccgccacccccatttcccccagaccacacgactcgccctcctccccgcgcagcagccccacctaccgacctaccgccccaagccgccgcgcatctcgcccctcagcccctcccctcccctcccgccgcagcaatggcgctcgccaccaacaccgccgccgcggccgcagcgctgaccggcagcgcggcccagccccgccgcgcgggcttcctccccctcaagcgccgcaccatctccgccgtgcacgccgccgaccccgccaggagcggcgcgtccgtcccggcggccgcggcagccaagacctcgtccccgacggtggcgccggaggccgcggccgtgacccggcccgcgagctggtccgtcgacagctggaggaagaagaaggcgctgcagctgcccgagtaccccaacaaggaggagctcgacgcggtcctcaagacgatcgagaccttcccgcccatcgtgttcgccggggaggcgcgccacctcgaggaccgcctcgccgaggccgccatgggccgcgccttcgtcctccagggcggcgactgcgccgagagcttcaaggagttcaacgccaacaacatccgtgacaccttccgcgtgctcctccagatgggcgccgtcctcatgttcggcggccaggtccccgtcgtcaaggtgggacggatggctggccagttcgccaagcccaggtctgacaacttcgaagagaaggacggcgtcaagctgccgagttacaggggcgacaacgtcaacggcgacgccttcgacctcaagagccgcacgcctgaccccgacaggatgatcagggcctacgcccagtcggtggcgaccctcaacctgctccgcgcgttcgcgaccggaggctacgcagctatgcagcgggtcatccagtggaacctggatttcatggatcacaacgagcagggagacaggtaccgtgagttggcgcatagggtggacgaggctcttggcttcatgacagcagctgggctggggatggaccatccgataatgacgactactgacttctggacatcccacgagtgtctcctcttgccatatgagcaggctcttacccgtgaggactccacaagtggccttttctacgactgctcggcccatatggtgtgggttggtgagcgtactcgtcaactcgacggggctcatgttgaatttctccgtggtattgccaaccctcttggcattaaggtgagtgacaagatgaaccctgctgaattggtgaagctgattgacattttgaacccttcaaacaagccgggaaggatcaccatcattacaaggatgggagctgagaacatgagggtgaagttgcctcatctcatccgtgctgtccgcaattctggacagattgtcacatggattactgaccccatgcacggaaacaccatcaaggccccatgtggtctgaagactcgtccatttgactctattatgaatgaggtgcgtgcattcttcgatgtgcacgaccaagaaggaagccacccaggaggcatccaccttgaaatgactggacagaatgtgaccgagtgcatcggtggatcacggaccgtgaccttcgatgacctgggtgaccgctaccacacccactgcgacccaaggctgaacgcgtcacagtctctggagctcgctttcatcatcgccgagagactcaggaagaggaggatgaagtcaggactcaccaacaacctgccactgcccccattggctttctaagcaggaagcaccagggaggaggggttagatagttggcatttgcaagcggtaaccaaatgcgcattccattgagtttgtatggtggctgctctttgcacaagctgtgtgcttatgaggtgttggtacttgtcgaggacagcaggggggtagcgtactcgtggtgttgcactatgttttgtttctttgttttatttttgagtgtttgatctgtttgagcctttgtgatccgagaaaataaaaataatatgagttacctttgttaattag

SEQ ID NO: 66037 - protein, 534 aa, Triticum aestivum
  peptide (1)..(534): Ceres Seq. ID no. 15169471
  misc_feature (75)..(511): Pfam Name: Class-II DAHP synthetase family Pfam Description: Class-II DAHP synthetase family
  misc_feature (75)..(518): Homolog of NCBI NO: 23472110 NR Description: hypothetical protein [Pseudomonas syringae pv.
  misc_feature (1)..(521): Homolog of NCBI NO: 15219878 NR Description: 2-dehydro-3-deoxyphosphoheptonate aldolase
  misc_feature (28)..(521): Homolog of NCBI NO: 2546988 NR Description: 2-dehydro-3-deoxyphosphoheptonate aldolase
  misc_feature (34)..(521): Homolog of NCBI NO: 2398679 NR Description: 3-deoxy-D-arabino-heptulosonate 7-phosphate
  misc_feature (34)..(521): Homolog of NCBI NO: 114193 NR Description: Phospho-2-dehydro-3-deoxyheptonate aldolase 1, precursor (Phospho-2-keto-3-deoxyheptonate aldolase 1) (DAHP
  misc_feature (34)..(524): Homolog of NCBI NO: 584778 NR Description: Phospho-2-dehydro-3-deoxyheptonate aldolase 2, precursor (Phospho-2-keto-3-deoxyheptonate aldolase 2) (DAHP
  misc_feature (34)..(521): Homolog of NCBI NO: 7488957 NR Description: probable 2-dehydro-3-deoxy-phosphoheptonate
  misc_feature (34)..(521): Homolog of NCBI NO: 24745903 NR Description: 3-deoxy-D-arabino-heptulosonate 7-phosphate
  misc_feature (34)..(521): Homolog of NCBI NO: 584777 NR Description: Phospho-2-dehydro-3-deoxyheptonate aldolase 1, precursor (Phospho-2-keto-3-deoxyheptonate aldolase 1) (DAHP
  misc_feature (1)..(534): Homolog of NCBI NO: 34906844 NR Description: putative phospho-2-dehydro-3-deoxyheptonate
MALATNTAAAAAALTGSAAQPRRAGFLPLKRRTISAVHAADPARSGASVPAAAAAKTSSPTVAPEAAAVTRPASWSVDSWRKKKALQLPEYPNKEELDAVLKTIETFPPIVFAGEARHLEDRLAEAAMGRAFVLQGGDCAESFKEFNANNIRDTFRVLLQMGAVLMFGGQVPVVKVGRMAGQFAKPRSDNFEEKDGVKLPSYRGDNVNGDAFDLKSRTPDPDRMIRAYAQSVATLNLLRAFATGGYAAMQRVIQWNLDFMDHNEQGDRYRELAHRVDEALGFMTAAGLGMDHPIMTTTDFWTSHECLLLPYEQALTREDSTSGLFYDCSAHMVWVGERTRQLDGAHVEFLRGIANPLGIKVSDKMNPAELVKLIDILNPSNKPGRITIITRMGAENMRVKLPHLIRAVRNSGQIVTWITDPMHGNTIKAPCGLKTRPFDSIMNEVRAFFDVHDQEGSHPGGIHLEMTGQNVTECIGGSRTVTFDDLGDRYHTHCDPRLNASQSLELAFIIAERLRKRRMKSGLTNNLPLPPLAF

SEQ ID NO: 66038 - protein, 407 aa, Triticum aestivum
  peptide (1)..(407): Ceres Seq. ID no. 15169472
  misc_feature (1)..(384): Pfam Name: Class-II DAHP synthetase family Pfam Description: Class-II DAHP synthetase family
  misc_feature (1)..(391): Homolog of NCBI NO: 23472110 NR Description: hypothetical protein [Pseudomonas syringae pv.
  misc_feature (1)..(394): Homolog of NCBI NO: 15219878 NR Description: 2-dehydro-3-deoxyphosphoheptonate aldolase
  misc_feature (1)..(394): Homolog of NCBI NO: 2546988 NR Description: 2-dehydro-3-deoxyphosphoheptonate aldolase
  misc_feature (1)..(394): Homolog of NCBI NO: 2398679 NR Description: 3-deoxy-D-arabino-heptulosonate 7-phosphate
  misc_feature (1)..(394): Homolog of NCBI NO: 114193 NR Description: Phospho-2-dehydro-3-deoxyheptonate aldolase 1, precursor (Phospho-2-keto-3-deoxyheptonate aldolase 1) (DAHP
  misc_feature (1)..(397): Homolog of NCBI NO: 584778 NR Description: Phospho-2-dehydro-3-deoxyheptonate aldolase 2, precursor (Phospho-2-keto-3-deoxyheptonate aldolase 2) (DAHP
  misc_feature (1)..(394): Homolog of NCBI NO: 7488957 NR Description: probable 2-dehydro-3-deoxy-phosphoheptonate
  misc_feature (1)..(394): Homolog of NCBI NO: 24745903 NR Description: 3-deoxy-D-arabino-heptulosonate 7-phosphate
  misc_feature (1)..(394): Homolog of NCBI NO: 584777 NR Description: Phospho-2-dehydro-3-deoxyheptonate aldolase 1, precursor (Phospho-2-keto-3-deoxyheptonate aldolase 1) (DAHP
  misc_feature (1)..(407): Homolog of NCBI NO: 34906844 NR Description: putative phospho-2-dehydro-3-deoxyheptonate
MGRAFVLQGGDCAESFKEFNANNIRDTFRVLLQMGAVLMFGGQVPVVKVGRMAGQFAKPRSDNFEEKDGVKLPSYRGDNVNGDAFDLKSRTPDPDRMIRAYAQSVATLNLLRAFATGGYAAMQRVIQWNLDFMDHNEQGDRYRELAHRVDEALGFMTAAGLGMDHPIMTTTDFWTSHECLLLPYEQALTREDSTSGLFYDCSAHMVWVGERTRQLDGAHVEFLRGIANPLGIKVSDKMNPAELVKLIDILNPSNKPGRITIITRMGAENMRVKLPHLIRAVRNSGQIVTWITDPMHGNTIKAPCGLKTRPFDSIMNEVRAFFDVHDQEGSHPGGIHLEMTGQNVTECIGGSRTVTFDDLGDRYHTHCDPRLNASQSLELAFIIAERLRKRRMKSGLTNNLPLPPLAF

SEQ ID NO: 66039 - protein, 374 aa, Triticum aestivum
  peptide (1)..(374): Ceres Seq. ID no. 15169473
  misc_feature (1)..(351): Pfam Name: Class-II DAHP synthetase family Pfam Description: Class-II DAHP synthetase family
  misc_feature (1)..(358): Homolog of NCBI NO: 23472110 NR Description: hypothetical protein [Pseudomonas syringae pv.
  misc_feature (1)..(361): Homolog of NCBI NO: 15219878 NR Description: 2-dehydro-3-deoxyphosphoheptonate aldolase
  misc_feature (1)..(361): Homolog of NCBI NO: 2546988 NR Description: 2-dehydro-3-deoxyphosphoheptonate aldolase
  misc_feature (1)..(361): Homolog of NCBI NO: 2398679 NR Description: 3-deoxy-D-arabino-heptulosonate 7-phosphate
  misc_feature (1)..(361): Homolog of NCBI NO: 114193 NR Description: Phospho-2-dehydro-3-deoxyheptonate aldolase 1, precursor (Phospho-2-keto-3-deoxyheptonate aldolase 1) (DAHP
  misc_feature (1)..(364): Homolog of NCBI NO: 584778 NR Description: Phospho-2-dehydro-3-deoxyheptonate aldolase 2, precursor (Phospho-2-keto-3-deoxyheptonate aldolase 2) (DAHP
  misc_feature (1)..(361): Homolog of NCBI NO: 7488957 NR Description: probable 2-dehydro-3-deoxy-phosphoheptonate
  misc_feature (1)..(361): Homolog of NCBI NO: 24745903 NR Description: 3-deoxy-D-arabino-heptulosonate 7-phosphate
  misc_feature (1)..(361): Homolog of NCBI NO: 584777 NR Description: Phospho-2-dehydro-3-deoxyheptonate aldolase 1, precursor (Phospho-2-keto-3-deoxyheptonate aldolase 1) (DAHP
  misc_feature (1)..(374): Homolog of NCBI NO: 34906844 NR Description: putative phospho-2-dehydro-3-deoxyheptonate
MGAVLMFGGQVPVVKVGRMAGQFAKPRSDNFEEKDGVKLPSYRGDNVNGDAFDLKSRTPDPDRMIRAYAQSVATLNLLRAFATGGYAAMQRVIQWNLDFMDHNEQGDRYRELAHRVDEALGFMTAAGLGMDHPIMTTTDFWTSHECLLLPYEQALTREDSTSGLFYDCSAHMVWVGERTRQLDGAHVEFLRGIANPLGIKVSDKMNPAELVKLIDILNPSNKPGRITIITRMGAENMRVKLPHLIRAVRNSGQIVTWITDPMHGNTIKAPCGLKTRPFDSIMNEVRAFFDVHDQEGSHPGGIHLEMTGQNVTECIGGSRTVTFDDLGDRYHTHCDPRLNASQSLELAFIIAERLRKRRMKSGLTNNLPLPPLAF

SEQ ID NO: 66040 - DNA, 1034 bp, Triticum aestivum
  misc_feature (1)..(1034): Ceres Seq. ID no. 12620250
ttccttcccaagaaaccctagatcaagtgctgccgcctccctctccccgatccagatccctcctccgacgcccctcctcccccatccccggccatcccccttccatcacccttaatgtcccagtcgccgctctctctctctctctccctctcggttcagtgagatgggatccactcccgcagccaccgccccaccctcacactcaccatcgacgacccccgccgccatcgcacaccatagcgccatcccctcaccctagccccaggtcaggcagtgcgaggcggcgctcctagacccgcgatggccgtctgggtcatcgccttcgaggacgacgagtacgccgacccggcagtcatcatcgcctccgagacggacgcgtgttggcggcacatggggcccacatcatcatggccgtgcgcaacctcgccgcggcagaggccgtgcgccaggtcgtccttgccgagacccccgtcgccagcctcaacctgatagagctggacctctccccactgacctccatccgcaacttcgccgccaacttcgccgacaggggcctaccgctgaacatcctcatgacaattcaacatacccctgccctttcggagagggaaggtttcccactcatggacacctagctgaatgcctgaacctgaacctcgtttttcttcttcttcttcttcttcttcttcttcttcttggtaattccttgttgattccttctgggcatgctatattattgggtgcaacaacaaattattgtccttgttttgatttccttcctgtcaagttcatcctttagtgctagtactagtggtacatcagtttgatttaggaaaaacaccagcctctgcttaacattaaatctagtcaagcaattgatgcacaacatatttgtttttgtacaacaacaatccgttaaacgatctggcctgtatacacatgttgaggaagagagagaggatatatacttgttctgttgcttctatatacatgtatatacgtttagtttttcaacatgcttcaacatttttttt

SEQ ID NO: 66041 - protein, 96 aa, Triticum aestivum
  peptide (1)..(96): Ceres Seq. ID no. 12620251
  misc_feature (11)..(85): Pfam Name: Extensin-like region Pfam Description: Extensin-like region
PSQETLDQVLPPPSPRSRSLLRRPSSPIPGHPPSITLNVPVAALSLSLPLGSVRWDPLPQPPPHPHTHHRRPPPPSHTIAPSPHPSPRSGSARRRS

SEQ ID NO: 66042 - protein, 75 aa, Triticum aestivum
  peptide (1)..(75): Ceres Seq. ID no. 12620252
  misc_feature (1)..(66): Homolog of NCBI NO: 15233666 NR Description: putative protein
  misc_feature (1)..(56): Homolog of NCBI NO: 37536622 NR Description: putative WW-domain oxidoreductase
  misc_feature (1)..(56): Homolog of NCBI NO: 37536620 NR Description: putative WW-domain oxidoreductase
  misc_feature (1)..(56): Homolog of NCBI NO: 30686197 NR Description: short-chain dehydrogenase/reductase family
  misc_feature (1)..(56): Homolog of NCBI NO: 18416145 NR Description: putative protein
  misc_feature (1)..(56): Homolog of NCBI NO: 15233359 NR Description: putative protein; protein id: At4g11410.1
  misc_feature (1)..(56): Homolog of NCBI NO: 7485551 NR Description: hypothetical protein F16G20.130 - Arabidopsis
  misc_feature (1)..(56): Homolog of NCBI NO: 23297050 NR Description: unknown protein [Arabidopsis thaliana]
  misc_feature (1)..(56): Homolog of NCBI NO: 34895876 NR Description: P0009G03.18 [Oryza sativa (japonica
  misc_feature (1)..(56): Homolog of NCBI NO: 24762219 NR Description: unknown protein [Arabidopsis thaliana]
MAVRNLAAAEAVRQVVLAETPVASLNLIELDLSPLTSIRNFAANFADRGLPLNILMTIQHTPALSEREGFPLMDT

SEQ ID NO: 66043 - protein, 62 aa, Triticum aestivum
  peptide (1)..(62): Ceres Seq. ID no. 12620253
  misc_feature (38)..(62): Homolog of NCBI NO: 20138131 NR Description: Vegetative cell wall protein gp1 precursor
MAVWVIAFEDDEYADPAVIIASETDACWRHMGPTSSWPCATSPRQRPCARSSLPRPPSPAST

SEQ ID NO: 66044 - DNA, 1021 bp, Triticum aestivum
  misc_feature (1)..(1021): Ceres Seq. ID no. 15224319
accgaagcccaacccgaaacaccacttctcccccaaagccgccgagcttgcctgcgcgcacacaatcgagcaacccagcacctccgccgcccgggaagcccaaaccaaaccctaagcctccgcgaccggccgccggcgatggcccgctacgaccgcgcgatcaccgtcttctcccccgacggccacctcttccaggtcgagtacgccctcgaggccgtccgcaagggcaacgccgccgtcggcgtccgcggcaccgacaccgtcgtcctcggcgtcgagaagaagtccacccccaagctccaggactccaggtccgtgcgcaagatcgcgagcctggacacgcacgtcgcgctggcgtgcgcggggctcaaggcggacgcgcgggtgctcatcaaccgcgcccgcgtcgagtgccagagccaccgcctcaccgtcgaggaccccgtcaccgtcgagtacatcacccgctacatcgccggcctgcagcagaagtacacccagagcggcggggtacgccccttcggcctctccaccctcatcgtcggcttcgatccatacacggacaagcccgccctgtaccagaccgacccctccggcaccttctccgcctggaaggccaacgccaccgggaggaactccaactccatgcgggagttcctggagaagaactacaaggacacatccggcaaggagaccatcaagctcaccatccgagcccttctagaggttgttgagagtggtgggaagaacatcgagattgcagtgatgacaaagaaggatggccttcggcaactcgaggagactgaaattgatgaatatgttgccgagattgaggcagagaaggccgcggctgaggctgcaaagaagagcggcccgaaggatacctaattactgggtgtgctatatcttcattctgtcggccgaaaccttttagtgtgtcactgttacgttccataactttctttaaactgctttaacaagatattgaagtcattcgtaaatgaattgccttgttttcttg

SEQ ID NO: 66045 - protein, 295 aa, Triticum aestivum
  peptide (1)..(295): Ceres Seq. ID no. 15224320
  misc_feature (73)..(256): Pfam Name: Proteasome A-type and B-type Pfam Description: Proteasome A-type and B-type
  misc_feature (48)..(295): Homolog of NCBI NO: 12229928 NR Description: Proteasome subunit alpha type 7 (Proteasome
  misc_feature (81)..(295): Homolog of NCBI NO: 14594917 NR Description: putative alpha4 proteasome subunit [Nicotiana
  misc_feature (47)..(280): Homolog of NCBI NO: 2511580 NR Description: multicatalytic endopeptidase [Arabidopsis
  misc_feature (47)..(295): Homolog of NCBI NO: 21593040 NR Description: multicatalytic endopeptidase complex  alpha chain
  misc_feature (47)..(295): Homolog of NCBI NO: 15230435 NR Description: 20S proteasome alpha subunit D (PAD1)
  misc_feature (47)..(289): Homolog of NCBI NO: 3334299 NR Description: Proteasome subunit alpha type 7 (20S proteasome
  misc_feature (47)..(295): Homolog of NCBI NO: 15239271 NR Description: 20S proteasome alpha subunit D2 (PAD2)
  misc_feature (47)..(295): Homolog of NCBI NO: 12229936 NR Description: Proteasome subunit alpha type 7 (20S proteasome
  misc_feature (47)..(295): Homolog of NCBI NO: 12644044 NR Description: Proteasome subunit alpha type 7 (20S proteasome
  misc_feature (47)..(295): Homolog of NCBI NO: 7435885 NR Description: probable C 3.4.25.1 proteasome endopeptidase
TEAQPETPLLPQSRRACLRAHNRATQHLRRPGSPNQTLSLRDRPPAMARYDRAITVFSPDGHLFQVEYALEAVRKGNAAVGVRGTDTVVLGVEKKSTPKLQDSRSVRKIASLDTHVALACAGLKADARVLINRARVECQSHRLTVEDPVTVEYITRYIAGLQQKYTQSGGVRPFGLSTLIVGFDPYTDKPALYQTDPSGTFSAWKANATGRNSNSMREFLEKNYKDTSGKETIKLTIRALLEVVESGGKNIEIAVMTKKDGLRQLEETEIDEYVAEIEAEKAAAEAAKKSGPKDT

SEQ ID NO: 66046 - protein, 249 aa, Triticum aestivum
  peptide (1)..(249): Ceres Seq. ID no. 15224321
  misc_feature (27)..(210): Pfam Name: Proteasome A-type and B-type Pfam Description: Proteasome A-type and B-type
  misc_feature (2)..(249): Homolog of NCBI NO: 12229928 NR Description: Proteasome subunit alpha type 7 (Proteasome
  misc_feature (35)..(249): Homolog of NCBI NO: 14594917 NR Description: putative alpha4 proteasome subunit [Nicotiana
  misc_feature (1)..(234): Homolog of NCBI NO: 2511580 NR Description: multicatalytic endopeptidase [Arabidopsis
  misc_feature (1)..(249): Homolog of NCBI NO: 21593040 NR Description: multicatalytic endopeptidase complex  alpha chain
  misc_feature (1)..(249): Homolog of NCBI NO: 15230435 NR Description: 20S proteasome alpha subunit D (PAD1)
  misc_feature (1)..(243): Homolog of NCBI NO: 3334299 NR Description: Proteasome subunit alpha type 7 (20S proteasome
  misc_feature (1)..(249): Homolog of NCBI NO: 15239271 NR Description: 20S proteasome alpha subunit D2 (PAD2)
  misc_feature (1)..(249): Homolog of NCBI NO: 12229936 NR Description: Proteasome subunit alpha type 7 (20S proteasome
  misc_feature (1)..(249): Homolog of NCBI NO: 12644044 NR Description: Proteasome subunit alpha type 7 (20S proteasome
  misc_feature (1)..(249): Homolog of NCBI NO: 7435885 NR Description: probable C 3.4.25.1 proteasome endopeptidase
MARYDRAITVFSPDGHLFQVEYALEAVRKGNAAVGVRGTDTVVLGVEKKSTPKLQDSRSVRKIASLDTHVALACAGLKADARVLINRARVECQSHRLTVEDPVTVEYITRYIAGLQQKYTQSGGVRPFGLSTLIVGFDPYTDKPALYQTDPSGTFSAWKANATGRNSNSMREFLEKNYKDTSGKETIKLTIRALLEVVESGGKNIEIAVMTKKDGLRQLEETEIDEYVAEIEAEKAAAEAAKKSGPKDT

SEQ ID NO: 66047 - protein, 243 aa, Triticum aestivum
  peptide (1)..(243): Ceres Seq. ID no. 15224322
  misc_feature (7)..(117): Pfam Name: 7 transmembrane receptor (rhodopsin family) Pfam Description: 7 transmembrane receptor (rhodopsin family)
  misc_feature (10)..(65): Homolog of NCBI NO: 5305335 NR Description: proline-rich mucin homolog [Mycobacterium
  misc_feature (9)..(64): Homolog of NCBI NO: 5305335 NR Description: proline-rich mucin homolog [Mycobacterium
  misc_feature (2)..(69): Homolog of NCBI NO: 5305335 NR Description: proline-rich mucin homolog [Mycobacterium
  misc_feature (3)..(64): Homolog of NCBI NO: 5305335 NR Description: proline-rich mucin homolog [Mycobacterium
  misc_feature (2)..(39): Homolog of NCBI NO: 22970264 NR Description: hypothetical protein [Chloroflexus aurantiacus]
  misc_feature (1)..(69): Homolog of NCBI NO: 7446482 NR Description: probable cell wall-plasma membrane linker protein
  misc_feature (2)..(40): Homolog of NCBI NO: 188864 NR Description: mucin
RSPTRNTTSPPKPPSLPARTQSSNPAPPPPGKPKPNPKPPRPAAGDGPLRPRDHRLLPRRPPLPGRVRPRGRPQGQRRRRRPRHRHRRPRRREEVHPQAPGLQVRAQDREPGHARRAGVRGAQGGRAGAHQPRPRRVPEPPPHRRGPRHRRVHHPLHRRPAAEVHPERRGTPLRPLHPHRRLRSIHGQARPVPDRPLRHLLRLEGQRHREELQLHAGVPGEELQGHIRQGDHQAHHPSPSRGC

SEQ ID NO: 66048 - DNA, 893 bp, Triticum aestivum
  misc_feature (1)..(893): Ceres Seq. ID no. 12619664
ctgacactagctatctcctacccacctatcccccgtccgtccgcccgtctaggtctctggagaagcggcgatggcggcgcccgtgacggtgtacgggccggcgatctcgccggcggtggcgcgcgtggcggcgtgcctgctggagaaggacgtgccgttccagctcgaggcggtggacatgtccaagggcgagcacaagtccccctccttcctcaagctccagcccttcggccaggtccccgccttcaaagaccacctcaccaccgtcttcgagtcaagggccatttgccgttacatctgtgaccagtactccgaccgtggcaaccagactctcctaggccggaaagaagacggcgcggtaggccgcgctgccatcgagcaatgggtagagtccgaaggccaagcatttaacccgccgagcttggccatcgcattccagctcaccttcgcgcctctcatgggcatggccaccgacatggccgtggtggagcagaatgaggcgaagctcgccaaggtgctcgacgtgtatgagcggcggctggcggagagccagtatttcgccggcgacgagttcacccttgccgaccttgtgcacatgcccaacactgatctcctcgtgagcaaggccggcaaggcgggtctgatcaccgagagaaagaatctgtccagatggtgggatgaggtctcggctcgtccgtcatggaagaaggttgtcgagttgcagagtgtaccacggccctctaaagcttgagggccccttcagtttttttagccgagcagcttctggtggcaattagtcacattctgttatgtgttgccatcactcctaaatgttattgtgttgtgaaagactcgggctgctttgtacaatatgttatcctgctatctatcgc

SEQ ID NO: 66049 - protein, 226 aa, Triticum aestivum
  peptide (1)..(226): Ceres Seq. ID no. 12619665
  misc_feature (7)..(221): Homolog of NCBI NO: 21217741 NR Description: putative glutathione S-transferase [Phaseolus
  misc_feature (1)..(169): Homolog of NCBI NO: 11385471 NR Description: glutathione S-transferase GST 10 [Zea mays]
  misc_feature (1)..(224): Homolog of NCBI NO: 11177845 NR Description: putative glutathione S-transferase OsGSTF3
  misc_feature (1)..(224): Homolog of NCBI NO: 22758267 NR Description: Putative glutathione S-transferase
MAAPVTVYGPAISPAVARVAACLLEKDVPFQLEAVDMSKGEHKSPSFLKLQPFGQVPAFKDHLTTVFESRAICRYICDQYSDRGNQTLLGRKEDGAVGRAAIEQWVESEGQAFNPPSLAIAFQLTFAPLMGMATDMAVVEQNEAKLAKVLDVYERRLAESQYFAGDEFTLADLVHMPNTDLLVSKAGKAGLITERKNLSRWWDEVSARPSWKKVVELQSVPRPSKA

SEQ ID NO: 66050 - protein, 190 aa, Triticum aestivum
  peptide (1)..(190): Ceres Seq. ID no. 12619666
  misc_feature (1)..(185): Homolog of NCBI NO: 21217741 NR Description: putative glutathione S-transferase [Phaseolus
  misc_feature (1)..(133): Homolog of NCBI NO: 11385471 NR Description: glutathione S-transferase GST 10 [Zea mays]
  misc_feature (1)..(188): Homolog of NCBI NO: 11177845 NR Description: putative glutathione S-transferase OsGSTF3
  misc_feature (1)..(188): Homolog of NCBI NO: 22758267 NR Description: Putative glutathione S-transferase
MSKGEHKSPSFLKLQPFGQVPAFKDHLTTVFESRAICRYICDQYSDRGNQTLLGRKEDGAVGRAAIEQWVESEGQAFNPPSLAIAFQLTFAPLMGMATDMAVVEQNEAKLAKVLDVYERRLAESQYFAGDEFTLADLVHMPNTDLLVSKAGKAGLITERKNLSRWWDEVSARPSWKKVVELQSVPRPSKA

SEQ ID NO: 66051 - DNA, 1581 bp, Triticum aestivum
  misc_feature (1)..(1581): Ceres Seq. ID no. 13657915
aaaaatccgacaatccatggggcgtagagaagacgagagaatcccgtactttcacgccaaggcaagcaaccggccgcccgcccgccgccatcaccaccgtcctccccacggtactccggttccaagttccgtatccggccctgcatggcctaaatcaccatccctccacgcctctgcttagtgagctcttgcttgccgtacatacatgccgatgagctcctcgccggcggtcgcggtcgcggtcgcgtctgcggccgtggtagcgctggctgtcgctaaccgcgtgctctataagctcgcgctggtgcccctcaagtcctatcccttcctcctcgctcagctcaccacgttcgggtacgtcacggtgtacttttcaatactctatgcgaggtaccgcgcgggggtggtgacgcgggacatgctgacactgccgaagatccggttcgctgtcatcggcttgctagaggctcttggggtcgccgctggaatgtctgcgggagctatgctgcctggccctgctattcctatactgtctcagtctttcctggtgtggcagcttatcttctctgtgttgcttttgggaaagacctactctctgagacaaatcattggttgcttgcttgtaacttctggtgtgattcttgctgttgcgagtggggcaaatgatggtcatcttctatctggagtcaagttaatttggccattgctgatggttgtttcatcggcattccaagctggtgcatccattttgaaggggaaacggcctgacatcttcgtggttaattcattcggatctgggtttcaggctcttgttgtcttccttcttctcccattactttctaatttgagggggattaagcttgctgagctttctggccatttaaatggtggtgctgagtgcttcttaaatgttggggagagcccaattgattgtggaggtgctccattcctaccattgctttttatattcgtaaacatggctttcaacatctcgttgcttaatttggtaaagatgtcgtctgccgtggttgcttcacttacagcaacttccgccgtgccaatatcaatctacatcctttctcttcctttgccctacatccctcaaggcgcggaattaagcgcttcttttatcttcggtggcattgtattgttgatgggcctaattctgtataaccttccccaatcatctaaagagtcaaagactgactaaaagcttatggcgattgagtgtatattaccacttcaaccgaaaatcaattattggtttggtcctgaagctaatattaggtttctagattggtgacgccagagtcgataaggactgtttgttgggatgcatgaatgcttggtatttctaatwtktgtcagagaatagkactastagtaaaaaaaaaaaaaaaaaaaaaaaaaaaaaaaaaaaaaaaaaaaaaaaaaaaaaaaaaaaaaaaaaaaaaaaaaaaaaaaaaaaaaaaaaaaaaaaaaaaaaaaaaaaaaaaamcccccaaaaaaaaaaaaaaaattttttttttcccccccccccccgggggggggsssssssccccctyyyccccwwaggggggg

SEQ ID NO: 66052 - protein, 334 aa, Triticum aestivum
  peptide (1)..(334): Ceres Seq. ID no. 15219893
  misc_feature (5)..(236): Homolog of NCBI NO: 11139714 NR Description: putative transporter protein SSA662
  misc_feature (6)..(99): Homolog of NCBI NO: 20161872 NR Description: B1139B11.13 [Oryza sativa (japonica
  misc_feature (72)..(334): Homolog of NCBI NO: 15239887 NR Description: expressed protein [Arabidopsis thaliana]
  misc_feature (11)..(149): Homolog of NCBI NO: 28973717 NR Description: unknown protein [Arabidopsis thaliana]
  misc_feature (11)..(285): Homolog of NCBI NO: 7487326 NR Description: hypothetical protein T22A6.290 - Arabidopsis
  misc_feature (11)..(334): Homolog of NCBI NO: 21536591 NR Description: unknown [Arabidopsis thaliana]
  misc_feature (11)..(334): Homolog of NCBI NO: 20260240 NR Description: unknown protein [Arabidopsis thaliana]
  misc_feature (11)..(331): Homolog of NCBI NO: 18419900 NR Description: expressed protein [Arabidopsis thaliana]
  misc_feature (11)..(331): Homolog of NCBI NO: 21553716 NR Description: unknown [Arabidopsis thaliana]
  misc_feature (11)..(333): Homolog of NCBI NO: 30686536 NR Description: expressed protein [Arabidopsis thaliana]
MPMSSSPAVAVAVASAAVVALAVANRVLYKLALVPLKSYPFLLAQLTTFGYVTVYFSILYARYRAGVVTRDMLTLPKIRFAVIGLLEALGVAAGMSAGAMLPGPAIPILSQSFLVWQLIFSVLLLGKTYSLRQIIGCLLVTSGVILAVASGANDGHLLSGVKLIWPLLMVVSSAFQAGASILKGKRPDIFVVNSFGSGFQALVVFLLLPLLSNLRGIKLAELSGHLNGGAECFLNVGESPIDCGGAPFLPLLFIFVNMAFNISLLNLVKMSSAVVASLTATSAVPISIYILSLPLPYIPQGAELSASFIFGGIVLLMGLILYNLPQSSKESKTD

SEQ ID NO: 66053 - protein, 332 aa, Triticum aestivum
  peptide (1)..(332): Ceres Seq. ID no. 15219894
  misc_feature (3)..(234): Homolog of NCBI NO: 11139714 NR Description: putative transporter protein SSA662
  misc_feature (4)..(97): Homolog of NCBI NO: 20161872 NR Description: B1139B11.13 [Oryza sativa (japonica
  misc_feature (70)..(332): Homolog of NCBI NO: 15239887 NR Description: expressed protein [Arabidopsis thaliana]
  misc_feature (9)..(147): Homolog of NCBI NO: 28973717 NR Description: unknown protein [Arabidopsis thaliana]
  misc_feature (9)..(283): Homolog of NCBI NO: 7487326 NR Description: hypothetical protein T22A6.290 - Arabidopsis
  misc_feature (9)..(332): Homolog of NCBI NO: 21536591 NR Description: unknown [Arabidopsis thaliana]
  misc_feature (9)..(332): Homolog of NCBI NO: 20260240 NR Description: unknown protein [Arabidopsis thaliana]
  misc_feature (9)..(329): Homolog of NCBI NO: 18419900 NR Description: expressed protein [Arabidopsis thaliana]
  misc_feature (9)..(329): Homolog of NCBI NO: 21553716 NR Description: unknown [Arabidopsis thaliana]
  misc_feature (9)..(331): Homolog of NCBI NO: 30686536 NR Description: expressed protein [Arabidopsis thaliana]
MSSSPAVAVAVASAAVVALAVANRVLYKLALVPLKSYPFLLAQLTTFGYVTVYFSILYARYRAGVVTRDMLTLPKIRFAVIGLLEALGVAAGMSAGAMLPGPAIPILSQSFLVWQLIFSVLLLGKTYSLRQIIGCLLVTSGVILAVASGANDGHLLSGVKLIWPLLMVVSSAFQAGASILKGKRPDIFVVNSFGSGFQALVVFLLLPLLSNLRGIKLAELSGHLNGGAECFLNVGESPIDCGGAPFLPLLFIFVNMAFNISLLNLVKMSSAVVASLTATSAVPISIYILSLPLPYIPQGAELSASFIFGGIVLLMGLILYNLPQSSKESKTD

SEQ ID NO: 66054 - protein, 263 aa, Triticum aestivum
  peptide (1)..(263): Ceres Seq. ID no. 15219895
  misc_feature (1)..(165): Homolog of NCBI NO: 11139714 NR Description: putative transporter protein SSA662
  misc_feature (1)..(28): Homolog of NCBI NO: 20161872 NR Description: B1139B11.13 [Oryza sativa (japonica
  misc_feature (1)..(263): Homolog of NCBI NO: 15239887 NR Description: expressed protein [Arabidopsis thaliana]
  misc_feature (1)..(78): Homolog of NCBI NO: 28973717 NR Description: unknown protein [Arabidopsis thaliana]
  misc_feature (1)..(214): Homolog of NCBI NO: 7487326 NR Description: hypothetical protein T22A6.290 - Arabidopsis
  misc_feature (1)..(263): Homolog of NCBI NO: 21536591 NR Description: unknown [Arabidopsis thaliana]
  misc_feature (1)..(263): Homolog of NCBI NO: 20260240 NR Description: unknown protein [Arabidopsis thaliana]
  misc_feature (1)..(260): Homolog of NCBI NO: 18419900 NR Description: expressed protein [Arabidopsis thaliana]
  misc_feature (1)..(260): Homolog of NCBI NO: 21553716 NR Description: unknown [Arabidopsis thaliana]
  misc_feature (1)..(262): Homolog of NCBI NO: 30686536 NR Description: expressed protein [Arabidopsis thaliana]
MLTLPKIRFAVIGLLEALGVAAGMSAGAMLPGPAIPILSQSFLVWQLIFSVLLLGKTYSLRQIIGCLLVTSGVILAVASGANDGHLLSGVKLIWPLLMVVSSAFQAGASILKGKRPDIFVVNSFGSGFQALVVFLLLPLLSNLRGIKLAELSGHLNGGAECFLNVGESPIDCGGAPFLPLLFIFVNMAFNISLLNLVKMSSAVVASLTATSAVPISIYILSLPLPYIPQGAELSASFIFGGIVLLMGLILYNLPQSSKESKTD

SEQ ID NO: 66055 - DNA, 724 bp, Triticum aestivum
  misc_feature (1)..(724): Ceres Seq. ID no. 13657920
atgtccatcaaccatcaaggcaataatccacgtacggttgtgagcggttcaccagcaagatacatagaggttacagagaagccagcagcagcaagcaagattgagcattcacggatggtggccggggccgtggtgcaggcgtcatcggtgttcgccgccttcgacaaggacggcgacggcaaggtgtcggccgccgagctgcgcggctccatgatggcggcgctgggcgaggaggtttccgaggaggaggccgcggcgatcctggccacggtggacgccgacggcgacgggctgctggaccaggaggagttctcccggctcgggctcggcgccgccggagacaacggtggggcggccggagacgacgacgacgacgaggtgaggcggcggtgcctgaaggaggcgttcgccatgtacgcgacggggggcggcgaggagggcgccaggatcacgccggcgagcctgaggcggatgctgggcaagctgctggggtccgagaagatggggctggaggagtgcagggccatgatctgcaggtttgacctcaacggcgacggcgtcctctccttcgacgagttcagggtcatgatgatggccaatttgtaaaggaaggatggtttcatttcattcgttcgcttttctcttctgtatttttgacatgtggttgcagttgttcacatgatggacgtttcaattgtatgttgaggcttgggtgtgatgcttg

SEQ ID NO: 66056 - protein, 201 aa, Triticum aestivum
  peptide (1)..(201): Ceres Seq. ID no. 13657921
  misc_feature (172)..(199): Pfam Name: EF hand Pfam Description: EF hand
  misc_feature (38)..(197): Homolog of NCBI NO: 15240340 NR Description: calmodulin-related protein 2, touch-induced
  misc_feature (50)..(197): Homolog of NCBI NO: 19386815 NR Description: B1147A04.10 [Oryza sativa (japonica
  misc_feature (50)..(107): Homolog of NCBI NO: 15723363 NR Description: calmodulin-like protein [Musa acuminata]
  misc_feature (122)..(197): Homolog of NCBI NO: 15723363 NR Description: calmodulin-like protein [Musa acuminata]
  misc_feature (44)..(197): Homolog of NCBI NO: 21618164 NR Description: putative calmodulin [Arabidopsis thaliana]
  misc_feature (44)..(197): Homolog of NCBI NO: 15238951 NR Description: calmodulin-related protein, putative [Arabidopsis
  misc_feature (49)..(197): Homolog of NCBI NO: 15223120 NR Description: calmodulin-related protein, putative [Arabidopsis
  misc_feature (39)..(199): Homolog of NCBI NO: 20161870 NR Description: B1139B11.11 [Oryza sativa (japonica
  misc_feature (41)..(199): Homolog of NCBI NO: 20161868 NR Description: B1139B11.9 [Oryza sativa (japonica
  misc_feature (50)..(199): Homolog of NCBI NO: 20161869 NR Description: B1139B11.10 [Oryza sativa (japonica
MSINHQGNNPRTVVSGSPARYIEVTEKPAAASKIEHSRMVAGAVVQASSVFAAFDKDGDGKVSAAELRGSMMAALGEEVSEEEAAAILATVDADGDGLLDQEEFSRLGLGAAGDNGGAAGDDDDDEVRRRCLKEAFAMYATGGGEEGARITPASLRRMLGKLLGSEKMGLEECRAMICRFDLNGDGVLSFDEFRVMMMANL

SEQ ID NO: 66057 - protein, 163 aa, Triticum aestivum
  peptide (1)..(163): Ceres Seq. ID no. 13657922
  misc_feature (134)..(161): Pfam Name: EF hand Pfam Description: EF hand
  misc_feature (1)..(159): Homolog of NCBI NO: 15240340 NR Description: calmodulin-related protein 2, touch-induced
  misc_feature (12)..(159): Homolog of NCBI NO: 19386815 NR Description: B1147A04.10 [Oryza sativa (japonica
  misc_feature (12)..(69): Homolog of NCBI NO: 15723363 NR Description: calmodulin-like protein [Musa acuminata]
  misc_feature (84)..(159): Homolog of NCBI NO: 15723363 NR Description: calmodulin-like protein [Musa acuminata]
  misc_feature (6)..(159): Homolog of NCBI NO: 21618164 NR Description: putative calmodulin [Arabidopsis thaliana]
  misc_feature (6)..(159): Homolog of NCBI NO: 15238951 NR Description: calmodulin-related protein, putative [Arabidopsis
  misc_feature (11)..(159): Homolog of NCBI NO: 15223120 NR Description: calmodulin-related protein, putative [Arabidopsis
  misc_feature (1)..(161): Homolog of NCBI NO: 20161870 NR Description: B1139B11.11 [Oryza sativa (japonica
  misc_feature (3)..(161): Homolog of NCBI NO: 20161868 NR Description: B1139B11.9 [Oryza sativa (japonica
  misc_feature (12)..(161): Homolog of NCBI NO: 20161869 NR Description: B1139B11.10 [Oryza sativa (japonica
MVAGAVVQASSVFAAFDKDGDGKVSAAELRGSMMAALGEEVSEEEAAAILATVDADGDGLLDQEEFSRLGLGAAGDNGGAAGDDDDDEVRRRCLKEAFAMYATGGGEEGARITPASLRRMLGKLLGSEKMGLEECRAMICRFDLNGDGVLSFDEFRVMMMANL

SEQ ID NO: 66058 - protein, 131 aa, Triticum aestivum
  peptide (1)..(131): Ceres Seq. ID no. 13657923
  misc_feature (102)..(129): Pfam Name: EF hand Pfam Description: EF hand
  misc_feature (1)..(127): Homolog of NCBI NO: 15240340 NR Description: calmodulin-related protein 2, touch-induced
  misc_feature (1)..(127): Homolog of NCBI NO: 19386815 NR Description: B1147A04.10 [Oryza sativa (japonica
  misc_feature (1)..(37): Homolog of NCBI NO: 15723363 NR Description: calmodulin-like protein [Musa acuminata]
  misc_feature (52)..(127): Homolog of NCBI NO: 15723363 NR Description: calmodulin-like protein [Musa acuminata]
  misc_feature (1)..(127): Homolog of NCBI NO: 21618164 NR Description: putative calmodulin [Arabidopsis thaliana]
  misc_feature (1)..(127): Homolog of NCBI NO: 15238951 NR Description: calmodulin-related protein, putative [Arabidopsis
  misc_feature (1)..(127): Homolog of NCBI NO: 15223120 NR Description: calmodulin-related protein, putative [Arabidopsis
  misc_feature (1)..(129): Homolog of NCBI NO: 20161870 NR Description: B1139B11.11 [Oryza sativa (japonica
  misc_feature (1)..(129): Homolog of NCBI NO: 20161868 NR Description: B1139B11.9 [Oryza sativa (japonica
  misc_feature (1)..(129): Homolog of NCBI NO: 20161869 NR Description: B1139B11.10 [Oryza sativa (japonica
MMAALGEEVSEEEAAAILATVDADGDGLLDQEEFSRLGLGAAGDNGGAAGDDDDDEVRRRCLKEAFAMYATGGGEEGARITPASLRRMLGKLLGSEKMGLEECRAMICRFDLNGDGVLSFDEFRVMMMANL

SEQ ID NO: 66059 - DNA, 810 bp, Triticum aestivum
  misc_feature (1)..(810): Ceres Seq. ID no. 13657924
catccccaactggcaacgtgccaccatcccgccctcaaccggcgaccggagacgccgccccgccccgccaccggccgccgccgttcccgccgcatcatcgaccgcgccgctgccgccccgccaccgaccgctgtcgccgccgcccaccatcgaccgccgttgccgccccgtccccaacaggagacgctgccgccgccggagacccgctacaccgcgccacctacggaggccctgttttctgtgccgtcgcgcctccaatggccaggatccgcgccgccacgcctccattggcctggatccgcaccgccgcgcaccgaaacagggcccgtccacctctgccgcaacagtctaccctcccgcagctgggggcgcgtgtgatggctgccatcggtggcagcgtgcccagatgcctccctcccccacggtgcagcaagctcgaggccgtcaccagactcccacctggtcgtggacatctcccctcctgccgctgcacgggctccaccatggacgcccccactcctccaccccccgagatttctgcacctacatacggccgtgatctgctgcccacccgtggttgcgtcgagcaacatcttgtgctccccaacgcgtgaggtgctgctgcctgctagtgctacaagcacgcgagttacgtaccctacctctctctcggatcagtgcaacaaggagcctcgtactttgatgatgaattagttgtacacgagcgtgttgtccatgagtacgttggtgcagatctcatgtgcttttgtatgcacgtgtgatgatgaattggttgagcattgcacccct

SEQ ID NO: 66060 - protein, 203 aa, Triticum aestivum
  peptide (1)..(203): Ceres Seq. ID no. 13657925
  misc_feature (2)..(176): Homolog of NCBI NO: 15145793 NR Description: basic proline-rich protein [Sus scrofa]
SPTGNVPPSRPQPATGDAAPPRHRPPPFPPHHRPRRCRPATDRCRRRPPSTAVAAPSPTGDAAAAGDPLHRATYGGPVFCAVAPPMARIRAATPPLAWIRTAAHRNRARPPLPQQSTLPQLGARVMAAIGGSVPRCLPPPRCSKLEAVTRLPPGRGHLPSCRCTGSTMDAPTPPPPEISAPTYGRDLLPTRGCVEQHLVLPNA

SEQ ID NO: 66061 - protein, 185 aa, Triticum aestivum
  peptide (1)..(185): Ceres Seq. ID no. 13657926
IPNWQRATIPPSTGDRRRRPAPPPAAAVPAASSTAPLPPRHRPLSPPPTIDRRCRPVPNRRRCRRRRPATPRHLRRPCFLCRRASNGQDPRRHASIGLDPHRRAPKQGPSTSAATVYPPAAGGACDGCHRWQRAQMPPSPTVQQARGRHQTPTWSWTSPLLPLHGLHHGRPHSSTPRDFCTYIRP

SEQ ID NO: 66062 - protein, 125 aa, Triticum aestivum
  peptide (1)..(125): Ceres Seq. ID no. 13657927
HPQLATCHHPALNRRPETPPRPATGRRRSRRIIDRAAAAPPPTAVAAAHHRPPLPPRPQQETLPPPETRYTAPPTEALFSVPSRLQWPGSAPPRLHWPGSAPPRTETGPVHLCRNSLPSRSWGRV

SEQ ID NO: 66063 - protein, 118 aa, Triticum aestivum
  peptide (1)..(118): Ceres Seq. ID no. 13657928
  misc_feature (1)..(91): Homolog of NCBI NO: 15145793 NR Description: basic proline-rich protein [Sus scrofa]
MARIRAATPPLAWIRTAAHRNRARPPLPQQSTLPQLGARVMAAIGGSVPRCLPPPRCSKLEAVTRLPPGRGHLPSCRCTGSTMDAPTPPPPEISAPTYGRDLLPTRGCVEQHLVLPNA

SEQ ID NO: 66064 - DNA, 818 bp, Triticum aestivum
  misc_feature (1)..(818): Ceres Seq. ID no. 15225989
cccctcccattccgcctcctgttgcttcgaactatggcagcagcagctgccggtgctgcatcggccgccgccgcgccagctacgcatcacgccgaccactccatgaacgccctccgctccaccgccttccgccgctccaccctccattgggacgccgccgcggccttcttttccccgcccttccgctctcgccgctgccaccgacgtgtcttgctccctcctgccgcggcgctgcccgcgaagtcccgctccagggccaaggctaagctcctggcggacgcgggggctgtggacccctggctcgcctccctctccctgctccccgccggcggcggcggctacggcggccagcgcggcggtggcggaggctacggcggcggcggcggctacggaggcggcggcggctacggcggtggtggcggctacggcggccagcgcggcggtggcggcggcgactccggcggccagtggaggaactgagcctcgaatctcccagttatcgatctatctaccgtgtcgtcgtcgtcgtcgtcgtcttcgtcagcaagttatcttcggtgtcgtcgtgttcctgtgtcagtctgagtcgtcgtgtgtgtggtgtttttgatcgcgagctcgagtgtcgctctgtccggggttaattagagctggttacgcgaggaagaaacaacatgtgttactatctttcagtcggtcggtcggtcggtcagtcggtgatgcagcaatccccttctgtcatggattgggatgtgatgttggaatatcctatgtttgaacaagtttaaatggatgaagaaaatgcaagtcatagctgc

SEQ ID NO: 66065 - protein, 159 aa, Triticum aestivum
  peptide (1)..(159): Ceres Seq. ID no. 15225990
  misc_feature (93)..(152): Pfam Name: Herpesvirus large structural phosphoprotein UL32 Pfam Description: Herpesvirus large structural phosphoprotein UL32
  misc_feature (110)..(159): Homolog of NCBI NO: 20257673 NR Description: glycine-rich RNA binding protein [Zea mays]
  misc_feature (110)..(159): Homolog of NCBI NO: 7439972 NR Description: glycine-rich RNA binding protein - maize
  misc_feature (110)..(159): Homolog of NCBI NO: 544423 NR Description: Glycine-rich RNA-binding protein 2
  misc_feature (110)..(159): Homolog of NCBI NO: 1076731 NR Description: RNA binding protein - barley
  misc_feature (110)..(155): Homolog of NCBI NO: 1076731 NR Description: RNA binding protein - barley
  misc_feature (110)..(159): Homolog of NCBI NO: 2331131 NR Description: glycine-rich protein [Oryza sativa]
  misc_feature (110)..(159): Homolog of NCBI NO: 82696 NR Description: glycine-rich protein - maize
  misc_feature (110)..(155): Homolog of NCBI NO: 7439981 NR Description: glycine-rich RNA-binding protein GRP1 - wheat
  misc_feature (110)..(159): Homolog of NCBI NO: 7439981 NR Description: glycine-rich RNA-binding protein GRP1 - wheat
  misc_feature (14)..(112): Homolog of NCBI NO: 34903152 NR Description: unnamed protein product [Oryza sativa (japonica
PLPFRLLLLRTMAAAAAGAASAAAAPATHHADHSMNALRSTAFRRSTLHWDAAAAFFSPPFRSRRCHRRVLLPPAAALPAKSRSRAKAKLLADAGAVDPWLASLSLLPAGGGGYGGQRGGGGGYGGGGGYGGGGGYGGGGGYGGQRGGGGGDSGGQWRN

SEQ ID NO: 66066 - protein, 148 aa, Triticum aestivum
  peptide (1)..(148): Ceres Seq. ID no. 15225991
  misc_feature (82)..(141): Pfam Name: Herpesvirus large structural phosphoprotein UL32 Pfam Description: Herpesvirus large structural phosphoprotein UL32
  misc_feature (99)..(148): Homolog of NCBI NO: 20257673 NR Description: glycine-rich RNA binding protein [Zea mays]
  misc_feature (99)..(148): Homolog of NCBI NO: 7439972 NR Description: glycine-rich RNA binding protein - maize
  misc_feature (99)..(148): Homolog of NCBI NO: 544423 NR Description: Glycine-rich RNA-binding protein 2
  misc_feature (99)..(148): Homolog of NCBI NO: 1076731 NR Description: RNA binding protein - barley
  misc_feature (99)..(144): Homolog of NCBI NO: 1076731 NR Description: RNA binding protein - barley
  misc_feature (99)..(148): Homolog of NCBI NO: 2331131 NR Description: glycine-rich protein [Oryza sativa]
  misc_feature (99)..(148): Homolog of NCBI NO: 82696 NR Description: glycine-rich protein - maize
  misc_feature (99)..(144): Homolog of NCBI NO: 7439981 NR Description: glycine-rich RNA-binding protein GRP1 - wheat
  misc_feature (99)..(148): Homolog of NCBI NO: 7439981 NR Description: glycine-rich RNA-binding protein GRP1 - wheat
  misc_feature (3)..(101): Homolog of NCBI NO: 34903152 NR Description: unnamed protein product [Oryza sativa (japonica
MAAAAAGAASAAAAPATHHADHSMNALRSTAFRRSTLHWDAAAAFFSPPFRSRRCHRRVLLPPAAALPAKSRSRAKAKLLADAGAVDPWLASLSLLPAGGGGYGGQRGGGGGYGGGGGYGGGGGYGGGGGYGGQRGGGGGDSGGQWRN

SEQ ID NO: 66067 - protein, 125 aa, Triticum aestivum
  peptide (1)..(125): Ceres Seq. ID no. 15225992
  misc_feature (59)..(118): Pfam Name: Herpesvirus large structural phosphoprotein UL32 Pfam Description: Herpesvirus large structural phosphoprotein UL32
  misc_feature (76)..(125): Homolog of NCBI NO: 20257669 NR Description: glycine-rich RNA binding protein [Zea mays]
  misc_feature (76)..(125): Homolog of NCBI NO: 7439972 NR Description: glycine-rich RNA binding protein - maize
  misc_feature (76)..(125): Homolog of NCBI NO: 544423 NR Description: Glycine-rich RNA-binding protein 2
  misc_feature (76)..(125): Homolog of NCBI NO: 1076731 NR Description: RNA binding protein - barley
  misc_feature (76)..(121): Homolog of NCBI NO: 1076731 NR Description: RNA binding protein - barley
  misc_feature (76)..(125): Homolog of NCBI NO: 2331131 NR Description: glycine-rich protein [Oryza sativa]
  misc_feature (76)..(125): Homolog of NCBI NO: 82696 NR Description: glycine-rich protein - maize
  misc_feature (76)..(121): Homolog of NCBI NO: 7439981 NR Description: glycine-rich RNA-binding protein GRP1 - wheat
  misc_feature (76)..(125): Homolog of NCBI NO: 7439981 NR Description: glycine-rich RNA-binding protein GRP1 - wheat
  misc_feature (1)..(78): Homolog of NCBI NO: 34903152 NR Description: unnamed protein product [Oryza sativa (japonica
MNALRSTAFRRSTLHWDAAAAFFSPPFRSRRCHRRVLLPPAAALPAKSRSRAKAKLLADAGAVDPWLASLSLLPAGGGGYGGQRGGGGGYGGGGGYGGGGGYGGGGGYGGQRGGGGGDSGGQWRN

SEQ ID NO: 66068 - DNA, 1842 bp, Triticum aestivum
  misc_feature (1)..(1842): Ceres Seq. ID no. 14303706
acaacgaagcaccagaaaagaacaaaaatataaaaaaataagacgagagagccacccccatcgcctcgtctctcctctcctcgcagatctttcccgtctccggccaccatgaactcctactccggcgaccggtcctcctcccgtcccaccacaacctccttcgactcctaccagtttgacttcggggccaacgcctcccgctcctccacctcccgccccctccgcgaccagaggccaggtggcgccaccaacccttcaccgaggccaaccaccacaaacacatggtcacaccagccggtgaagacgtcctggactcatcagccatccccgtccgccgccgcggcgctcggatccgggcctgtgtccatggtcggcgacatctccggccggagctggtccgccactgcgccctcctccggcatcggcctccctcagtccaacaaccccaacctcttcagcgacctcctcgggcccgcgcttggatccacccgagcccagtccaacgcgccgctcagatcagcagcggcccagccctccaagccgtcaagcgctaaccctaggaccaacagctcttccttctcgatgggcggtatggcgagcacgctcccgaaaaccaccggggcaccgatagcttctggtagttatggggttggtggccggccaatgaagccggtgggcatggcgccggcgaccgcgtcacagcccacggcgcagaagaaggatccgttcggctccatagatcccttcgcggcgaagcctgggtctatgaatgctgcaaagcaggcaggttcggccaaatcggatcagggatttggcgtgtttcagggcgtgagttcgggcgccaacgctggattcagtagtttccagaaagccggtgctggatccagtggcttccagagttctggtgccacgaagccttccaatgttacgcctccgcctgcacccgctccagcgcctgtttctgcagcggtgaactctggcgtggatcattttgacacgctgtttccttcgtccgcatctgcaccaactgcttctgcggcgagtaatggtggtggtgacatgtttggtgagatggatggttgggtggacgtggagtcggagtatgttggtggtggtgatagcagtggcacaaccacagagctggagggattaccgccaccaccctctgggttgacggcatctgctgctaaggcaaaaggaatggataattacaagggtgggcagtatgctgatgctatcaaatggttgtcttgggctgttctgctcatcgagaagactgggaaaaatgctggtattgcagaggtgttgtcatcaagggcctcgtcctataaggaggtcggcgagtacaagaaggctattgccgactgttcgaaggtgctcgagcaagataaggacaatgtgtcggtgctagtgcaacgtgctctcttatatgagagcagtgagaaatataggcttggggctgaggacctgcgtttggttctgaagattgaccctgggaatcgtcttgccaggagtatgattcatcgattgaacaaaatggctgactagggatgtttgtcaagttccctgatgtaccaccattgtaatcatccttgacacggaaactgtgagttatttcaaattgttttactatacttgtggctttgggggtaataatttacaactttggtgttatgaagcacatcattgcatcttcacacacagtatatctttgatatgtattgtatatcatatattgtattgaactttaatagttcactttgtgtttgaaaaaaaaaaaaaaaaaaaaaaaaaaaaaaaaaaaaaaaaaaaaaaaaaaaaaaaaaaaaaaaaaaaaaaagg

SEQ ID NO: 66069 - protein, 479 aa, Triticum aestivum
  peptide (1)..(479): Ceres Seq. ID no. 14303707
  misc_feature (10)..(279): Pfam Name: Herpes virus major outer envelope glycoprotein (BLLF1) Pfam Description: Herpes virus major outer envelope glycoprotein
  misc_feature (1)..(312): Homolog of NCBI NO: 13592175 NR Description: ppg3 [Leishmania major]
  misc_feature (1)..(312): Homolog of NCBI NO: 13592175 NR Description: ppg3 [Leishmania major]
  misc_feature (1)..(312): Homolog of NCBI NO: 13592175 NR Description: ppg3 [Leishmania major]
  misc_feature (1)..(312): Homolog of NCBI NO: 13592175 NR Description: ppg3 [Leishmania major]
  misc_feature (1)..(312): Homolog of NCBI NO: 13592175 NR Description: ppg3 [Leishmania major]
  misc_feature (1)..(312): Homolog of NCBI NO: 13592175 NR Description: ppg3 [Leishmania major]
  misc_feature (388)..(423): Homolog of NCBI NO: 11994631 NR Description: gene_id:MGL6.23~unknown protein [Arabidopsis
  misc_feature (1)..(392): Homolog of NCBI NO: 11994631 NR Description: gene_id:MGL6.23~unknown protein [Arabidopsis
  misc_feature (16)..(478): Homolog of NCBI NO: 30684223 NR Description: tetratricopeptide repeat (TPR)-containing protein
  misc_feature (1)..(478): Homolog of NCBI NO: 30684217 NR Description: tetratricopeptide repeat (TPR)-containing protein
MNSYSGDRSSSRPTTTSFDSYQFDFGANASRSSTSRPLRDQRPGGATNPSPRPTTTNTWSHQPVKTSWTHQPSPSAAAALGSGPVSMVGDISGRSWSATAPSSGIGLPQSNNPNLFSDLLGPALGSTRAQSNAPLRSAAAQPSKPSSANPRTNSSSFSMGGMASTLPKTTGAPIASGSYGVGGRPMKPVGMAPATASQPTAQKKDPFGSIDPFAAKPGSMNAAKQAGSAKSDQGFGVFQGVSSGANAGFSSFQKAGAGSSGFQSSGATKPSNVTPPPAPAPAPVSAAVNSGVDHFDTLFPSSASAPTASAASNGGGDMFGEMDGWVDVESEYVGGGDSSGTTTELEGLPPPPSGLTASAAKAKGMDNYKGGQYADAIKWLSWAVLLIEKTGKNAGIAEVLSSRASSYKEVGEYKKAIADCSKVLEQDKDNVSVLVQRALLYESSEKYRLGAEDLRLVLKIDPGNRLARSMIHRLNKMAD

SEQ ID NO: 66070 - protein, 393 aa, Triticum aestivum
  peptide (1)..(393): Ceres Seq. ID no. 14303708
  misc_feature (1)..(193): Pfam Name: Herpes virus major outer envelope glycoprotein (BLLF1) Pfam Description: Herpes virus major outer envelope glycoprotein
  misc_feature (1)..(226): Homolog of NCBI NO: 13592175 NR Description: ppg3 [Leishmania major]
  misc_feature (1)..(226): Homolog of NCBI NO: 13592175 NR Description: ppg3 [Leishmania major]
  misc_feature (1)..(226): Homolog of NCBI NO: 13592175 NR Description: ppg3 [Leishmania major]
  misc_feature (1)..(226): Homolog of NCBI NO: 13592175 NR Description: ppg3 [Leishmania major]
  misc_feature (1)..(226): Homolog of NCBI NO: 13592175 NR Description: ppg3 [Leishmania major]
  misc_feature (1)..(226): Homolog of NCBI NO: 13592175 NR Description: ppg3 [Leishmania major]
  misc_feature (302)..(337): Homolog of NCBI NO: 11994631 NR Description: gene_id:MGL6.23~unknown protein [Arabidopsis
  misc_feature (1)..(306): Homolog of NCBI NO: 11994631 NR Description: gene_id:MGL6.23~unknown protein [Arabidopsis
  misc_feature (1)..(392): Homolog of NCBI NO: 30684223 NR Description: tetratricopeptide repeat (TPR)-containing protein
  misc_feature (1)..(392): Homolog of NCBI NO: 30684217 NR Description: tetratricopeptide repeat (TPR)-containing protein
MVGDISGRSWSATAPSSGIGLPQSNNPNLFSDLLGPALGSTRAQSNAPLRSAAAQPSKPSSANPRTNSSSFSMGGMASTLPKTTGAPIASGSYGVGGRPMKPVGMAPATASQPTAQKKDPFGSIDPFAAKPGSMNAAKQAGSAKSDQGFGVFQGVSSGANAGFSSFQKAGAGSSGFQSSGATKPSNVTPPPAPAPAPVSAAVNSGVDHFDTLFPSSASAPTASAASNGGGDMFGEMDGWVDVESEYVGGGDSSGTTTELEGLPPPPSGLTASAAKAKGMDNYKGGQYADAIKWLSWAVLLIEKTGKNAGIAEVLSSRASSYKEVGEYKKAIADCSKVLEQDKDNVSVLVQRALLYESSEKYRLGAEDLRLVLKIDPGNRLARSMIHRLNKMAD

SEQ ID NO: 66071 - protein, 321 aa, Triticum aestivum
  peptide (1)..(321): Ceres Seq. ID no. 14303709
  misc_feature (1)..(121): Pfam Name: Herpes virus major outer envelope glycoprotein (BLLF1) Pfam Description: Herpes virus major outer envelope glycoprotein
  misc_feature (1)..(154): Homolog of NCBI NO: 13592175 NR Description: ppg3 [Leishmania major]
  misc_feature (1)..(154): Homolog of NCBI NO: 13592175 NR Description: ppg3 [Leishmania major]
  misc_feature (1)..(154): Homolog of NCBI NO: 13592175 NR Description: ppg3 [Leishmania major]
  misc_feature (1)..(154): Homolog of NCBI NO: 13592175 NR Description: ppg3 [Leishmania major]
  misc_feature (1)..(154): Homolog of NCBI NO: 13592175 NR Description: ppg3 [Leishmania major]
  misc_feature (1)..(154): Homolog of NCBI NO: 13592175 NR Description: ppg3 [Leishmania major]
  misc_feature (230)..(265): Homolog of NCBI NO: 11994631 NR Description: gene_id:MGL6.23~unknown protein [Arabidopsis
  misc_feature (1)..(234): Homolog of NCBI NO: 11994631 NR Description: gene_id:MGL6.23~unknown protein [Arabidopsis
  misc_feature (1)..(320): Homolog of NCBI NO: 30684223 NR Description: tetratricopeptide repeat (TPR)-containing protein
  misc_feature (1)..(320): Homolog of NCBI NO: 30684217 NR Description: tetratricopeptide repeat (TPR)-containing protein
MGGMASTLPKTTGAPIASGSYGVGGRPMKPVGMAPATASQPTAQKKDPFGSIDPFAAKPGSMNAAKQAGSAKSDQGFGVFQGVSSGANAGFSSFQKAGAGSSGFQSSGATKPSNVTPPPAPAPAPVSAAVNSGVDHFDTLFPSSASAPTASAASNGGGDMFGEMDGWVDVESEYVGGGDSSGTTTELEGLPPPPSGLTASAAKAKGMDNYKGGQYADAIKWLSWAVLLIEKTGKNAGIAEVLSSRASSYKEVGEYKKAIADCSKVLEQDKDNVSVLVQRALLYESSEKYRLGAEDLRLVLKIDPGNRLARSMIHRLNKMAD

SEQ ID NO: 66072 - DNA, 1960 bp, Triticum aestivum
  misc_feature (1)..(1960): Ceres Seq. ID no. 13590904
aaaaatccctctcccaaaacaagcggcataaaccacgacctcgacccgctccgtctccgctcccccgcttccagtccactccccttcctccccctccgctccgccccctcaagcgaaggcaccggatggcggcgtcccccacccccggcggcggcctcggggccatcctcgccgccggcgacagggactacctcgtccgcaactccggcgagcaggtgaagatcagcagcattgagggagacactgtagctatctatttctcggcctcatggtgcccgccatgccagcggtttacaccaaagcttattgaagcatacaaagaacttacctcaaatggcaagagctttgaggtgatctttgtttcaggcgaccgagatgaggaagcattcaatgcctattttgcaaagatgccgtggttggcagttcctttctccgactccgaaggccgtaaaagccttgatgagcggtttgacgtcaacggtattccacaccttgttttccttgatgcaaaaactggcgaagttcttactgacgaaggagttgagtttgtgagtgaatatggaatagaagcttatccttttacaactgagaggatcaatgaattgaaggaacaagaaaaggctgctaaggataaccaaactattcatagtgtgcttgctacaccaaatcgtaactatgtaatttcaaacacgggggagaaggtacccatcgttgatcttgaggggaagtatgttggtatatgctttgtagtgaacggctaccctccagttgaggaatttaccccagtgcttgccaagatatatgcgaaactcaaagaagtgggggagaagtttgaagttgtagctgtatccttggacagtgatgaggaatcattcaataacagtttttcaagcatgccttggctcgccattccccatggcgacaagatgtgtcagaagcttgtcagttactttgagcttagtgatcttcctacactagtgctgattggtcctgatgggaagacactgagcagcaatattgcagacataatcaatgagcatggtttggatgcatgggaggggttccccttcaatgcagagaagctggaaattctagctgagaaggcaaaggctaaagcagcctcacagacattggagtcccttctggttactggtgacgtggactttgtcatcgggaaagatggagcaaaggttcctgtagcagaacttgttgggaagactgtcctcctctacttttcagctaaatggtgtgggccatgcagagccttcctgcctacacttgtggatgtctacaacaagatcaaggagaagaacagcgatttcgagatcgtcttcgtctctagcgacagggaccagagctcattcgacgacttcttctctggcatgccatggctcgccatccccttggaagacgaaaggaaggcgtacctgaaaaagaagttcaagatccgtggaatcccttctctggtcgccattggccccgatgggaagacggtcaacacggacgcgaagacttcgctggcggtccatggcgccgacgcgtttccgttcaccgacgagaggatccaggagctggagaagaagatcgaggagatggcaaaggggtggcctgagaagctgaagcacgagctgcacgagcacgagctcgtgctgatccgccgccccaggccgtacggctgcgacgggtgcgaagagatgggcacctcctggtcctacaactgcgcggagtgcgacttcgatctgcacaccaagtgtgcgctgggtgaggagaagaagggagaggaggtgaatgggcaggagcatgctgctgccccagctgggtacgtgtgcgagggagacgtctgcaggaaggcctaggtatcgttgtgttgtgtgtgttccttgccagctgaggcgtgtctgaatcatgtgctgtgtggtgtgatgataaataaatcttgcatccgatggtttggcttggg

SEQ ID NO: 66073 - protein, 617 aa, Triticum aestivum
  peptide (1)..(617): Ceres Seq. ID no. 13590905
  misc_feature (78)..(119): Pfam Name: Thioredoxin Pfam Description: Thioredoxin
  misc_feature (64)..(459): Homolog of NCBI NO: 38567893 NR Description: OSJNBa0060N03.13 [Oryza sativa (japonica
  misc_feature (52)..(372): Homolog of NCBI NO: 23304737 NR Description: PDI-like protein [Quercus suber]
  misc_feature (210)..(530): Homolog of NCBI NO: 21592996 NR Description: PDI-like protein [Arabidopsis thaliana]
  misc_feature (27)..(367): Homolog of NCBI NO: 18406743 NR Description: expressed protein [Arabidopsis thaliana]
  misc_feature (210)..(530): Homolog of NCBI NO: 18406743 NR Description: expressed protein [Arabidopsis thaliana]
  misc_feature (214)..(589): Homolog of NCBI NO: 18417767 NR Description: receptor kinase -related [Arabidopsis thaliana]
  misc_feature (54)..(533): Homolog of NCBI NO: 23304737 NR Description: PDI-like protein [Quercus suber]
  misc_feature (52)..(617): Homolog of NCBI NO: 21592996 NR Description: PDI-like protein [Arabidopsis thaliana]
  misc_feature (52)..(617): Homolog of NCBI NO: 18406743 NR Description: expressed protein [Arabidopsis thaliana]
  misc_feature (44)..(617): Homolog of NCBI NO: 4056568 NR Description: PDI-like protein [Zea mays]
KSLSQNKRHKPRPRPAPSPLPRFQSTPLPPPPLRPLKRRHRMAASPTPGGGLGAILAAGDRDYLVRNSGEQVKISSIEGDTVAIYFSASWCPPCQRFTPKLIEAYKELTSNGKSFEVIFVSGDRDEEAFNAYFAKMPWLAVPFSDSEGRKSLDERFDVNGIPHLVFLDAKTGEVLTDEGVEFVSEYGIEAYPFTTERINELKEQEKAAKDNQTIHSVLATPNRNYVISNTGEKVPIVDLEGKYVGICFVVNGYPPVEEFTPVLAKIYAKLKEVGEKFEVVAVSLDSDEESFNNSFSSMPWLAIPHGDKMCQKLVSYFELSDLPTLVLIGPDGKTLSSNIADIINEHGLDAWEGFPFNAEKLEILAEKAKAKAASQTLESLLVTGDVDFVIGKDGAKVPVAELVGKTVLLYFSAKWCGPCRAFLPTLVDVYNKIKEKNSDFEIVFVSSDRDQSSFDDFFSGMPWLAIPLEDERKAYLKKKFKIRGIPSLVAIGPDGKTVNTDAKTSLAVHGADAFPFTDERIQELEKKIEEMAKGWPEKLKHELHEHELVLIRRPRPYGCDGCEEMGTSWSYNCAECDFDLHTKCALGEEKKGEEVNGQEHAAAPAGYVCEGDVCRKA

SEQ ID NO: 66074 - protein, 576 aa, Triticum aestivum
  peptide (1)..(576): Ceres Seq. ID no. 13590906
  misc_feature (37)..(78): Pfam Name: Thioredoxin Pfam Description: Thioredoxin
  misc_feature (23)..(418): Homolog of NCBI NO: 38567893 NR Description: OSJNBa0060N03.13 [Oryza sativa (japonica
  misc_feature (11)..(331): Homolog of NCBI NO: 23304737 NR Description: PDI-like protein [Quercus suber]
  misc_feature (169)..(489): Homolog of NCBI NO: 21592996 NR Description: PDI-like protein [Arabidopsis thaliana]
  misc_feature (1)..(326): Homolog of NCBI NO: 18406743 NR Description: expressed protein [Arabidopsis thaliana]
  misc_feature (169)..(489): Homolog of NCBI NO: 18406743 NR Description: expressed protein [Arabidopsis thaliana]
  misc_feature (173)..(548): Homolog of NCBI NO: 18417767 NR Description: receptor kinase -related [Arabidopsis thaliana]
  misc_feature (13)..(492): Homolog of NCBI NO: 23304737 NR Description: PDI-like protein [Quercus suber]
  misc_feature (11)..(576): Homolog of NCBI NO: 21592996 NR Description: PDI-like protein [Arabidopsis thaliana]
  misc_feature (11)..(576): Homolog of NCBI NO: 18406743 NR Description: expressed protein [Arabidopsis thaliana]
  misc_feature (3)..(576): Homolog of NCBI NO: 4056568 NR Description: PDI-like protein [Zea mays]
MAASPTPGGGLGAILAAGDRDYLVRNSGEQVKISSIEGDTVAIYFSASWCPPCQRFTPKLIEAYKELTSNGKSFEVIFVSGDRDEEAFNAYFAKMPWLAVPFSDSEGRKSLDERFDVNGIPHLVFLDAKTGEVLTDEGVEFVSEYGIEAYPFTTERINELKEQEKAAKDNQTIHSVLATPNRNYVISNTGEKVPIVDLEGKYVGICFVVNGYPPVEEFTPVLAKIYAKLKEVGEKFEVVAVSLDSDEESFNNSFSSMPWLAIPHGDKMCQKLVSYFELSDLPTLVLIGPDGKTLSSNIADIINEHGLDAWEGFPFNAEKLEILAEKAKAKAASQTLESLLVTGDVDFVIGKDGAKVPVAELVGKTVLLYFSAKWCGPCRAFLPTLVDVYNKIKEKNSDFEIVFVSSDRDQSSFDDFFSGMPWLAIPLEDERKAYLKKKFKIRGIPSLVAIGPDGKTVNTDAKTSLAVHGADAFPFTDERIQELEKKIEEMAKGWPEKLKHELHEHELVLIRRPRPYGCDGCEEMGTSWSYNCAECDFDLHTKCALGEEKKGEEVNGQEHAAAPAGYVCEGDVCRKA

SEQ ID NO: 66075 - protein, 482 aa, Triticum aestivum
  peptide (1)..(482): Ceres Seq. ID no. 13590907
  misc_feature (422)..(450): Pfam Name: DC1 domain Pfam Description: DC1 domain
  misc_feature (1)..(324): Homolog of NCBI NO: 38567893 NR Description: OSJNBa0060N03.13 [Oryza sativa (japonica
  misc_feature (1)..(237): Homolog of NCBI NO: 23304737 NR Description: PDI-like protein [Quercus suber]
  misc_feature (75)..(395): Homolog of NCBI NO: 21592996 NR Description: PDI-like protein [Arabidopsis thaliana]
  misc_feature (1)..(232): Homolog of NCBI NO: 18406743 NR Description: expressed protein [Arabidopsis thaliana]
  misc_feature (75)..(395): Homolog of NCBI NO: 18406743 NR Description: expressed protein [Arabidopsis thaliana]
  misc_feature (79)..(454): Homolog of NCBI NO: 18417767 NR Description: receptor kinase -related [Arabidopsis thaliana]
  misc_feature (1)..(398): Homolog of NCBI NO: 23304737 NR Description: PDI-like protein [Quercus suber]
  misc_feature (1)..(482): Homolog of NCBI NO: 21592996 NR Description: PDI-like protein [Arabidopsis thaliana]
  misc_feature (1)..(482): Homolog of NCBI NO: 18406743 NR Description: expressed protein [Arabidopsis thaliana]
  misc_feature (1)..(482): Homolog of NCBI NO: 4056568 NR Description: PDI-like protein [Zea mays]
MPWLAVPFSDSEGRKSLDERFDVNGIPHLVFLDAKTGEVLTDEGVEFVSEYGIEAYPFTTERINELKEQEKAAKDNQTIHSVLATPNRNYVISNTGEKVPIVDLEGKYVGICFVVNGYPPVEEFTPVLAKIYAKLKEVGEKFEVVAVSLDSDEESFNNSFSSMPWLAIPHGDKMCQKLVSYFELSDLPTLVLIGPDGKTLSSNIADIINEHGLDAWEGFPFNAEKLEILAEKAKAKAASQTLESLLVTGDVDFVIGKDGAKVPVAELVGKTVLLYFSAKWCGPCRAFLPTLVDVYNKIKEKNSDFEIVFVSSDRDQSSFDDFFSGMPWLAIPLEDERKAYLKKKFKIRGIPSLVAIGPDGKTVNTDAKTSLAVHGADAFPFTDERIQELEKKIEEMAKGWPEKLKHELHEHELVLIRRPRPYGCDGCEEMGTSWSYNCAECDFDLHTKCALGEEKKGEEVNGQEHAAAPAGYVCEGDVCRKA

SEQ ID NO: 66076 - DNA, 1727 bp, Triticum aestivum
  misc_feature (1)..(1727): Ceres Seq. ID no. 15169585
ttttttttcgattacactccgtccagtgcagctaggctagggcgctaggctaggcagcagacatgatgaccgtcccgcttgttgtcgcgctgttcaactcgcccttcgtcctcaccaccctcgccttcctcctcttcaccctcctcgtctccaagacgcgcagcaatgttgctgcccggggaacgttgcctccgtcgccgcccagcctgccagtcttcggccaccttcgtctactcgggagcctgccgcacaggagcctccggtcactggccgcgtcctacggcccggtcatgtacctacgcctcgggcgtgtgcccaccgtcgtggcgtactccgcggccgccgcggaggaggccatgaagacccgcgacctggccttcgccagccgccccaagctgttcatggtcgaccggttctactacggcaccggcggcatcggcttcgcgccgtacggcgagcactggcgccaggcccgccgcgtctgcgtcacccacatgcttaacccgcaccgcctcctgtccttcaggcgcgtccgggggcaggaggtcgccgccctcgtcgaccgggtccgccgcgccggtaccgtcgtgaacctgagcgacaacctcatcgtctactctttcaccgccatctctcgcgccacctttggcgacacggactacgggatcgacggcgaggaggggggagcgaggctgaggaaggtgttcgccgagatcgaggagcttctcggcacggcccccatgggggagaaggtgccatggctgcggtgggtcgacgtcctgacgggactggagcggaagacgaggcgcgcgttcgaggagatggatggactgctcgagcgggtcatcacggaccatcgccaaaagagcggcgccggggacaacgaccagcgtgacttcgtggacgtgctgttaggggccaacgagctcgacacgaacggcatcaaggccatcatcctggacatgcttgccgccgccacggattcaacgttcacgttgctggaatgggccatggcggagctcatcaaccacccgcaagaaatgcgcaagctccaggacgaggtccgcacggccgtcggcgacgccggccacgtcaccgaggatcatctgccggatctacgctacctgaaggccgtcgtcaaggagaccctccggctccaccctcccacgccgctcctcctgccccgggagactgtcgaggacacccagctgctcggctaccacgtcccggcaggcacgcgggtgctgatccacgcctgggccatcggccgtgacccggcgacgtggggcgaccgcgccgaggagttcgtgccggagaggttcttggagtacacccacgagatggggcaagacttcgcgttcttgcccttcggcaccgggaggagaggttgccccggggtcaagttcgccatgccgtccaacgagctggccctcgcgagcctggtgtaccatttcgactgggagctagccggcgggaggaagccgcccgtggacatgaccgagctgcacgggctctccgtgcgcctgaagacgcctctgcttctggctgctaaaccgtggtcaagccgtggtgtcgaatgagagaaaagcgtctctacatgcttcttctaagtagtacgagctagctcagagctcggatgatcattatcgaccaagtctagtaatgtactccttcatgtattgttcacttgttaatttccttacccgtatttgttgagcagtaacttc

SEQ ID NO: 66077 - protein, 505 aa, Triticum aestivum
  peptide (1)..(505): Ceres Seq. ID no. 15169586
  misc_feature (43)..(303): Pfam Name: Cytochrome P450 Pfam Description: Cytochrome P450
  misc_feature (16)..(501): Homolog of NCBI NO: 15723953 NR Description: menthofuran synthase [Mentha x piperita]
  misc_feature (16)..(470): Homolog of NCBI NO: 117188 NR Description: CYTOCHROME P450 71A1 (CYPLXXIA1) (ARP-2)
  misc_feature (13)..(498): Homolog of NCBI NO: 3582021 NR Description: cytochrome P450 [Nepeta racemosa]
  misc_feature (16)..(497): Homolog of NCBI NO: 25282608 NR Description: cytochrome P-450LXXIA1 [similarity] - avocado
  misc_feature (300)..(498): Homolog of NCBI NO: 34904246 NR Description: putative cytochrome P-450LXXIA1 (cyp71A1) family
  misc_feature (2)..(295): Homolog of NCBI NO: 34904246 NR Description: putative cytochrome P-450LXXIA1 (cyp71A1) family
  misc_feature (300)..(500): Homolog of NCBI NO: 34904240 NR Description: putative cytochrome P-450LXXIA1 (cyp71A1) family
  misc_feature (2)..(303): Homolog of NCBI NO: 34904240 NR Description: putative cytochrome P-450LXXIA1 (cyp71A1) family
  misc_feature (285)..(501): Homolog of NCBI NO: 34904238 NR Description: putative cytochrome P-450LXXIA1 (cyp71A1) family
  misc_feature (7)..(303): Homolog of NCBI NO: 34904238 NR Description: putative cytochrome P-450LXXIA1 (cyp71A1) family
MMTVPLVVALFNSPFVLTTLAFLLFTLLVSKTRSNVAARGTLPPSPPSLPVFGHLRLLGSLPHRSLRSLAASYGPVMYLRLGRVPTVVAYSAAAAEEAMKTRDLAFASRPKLFMVDRFYYGTGGIGFAPYGEHWRQARRVCVTHMLNPHRLLSFRRVRGQEVAALVDRVRRAGTVVNLSDNLIVYSFTAISRATFGDTDYGIDGEEGGARLRKVFAEIEELLGTAPMGEKVPWLRWVDVLTGLERKTRRAFEEMDGLLERVITDHRQKSGAGDNDQRDFVDVLLGANELDTNGIKAIILDMLAAATDSTFTLLEWAMAELINHPQEMRKLQDEVRTAVGDAGHVTEDHLPDLRYLKAVVKETLRLHPPTPLLLPRETVEDTQLLGYHVPAGTRVLIHAWAIGRDPATWGDRAEEFVPERFLEYTHEMGQDFAFLPFGTGRRGCPGVKFAMPSNELALASLVYHFDWELAGGRKPPVDMTELHGLSVRLKTPLLLAAKPWSSRGVE

SEQ ID NO: 66078 - protein, 504 aa, Triticum aestivum
  peptide (1)..(504): Ceres Seq. ID no. 15169587
  misc_feature (42)..(302): Pfam Name: Cytochrome P450 Pfam Description: Cytochrome P450
  misc_feature (15)..(500): Homolog of NCBI NO: 15723953 NR Description: menthofuran synthase [Mentha x piperita]
  misc_feature (15)..(469): Homolog of NCBI NO: 117188 NR Description: CYTOCHROME P450 71A1 (CYPLXXIA1) (ARP-2)
  misc_feature (12)..(497): Homolog of NCBI NO: 3582021 NR Description: cytochrome P450 [Nepeta racemosa]
  misc_feature (15)..(496): Homolog of NCBI NO: 25282608 NR Description: cytochrome P-450LXXIA1 [similarity] - avocado
  misc_feature (299)..(497): Homolog of NCBI NO: 34904246 NR Description: putative cytochrome P-450LXXIA1 (cyp71A1) family
  misc_feature (1)..(294): Homolog of NCBI NO: 34904246 NR Description: putative cytochrome P-450LXXIA1 (cyp71A1) family
  misc_feature (299)..(499): Homolog of NCBI NO: 34904240 NR Description: putative cytochrome P-450LXXIA1 (cyp71A1) family
  misc_feature (1)..(302): Homolog of NCBI NO: 34904240 NR Description: putative cytochrome P-450LXXIA1 (cyp71A1) family
  misc_feature (284)..(500): Homolog of NCBI NO: 34904238 NR Description: putative cytochrome P-450LXXIA1 (cyp71A1) family
  misc_feature (6)..(302): Homolog of NCBI NO: 34904238 NR Description: putative cytochrome P-450LXXIA1 (cyp71A1) family
MTVPLVVALFNSPFVLTTLAFLLFTLLVSKTRSNVAARGTLPPSPPSLPVFGHLRLLGSLPHRSLRSLAASYGPVMYLRLGRVPTVVAYSAAAAEEAMKTRDLAFASRPKLFMVDRFYYGTGGIGFAPYGEHWRQARRVCVTHMLNPHRLLSFRRVRGQEVAALVDRVRRAGTVVNLSDNLIVYSFTAISRATFGDTDYGIDGEEGGARLRKVFAEIEELLGTAPMGEKVPWLRWVDVLTGLERKTRRAFEEMDGLLERVITDHRQKSGAGDNDQRDFVDVLLGANELDTNGIKAIILDMLAAATDSTFTLLEWAMAELINHPQEMRKLQDEVRTAVGDAGHVTEDHLPDLRYLKAVVKETLRLHPPTPLLLPRETVEDTQLLGYHVPAGTRVLIHAWAIGRDPATWGDRAEEFVPERFLEYTHEMGQDFAFLPFGTGRRGCPGVKFAMPSNELALASLVYHFDWELAGGRKPPVDMTELHGLSVRLKTPLLLAAKPWSSRGVE

SEQ ID NO: 66079 - protein, 429 aa, Triticum aestivum
  peptide (1)..(429): Ceres Seq. ID no. 15169588
  misc_feature (1)..(227): Pfam Name: Cytochrome P450 Pfam Description: Cytochrome P450
  misc_feature (1)..(425): Homolog of NCBI NO: 15723953 NR Description: menthofuran synthase [Mentha x piperita]
  misc_feature (1)..(394): Homolog of NCBI NO: 117188 NR Description: CYTOCHROME P450 71A1 (CYPLXXIA1) (ARP-2)
  misc_feature (1)..(422): Homolog of NCBI NO: 3582021 NR Description: cytochrome P450 [Nepeta racemosa]
  misc_feature (1)..(421): Homolog of NCBI NO: 25282608 NR Description: cytochrome P-450LXXIA1 [similarity] - avocado
  misc_feature (224)..(422): Homolog of NCBI NO: 34904246 NR Description: putative cytochrome P-450LXXIA1 (cyp71A1) family
  misc_feature (1)..(219): Homolog of NCBI NO: 34904246 NR Description: putative cytochrome P-450LXXIA1 (cyp71A1) family
  misc_feature (224)..(424): Homolog of NCBI NO: 34904240 NR Description: putative cytochrome P-450LXXIA1 (cyp71A1) family
  misc_feature (1)..(227): Homolog of NCBI NO: 34904240 NR Description: putative cytochrome P-450LXXIA1 (cyp71A1) family
  misc_feature (209)..(425): Homolog of NCBI NO: 34904238 NR Description: putative cytochrome P-450LXXIA1 (cyp71A1) family
  misc_feature (1)..(227): Homolog of NCBI NO: 34904238 NR Description: putative cytochrome P-450LXXIA1 (cyp71A1) family
MYLRLGRVPTVVAYSAAAAEEAMKTRDLAFASRPKLFMVDRFYYGTGGIGFAPYGEHWRQARRVCVTHMLNPHRLLSFRRVRGQEVAALVDRVRRAGTVVNLSDNLIVYSFTAISRATFGDTDYGIDGEEGGARLRKVFAEIEELLGTAPMGEKVPWLRWVDVLTGLERKTRRAFEEMDGLLERVITDHRQKSGAGDNDQRDFVDVLLGANELDTNGIKAIILDMLAAATDSTFTLLEWAMAELINHPQEMRKLQDEVRTAVGDAGHVTEDHLPDLRYLKAVVKETLRLHPPTPLLLPRETVEDTQLLGYHVPAGTRVLIHAWAIGRDPATWGDRAEEFVPERFLEYTHEMGQDFAFLPFGTGRRGCPGVKFAMPSNELALASLVYHFDWELAGGRKPPVDMTELHGLSVRLKTPLLLAAKPWSSRGVE

SEQ ID NO: 66080 - DNA, 1792 bp, Triticum aestivum
  misc_feature (1)..(1792): Ceres Seq. ID no. 14301587
acaaaatttctccccccaaatttcctactcgtccgtttcacgctcccacggtctcactctcacctccaaacccaaatccccaaaccctaaccacagcacctacctcctccgccgccgccgccatggcaggagcaggagtcggcggccgcaaggctcgcaactttgcgacctttcgcctattcccccgcgacggtgccgccgaccccaacgaccgcgtcttcgtccgcgtcgacaacaacgcctacaccatccccggcttcggcgacgacgaagacccttccctctcgcccaccgccgccgccgaccaattcccttcctccacctctgggcccctccccgaccacgtccgccagcagatccttgagctcggcctccccgacgatggctacaactaccttctccatctccgcgagctgcggccctccgctgtggcctcctccttcgtacccagccataccgcccgcccagagcaacttcccctggacgtgaaggcctatgatgcaagcaaggtgcgggttgcttctggcaaggtcgaggaagagttggacgaggggaggaccatgtgtaaggtggccgcaaagacggcaccggtgaggcgagttgagaaggccgtcgaccctgacgttgcaaggttgctcgatgagagcgaggatgagggtttggaggaggatttcgtcataatggcaaaccaagccgaaggggatgatatggaggatgaaagtgaggaagaggggggtggtgtgttcagtgatgtggaaaatgatgaggagttcgaggatgaagagggtgagcccaagccgagggtgccacggctgctggatgaacaatttgatctgcttgctttggaagaatatggagctagtgatgatgatgatggagctgttagagatggggaacatgaactcccgtctgaggttatagatgaactgaagttgttccacaatcaaaatgtatgcgttgatgaagaatatagaacaccagcagattttgttcgtggaaaacttgactcaaccaccgccgaggaggtggatgaatctgctaatgtgatccagaagtgtgctgaatatgctgaaaggtatttaaatgaaactgcagaagatgaagaggtcttgcttgtttcggaaagcagtgatgaatctgaagtttgggactgtgagaccattgtttccacatactctaacttggacaatcaccctggcaaaattcaaactccaggaaatcctagaaatcgtcttcccaaagtttttcctggggaaacagctacaacgaaagatatcatcaagcttcatggtaaagagaaacttcctgtagattacctgccacagaggaaaagaaaagttgaaaaggagaagaaagcaaagcccacagaagcttcagatgctgaatattattttgaaaaggttgtagttcagaaggaaacaaaagatgaaaagaaagctagaaagtccgcggtaaaagaagagaagagagaagcccggaaagcaaagaaagagctcaaagaactgtataaatttgaaacacagaaggctcagaaagttgctgctgttacaggaccatcttccatacggctaatataattgtcctgtgtcatatgtaacgtgtttcctacatctgctgaactgttgaagccttgaagacagtagtccagagcaagataggcatgtcatatgtaactgctggtacctgagacatttcatgccttgcttaaggttgtcccattctctggactggaggcagtgaatgattctgcttggcattacctttttactgctgaatgtatgagttttgtgtt

SEQ ID NO: 66081 - protein, 524 aa, Triticum aestivum
  peptide (1)..(524): Ceres Seq. ID no. 14301588
  misc_feature (166)..(511): Homolog of NCBI NO: 31211149 NR Description: ENSANGP00000016262 [Anopheles gambiae]
  misc_feature (88)..(510): Homolog of NCBI NO: 19921998 NR Description: CG7686-PA [Drosophila melanogaster]
  misc_feature (126)..(511): Homolog of NCBI NO: 21361875 NR Description: hypothetical protein FLJ14909 [Homo sapiens]
  misc_feature (126)..(511): Homolog of NCBI NO: 31324539 NR Description: RIKEN cDNA 2610020N02 gene [Mus musculus]
  misc_feature (49)..(261): Homolog of NCBI NO: 34913326 NR Description: hypothetical protein~predicted by FGENESH etc.
  misc_feature (49)..(261): Homolog of NCBI NO: 33146615 NR Description: unknown protein [Oryza sativa (japonica
  misc_feature (55)..(520): Homolog of NCBI NO: 15229649 NR Description: expressed protein [Arabidopsis thaliana]
  misc_feature (305)..(524): Homolog of NCBI NO: 31249721 NR Description: hypothetical protein [Oryza sativa (japonica
  misc_feature (41)..(291): Homolog of NCBI NO: 28927687 NR Description: unknown protein [Oryza sativa (japonica
  misc_feature (88)..(524): Homolog of NCBI NO: 28927687 NR Description: unknown protein [Oryza sativa (japonica
KISPPKFPTRPFHAPTVSLSPPNPNPQTLTTAPTSSAAAAMAGAGVGGRKARNFATFRLFPRDGAADPNDRVFVRVDNNAYTIPGFGDDEDPSLSPTAAADQFPSSTSGPLPDHVRQQILELGLPDDGYNYLLHLRELRPSAVASSFVPSHTARPEQLPLDVKAYDASKVRVASGKVEEELDEGRTMCKVAAKTAPVRRVEKAVDPDVARLLDESEDEGLEEDFVIMANQAEGDDMEDESEEEGGGVFSDVENDEEFEDEEGEPKPRVPRLLDEQFDLLALEEYGASDDDDGAVRDGEHELPSEVIDELKLFHNQNVCVDEEYRTPADFVRGKLDSTTAEEVDESANVIQKCAEYAERYLNETAEDEEVLLVSESSDESEVWDCETIVSTYSNLDNHPGKIQTPGNPRNRLPKVFPGETATTKDIIKLHGKEKLPVDYLPQRKRKVEKEKKAKPTEASDAEYYFEKVVVQKETKDEKKARKSAVKEEKREARKAKKELKELYKFETQKAQKVAAVTGPSSIRLI

SEQ ID NO: 66082 - protein, 484 aa, Triticum aestivum
  peptide (1)..(484): Ceres Seq. ID no. 14301589
  misc_feature (126)..(471): Homolog of NCBI NO: 31211149 NR Description: ENSANGP00000016262 [Anopheles gambiae]
  misc_feature (48)..(470): Homolog of NCBI NO: 19921998 NR Description: CG7686-PA [Drosophila melanogaster]
  misc_feature (86)..(471): Homolog of NCBI NO: 21361875 NR Description: hypothetical protein FLJ14909 [Homo sapiens]
  misc_feature (86)..(471): Homolog of NCBI NO: 31324539 NR Description: RIKEN cDNA 2610020N02 gene [Mus musculus]
  misc_feature (9)..(221): Homolog of NCBI NO: 34913326 NR Description: hypothetical protein~predicted by FGENESH etc.
  misc_feature (9)..(221): Homolog of NCBI NO: 33146615 NR Description: unknown protein [Oryza sativa (japonica
  misc_feature (15)..(480): Homolog of NCBI NO: 15229649 NR Description: expressed protein [Arabidopsis thaliana]
  misc_feature (265)..(484): Homolog of NCBI NO: 31249721 NR Description: hypothetical protein [Oryza sativa (japonica
  misc_feature (1)..(251): Homolog of NCBI NO: 28927687 NR Description: unknown protein [Oryza sativa (japonica
  misc_feature (48)..(484): Homolog of NCBI NO: 28927687 NR Description: unknown protein [Oryza sativa (japonica
MAGAGVGGRKARNFATFRLFPRDGAADPNDRVFVRVDNNAYTIPGFGDDEDPSLSPTAAADQFPSSTSGPLPDHVRQQILELGLPDDGYNYLLHLRELRPSAVASSFVPSHTARPEQLPLDVKAYDASKVRVASGKVEEELDEGRTMCKVAAKTAPVRRVEKAVDPDVARLLDESEDEGLEEDFVIMANQAEGDDMEDESEEEGGGVFSDVENDEEFEDEEGEPKPRVPRLLDEQFDLLALEEYGASDDDDGAVRDGEHELPSEVIDELKLFHNQNVCVDEEYRTPADFVRGKLDSTTAEEVDESANVIQKCAEYAERYLNETAEDEEVLLVSESSDESEVWDCETIVSTYSNLDNHPGKIQTPGNPRNRLPKVFPGETATTKDIIKLHGKEKLPVDYLPQRKRKVEKEKKAKPTEASDAEYYFEKVVVQKETKDEKKARKSAVKEEKREARKAKKELKELYKFETQKAQKVAAVTGPSSIRLI

SEQ ID NO: 66083 - protein, 338 aa, Triticum aestivum
  peptide (1)..(338): Ceres Seq. ID no. 14301590
  misc_feature (1)..(325): Homolog of NCBI NO: 31211149 NR Description: ENSANGP00000016262 [Anopheles gambiae]
  misc_feature (1)..(324): Homolog of NCBI NO: 19921998 NR Description: CG7686-PA [Drosophila melanogaster]
  misc_feature (1)..(325): Homolog of NCBI NO: 21361875 NR Description: hypothetical protein FLJ14909 [Homo sapiens]
  misc_feature (1)..(325): Homolog of NCBI NO: 31324539 NR Description: RIKEN cDNA 2610020N02 gene [Mus musculus]
  misc_feature (1)..(75): Homolog of NCBI NO: 34913326 NR Description: hypothetical protein~predicted by FGENESH etc.
  misc_feature (1)..(75): Homolog of NCBI NO: 33146615 NR Description: unknown protein [Oryza sativa (japonica
  misc_feature (1)..(334): Homolog of NCBI NO: 15229649 NR Description: expressed protein [Arabidopsis thaliana]
  misc_feature (119)..(338): Homolog of NCBI NO: 31249721 NR Description: hypothetical protein [Oryza sativa (japonica
  misc_feature (1)..(105): Homolog of NCBI NO: 28927687 NR Description: unknown protein [Oryza sativa (japonica
  misc_feature (1)..(338): Homolog of NCBI NO: 28927687 NR Description: unknown protein [Oryza sativa (japonica
MCKVAAKTAPVRRVEKAVDPDVARLLDESEDEGLEEDFVIMANQAEGDDMEDESEEEGGGVFSDVENDEEFEDEEGEPKPRVPRLLDEQFDLLALEEYGASDDDDGAVRDGEHELPSEVIDELKLFHNQNVCVDEEYRTPADFVRGKLDSTTAEEVDESANVIQKCAEYAERYLNETAEDEEVLLVSESSDESEVWDCETIVSTYSNLDNHPGKIQTPGNPRNRLPKVFPGETATTKDIIKLHGKEKLPVDYLPQRKRKVEKEKKAKPTEASDAEYYFEKVVVQKETKDEKKARKSAVKEEKREARKAKKELKELYKFETQKAQKVAAVTGPSSIRLI

SEQ ID NO: 66084 - DNA, 899 bp, Triticum aestivum
  misc_feature (1)..(899): Ceres Seq. ID no. 13657435
atcgaaaaactcgcgcacctcacaacacccctccatccaccttttgccagcgtgagagcttcttctttcttgcgagggagaggacagcgagcaaccagggagctaggcgtcaatggcgaccatagccacgatgaccatgctcaagcccgccaagatcacggccaggtcggcgccttcctcgccgtcgttcagcgccaaggtggcgtcgccgagcatctcgctgcgcagcctgcagaagaacgcggccaagaagggagccctggccgtgtcgccggcggccgcggccatggcgagcgccttcttcacctcgctggcctcgtcggacgccgcgatggcgtcgcagcggatcgcggacgtggcggcggtggcgcccgcggacgacaaccggggcctgctgctgctcttcgtggtggcgcccgcgctcgggtgggtgctctacaacatcctccagccggcgctgaaccagctcaataagatgcggtccgagaaggcgctcgtcgccgggctcggcatcagcgccgccgcggccgccggcctggccgccgcgccggagccggcctccgccgccgtgcaggagctcgccgcgctggcggcggtagcgcccgccgacgacaaccggggcctgctgctgctcttcgtggtggcgcccgccctcggatgggtgctctacaacatcctgcagccggcgctgaaccagctcaacaaaatgcggtccaactgagcgtcgtcgtcgtcgtggcatcgcatgcggtccggccgagtgggttcgtatgtgtgtgttcgtctattaagagtcgtggtagtagcgtggaacgtggtgtgagtgcctgcttgcatactctctaatcttgttccttccattgatcaaatgcagtacagctcttcttgttttctcttcg

SEQ ID NO: 66085 - protein, 202 aa, Triticum aestivum
  peptide (1)..(202): Ceres Seq. ID no. 13657436
  misc_feature (90)..(124): Pfam Name: Photosystem II protein Y (PsbY) Pfam Description: Photosystem II protein Y (PsbY)
  misc_feature (36)..(125): Homolog of NCBI NO: 6093830 NR Description: Photosystem II core complex proteins psbY,
  misc_feature (132)..(202): Homolog of NCBI NO: 21593330 NR Description: unknown [Arabidopsis thaliana]
  misc_feature (132)..(202): Homolog of NCBI NO: 15220530 NR Description: F12A21.13 [Arabidopsis thaliana]
  misc_feature (21)..(201): Homolog of NCBI NO: 21593330 NR Description: unknown [Arabidopsis thaliana]
  misc_feature (21)..(201): Homolog of NCBI NO: 15220530 NR Description: F12A21.13 [Arabidopsis thaliana]
  misc_feature (1)..(201): Homolog of NCBI NO: 6093830 NR Description: Photosystem II core complex proteins psbY,
MATIATMTMLKPAKITARSAPSSPSFSAKVASPSISLRSLQKNAAKKGALAVSPAAAAMASAFFTSLASSDAAMASQRIADVAAVAPADDNRGLLLLFVVAPALGWVLYNILQPALNQLNKMRSEKALVAGLGISAAAAAGLAAAPEPASAAVQELAALAAVAPADDNRGLLLLFVVAPALGWVLYNILQPALNQLNKMRSN

SEQ ID NO: 66086 - protein, 196 aa, Triticum aestivum
  peptide (1)..(196): Ceres Seq. ID no. 13657437
  misc_feature (84)..(118): Pfam Name: Photosystem II protein Y (PsbY) Pfam Description: Photosystem II protein Y (PsbY)
  misc_feature (30)..(119): Homolog of NCBI NO: 6093830 NR Description: Photosystem II core complex proteins psbY,
  misc_feature (126)..(196): Homolog of NCBI NO: 21593330 NR Description: unknown [Arabidopsis thaliana]
  misc_feature (126)..(196): Homolog of NCBI NO: 15220530 NR Description: F12A21.13 [Arabidopsis thaliana]
  misc_feature (15)..(195): Homolog of NCBI NO: 21593330 NR Description: unknown [Arabidopsis thaliana]
  misc_feature (15)..(195): Homolog of NCBI NO: 15220530 NR Description: F12A21.13 [Arabidopsis thaliana]
  misc_feature (1)..(195): Homolog of NCBI NO: 6093830 NR Description: Photosystem II core complex proteins psbY,
MTMLKPAKITARSAPSSPSFSAKVASPSISLRSLQKNAAKKGALAVSPAAAAMASAFFTSLASSDAAMASQRIADVAAVAPADDNRGLLLLFVVAPALGWVLYNILQPALNQLNKMRSEKALVAGLGISAAAAAGLAAAPEPASAAVQELAALAAVAPADDNRGLLLLFVVAPALGWVLYNILQPALNQLNKMRSN

SEQ ID NO: 66087 - protein, 194 aa, Triticum aestivum
  peptide (1)..(194): Ceres Seq. ID no. 13657438
  misc_feature (82)..(116): Pfam Name: Photosystem II protein Y (PsbY) Pfam Description: Photosystem II protein Y (PsbY)
  misc_feature (28)..(117): Homolog of NCBI NO: 6093830 NR Description: Photosystem II core complex proteins psbY,
  misc_feature (124)..(194): Homolog of NCBI NO: 21593330 NR Description: unknown [Arabidopsis thaliana]
  misc_feature (124)..(194): Homolog of NCBI NO: 15220530 NR Description: F12A21.13 [Arabidopsis thaliana]
  misc_feature (13)..(193): Homolog of NCBI NO: 21593330 NR Description: unknown [Arabidopsis thaliana]
  misc_feature (13)..(193): Homolog of NCBI NO: 15220530 NR Description: F12A21.13 [Arabidopsis thaliana]
  misc_feature (1)..(193): Homolog of NCBI NO: 6093830 NR Description: Photosystem II core complex proteins psbY,
MLKPAKITARSAPSSPSFSAKVASPSISLRSLQKNAAKKGALAVSPAAAAMASAFFTSLASSDAAMASQRIADVAAVAPADDNRGLLLLFVVAPALGWVLYNILQPALNQLNKMRSEKALVAGLGISAAAAAGLAAAPEPASAAVQELAALAAVAPADDNRGLLLLFVVAPALGWVLYNILQPALNQLNKMRSN

SEQ ID NO: 66088 - DNA, 1741 bp, Triticum aestivum
  misc_feature (1)..(1741): Ceres Seq. ID no. 15225244
acctaccgcaaacccccaaagccacagcgaactcgagctccccccaatggcagctccgcccatctccggccacccccattcctccgtcgactcgccgctccccaccgacgccctcctcgcgcacccccaactcccctccgcccccgcgccccaggcccccaccgcctcccgcttcctcatcatcctcaccgccgccctcgccgtctccacctcctacctcctcctcctccgcccgcccttctccgccgtgtccgccgccgcctccacctcatccttcgcacggcctctatccaagctcccgaagccggtggtcctcctcatatcctccgatggcttccgcttcggctaccaccacaaggcccccaccccgcacatccgccgcctcatcgccaatggcacctccgccgccgagggcctcatccccgtcttccccaccctcaccttccccaaccactactccatcgtcaccggccttcacccttcctcccacggcatcatcaacaacttcttccccgaccccatctcgggggacaacttcaacatgggctcccacgagcccaagtggtggctcggggagcccctctgggtcaccgccgccgaccagggggtccaggcctccacgttcttctggccgggctcggaggtgaagaagggctcctgggactgccccgataagtattgccgccactataatggctctgtgccattcgaggacagggttgacgccgtccttggttactttgatctcccggttgatgaaatgccgcagtttctgacactgtactttgaggatccagatcaccaggggcaccaggttggtcctgatgacccagccatcaccgatgctgtgacgcacattgacgagatgatcgggaggctcattgctggtttggaagctaggggggtgttcgaggatgtgaacatcatattggttggggatcatgggatggttgggacctgcgaccagaagctactgtttctcgaggaattggctccatggattgaggtgaaggctgattgggttctgtcgaggacaccattgctggcaatcaggccaccagatggtatatccccgtcagaggtcgtggccaagatgaatgaagggctgagctctgggaaggtgaagaatgggcaatatctgaagatgtacttgaaggaggatttgccttctcgcctgcattactcggaaagctataggataccaccaattattgggctggtagctgaaggttataaggtagagatgaaagtatcaaagaaaaatgagtgtggaggggcgcacgggtatgacaatgccttcttctcaatgaggaccatattcatcgcacatgggcctcgtttcgaagagggtaaaattgtgccctcatttgtgaatgtggagatatacaatgccattgcttccattctcagtttgaagccagctccaaacaatggctccagttctttccctgaaacagttcttttaccgagtgaatgatcatcggtgtatgtgagggctttggttctggaggaggaaagcccacactgatggtattatcttctggttgtagttgtatttgtacactattttagttcaaattctgccatgtgcagctattcgctactgataatactgcaagcagagtttctttttccttaaggatgtaatttgccaatgcaaatcacatctaacttttgatcttctgtgatgaatgtataatgctacttcttttaagtgccatgtgtttctacttgagttgat

SEQ ID NO: 66089 - protein, 491 aa, Triticum aestivum
  peptide (1)..(491): Ceres Seq. ID no. 15225245
  misc_feature (102)..(471): Pfam Name: Type I phosphodiesterase / nucleotide pyrophosphatase Pfam Description: Type I phosphodiesterase / nucleotide
  misc_feature (102)..(479): Homolog of NCBI NO: 23503088 NR Description: Ectonucleotide pyrophosphatase/phosphodiesterase (E-NPP 1) (Phosphodiesterase I/nucleotide pyrophosphatase 1)
  misc_feature (102)..(479): Homolog of NCBI NO: 13324677 NR Description: ectonucleotide pyrophosphatase/phosphodiesterase 1
  misc_feature (102)..(479): Homolog of NCBI NO: 9453796 NR Description: dJ131F15.2 (phosphodiesterase I/nucleotide
  misc_feature (258)..(489): Homolog of NCBI NO: 13877571 NR Description: nucleotide pyrophosphatase-like protein
  misc_feature (95)..(490): Homolog of NCBI NO: 15233665 NR Description: nucleotide pyrophosphatase -related protein
  misc_feature (68)..(489): Homolog of NCBI NO: 27808612 NR Description: At4g29690 [Arabidopsis thaliana]
  misc_feature (68)..(489): Homolog of NCBI NO: 15233662 NR Description: nucleotide pyrophosphatase - like protein
  misc_feature (60)..(489): Homolog of NCBI NO: 15233659 NR Description: nucleotide pyrophosphatase - like protein
  misc_feature (11)..(489): Homolog of NCBI NO: 12081942 NR Description: nucleotide pyrophosphatase-like protein [Spinacia
  misc_feature (16)..(491): Homolog of NCBI NO: 34903578 NR Description: nucleotide pyrophosphatase homolog
PTANPQSHSELELPPMAAPPISGHPHSSVDSPLPTDALLAHPQLPSAPAPQAPTASRFLIILTAALAVSTSYLLLLRPPFSAVSAAASTSSFARPLSKLPKPVVLLISSDGFRFGYHHKAPTPHIRRLIANGTSAAEGLIPVFPTLTFPNHYSIVTGLHPSSHGIINNFFPDPISGDNFNMGSHEPKWWLGEPLWVTAADQGVQASTFFWPGSEVKKGSWDCPDKYCRHYNGSVPFEDRVDAVLGYFDLPVDEMPQFLTLYFEDPDHQGHQVGPDDPAITDAVTHIDEMIGRLIAGLEARGVFEDVNIILVGDHGMVGTCDQKLLFLEELAPWIEVKADWVLSRTPLLAIRPPDGISPSEVVAKMNEGLSSGKVKNGQYLKMYLKEDLPSRLHYSESYRIPPIIGLVAEGYKVEMKVSKKNECGGAHGYDNAFFSMRTIFIAHGPRFEEGKIVPSFVNVEIYNAIASILSLKPAPNNGSSSFPETVLLPSE

SEQ ID NO: 66090 - protein, 476 aa, Triticum aestivum
  peptide (1)..(476): Ceres Seq. ID no. 15225246
  misc_feature (87)..(456): Pfam Name: Type I phosphodiesterase / nucleotide pyrophosphatase Pfam Description: Type I phosphodiesterase / nucleotide
  misc_feature (87)..(464): Homolog of NCBI NO: 13324677 NR Description: ectonucleotide pyrophosphatase/phosphodiesterase 1
  misc_feature (87)..(464): Homolog of NCBI NO: 23503088 NR Description: Ectonucleotide pyrophosphatase/phosphodiesterase (E-NPP 1) (Phosphodiesterase I/nucleotide pyrophosphatase 1)
  misc_feature (87)..(464): Homolog of NCBI NO: 9453796 NR Description: dJ131F15.2 (phosphodiesterase I/nucleotide
  misc_feature (243)..(474): Homolog of NCBI NO: 13877571 NR Description: nucleotide pyrophosphatase-like protein
  misc_feature (80)..(475): Homolog of NCBI NO: 15233665 NR Description: nucleotide pyrophosphatase -related protein
  misc_feature (53)..(474): Homolog of NCBI NO: 27808612 NR Description: At4g29690 [Arabidopsis thaliana]
  misc_feature (53)..(474): Homolog of NCBI NO: 15233662 NR Description: nucleotide pyrophosphatase - like protein
  misc_feature (45)..(474): Homolog of NCBI NO: 15233659 NR Description: nucleotide pyrophosphatase - like protein
  misc_feature (1)..(474): Homolog of NCBI NO: 12081942 NR Description: nucleotide pyrophosphatase-like protein [Spinacia
  misc_feature (1)..(476): Homolog of NCBI NO: 34903578 NR Description: nucleotide pyrophosphatase homolog
MAAPPISGHPHSSVDSPLPTDALLAHPQLPSAPAPQAPTASRFLIILTAALAVSTSYLLLLRPPFSAVSAAASTSSFARPLSKLPKPVVLLISSDGFRFGYHHKAPTPHIRRLIANGTSAAEGLIPVFPTLTFPNHYSIVTGLHPSSHGIINNFFPDPISGDNFNMGSHEPKWWLGEPLWVTAADQGVQASTFFWPGSEVKKGSWDCPDKYCRHYNGSVPFEDRVDAVLGYFDLPVDEMPQFLTLYFEDPDHQGHQVGPDDPAITDAVTHIDEMIGRLIAGLEARGVFEDVNIILVGDHGMVGTCDQKLLFLEELAPWIEVKADWVLSRTPLLAIRPPDGISPSEVVAKMNEGLSSGKVKNGQYLKMYLKEDLPSRLHYSESYRIPPIIGLVAEGYKVEMKVSKKNECGGAHGYDNAFFSMRTIFIAHGPRFEEGKIVPSFVNVEIYNAIASILSLKPAPNNGSSSFPETVLLPSE

SEQ ID NO: 66091 - protein, 311 aa, Triticum aestivum
  peptide (1)..(311): Ceres Seq. ID no. 15225247
  misc_feature (1)..(291): Pfam Name: Type I phosphodiesterase / nucleotide pyrophosphatase Pfam Description: Type I phosphodiesterase / nucleotide
  misc_feature (1)..(299): Homolog of NCBI NO: 13324677 NR Description: ectonucleotide pyrophosphatase/phosphodiesterase 1
  misc_feature (1)..(299): Homolog of NCBI NO: 23503088 NR Description: Ectonucleotide pyrophosphatase/phosphodiesterase (E-NPP 1) (Phosphodiesterase I/nucleotide pyrophosphatase 1)
  misc_feature (1)..(299): Homolog of NCBI NO: 9453796 NR Description: dJ131F15.2 (phosphodiesterase I/nucleotide
  misc_feature (78)..(309): Homolog of NCBI NO: 13877571 NR Description: nucleotide pyrophosphatase-like protein
  misc_feature (1)..(310): Homolog of NCBI NO: 15233665 NR Description: nucleotide pyrophosphatase -related protein
  misc_feature (1)..(309): Homolog of NCBI NO: 27808612 NR Description: At4g29690 [Arabidopsis thaliana]
  misc_feature (1)..(309): Homolog of NCBI NO: 15233662 NR Description: nucleotide pyrophosphatase - like protein
  misc_feature (1)..(309): Homolog of NCBI NO: 15233659 NR Description: nucleotide pyrophosphatase - like protein
  misc_feature (1)..(309): Homolog of NCBI NO: 12081942 NR Description: nucleotide pyrophosphatase-like protein [Spinacia
  misc_feature (1)..(311): Homolog of NCBI NO: 34903578 NR Description: nucleotide pyrophosphatase homolog
MGSHEPKWWLGEPLWVTAADQGVQASTFFWPGSEVKKGSWDCPDKYCRHYNGSVPFEDRVDAVLGYFDLPVDEMPQFLTLYFEDPDHQGHQVGPDDPAITDAVTHIDEMIGRLIAGLEARGVFEDVNIILVGDHGMVGTCDQKLLFLEELAPWIEVKADWVLSRTPLLAIRPPDGISPSEVVAKMNEGLSSGKVKNGQYLKMYLKEDLPSRLHYSESYRIPPIIGLVAEGYKVEMKVSKKNECGGAHGYDNAFFSMRTIFIAHGPRFEEGKIVPSFVNVEIYNAIASILSLKPAPNNGSSSFPETVLLPSE

SEQ ID NO: 66092 - DNA, 1768 bp, Triticum aestivum
  misc_feature (1)..(1768): Ceres Seq. ID no. 13658032
tgctcaaggcacatggcgcgctgctccgtcgcgaagccgcttacaaccgccgccgcggctccgcgcctccctcgccgccgcgctctgctcgttagcgccgccgccgcctccctggccacggcaacaacaagaacgcagcggctgtccgccctatcgaagccgcctaaaccaccgcctctcctcccgcgcccaaggctccccacctccaaccacgcccccaccaacgacaagcaagacgaccgccgtgaagcatcgacgggcgcggcgtcctctggctctgggtcgccctcgggcgccggagacgtgctccgcctgatggatgccctcggcgtcgcgcccgacgaggacgtctacgtctccctcctcagggactccgtcgacgccgccgaggtcgccgccgtgcacgcccacttygacgccgcacgcgccgcgcctggcctccccctgccgctggccaaccggctgctgctcgcctacgcggcctgcggcgacatggcggccgcccgcaaggtgttcgacgaaattcccgtcaaggacggcatcacgtgggcgaccatggtgtcggcctactccgatgggtgtttccatgaagaagcgctaaggctcttcacccgcatgtgccaagaagaacatgggcttgctggtgatctgctcggccatgccattgtggcagtgctgcggtcatgtgctcggctgggcagattaaggggctttggtgagcaggtacatgcgctcgtcgtcaagacaaagagagtctgcggtgataccggtagttcgctgctgcagctgtacatcgcaagtaatcagcatgacagtgcgcggcaagtgcttcaggcgatgaggtgttgttcccatgagccagtgcccgaggcagcctggactagcttcatgacagcttgccaccgggacggactgctagatgaggccatctatgtctttagggacatggtgtcctccggagtcgccaggagcagcttctccctgtcgactatccttgcggtatgtgcagaatcagataactgcaggtgttatggacagcaagtgcatggcgacgccatcaagcacggcgtggaaacagaccagttcgttgtgtctgggttggtccacatgtatgcgaagcaaggacggcttgcagacgccgcgagggcatttgaggcagtgggtggcaagcctgacgcggtgtgctggaacgccatggccatggggtatgcacgcggtgggtggtacagagaggccaccagaatgatgtaccagatgaaagctgctggactggatcttccaggactaaatgtggttggaatggcctgctccagattgatgcatgtagggattgatgcatccatggcaggattgatgcatgttttcccattttgggcgatggatcccaaggaggacatgaaccagaaggtgctcctcttcgcccgcaggaactgtgaccaccagtgtttgttcacctactggagcagctgagaagaggaggaagaaaaacaggacaactcttcaggaactagggttcatacaacactgttcatgatgtgagtatatcaccatgttcttgattttttagttaacaatattcagtcactaggagtacaacagtagcagtacatagctggaatatgcatttacatagacttactgatggctcaacattcgagctgattactagcagtgcaacactagcagtacacatatggatactcacagattactcctttgttactgtatttatctagagatgggagtagagctgaagcagtacgacttc

SEQ ID NO: 66093 - protein, 489 aa, Triticum aestivum
  peptide (1)..(489): Ceres Seq. ID no. 15220618
  misc_feature (394)..(425): Pfam Name: PPR repeat Pfam Description: PPR repeat
  misc_feature (155)..(217): Homolog of NCBI NO: 30684439 NR Description: pentatricopeptide (PPR) repeat-containing protein
  misc_feature (241)..(426): Homolog of NCBI NO: 30684439 NR Description: pentatricopeptide (PPR) repeat-containing protein
  misc_feature (110)..(439): Homolog of NCBI NO: 18409250 NR Description: pentatricopeptide (PPR) repeat-containing protein
  misc_feature (113)..(405): Homolog of NCBI NO: 34905780 NR Description: selenium-binding protein-like
  misc_feature (76)..(463): Homolog of NCBI NO: 15221304 NR Description: pentatricopeptide (PPR) repeat-containing protein
  misc_feature (102)..(444): Homolog of NCBI NO: 34897884 NR Description: Similar to Arabidopsis thaliana DNA chromosome 4,
  misc_feature (76)..(444): Homolog of NCBI NO: 27260973 NR Description: OJ1705_C03.3 [Oryza sativa (japonica
  misc_feature (104)..(443): Homolog of NCBI NO: 15226301 NR Description: pentatricopeptide (PPR) repeat-containing protein
  misc_feature (95)..(424): Homolog of NCBI NO: 15222460 NR Description: pentatricopeptide (PPR) repeat-containing protein
  misc_feature (5)..(438): Homolog of NCBI NO: 34900752 NR Description: OJ1341_A08.34 [Oryza sativa (japonica
  misc_feature (138)..(138): Xaa is any aa, unknown or other
CSRHMARCSVAKPLTTAAAAPRLPRRRALLVSAAAASLATATTRTQRLSALSKPPKPPPLLPRPRLPTSNHAPTNDKQDDRREASTGAASSGSGSPSGAGDVLRLMDALGVAPDEDVYVSLLRDSVDAAEVAAVHAHXDAARAAPGLPLPLANRLLLAYAACGDMAAARKVFDEIPVKDGITWATMVSAYSDGCFHEEALRLFTRMCQEEHGLAGDLLGHAIVAVLRSCARLGRLRGFGEQVHALVVKTKRVCGDTGSSLLQLYIASNQHDSARQVLQAMRCCSHEPVPEAAWTSFMTACHRDGLLDEAIYVFRDMVSSGVARSSFSLSTILAVCAESDNCRCYGQQVHGDAIKHGVETDQFVVSGLVHMYAKQGRLADAARAFEAVGGKPDAVCWNAMAMGYARGGWYREATRMMYQMKAAGLDLPGLNVVGMACSRLMHVGIDASMAGLMHVFPFWAMDPKEDMNQKVLLFARRNCDHQCLFTYWSS

SEQ ID NO: 66094 - protein, 485 aa, Triticum aestivum
  peptide (1)..(485): Ceres Seq. ID no. 15220619
  misc_feature (390)..(421): Pfam Name: PPR repeat Pfam Description: PPR repeat
  misc_feature (151)..(213): Homolog of NCBI NO: 30684439 NR Description: pentatricopeptide (PPR) repeat-containing protein
  misc_feature (237)..(422): Homolog of NCBI NO: 30684439 NR Description: pentatricopeptide (PPR) repeat-containing protein
  misc_feature (106)..(435): Homolog of NCBI NO: 18409250 NR Description: pentatricopeptide (PPR) repeat-containing protein
  misc_feature (109)..(401): Homolog of NCBI NO: 34905780 NR Description: selenium-binding protein-like
  misc_feature (72)..(459): Homolog of NCBI NO: 15221304 NR Description: pentatricopeptide (PPR) repeat-containing protein
  misc_feature (98)..(440): Homolog of NCBI NO: 34897884 NR Description: Similar to Arabidopsis thaliana DNA chromosome 4,
  misc_feature (72)..(440): Homolog of NCBI NO: 27260973 NR Description: OJ1705_C03.3 [Oryza sativa (japonica
  misc_feature (100)..(439): Homolog of NCBI NO: 15226301 NR Description: pentatricopeptide (PPR) repeat-containing protein
  misc_feature (91)..(420): Homolog of NCBI NO: 15222460 NR Description: pentatricopeptide (PPR) repeat-containing protein
  misc_feature (1)..(434): Homolog of NCBI NO: 34900752 NR Description: OJ1341_A08.34 [Oryza sativa (japonica
  misc_feature (134)..(134): Xaa is any aa, unknown or other
MARCSVAKPLTTAAAAPRLPRRRALLVSAAAASLATATTRTQRLSALSKPPKPPPLLPRPRLPTSNHAPTNDKQDDRREASTGAASSGSGSPSGAGDVLRLMDALGVAPDEDVYVSLLRDSVDAAEVAAVHAHXDAARAAPGLPLPLANRLLLAYAACGDMAAARKVFDEIPVKDGITWATMVSAYSDGCFHEEALRLFTRMCQEEHGLAGDLLGHAIVAVLRSCARLGRLRGFGEQVHALVVKTKRVCGDTGSSLLQLYIASNQHDSARQVLQAMRCCSHEPVPEAAWTSFMTACHRDGLLDEAIYVFRDMVSSGVARSSFSLSTILAVCAESDNCRCYGQQVHGDAIKHGVETDQFVVSGLVHMYAKQGRLADAARAFEAVGGKPDAVCWNAMAMGYARGGWYREATRMMYQMKAAGLDLPGLNVVGMACSRLMHVGIDASMAGLMHVFPFWAMDPKEDMNQKVLLFARRNCDHQCLFTYWSS

SEQ ID NO: 66095 - protein, 384 aa, Triticum aestivum
  peptide (1)..(384): Ceres Seq. ID no. 15220620
  misc_feature (289)..(320): Pfam Name: PPR repeat Pfam Description: PPR repeat
  misc_feature (50)..(112): Homolog of NCBI NO: 30684439 NR Description: pentatricopeptide (PPR) repeat-containing protein
  misc_feature (136)..(321): Homolog of NCBI NO: 30684439 NR Description: pentatricopeptide (PPR) repeat-containing protein
  misc_feature (5)..(334): Homolog of NCBI NO: 18409250 NR Description: pentatricopeptide (PPR) repeat-containing protein
  misc_feature (8)..(300): Homolog of NCBI NO: 34905780 NR Description: selenium-binding protein-like
  misc_feature (1)..(358): Homolog of NCBI NO: 15221304 NR Description: pentatricopeptide (PPR) repeat-containing protein
  misc_feature (1)..(339): Homolog of NCBI NO: 34897884 NR Description: Similar to Arabidopsis thaliana DNA chromosome 4,
  misc_feature (1)..(339): Homolog of NCBI NO: 27260973 NR Description: OJ1705_C03.3 [Oryza sativa (japonica
  misc_feature (1)..(338): Homolog of NCBI NO: 15226301 NR Description: pentatricopeptide (PPR) repeat-containing protein
  misc_feature (1)..(319): Homolog of NCBI NO: 15222460 NR Description: pentatricopeptide (PPR) repeat-containing protein
  misc_feature (1)..(333): Homolog of NCBI NO: 34900752 NR Description: OJ1341_A08.34 [Oryza sativa (japonica
  misc_feature (33)..(33): Xaa is any aa, unknown or other
MDALGVAPDEDVYVSLLRDSVDAAEVAAVHAHXDAARAAPGLPLPLANRLLLAYAACGDMAAARKVFDEIPVKDGITWATMVSAYSDGCFHEEALRLFTRMCQEEHGLAGDLLGHAIVAVLRSCARLGRLRGFGEQVHALVVKTKRVCGDTGSSLLQLYIASNQHDSARQVLQAMRCCSHEPVPEAAWTSFMTACHRDGLLDEAIYVFRDMVSSGVARSSFSLSTILAVCAESDNCRCYGQQVHGDAIKHGVETDQFVVSGLVHMYAKQGRLADAARAFEAVGGKPDAVCWNAMAMGYARGGWYREATRMMYQMKAAGLDLPGLNVVGMACSRLMHVGIDASMAGLMHVFPFWAMDPKEDMNQKVLLFARRNCDHQCLFTYWSS

SEQ ID NO: 66096 - DNA, 1966 bp, Triticum aestivum
  misc_feature (1)..(1966): Ceres Seq. ID no. 15169599
agcaaccaacaacatccgagcatcagcaccagctcaaacacacatactgtagtacattgcacgccaagctagcacccgcgcagagcacagcatggctgtctccgcgcgcagggtggccttcgccacggcagcctccttggccgtgtactggctcctcaaatcgttcctccacgcaccgcaccccgcgctgctgccggcagcggccgccctcgtcgccgtcgccgtgggagcgggagggaagcgtggaggccccggcgcccctccaggccccgcggccgtgccggtgttcggcaactggctgcaggtgggcaacgacctgaaccaccgcttcctggcgcggctgtcggcgcggtacggccccgtgttccggctgcggctgggcgtgcgcaacctggtggtggtgtcggacccgcggctggccacggaggtgctccacacgcagggcgtggagttcggctcccgcccgcggaacgtcgtcttcgacatcttcacggccaatggcgccgacatggtcttcaccgagtacggcgaccactggcgccgcatgcgccgcgtcatgacgctgcccttcttcacggcgcgggttgtgcagcagtaccgcgccatgtgggaggccgagatggacgacgtcgtgtccgacctgcgcgccgactcggcggcccgcggcgccggcgtcgtcgtgcgccgcaggctgcagctcatgctctacaacatcatgtaccgcatgatgttcgacgcccgcttcgactccgtggacgaccccatgttcgtggaggccaccaagttcaactcggagcgcagccgcctcgcgcagagcttcgattacaactacggcgacttcatccccatcctcaggcccttcctgcgtggctacctcaacaagtgcagggacctgcagacgaggaggctggccttcttcaacagcaactacgtcgagaagagaagggaggtgatggacaccccaggacaagacaagaacaagctccggtgcgcgatcgaccacatcctcgcagcagagaagagcggcgagatcacgccggagaacgtcatctacatcgtcgagaacatcaacgtcgcggccatcgagacgacgctatggtccatcgagtgggcgctggccgaggtggtgaaccacccggacgtgcagcgcaaggtccgcggcgagatcagggacgtgctcggcgacgacgagcccatcaccgagtccaacatcagcaagctgccgtacctgcaggccgtgatcaaggagacgctgcggctgcactccccgatcccgctcctcgtcccccacatgaacctggaggaggccagcctcggcggctacaccattcccaagggctccaaggtcgtcgtcaacgcctggtggctggccaacaacccagagctatgggagaagccggaggagttcaagccggagaggttcttgggcgaggagagcaacgtggacgccacggtcggcggcaaggtggacttccggttcctcccgttcggcgtggggcggcgcagctgccccggtatcatcctcgcgctgcccatcctggcgctcatcgtcgggaagctggtgaggagcttcgagatggtgccgccgccaggcgtggacaagctcgacgtgagcgagaaaggcgggcagttcagcctgcacattgccaaccattccgtcgtcgcattccaccccatctcaccctgagcaattgcatcttcaacccaatagcctgatccacaagcacaatttttcttcagattacaaatacagtagattacacgaaagtatgtcagttgatttatggggtttacatttttttttctttataaaaaggaggatcacgcgtggcctctgcataaggggtttaaaaaatgcttttcagctttaagaaattggtttacataacgcttttcagctttaagaaatgtatgtattttgcaaatcaaaatgttttttatgggtgcaaattgaaatgttattgcc

SEQ ID NO: 66097 - protein, 531 aa, Triticum aestivum
  peptide (1)..(531): Ceres Seq. ID no. 15169600
  misc_feature (57)..(524): Pfam Name: Cytochrome P450 Pfam Description: Cytochrome P450
  misc_feature (33)..(528): Homolog of NCBI NO: 1351206 NR Description: Trans-cinnamate 4-monooxygenase (Cinnamic acid
  misc_feature (38)..(530): Homolog of NCBI NO: 586082 NR Description: Trans-cinnamate 4-monooxygenase (Cinnamic acid
  misc_feature (33)..(528): Homolog of NCBI NO: 3915112 NR Description: Trans-cinnamate 4-monooxygenase (Cinnamic acid
  misc_feature (38)..(530): Homolog of NCBI NO: 3915095 NR Description: Trans-cinnamate 4-monooxygenase (Cinnamic acid
  misc_feature (57)..(530): Homolog of NCBI NO: 4566493 NR Description: trans-cinnamate 4-hydroxylase [Pinus taeda]
  misc_feature (21)..(529): Homolog of NCBI NO: 7430650 NR Description: trans-cinnamate 4-monooxygenase (EC 1.14.13.11) -
  misc_feature (21)..(530): Homolog of NCBI NO: 14423325 NR Description: elicitor-inducible cytochrome P450 [Nicotiana
  misc_feature (57)..(529): Homolog of NCBI NO: 4206116 NR Description: cinnamate 4-hydroxylase [Mesembryanthemum
  misc_feature (12)..(530): Homolog of NCBI NO: 14423323 NR Description: elicitor-inducible cytochrome P450 [Nicotiana
  misc_feature (57)..(529): Homolog of NCBI NO: 7650489 NR Description: cinnamate 4-hydroxylase CYP73 [Citrus sinensis]
MAVSARRVAFATAASLAVYWLLKSFLHAPHPALLPAAAALVAVAVGAGGKRGGPGAPPGPAAVPVFGNWLQVGNDLNHRFLARLSARYGPVFRLRLGVRNLVVVSDPRLATEVLHTQGVEFGSRPRNVVFDIFTANGADMVFTEYGDHWRRMRRVMTLPFFTARVVQQYRAMWEAEMDDVVSDLRADSAARGAGVVVRRRLQLMLYNIMYRMMFDARFDSVDDPMFVEATKFNSERSRLAQSFDYNYGDFIPILRPFLRGYLNKCRDLQTRRLAFFNSNYVEKRREVMDTPGQDKNKLRCAIDHILAAEKSGEITPENVIYIVENINVAAIETTLWSIEWALAEVVNHPDVQRKVRGEIRDVLGDDEPITESNISKLPYLQAVIKETLRLHSPIPLLVPHMNLEEASLGGYTIPKGSKVVVNAWWLANNPELWEKPEEFKPERFLGEESNVDATVGGKVDFRFLPFGVGRRSCPGIILALPILALIVGKLVRSFEMVPPPGVDKLDVSEKGGQFSLHIANHSVVAFHPISP

SEQ ID NO: 66098 - protein, 392 aa, Triticum aestivum
  peptide (1)..(392): Ceres Seq. ID no. 15169601
  misc_feature (1)..(385): Pfam Name: Cytochrome P450 Pfam Description: Cytochrome P450
  misc_feature (1)..(389): Homolog of NCBI NO: 1351206 NR Description: Trans-cinnamate 4-monooxygenase (Cinnamic acid
  misc_feature (1)..(391): Homolog of NCBI NO: 586082 NR Description: Trans-cinnamate 4-monooxygenase (Cinnamic acid
  misc_feature (1)..(389): Homolog of NCBI NO: 3915112 NR Description: Trans-cinnamate 4-monooxygenase (Cinnamic acid
  misc_feature (1)..(391): Homolog of NCBI NO: 3915095 NR Description: Trans-cinnamate 4-monooxygenase (Cinnamic acid
  misc_feature (1)..(391): Homolog of NCBI NO: 4566493 NR Description: trans-cinnamate 4-hydroxylase [Pinus taeda]
  misc_feature (1)..(390): Homolog of NCBI NO: 7430650 NR Description: trans-cinnamate 4-monooxygenase (EC 1.14.13.11) -
  misc_feature (1)..(391): Homolog of NCBI NO: 14423325 NR Description: elicitor-inducible cytochrome P450 [Nicotiana
  misc_feature (1)..(390): Homolog of NCBI NO: 4206116 NR Description: cinnamate 4-hydroxylase [Mesembryanthemum
  misc_feature (1)..(391): Homolog of NCBI NO: 14423323 NR Description: elicitor-inducible cytochrome P450 [Nicotiana
  misc_feature (1)..(390): Homolog of NCBI NO: 7650489 NR Description: cinnamate 4-hydroxylase CYP73 [Citrus sinensis]
MVFTEYGDHWRRMRRVMTLPFFTARVVQQYRAMWEAEMDDVVSDLRADSAARGAGVVVRRRLQLMLYNIMYRMMFDARFDSVDDPMFVEATKFNSERSRLAQSFDYNYGDFIPILRPFLRGYLNKCRDLQTRRLAFFNSNYVEKRREVMDTPGQDKNKLRCAIDHILAAEKSGEITPENVIYIVENINVAAIETTLWSIEWALAEVVNHPDVQRKVRGEIRDVLGDDEPITESNISKLPYLQAVIKETLRLHSPIPLLVPHMNLEEASLGGYTIPKGSKVVVNAWWLANNPELWEKPEEFKPERFLGEESNVDATVGGKVDFRFLPFGVGRRSCPGIILALPILALIVGKLVRSFEMVPPPGVDKLDVSEKGGQFSLHIANHSVVAFHPISP

SEQ ID NO: 66099 - protein, 380 aa, Triticum aestivum
  peptide (1)..(380): Ceres Seq. ID no. 15169602
  misc_feature (1)..(373): Pfam Name: Cytochrome P450 Pfam Description: Cytochrome P450
  misc_feature (1)..(377): Homolog of NCBI NO: 1351206 NR Description: Trans-cinnamate 4-monooxygenase (Cinnamic acid
  misc_feature (1)..(379): Homolog of NCBI NO: 586082 NR Description: Trans-cinnamate 4-monooxygenase (Cinnamic acid
  misc_feature (1)..(377): Homolog of NCBI NO: 3915112 NR Description: Trans-cinnamate 4-monooxygenase (Cinnamic acid
  misc_feature (1)..(379): Homolog of NCBI NO: 3915095 NR Description: Trans-cinnamate 4-monooxygenase (Cinnamic acid
  misc_feature (1)..(379): Homolog of NCBI NO: 4566493 NR Description: trans-cinnamate 4-hydroxylase [Pinus taeda]
  misc_feature (1)..(378): Homolog of NCBI NO: 7430650 NR Description: trans-cinnamate 4-monooxygenase (EC 1.14.13.11) -
  misc_feature (1)..(379): Homolog of NCBI NO: 14423325 NR Description: elicitor-inducible cytochrome P450 [Nicotiana
  misc_feature (1)..(378): Homolog of NCBI NO: 4206116 NR Description: cinnamate 4-hydroxylase [Mesembryanthemum
  misc_feature (1)..(379): Homolog of NCBI NO: 14423323 NR Description: elicitor-inducible cytochrome P450 [Nicotiana
  misc_feature (1)..(378): Homolog of NCBI NO: 7650489 NR Description: cinnamate 4-hydroxylase CYP73 [Citrus sinensis]
MRRVMTLPFFTARVVQQYRAMWEAEMDDVVSDLRADSAARGAGVVVRRRLQLMLYNIMYRMMFDARFDSVDDPMFVEATKFNSERSRLAQSFDYNYGDFIPILRPFLRGYLNKCRDLQTRRLAFFNSNYVEKRREVMDTPGQDKNKLRCAIDHILAAEKSGEITPENVIYIVENINVAAIETTLWSIEWALAEVVNHPDVQRKVRGEIRDVLGDDEPITESNISKLPYLQAVIKETLRLHSPIPLLVPHMNLEEASLGGYTIPKGSKVVVNAWWLANNPELWEKPEEFKPERFLGEESNVDATVGGKVDFRFLPFGVGRRSCPGIILALPILALIVGKLVRSFEMVPPPGVDKLDVSEKGGQFSLHIANHSVVAFHPISP

SEQ ID NO: 66100 - DNA, 531 bp, Triticum aestivum
  misc_feature (1)..(531): Ceres Seq. ID no. 14305395
cgtatacctgatgggaaatttcaggctgctttcctgacgtaccattctcttggacactgggttcatcgaggaagctcatcagaccaggctggccatagtcatgctgtcttgccagtcatgggtttgcaatcttacaacgacaagggggagtggtggtttcagacgagcagatctggttcgggggatgcagagtcctcgtcgagtcggccgtctcaggttcttcaagaaaggttgtcgacgctgaaccaagccgcggcggcgatggccagggccgacgtgtggaagaaggaccaggctcgcagaaacaggcacccggactacgagttcttcctgtcccggcagcaacggtagacagacgactccaggctttttgcgcgtacaatgtgttcaaaatgctgacggacgaacgtttgttcccttgtaaccagaagcaagcatgcggactgagcggtgccgtctgcgtgtgttaccaccctgtatatatttgagatagaggtacatgtcatgtggaggtgctgctcaattgaaagg

SEQ ID NO: 66101 - protein, 116 aa, Triticum aestivum
  peptide (1)..(116): Ceres Seq. ID no. 14305396
  misc_feature (1)..(113): Homolog of NCBI NO: 38344926 NR Description: OSJNBa0018M05.17 [Oryza sativa (japonica
RIPDGKFQAAFLTYHSLGHWVHRGSSSDQAGHSHAVLPVMGLQSYNDKGEWWFQTSRSGSGDAESSSSRPSQVLQERLSTLNQAAAAMARADVWKKDQARRNRHPDYEFFLSRQQR

SEQ ID NO: 66102 - protein, 77 aa, Triticum aestivum
  peptide (1)..(77): Ceres Seq. ID no. 14305397
  misc_feature (1)..(74): Homolog of NCBI NO: 38344926 NR Description: OSJNBa0018M05.17 [Oryza sativa (japonica
MGLQSYNDKGEWWFQTSRSGSGDAESSSSRPSQVLQERLSTLNQAAAAMARADVWKKDQARRNRHPDYEFFLSRQQR

SEQ ID NO: 66103 - DNA, 1838 bp, Triticum aestivum
  misc_feature (1)..(1838): Ceres Seq. ID no. 14313216
atgcggagctccatggcctgctggtcgccaaccatggcgccgctggcaatgctgctcgtctctgctctattcttcgtcacctcccatgcttcccttcctatccctatccaagctgccgccgacgacttcctccggtgcatgtcggcgtccgtcccaggcaaccttctctttccccgcagctcgccgtcgttcgcgtcggtccttgcgtcctccgtccggaacccgcggttcctcgggccggccgtggtgcgtccgctctgcatcgtcacggcgaccaacgcgtcccacgtccaggccgccgtcgtgtgcggccgccggcacggcgtgcgcctccgcgtgcgcagcggcgggcacgactacgagggcctctcgttccggtccgcgcgccaggaggacttcgccgtcgtggacctcgccgccctccgctccgtgcgcgtcaccgtgcgggagccggccgaggcgtgggtggagtccggcgccacgctcggggagctgtaccacgccatcgggagggcgaccgaccggcacgcgttcccggggggcctctgcccgacggtgggcgtcgggggccacctgagcggcggcggcttcggcatgctgctgcgcaagtacggcctcgcctccgaccacgtcatcaacgccgtgatggtggacgcggaggggcggctgctggacaagcaggccatggggcgcgacgtgttctgggccatccgcggcggcggcggcgggagcttcgggatcgtgctgtcgtggaaggtgaggctggtggccgtgccgccgagggtgacggtgttcaccgtcgtgaagacggcccgggagggcgcggcggacctcctcgccaagtggcaggaggtcgcccctgctctccccgacgacctgctggtgagggtggtcgtccagggggacaaggcgaggttccaggccctgtacctgggcgcccgcgacgcgctgctgccggtgatgggcagccggttcccggagctgggagtgaacccgacgcactgcaaggagatgtcgtggatccagtcggtgccctacatctacatcggcgaggcagccagcgtggacgacatcctgaaccggaccgtcgcgagggactcctccccgagcaagtcgacgtccgactacgtgcggcgggccatcccgagggacgtgtgggcgcggatcttctccgactggctggcgaggcgggacgcggggctgatgatcctggacccctacggcgggagcatcgcgggcgtggcggagtcggcgacgcccttctcgcaccgggccggcgtgctgtacaacgtgcagtacatgaacttctggggcgtgggcggcgacggcgcggcaaacacgaggtggatcagggacatgtacgcgttcatggagccgcacgtgagcaagaacccgcgggaggcgtacgtgaactacagggacctggacctcgggcagaacgtggtgggcgccggcgacgtctcgagcttcgaggccggtagggtgtggggggagaagtactactccaaggccaacttccggaggctcgccatggccaaggggcagatcgatccccgcgactacttcaggagcgagcagagcatcccgccgcttgttggctcgcagctggagctgacctccgccaggaacgcgccgcacgttgatggcgtgaatcctccgggttggtgggcagtggggtgtgggacaggcagtccgtgttcagtccttagctctgtcttggctaaactgatgcctagtttcttttagacatagctcattctgttttaccacgtagtacttgttggtcttattgtcaatggtgtttgctagcggaaataaagtctgaaattatggttaag

SEQ ID NO: 66104 - protein, 581 aa, Triticum aestivum
  peptide (1)..(581): Ceres Seq. ID no. 14313217
  misc_feature (85)..(242): Pfam Name: FAD binding domain Pfam Description: FAD binding domain
  misc_feature (23)..(534): Homolog of NCBI NO: 18652398 NR Description: carbohydrate oxidase [Lactuca sativa]
  misc_feature (50)..(529): Homolog of NCBI NO: 28058799 NR Description: berberine bridge enzyme-like protein [Arabidopsis
  misc_feature (9)..(531): Homolog of NCBI NO: 34905176 NR Description: putative berberine bridge enzyme
  misc_feature (70)..(531): Homolog of NCBI NO: 14194127 NR Description: AT4g20860/T13K14_20 [Arabidopsis thaliana]
  misc_feature (70)..(531): Homolog of NCBI NO: 15233424 NR Description: FAD-linked oxidoreductase family [Arabidopsis
  misc_feature (21)..(533): Homolog of NCBI NO: 15226830 NR Description: FAD-linked oxidoreductase family [Arabidopsis
  misc_feature (41)..(529): Homolog of NCBI NO: 15241498 NR Description: FAD-linked oxidoreductase family [Arabidopsis
  misc_feature (23)..(530): Homolog of NCBI NO: 15233411 NR Description: FAD-linked oxidoreductase family [Arabidopsis
  misc_feature (14)..(532): Homolog of NCBI NO: 15241494 NR Description: FAD-linked oxidoreductase family [Arabidopsis
  misc_feature (12)..(529): Homolog of NCBI NO: 15241495 NR Description: FAD-linked oxidoreductase family [Arabidopsis
MRSSMACWSPTMAPLAMLLVSALFFVTSHASLPIPIQAAADDFLRCMSASVPGNLLFPRSSPSFASVLASSVRNPRFLGPAVVRPLCIVTATNASHVQAAVVCGRRHGVRLRVRSGGHDYEGLSFRSARQEDFAVVDLAALRSVRVTVREPAEAWVESGATLGELYHAIGRATDRHAFPGGLCPTVGVGGHLSGGGFGMLLRKYGLASDHVINAVMVDAEGRLLDKQAMGRDVFWAIRGGGGGSFGIVLSWKVRLVAVPPRVTVFTVVKTAREGAADLLAKWQEVAPALPDDLLVRVVVQGDKARFQALYLGARDALLPVMGSRFPELGVNPTHCKEMSWIQSVPYIYIGEAASVDDILNRTVARDSSPSKSTSDYVRRAIPRDVWARIFSDWLARRDAGLMILDPYGGSIAGVAESATPFSHRAGVLYNVQYMNFWGVGGDGAANTRWIRDMYAFMEPHVSKNPREAYVNYRDLDLGQNVVGAGDVSSFEAGRVWGEKYYSKANFRRLAMAKGQIDPRDYFRSEQSIPPLVGSQLELTSARNAPHVDGVNPPGWWAVGCGTGSPCSVLSSVLAKLMPSFF

SEQ ID NO: 66105 - protein, 577 aa, Triticum aestivum
  peptide (1)..(577): Ceres Seq. ID no. 14313218
  misc_feature (81)..(238): Pfam Name: FAD binding domain Pfam Description: FAD binding domain
  misc_feature (19)..(530): Homolog of NCBI NO: 18652398 NR Description: carbohydrate oxidase [Lactuca sativa]
  misc_feature (46)..(525): Homolog of NCBI NO: 28058799 NR Description: berberine bridge enzyme-like protein [Arabidopsis
  misc_feature (5)..(527): Homolog of NCBI NO: 34905176 NR Description: putative berberine bridge enzyme
  misc_feature (66)..(527): Homolog of NCBI NO: 14194127 NR Description: AT4g20860/T13K14_20 [Arabidopsis thaliana]
  misc_feature (66)..(527): Homolog of NCBI NO: 15233424 NR Description: FAD-linked oxidoreductase family [Arabidopsis
  misc_feature (17)..(529): Homolog of NCBI NO: 15226830 NR Description: FAD-linked oxidoreductase family [Arabidopsis
  misc_feature (37)..(525): Homolog of NCBI NO: 15241498 NR Description: FAD-linked oxidoreductase family [Arabidopsis
  misc_feature (19)..(526): Homolog of NCBI NO: 15233411 NR Description: FAD-linked oxidoreductase family [Arabidopsis
  misc_feature (10)..(528): Homolog of NCBI NO: 15241494 NR Description: FAD-linked oxidoreductase family [Arabidopsis
  misc_feature (8)..(525): Homolog of NCBI NO: 15241495 NR Description: FAD-linked oxidoreductase family [Arabidopsis
MACWSPTMAPLAMLLVSALFFVTSHASLPIPIQAAADDFLRCMSASVPGNLLFPRSSPSFASVLASSVRNPRFLGPAVVRPLCIVTATNASHVQAAVVCGRRHGVRLRVRSGGHDYEGLSFRSARQEDFAVVDLAALRSVRVTVREPAEAWVESGATLGELYHAIGRATDRHAFPGGLCPTVGVGGHLSGGGFGMLLRKYGLASDHVINAVMVDAEGRLLDKQAMGRDVFWAIRGGGGGSFGIVLSWKVRLVAVPPRVTVFTVVKTAREGAADLLAKWQEVAPALPDDLLVRVVVQGDKARFQALYLGARDALLPVMGSRFPELGVNPTHCKEMSWIQSVPYIYIGEAASVDDILNRTVARDSSPSKSTSDYVRRAIPRDVWARIFSDWLARRDAGLMILDPYGGSIAGVAESATPFSHRAGVLYNVQYMNFWGVGGDGAANTRWIRDMYAFMEPHVSKNPREAYVNYRDLDLGQNVVGAGDVSSFEAGRVWGEKYYSKANFRRLAMAKGQIDPRDYFRSEQSIPPLVGSQLELTSARNAPHVDGVNPPGWWAVGCGTGSPCSVLSSVLAKLMPSFF

SEQ ID NO: 66106 - protein, 570 aa, Triticum aestivum
  peptide (1)..(570): Ceres Seq. ID no. 14313219
  misc_feature (74)..(231): Pfam Name: FAD binding domain Pfam Description: FAD binding domain
  misc_feature (12)..(523): Homolog of NCBI NO: 18652398 NR Description: carbohydrate oxidase [Lactuca sativa]
  misc_feature (39)..(518): Homolog of NCBI NO: 28058799 NR Description: berberine bridge enzyme-like protein [Arabidopsis
  misc_feature (1)..(520): Homolog of NCBI NO: 34905176 NR Description: putative berberine bridge enzyme
  misc_feature (59)..(520): Homolog of NCBI NO: 14194127 NR Description: AT4g20860/T13K14_20 [Arabidopsis thaliana]
  misc_feature (59)..(520): Homolog of NCBI NO: 15233424 NR Description: FAD-linked oxidoreductase family [Arabidopsis
  misc_feature (10)..(522): Homolog of NCBI NO: 15226830 NR Description: FAD-linked oxidoreductase family [Arabidopsis
  misc_feature (30)..(518): Homolog of NCBI NO: 15241498 NR Description: FAD-linked oxidoreductase family [Arabidopsis
  misc_feature (12)..(519): Homolog of NCBI NO: 15233411 NR Description: FAD-linked oxidoreductase family [Arabidopsis
  misc_feature (3)..(521): Homolog of NCBI NO: 15241494 NR Description: FAD-linked oxidoreductase family [Arabidopsis
  misc_feature (1)..(518): Homolog of NCBI NO: 15241495 NR Description: FAD-linked oxidoreductase family [Arabidopsis
MAPLAMLLVSALFFVTSHASLPIPIQAAADDFLRCMSASVPGNLLFPRSSPSFASVLASSVRNPRFLGPAVVRPLCIVTATNASHVQAAVVCGRRHGVRLRVRSGGHDYEGLSFRSARQEDFAVVDLAALRSVRVTVREPAEAWVESGATLGELYHAIGRATDRHAFPGGLCPTVGVGGHLSGGGFGMLLRKYGLASDHVINAVMVDAEGRLLDKQAMGRDVFWAIRGGGGGSFGIVLSWKVRLVAVPPRVTVFTVVKTAREGAADLLAKWQEVAPALPDDLLVRVVVQGDKARFQALYLGARDALLPVMGSRFPELGVNPTHCKEMSWIQSVPYIYIGEAASVDDILNRTVARDSSPSKSTSDYVRRAIPRDVWARIFSDWLARRDAGLMILDPYGGSIAGVAESATPFSHRAGVLYNVQYMNFWGVGGDGAANTRWIRDMYAFMEPHVSKNPREAYVNYRDLDLGQNVVGAGDVSSFEAGRVWGEKYYSKANFRRLAMAKGQIDPRDYFRSEQSIPPLVGSQLELTSARNAPHVDGVNPPGWWAVGCGTGSPCSVLSSVLAKLMPSFF

SEQ ID NO: 66107 - DNA, 1861 bp, Triticum aestivum
  misc_feature (1)..(1861): Ceres Seq. ID no. 15178460
accactctcccattcccgtataacccccgcagccgccgccgctcctccccctctcttcctcccttggccaaattttgcgggaaacgcgacgccacccggagaaaccctcctcccgcacctcgcctcccaccctgccaaaaccctcgcccctcctcctcctcctcctcctacgatggccgcgccgacgcctccgcccgccgccgcccccgccgcggcgccaggaccgacgccgccggcgcaagtggtgggcaacgccttcgtgcagcagtactacaacatcctccaccagtcaccggagctcgtcttccgcttctaccaggaggccagccgcatcggccgccccgccaccaccggcgccgacatggacaccgtcaccaccatggaggcgattaacgagaagatcatgtccatggacatcgcgcgggcggagatcaggggggtggacgcgcaggagtcgctatgtggcggtgtgaccgtgctcgtcacgggccacctcacagggaaggacgacgtctgccgcgagttcgcgcagtccttcttcctcgcgccgcaggagaagggttacttcgtgctcaacgacatactacgttatgtcgggcagggtgaggccgacccgtcattgccgccacctcagcagcagccgccggcaccggagttggatgcagtggttgcccctgctgccgccttggcaaatggtactgttgcccctgtggagactgtgcctcgcgagcaggaggcttcgccgcagccagagctggatctctctgagtctgttcctcataccaacgaggaggaggatcccaaggaggaggtttacaacccaccgaatgacgtggaggtgcctgttgtggaggaaacactggttcctgaggtcatagatgaagtgccaaataatgtagcagcctccataccggtttcggctccccctgtaccacatgaggaggcccctaagaagtcgtacgcttcaattgtcaaagtcatgaaagcagttctgccaccaaattccacagttccttacaggcctgcaccaccaaaaccagagaagcaagctcctgctcctgcccagtctgtggctgttgatgctccaactttcagtcctaatcctgagagcagcaacattcaagaccaagaagttgatgcgcttgcggtgtatgtaaaaaatctgcccttacatgccacacctagccaattagaagaggagttcaaaagatttggtactattaaacatgatggtatccaagttagaagccacaagattcaagggttctgctatggcttcatagagtttgaggatgccagctcagttcaaagtgcactagcggcttctcctgtgacgattgatgaccggccatgccacgtcgaagaaaaaagaactcctggttcacgtggtagtagcaggggaaggtttccaccgggtagaggtggtaatttccgaggtgaaggcatgagaggccgtggtagttacactggagggagaggctatggaaggggcgagtacaacaactatcgatctgattttggaggcagaggcggtggtagaggcggctcaggtcgtggaggtgatgttggctaccagcgggttgatcactctggcaccggtggtcgtggtggtgcccgggcagctgcaaagtgagtttggtagctatgcgttggtagaagtttgctatttcattgtcgttgaacgtactaagattcacaaaaatggtgtgtcgtgagctgggttcctgtgcggtcgttgtcagcgtattcaggtcataaattggtgctctccttgttttgtggcaaggaaagcagtggtgatattggttactaattgtagaatattacaatctattcagatgcagtcctagtaagttttgac

SEQ ID NO: 66108 - protein, 543 aa, Triticum aestivum
  peptide (1)..(543): Ceres Seq. ID no. 15178461
  misc_feature (82)..(197): Pfam Name: Nuclear transport factor 2 (NTF2) domain Pfam Description: Nuclear transport factor 2 (NTF2) domain
  misc_feature (75)..(350): Homolog of NCBI NO: 30697452 NR Description: NTF2-containing RNA-binding protein, putative
  misc_feature (222)..(537): Homolog of NCBI NO: 30697452 NR Description: NTF2-containing RNA-binding protein, putative
  misc_feature (222)..(537): Homolog of NCBI NO: 21553535 NR Description: ras-GTPase-activating protein SH3-domain binding
  misc_feature (75)..(518): Homolog of NCBI NO: 15240057 NR Description: NTF2-containing RNA-binding protein, putative
  misc_feature (222)..(537): Homolog of NCBI NO: 30697455 NR Description: NTF2-containing RNA-binding protein, putative
  misc_feature (67)..(525): Homolog of NCBI NO: 31126693 NR Description: putative GAP SH3 binding protein
  misc_feature (75)..(519): Homolog of NCBI NO: 34394922 NR Description: putative Ras-GTPase activating protein SH3
  misc_feature (82)..(541): Homolog of NCBI NO: 9294171 NR Description: RNA-binding protein-like [Arabidopsis thaliana]
  misc_feature (69)..(541): Homolog of NCBI NO: 30687772 NR Description: NTF2-containing RNA-binding protein, putative
  misc_feature (58)..(543): Homolog of NCBI NO: 21742151 NR Description: OSJNBa0069D17.2 [Oryza sativa (japonica
PLSHSRITPAAAAAPPPLFLPWPNFAGNATPPGETLLPHLASHPAKTLAPPPPPPPTMAAPTPPPAAAPAAAPGPTPPAQVVGNAFVQQYYNILHQSPELVFRFYQEASRIGRPATTGADMDTVTTMEAINEKIMSMDIARAEIRGVDAQESLCGGVTVLVTGHLTGKDDVCREFAQSFFLAPQEKGYFVLNDILRYVGQGEADPSLPPPQQQPPAPELDAVVAPAAALANGTVAPVETVPREQEASPQPELDLSESVPHTNEEEDPKEEVYNPPNDVEVPVVEETLVPEVIDEVPNNVAASIPVSAPPVPHEEAPKKSYASIVKVMKAVLPPNSTVPYRPAPPKPEKQAPAPAQSVAVDAPTFSPNPESSNIQDQEVDALAVYVKNLPLHATPSQLEEEFKRFGTIKHDGIQVRSHKIQGFCYGFIEFEDASSVQSALAASPVTIDDRPCHVEEKRTPGSRGSSRGRFPPGRGGNFRGEGMRGRGSYTGGRGYGRGEYNNYRSDFGGRGGGRGGSGRGGDVGYQRVDHSGTGGRGGARAAAK

SEQ ID NO: 66109 - protein, 486 aa, Triticum aestivum
  peptide (1)..(486): Ceres Seq. ID no. 15178462
  misc_feature (25)..(140): Pfam Name: Nuclear transport factor 2 (NTF2) domain Pfam Description: Nuclear transport factor 2 (NTF2) domain
  misc_feature (18)..(293): Homolog of NCBI NO: 30697452 NR Description: NTF2-containing RNA-binding protein, putative
  misc_feature (165)..(480): Homolog of NCBI NO: 30697452 NR Description: NTF2-containing RNA-binding protein, putative
  misc_feature (165)..(480): Homolog of NCBI NO: 21553535 NR Description: ras-GTPase-activating protein SH3-domain binding
  misc_feature (18)..(461): Homolog of NCBI NO: 15240057 NR Description: NTF2-containing RNA-binding protein, putative
  misc_feature (165)..(480): Homolog of NCBI NO: 30697455 NR Description: NTF2-containing RNA-binding protein, putative
  misc_feature (10)..(468): Homolog of NCBI NO: 31126693 NR Description: putative GAP SH3 binding protein
  misc_feature (18)..(462): Homolog of NCBI NO: 34394922 NR Description: putative Ras-GTPase activating protein SH3
  misc_feature (25)..(484): Homolog of NCBI NO: 9294171 NR Description: RNA-binding protein-like [Arabidopsis thaliana]
  misc_feature (12)..(484): Homolog of NCBI NO: 30687772 NR Description: NTF2-containing RNA-binding protein, putative
  misc_feature (1)..(486): Homolog of NCBI NO: 21742151 NR Description: OSJNBa0069D17.2 [Oryza sativa (japonica
MAAPTPPPAAAPAAAPGPTPPAQVVGNAFVQQYYNILHQSPELVFRFYQEASRIGRPATTGADMDTVTTMEAINEKIMSMDIARAEIRGVDAQESLCGGVTVLVTGHLTGKDDVCREFAQSFFLAPQEKGYFVLNDILRYVGQGEADPSLPPPQQQPPAPELDAVVAPAAALANGTVAPVETVPREQEASPQPELDLSESVPHTNEEEDPKEEVYNPPNDVEVPVVEETLVPEVIDEVPNNVAASIPVSAPPVPHEEAPKKSYASIVKVMKAVLPPNSTVPYRPAPPKPEKQAPAPAQSVAVDAPTFSPNPESSNIQDQEVDALAVYVKNLPLHATPSQLEEEFKRFGTIKHDGIQVRSHKIQGFCYGFIEFEDASSVQSALAASPVTIDDRPCHVEEKRTPGSRGSSRGRFPPGRGGNFRGEGMRGRGSYTGGRGYGRGEYNNYRSDFGGRGGGRGGSGRGGDVGYQRVDHSGTGGRGGARAAAK

SEQ ID NO: 66110 - protein, 423 aa, Triticum aestivum
  peptide (1)..(423): Ceres Seq. ID no. 15178463
  misc_feature (1)..(77): Pfam Name: Nuclear transport factor 2 (NTF2) domain Pfam Description: Nuclear transport factor 2 (NTF2) domain
  misc_feature (1)..(230): Homolog of NCBI NO: 30697452 NR Description: NTF2-containing RNA-binding protein, putative
  misc_feature (102)..(417): Homolog of NCBI NO: 30697452 NR Description: NTF2-containing RNA-binding protein, putative
  misc_feature (102)..(417): Homolog of NCBI NO: 21553535 NR Description: ras-GTPase-activating protein SH3-domain binding
  misc_feature (1)..(398): Homolog of NCBI NO: 15240057 NR Description: NTF2-containing RNA-binding protein, putative
  misc_feature (102)..(417): Homolog of NCBI NO: 30697455 NR Description: NTF2-containing RNA-binding protein, putative
  misc_feature (1)..(405): Homolog of NCBI NO: 31126693 NR Description: putative GAP SH3 binding protein
  misc_feature (1)..(399): Homolog of NCBI NO: 34394922 NR Description: putative Ras-GTPase activating protein SH3
  misc_feature (1)..(421): Homolog of NCBI NO: 9294171 NR Description: RNA-binding protein-like [Arabidopsis thaliana]
  misc_feature (1)..(421): Homolog of NCBI NO: 30687772 NR Description: NTF2-containing RNA-binding protein, putative
  misc_feature (1)..(423): Homolog of NCBI NO: 21742151 NR Description: OSJNBa0069D17.2 [Oryza sativa (japonica
MDTVTTMEAINEKIMSMDIARAEIRGVDAQESLCGGVTVLVTGHLTGKDDVCREFAQSFFLAPQEKGYFVLNDILRYVGQGEADPSLPPPQQQPPAPELDAVVAPAAALANGTVAPVETVPREQEASPQPELDLSESVPHTNEEEDPKEEVYNPPNDVEVPVVEETLVPEVIDEVPNNVAASIPVSAPPVPHEEAPKKSYASIVKVMKAVLPPNSTVPYRPAPPKPEKQAPAPAQSVAVDAPTFSPNPESSNIQDQEVDALAVYVKNLPLHATPSQLEEEFKRFGTIKHDGIQVRSHKIQGFCYGFIEFEDASSVQSALAASPVTIDDRPCHVEEKRTPGSRGSSRGRFPPGRGGNFRGEGMRGRGSYTGGRGYGRGEYNNYRSDFGGRGGGRGGSGRGGDVGYQRVDHSGTGGRGGARAAAK

SEQ ID NO: 66111 - DNA, 1380 bp, Triticum aestivum
  misc_feature (1)..(1380): Ceres Seq. ID no. 12784228
actctcccccgaaccttctagaaccctacccacccatggcggcctcgctcctctcgcgcgccgcctcggccgccttcgccctccgcggcggcgcccggctcctccccaagggaagggtcggatgggcgcgcgcggcggaggtcggctgcggggcgtcgctgtcgccgtcgatgacgcggttcgggatcgccgcgcgcttcaacgccacctcgtcggccgtgtcggaggccgccgccgccgcgtcgggcgccgtccacgcggtgccgcggacggagcctgtcgtgtccgccgagtggctccacgccaacctcagggaccccgatgtgaaggtacttgatgcctcttggtatatgcctgcagaacaaaggaatccccttcaggagtaccaggtggctcatatccctggtgccttattctttgatgtcgatggaatatctgacagagcatctagtctgccacacatgctgccatctgagaaagcattttctgctgctgtgtcttctcttggcatctacaacaaagatggaatagtagtttatgatggaaagggtctatttagcgctgctcgtgtttggtggatgtttcgtgcttatggacatgacaaagtttgggttttggatggaggtttgccccaatggcgtgcttctgggtatgatgtcgaatcaagtgcctctagtgatgctatcttaaaagccagtgctgctagtgaagcaatcgagaaagtttatcaggggcaatcggttggtcccaccacatttgaagcgaagttgcagcctcatcttctttggaatcttggtcaggtgaaagagaacatcgagacccagacacatcaacttatagatgctcgagggaagcctagatttgatggtgcagttccagagccacgcaagggaataagaagcgggcatgtgcctgggagcaaatgcgttccttttcctcaggtccttgacagtacacagaagctattgcctgcagatgatctccgtaagcgattcgagcaagaaggtatatcacttgatcaacccattgtgacctcttgcggcactggtgtgacagcatgtgtattggctttgggccttcatcgcctcggcaaaactgatgttgccgtgtacgatggatcatggactgaatggggtgctcaccctgacactccagttgctactgctgtttagtctcacgcggcgtgtatggaggaccatcttttgtacccgcacttctcagcgatgtatgaaggtcagaaggcaaaggaaactgaagagtgtgggtgggtgtaaggttgtggaagcgatgctgttcggcgttttcaatgtaaattatcgaaacagagaaaaattgaatacatactgtgtgaatcaatagttgatgatccacctttctgtg

SEQ ID NO: 66112 - protein, 389 aa, Triticum aestivum
  peptide (1)..(389): Ceres Seq. ID no. 12784229
  misc_feature (95)..(215): Pfam Name: Rhodanese-like domain Pfam Description: Rhodanese-like domain
  misc_feature (249)..(387): Homolog of NCBI NO: 27381801 NR Description: thiosulfate sulfurtransferase [Bradyrhizobium
  misc_feature (88)..(243): Homolog of NCBI NO: 27381801 NR Description: thiosulfate sulfurtransferase [Bradyrhizobium
  misc_feature (91)..(388): Homolog of NCBI NO: 14571545 NR Description: thiosulfate transferase [Triticum aestivum]
  misc_feature (73)..(385): Homolog of NCBI NO: 25288797 NR Description: hypothetical protein F3O9.26 [imported] -
  misc_feature (73)..(385): Homolog of NCBI NO: 25456716 NR Description: thiosulfate sulfurtransferase (EC 2.8.1.1)
  misc_feature (73)..(385): Homolog of NCBI NO: 30684873 NR Description: mercaptopyruvate sulfurtransferase (Mst2/Rdh2)
  misc_feature (73)..(385): Homolog of NCBI NO: 18394364 NR Description: mercaptopyruvate sulfurtransferase (Mst2/Rdh2)
  misc_feature (12)..(385): Homolog of NCBI NO: 25288794 NR Description: thiosulfate sulfurtransferase (EC 2.8.1.1) Mst1
  misc_feature (12)..(385): Homolog of NCBI NO: 18412307 NR Description: mercaptopyruvate sulfurtransferase (Mst1/Rdh1)
  misc_feature (12)..(387): Homolog of NCBI NO: 4406372 NR Description: thiosulfate sulfurtransferase [Datisca glomerata]
SPPNLLEPYPPMAASLLSRAASAAFALRGGARLLPKGRVGWARAAEVGCGASLSPSMTRFGIAARFNATSSAVSEAAAAASGAVHAVPRTEPVVSAEWLHANLRDPDVKVLDASWYMPAEQRNPLQEYQVAHIPGALFFDVDGISDRASSLPHMLPSEKAFSAAVSSLGIYNKDGIVVYDGKGLFSAARVWWMFRAYGHDKVWVLDGGLPQWRASGYDVESSASSDAILKASAASEAIEKVYQGQSVGPTTFEAKLQPHLLWNLGQVKENIETQTHQLIDARGKPRFDGAVPEPRKGIRSGHVPGSKCVPFPQVLDSTQKLLPADDLRKRFEQEGISLDQPIVTSCGTGVTACVLALGLHRLGKTDVAVYDGSWTEWGAHPDTPVATAV

SEQ ID NO: 66113 - protein, 378 aa, Triticum aestivum
  peptide (1)..(378): Ceres Seq. ID no. 12784230
  misc_feature (84)..(204): Pfam Name: Rhodanese-like domain Pfam Description: Rhodanese-like domain
  misc_feature (238)..(376): Homolog of NCBI NO: 27381801 NR Description: thiosulfate sulfurtransferase [Bradyrhizobium
  misc_feature (77)..(232): Homolog of NCBI NO: 27381801 NR Description: thiosulfate sulfurtransferase [Bradyrhizobium
  misc_feature (80)..(377): Homolog of NCBI NO: 14571545 NR Description: thiosulfate transferase [Triticum aestivum]
  misc_feature (62)..(374): Homolog of NCBI NO: 25288797 NR Description: hypothetical protein F3O9.26 [imported] -
  misc_feature (62)..(374): Homolog of NCBI NO: 25456716 NR Description: thiosulfate sulfurtransferase (EC 2.8.1.1)
  misc_feature (62)..(374): Homolog of NCBI NO: 30684873 NR Description: mercaptopyruvate sulfurtransferase (Mst2/Rdh2)
  misc_feature (62)..(374): Homolog of NCBI NO: 18394364 NR Description: mercaptopyruvate sulfurtransferase (Mst2/Rdh2)
  misc_feature (1)..(374): Homolog of NCBI NO: 25288794 NR Description: thiosulfate sulfurtransferase (EC 2.8.1.1) Mst1
  misc_feature (1)..(374): Homolog of NCBI NO: 18412307 NR Description: mercaptopyruvate sulfurtransferase (Mst1/Rdh1)
  misc_feature (1)..(376): Homolog of NCBI NO: 4406372 NR Description: thiosulfate sulfurtransferase [Datisca glomerata]
MAASLLSRAASAAFALRGGARLLPKGRVGWARAAEVGCGASLSPSMTRFGIAARFNATSSAVSEAAAAASGAVHAVPRTEPVVSAEWLHANLRDPDVKVLDASWYMPAEQRNPLQEYQVAHIPGALFFDVDGISDRASSLPHMLPSEKAFSAAVSSLGIYNKDGIVVYDGKGLFSAARVWWMFRAYGHDKVWVLDGGLPQWRASGYDVESSASSDAILKASAASEAIEKVYQGQSVGPTTFEAKLQPHLLWNLGQVKENIETQTHQLIDARGKPRFDGAVPEPRKGIRSGHVPGSKCVPFPQVLDSTQKLLPADDLRKRFEQEGISLDQPIVTSCGTGVTACVLALGLHRLGKTDVAVYDGSWTEWGAHPDTPVATAV

SEQ ID NO: 66114 - protein, 333 aa, Triticum aestivum
  peptide (1)..(333): Ceres Seq. ID no. 12784231
  misc_feature (39)..(159): Pfam Name: Rhodanese-like domain Pfam Description: Rhodanese-like domain
  misc_feature (193)..(331): Homolog of NCBI NO: 27381801 NR Description: thiosulfate sulfurtransferase [Bradyrhizobium
  misc_feature (32)..(187): Homolog of NCBI NO: 27381801 NR Description: thiosulfate sulfurtransferase [Bradyrhizobium
  misc_feature (35)..(332): Homolog of NCBI NO: 14571545 NR Description: thiosulfate transferase [Triticum aestivum]
  misc_feature (17)..(329): Homolog of NCBI NO: 25288797 NR Description: hypothetical protein F3O9.26 [imported] -
  misc_feature (17)..(329): Homolog of NCBI NO: 25456716 NR Description: thiosulfate sulfurtransferase (EC 2.8.1.1)
  misc_feature (17)..(329): Homolog of NCBI NO: 30684873 NR Description: mercaptopyruvate sulfurtransferase (Mst2/Rdh2)
  misc_feature (17)..(329): Homolog of NCBI NO: 18394364 NR Description: mercaptopyruvate sulfurtransferase (Mst2/Rdh2)
  misc_feature (1)..(329): Homolog of NCBI NO: 25288794 NR Description: thiosulfate sulfurtransferase (EC 2.8.1.1) Mst1
  misc_feature (1)..(329): Homolog of NCBI NO: 18412307 NR Description: mercaptopyruvate sulfurtransferase (Mst1/Rdh1)
  misc_feature (1)..(331): Homolog of NCBI NO: 4406372 NR Description: thiosulfate sulfurtransferase [Datisca glomerata]
MTRFGIAARFNATSSAVSEAAAAASGAVHAVPRTEPVVSAEWLHANLRDPDVKVLDASWYMPAEQRNPLQEYQVAHIPGALFFDVDGISDRASSLPHMLPSEKAFSAAVSSLGIYNKDGIVVYDGKGLFSAARVWWMFRAYGHDKVWVLDGGLPQWRASGYDVESSASSDAILKASAASEAIEKVYQGQSVGPTTFEAKLQPHLLWNLGQVKENIETQTHQLIDARGKPRFDGAVPEPRKGIRSGHVPGSKCVPFPQVLDSTQKLLPADDLRKRFEQEGISLDQPIVTSCGTGVTACVLALGLHRLGKTDVAVYDGSWTEWGAHPDTPVATAV

SEQ ID NO: 66115 - DNA, 1750 bp, Triticum aestivum
  misc_feature (1)..(1750): Ceres Seq. ID no. 13657460
gcaaccaaaatcaccatgaaatcttactaattaagcagacaatattattgcaccagtgcagatcatgttcatatatataagctctatatagaaggcagtgagcaagcaaaccctaggtcaccgtcgtcgactgttcgtagtcgccggtatgcatgcatgcacagagtagaaggcgcgcgcgccaatggcacctactgccacgccgacacggacagcagcggccgcgtctgccacccgaggaagcacgcgccgcgggactcctgcaccaggtatccctccgacgggtagtgcagccgcagcagtagccgcgcctgggaaacggcgaacgcgctgagcggccgcgcggcgaacccagtgccgcgtgcggcggtagcccaccgctcgagcccgcgccaccacctcccgcctgtcccgcccaccgcggcctcgatctccctgccgaggacctcctgctccaccgccagcctctcccggctccccggcggcaccgtcgcctcaagcgcctcgaacaccgccgaatagtgatccatggccacaccaacacggcgcgggagctcgtcgatggggtcgatctctcctccgctcgcctccctctcggcgacggtcaccacggcgggggccatggccttcacccacttgaggaacgctgcgagctcgtcctgcccgccgagcttgtgcaagaacagcacgcagttcacggccagcgtctcgtcgggatgtagctccaggctcgtgacagcggtgctcggggtggtgctcgtgccggcgacgtggtgcgtgctggcggcgcaggagaggaggagcggggtgaagtggaaagggaggtggatcgagcgggcgaaagcgcgtagccggttgcctgtacgaaggagtgtgtcgcggtcggcgccagcgccggtgatgcggacctcgggcgggcccagcgccgggtcggctcgttcggcgatcgcctggaggagtggcggccactgcacgccgtgcgccgcgtcgaggtcgaggatgtggacgcggcgcgaaccctccacggcctcgaggatggcctggttggccgtcaggtgggcgaaccgcaggaacggcgcgatctggttgaacgccaggtacgccccggacggtgccggcgctgtcccagctggcggccgcggggagaacggcagcccggccttggagtccacgcggagcacgagcgcgcgcgcgaagtggtacgcgaggcggtcggtggcgtcgccgcgcggggacgccgcggagaggaggatctcggcagcgcggcgcgcggcggcgaggtccccgcgctgcagcaggtcggcgcaggccagcacgaggtcccgcgtggacggtgccgccgcgagcgcacgcccgccgccgcccagcaaggcagcgtcgcccccgccctcgccgctgctgttcctgaggtcggcgttgctgttgttgtcggtgtcggaggacgaggaagagtggagtgagctgatcatgtcttcttcttcgctcgcggcgccctgggactaggatcgtcgtgagcggccggaggtggaggagaagacggagacggagacggagcatgagggcgcgcatctctgggggggtttaatagggacgatgagggcgcacgtccagcagcatctgggctcgcagcttccttgacaggacatcatctgccaaaaatacacaagtatgctgctgctgctagctagcttgtgtgagtgagtgagaggggagaacccagcagcaccatcttttcgattaggatgttcta

SEQ ID NO: 66116 - protein, 324 aa, Triticum aestivum
  peptide (1)..(324): Ceres Seq. ID no. 13657461
  misc_feature (1)..(288): Homolog of NCBI NO: 13592175 NR Description: ppg3 [Leishmania major]
  misc_feature (1)..(284): Homolog of NCBI NO: 15901602 NR Description: cell wall surface anchor family protein
  misc_feature (1)..(284): Homolog of NCBI NO: 15901602 NR Description: cell wall surface anchor family protein
  misc_feature (1)..(284): Homolog of NCBI NO: 15901602 NR Description: cell wall surface anchor family protein
  misc_feature (1)..(322): Homolog of NCBI NO: 13592175 NR Description: ppg3 [Leishmania major]
  misc_feature (1)..(322): Homolog of NCBI NO: 13592175 NR Description: ppg3 [Leishmania major]
  misc_feature (1)..(321): Homolog of NCBI NO: 15901602 NR Description: cell wall surface anchor family protein
  misc_feature (1)..(288): Homolog of NCBI NO: 15901602 NR Description: cell wall surface anchor family protein
  misc_feature (1)..(288): Homolog of NCBI NO: 15901602 NR Description: cell wall surface anchor family protein
  misc_feature (1)..(321): Homolog of NCBI NO: 15901602 NR Description: cell wall surface anchor family protein
MATPTRRGSSSMGSISPPLASLSATVTTAGAMAFTHLRNAASSSCPPSLCKNSTQFTASVSSGCSSRLVTAVLGVVLVPATWCVLAAQERRSGVKWKGRWIERAKARSRLPVRRSVSRSAPAPVMRTSGGPSAGSARSAIAWRSGGHCTPCAASRSRMWTRREPSTASRMAWLAVRWANRRNGAIWLNARYAPDGAGAVPAGGRGENGSPALESTRSTSARAKWYARRSVASPRGDAAERRISAARRAAARSPRCSRSAQASTRSRVDGAAASARPPPPSKAASPPPSPLLFLRSALLLLSVSEDEEEWSELIMSSSSLAAPWD

SEQ ID NO: 66117 - protein, 313 aa, Triticum aestivum
  peptide (1)..(313): Ceres Seq. ID no. 13657462
  misc_feature (1)..(277): Homolog of NCBI NO: 13592175 NR Description: ppg3 [Leishmania major]
  misc_feature (1)..(273): Homolog of NCBI NO: 15901602 NR Description: cell wall surface anchor family protein
  misc_feature (1)..(273): Homolog of NCBI NO: 15901602 NR Description: cell wall surface anchor family protein
  misc_feature (1)..(273): Homolog of NCBI NO: 15901602 NR Description: cell wall surface anchor family protein
  misc_feature (1)..(311): Homolog of NCBI NO: 13592175 NR Description: ppg3 [Leishmania major]
  misc_feature (1)..(311): Homolog of NCBI NO: 13592175 NR Description: ppg3 [Leishmania major]
  misc_feature (1)..(310): Homolog of NCBI NO: 15901602 NR Description: cell wall surface anchor family protein
  misc_feature (1)..(277): Homolog of NCBI NO: 15901602 NR Description: cell wall surface anchor family protein
  misc_feature (1)..(277): Homolog of NCBI NO: 15901602 NR Description: cell wall surface anchor family protein
  misc_feature (1)..(310): Homolog of NCBI NO: 15901602 NR Description: cell wall surface anchor family protein
MGSISPPLASLSATVTTAGAMAFTHLRNAASSSCPPSLCKNSTQFTASVSSGCSSRLVTAVLGVVLVPATWCVLAAQERRSGVKWKGRWIERAKARSRLPVRRSVSRSAPAPVMRTSGGPSAGSARSAIAWRSGGHCTPCAASRSRMWTRREPSTASRMAWLAVRWANRRNGAIWLNARYAPDGAGAVPAGGRGENGSPALESTRSTSARAKWYARRSVASPRGDAAERRISAARRAAARSPRCSRSAQASTRSRVDGAAASARPPPPSKAASPPPSPLLFLRSALLLLSVSEDEEEWSELIMSSSSLAAPWD

SEQ ID NO: 66118 - protein, 293 aa, Triticum aestivum
  peptide (1)..(293): Ceres Seq. ID no. 13657463
  misc_feature (1)..(257): Homolog of NCBI NO: 13592175 NR Description: ppg3 [Leishmania major]
  misc_feature (1)..(253): Homolog of NCBI NO: 15901602 NR Description: cell wall surface anchor family protein
  misc_feature (1)..(253): Homolog of NCBI NO: 15901602 NR Description: cell wall surface anchor family protein
  misc_feature (1)..(253): Homolog of NCBI NO: 15901602 NR Description: cell wall surface anchor family protein
  misc_feature (1)..(291): Homolog of NCBI NO: 13592175 NR Description: ppg3 [Leishmania major]
  misc_feature (1)..(291): Homolog of NCBI NO: 13592175 NR Description: ppg3 [Leishmania major]
  misc_feature (1)..(290): Homolog of NCBI NO: 15901602 NR Description: cell wall surface anchor family protein
  misc_feature (1)..(257): Homolog of NCBI NO: 15901602 NR Description: cell wall surface anchor family protein
  misc_feature (1)..(257): Homolog of NCBI NO: 15901602 NR Description: cell wall surface anchor family protein
  misc_feature (1)..(290): Homolog of NCBI NO: 15901602 NR Description: cell wall surface anchor family protein
MAFTHLRNAASSSCPPSLCKNSTQFTASVSSGCSSRLVTAVLGVVLVPATWCVLAAQERRSGVKWKGRWIERAKARSRLPVRRSVSRSAPAPVMRTSGGPSAGSARSAIAWRSGGHCTPCAASRSRMWTRREPSTASRMAWLAVRWANRRNGAIWLNARYAPDGAGAVPAGGRGENGSPALESTRSTSARAKWYARRSVASPRGDAAERRISAARRAAARSPRCSRSAQASTRSRVDGAAASARPPPPSKAASPPPSPLLFLRSALLLLSVSEDEEEWSELIMSSSSLAAPWD

SEQ ID NO: 66119 - DNA, 1854 bp, Triticum aestivum
  misc_feature (1)..(1854): Ceres Seq. ID no. 13657677
cgcctccaccgccccactcacaaccttatcgtcgccgcggcctgagcacagatggcgccgccggcagcagcgccgcctcccgccatgtccgccctccccaccttcgcctcctcccacccatacccttccctcaccacgcccaaaaccgccgccctcaaaccgcgcctcaacctggcctatgccggcgccgccgcggcccccaatgccgtcccccaccgcagcgccgccgcctccaacgaccgcctgcggggtctggtccgccgcggcgacctcgaggaggccctccggctcgtcgagtccatggcgggcatcgagccgtccgcggccgccgcggggccctgcgccgcgctcatcaagaagctgtgcgcgtccgggcgcaccgcggaggcccggcgcgtgctggccgcctgcgagcccgacgtcatggcctacaacgcgatggtcgccgggtactgcgtcacggggcagctcgacaacgcccgccggctcgtcgcggcgatgcccatggagcccgacgcctacacctacaacaccctcatccgcggcctgtgcgggcgcggcaggaccgacaacgccctggcgggtgctcgacgatatgctccgccgggggtgcgtgcccgacgtggtcacctacaccatcctgctcgaggccacctgcaagaggagcgggtacaagcaggccatgaagctgctcgacgagatgcgcgacaaggggtgcgccccggacatcatcacctacaacgtcgtggtcaacggcatttgccaagaggggcgagtcgatgatgccatggagttcttgaagagcctgctgtcctatggatgcgagccaaacacggtcagctacaacattgtgctgaagggcctgtgcaccgcagagcggtgggaggacgccgagaagctcatggctgagatgagtcgcaaggggtgccccccaaatgtggtgacattcaatatgctcatcagcttcttgtgccggagaggattggtcgagcctgcgatggagattcttgagcagatcccaaagtacgggtgcacgcccaattcgttgagttacaacccaatacttcacgcattctgcaagcaaaagaagatggacagagccatggcgtttgtggaactgatggtgtccagtggctgttaccccgacatcgtctcatacaacactcttcttaccgcgctgtgtcgcggcggggaagttgatgccgctgttgagctgcttcatcaactgaaggacaaaggctgcacccctgtcttgattagctacaacaccgtcatcgatggccttaccaaagccggcaagacagaggaagctttagaactgctgaatgagatggttaccaaagggctccaaccggacataatcacttactcgacaatatcttctggtctttgtcgggaagacagaatcgaagaagcgatcaaagcattttgtaaagtgcaagacatgggcataaggcccaacactgtgctgtacaacgcgatacttcttgggctctgcaaaaggcgtgaaacacacagtgctatcgatctgtttacttacatgatatcgaatggctgcatgccaaatgaatcgacctacactatattgattgaaggcttggcttacgaaggcttggtcaaggaggcacgggaaatgctggctgagttgtgctccagaggagtggtgagtaagactttggtaaataagggagccatccggttacttgatgcttgaaggaactatgcatacttaaaaaggttgagcagaccagtaggagtgtgtggatccaggaatatgttcttctgcatcttcggcagtacgtagagatacttcattgttcttaatgatgtcttattcgatgctgccttcttatg

SEQ ID NO: 66120 - protein, 570 aa, Triticum aestivum
  peptide (1)..(570): Ceres Seq. ID no. 15219871
  misc_feature (5)..(189): Pfam Name: Formin Homology 2 Domain Pfam Description: Formin Homology 2 Domain
  misc_feature (194)..(570): Homolog of NCBI NO: 34394163 NR Description: putative fertility restorer homologue
  misc_feature (195)..(563): Homolog of NCBI NO: 34896658 NR Description: putative membrane-associated salt-inducible
  misc_feature (174)..(524): Homolog of NCBI NO: 15218325 NR Description: pentatricopeptide (PPR) repeat-containing protein
  misc_feature (193)..(520): Homolog of NCBI NO: 34910106 NR Description: B1100D10.28 [Oryza sativa (japonica
  misc_feature (195)..(560): Homolog of NCBI NO: 34896658 NR Description: putative membrane-associated salt-inducible
  misc_feature (195)..(553): Homolog of NCBI NO: 15218325 NR Description: pentatricopeptide (PPR) repeat-containing protein
  misc_feature (194)..(557): Homolog of NCBI NO: 18397002 NR Description: pentatricopeptide (PPR) repeat-containing protein
  misc_feature (194)..(562): Homolog of NCBI NO: 34910106 NR Description: B1100D10.28 [Oryza sativa (japonica
  misc_feature (195)..(553): Homolog of NCBI NO: 34910106 NR Description: B1100D10.28 [Oryza sativa (japonica
  misc_feature (195)..(558): Homolog of NCBI NO: 15218325 NR Description: pentatricopeptide (PPR) repeat-containing protein
ASTAPLTTLSSPRPEHRWRRRQQRRLPPCPPSPPSPPPTHTLPSPRPKPPPSNRASTWPMPAPPRPPMPSPTAAPPPPTTACGVWSAAATSRRPSGSSSPWRASSRPRPPRGPAPRSSRSCARPGAPRRPGACWPPASPTSWPTTRWSPGTASRGSSTTPAGSSRRCPWSPTPTPTTPSSAACAGAAGPTTPWRVLDDMLRRGCVPDVVTYTILLEATCKRSGYKQAMKLLDEMRDKGCAPDIITYNVVVNGICQEGRVDDAMEFLKSLLSYGCEPNTVSYNIVLKGLCTAERWEDAEKLMAEMSRKGCPPNVVTFNMLISFLCRRGLVEPAMEILEQIPKYGCTPNSLSYNPILHAFCKQKKMDRAMAFVELMVSSGCYPDIVSYNTLLTALCRGGEVDAAVELLHQLKDKGCTPVLISYNTVIDGLTKAGKTEEALELLNEMVTKGLQPDIITYSTISSGLCREDRIEEAIKAFCKVQDMGIRPNTVLYNAILLGLCKRRETHSAIDLFTYMISNGCMPNESTYTILIEGLAYEGLVKEAREMLAELCSRGVVSKTLVNKGAIRLLDA

SEQ ID NO: 66121 - protein, 511 aa, Triticum aestivum
  peptide (1)..(511): Ceres Seq. ID no. 15219872
  misc_feature (1)..(130): Pfam Name: Formin Homology 2 Domain Pfam Description: Formin Homology 2 Domain
  misc_feature (135)..(511): Homolog of NCBI NO: 34394163 NR Description: putative fertility restorer homologue
  misc_feature (136)..(504): Homolog of NCBI NO: 34896658 NR Description: putative membrane-associated salt-inducible
  misc_feature (115)..(465): Homolog of NCBI NO: 15218325 NR Description: pentatricopeptide (PPR) repeat-containing protein
  misc_feature (134)..(461): Homolog of NCBI NO: 34910106 NR Description: B1100D10.28 [Oryza sativa (japonica
  misc_feature (136)..(501): Homolog of NCBI NO: 34896658 NR Description: putative membrane-associated salt-inducible
  misc_feature (136)..(494): Homolog of NCBI NO: 15218325 NR Description: pentatricopeptide (PPR) repeat-containing protein
  misc_feature (135)..(498): Homolog of NCBI NO: 18397002 NR Description: pentatricopeptide (PPR) repeat-containing protein
  misc_feature (135)..(503): Homolog of NCBI NO: 34910106 NR Description: B1100D10.28 [Oryza sativa (japonica
  misc_feature (136)..(494): Homolog of NCBI NO: 34910106 NR Description: B1100D10.28 [Oryza sativa (japonica
  misc_feature (136)..(499): Homolog of NCBI NO: 15218325 NR Description: pentatricopeptide (PPR) repeat-containing protein
MPAPPRPPMPSPTAAPPPPTTACGVWSAAATSRRPSGSSSPWRASSRPRPPRGPAPRSSRSCARPGAPRRPGACWPPASPTSWPTTRWSPGTASRGSSTTPAGSSRRCPWSPTPTPTTPSSAACAGAAGPTTPWRVLDDMLRRGCVPDVVTYTILLEATCKRSGYKQAMKLLDEMRDKGCAPDIITYNVVVNGICQEGRVDDAMEFLKSLLSYGCEPNTVSYNIVLKGLCTAERWEDAEKLMAEMSRKGCPPNVVTFNMLISFLCRRGLVEPAMEILEQIPKYGCTPNSLSYNPILHAFCKQKKMDRAMAFVELMVSSGCYPDIVSYNTLLTALCRGGEVDAAVELLHQLKDKGCTPVLISYNTVIDGLTKAGKTEEALELLNEMVTKGLQPDIITYSTISSGLCREDRIEEAIKAFCKVQDMGIRPNTVLYNAILLGLCKRRETHSAIDLFTYMISNGCMPNESTYTILIEGLAYEGLVKEAREMLAELCSRGVVSKTLVNKGAIRLLDA

SEQ ID NO: 66122 - protein, 503 aa, Triticum aestivum
  peptide (1)..(503): Ceres Seq. ID no. 15219873
  misc_feature (1)..(122): Pfam Name: Formin Homology 2 Domain Pfam Description: Formin Homology 2 Domain
  misc_feature (127)..(503): Homolog of NCBI NO: 34394163 NR Description: putative fertility restorer homologue
  misc_feature (128)..(496): Homolog of NCBI NO: 34896658 NR Description: putative membrane-associated salt-inducible
  misc_feature (107)..(457): Homolog of NCBI NO: 15218325 NR Description: pentatricopeptide (PPR) repeat-containing protein
  misc_feature (126)..(453): Homolog of NCBI NO: 34910106 NR Description: B1100D10.28 [Oryza sativa (japonica
  misc_feature (128)..(493): Homolog of NCBI NO: 34896658 NR Description: putative membrane-associated salt-inducible
  misc_feature (128)..(486): Homolog of NCBI NO: 15218325 NR Description: pentatricopeptide (PPR) repeat-containing protein
  misc_feature (127)..(490): Homolog of NCBI NO: 18397002 NR Description: pentatricopeptide (PPR) repeat-containing protein
  misc_feature (127)..(495): Homolog of NCBI NO: 34910106 NR Description: B1100D10.28 [Oryza sativa (japonica
  misc_feature (128)..(486): Homolog of NCBI NO: 34910106 NR Description: B1100D10.28 [Oryza sativa (japonica
  misc_feature (128)..(491): Homolog of NCBI NO: 15218325 NR Description: pentatricopeptide (PPR) repeat-containing protein
MPSPTAAPPPPTTACGVWSAAATSRRPSGSSSPWRASSRPRPPRGPAPRSSRSCARPGAPRRPGACWPPASPTSWPTTRWSPGTASRGSSTTPAGSSRRCPWSPTPTPTTPSSAACAGAAGPTTPWRVLDDMLRRGCVPDVVTYTILLEATCKRSGYKQAMKLLDEMRDKGCAPDIITYNVVVNGICQEGRVDDAMEFLKSLLSYGCEPNTVSYNIVLKGLCTAERWEDAEKLMAEMSRKGCPPNVVTFNMLISFLCRRGLVEPAMEILEQIPKYGCTPNSLSYNPILHAFCKQKKMDRAMAFVELMVSSGCYPDIVSYNTLLTALCRGGEVDAAVELLHQLKDKGCTPVLISYNTVIDGLTKAGKTEEALELLNEMVTKGLQPDIITYSTISSGLCREDRIEEAIKAFCKVQDMGIRPNTVLYNAILLGLCKRRETHSAIDLFTYMISNGCMPNESTYTILIEGLAYEGLVKEAREMLAELCSRGVVSKTLVNKGAIRLLDA

SEQ ID NO: 66123 - DNA, 1047 bp, Triticum aestivum
  misc_feature (1)..(1047): Ceres Seq. ID no. 12619999
gccgaagcgaaccgcccccagatcagttcgaccacgtagccacgtctccttccttccgaagtaaacagaggaggaaatcccccctctctccctcgtcgctgctcccctccaaatcccctgaaccccgcctctccccggagtagctgctgcggccgcggcggaggagagatgtcgtacgcctacctcttcaagtacatcatcatcggcgacacaggtgtcggcaagtcgtgcctgctgctgcagttcaccgacaagcgcttccagcccgtccacgacctcaccatcggcgtcgagttcggcgcccggatgatcaccatcngacaacaagcccatcaagctccagatttgggacacggcaggccaggagtcattcagatcgataactagatcatactacaggggagctgctggtgctcttttggtttatgacatcaccaggagggaaacctttaatcatcttgcaagctggctggaagatgcaaggcaacatgcaaatgccaacatgacaataatgctagttggaaacaaatgtgacctatcccataggcgtgccgtgagcttcgaggaaggcgagcagtttgccaaggagaatggtctcatctttatggaggcatctgcaaaaactgcacaaaatgtcgaggagggctttgtcaagactgctggagcaatatacaagaaaattcaggatggtgtctttgatgtatctaatgagtcgtatggaatcaaagttggctatgcagttcctggccaagctggaggtgctggtgcttcgtcttcccaaggtggcagctgctgcggctaatggaacgatccatggtgtacaaaatcgcatggcatgtgttacaatacctgttacattatttcgagttgcgagtgattgtaactccagggtgctttgttatttcacgcgcctatggattatgttccagtgagccagtcaaaataggttcagttcatttccttatactgtatacaatcactgtaatccatcagatgcttccagccgtgtcatttaggattcacgaattatatccatttgcatgtgtg

SEQ ID NO: 66124 - protein, 113 aa, Triticum aestivum
  peptide (1)..(113): Ceres Seq. ID no. 12620000
MVSSLWRHLQKLHKMSRRALSRLLEQYTRKFRMVSLMYLMSRMESKLAMQFLAKLEVLVLRLPKVAAAAANGTIHGVQNRMACVTIPVTLFRVASDCNSRVLCYFTRLWIMFQ

SEQ ID NO: 66125 - protein, 99 aa, Triticum aestivum
  peptide (1)..(99): Ceres Seq. ID no. 12620001
MSRRALSRLLEQYTRKFRMVSLMYLMSRMESKLAMQFLAKLEVLVLRLPKVAAAAANGTIHGVQNRMACVTIPVTLFRVASDCNSRVLCYFTRLWIMFQ

SEQ ID NO: 66126 - protein, 99 aa, Triticum aestivum
  peptide (1)..(99): Ceres Seq. ID no. 12620002
  misc_feature (1)..(58): Pfam Name: Ras family Pfam Description: Ras family
  misc_feature (1)..(95): Homolog of NCBI NO: 7438379 NR Description: GTP-binding protein RAB2A - Arabidopsis thaliana
  misc_feature (1)..(98): Homolog of NCBI NO: 1370176 NR Description: RAB2A [Lotus japonicus]
  misc_feature (1)..(98): Homolog of NCBI NO: 16755592 NR Description: small GTPase Rab2 [Nicotiana tabacum]
  misc_feature (1)..(99): Homolog of NCBI NO: 15235981 NR Description: GTP-binding protein (At-RAB2); protein id:
  misc_feature (1)..(98): Homolog of NCBI NO: 7438438 NR Description: GTP-binding protein yptm3 - maize
  misc_feature (1)..(98): Homolog of NCBI NO: 38344743 NR Description: OSJNBa0089K21.1 [Oryza sativa (japonica
  misc_feature (1)..(98): Homolog of NCBI NO: 4837727 NR Description: small GTP binding protein Rab2 [Sporobolus
  misc_feature (1)..(98): Homolog of NCBI NO: 1346956 NR Description: RAS-RELATED PROTEIN RAB-2-A
  misc_feature (1)..(98): Homolog of NCBI NO: 1346957 NR Description: RAS-RELATED PROTEIN RAB-2-B
MTIMLVGNKCDLSHRRAVSFEEGEQFAKENGLIFMEASAKTAQNVEEGFVKTAGAIYKKIQDGVFDVSNESYGIKVGYAVPGQAGGAGASSSQGGSCCG

SEQ ID NO: 66127 - DNA, 2023 bp, Triticum aestivum
  misc_feature (1)..(2023): Ceres Seq. ID no. 14302458
gttagatctctgcttacagtagccgagtccccactgtgtagcgtagtgtgttctcttctcttctcccgtcacgcccaccccccttcttcccccctcactctccctcccacactctcagcagccgccgcccaagctgagagggcggggcacacacagaggcacgcatccggccagcagaccagcacggtgcgagcaatggagtatgagaggattcacaagccccaggcaggcgccctttctcccacaaagctgaggatgaagctcctgggagcccacaaccgcgtgagggtcatcagcagcagctcgtcgcgaacatcgccttcaaagaacgccgagccatcgctagcgcacaacagattattagtatgcgatgttcttgacgaagtttcagacagctccggtgcctccaaatgccctgcagcagtcagcaacaccgaagttatagacaaggatccagcagtagataggtacaaggttcagaacacgcccaagagttcagttcaccaaccggcgccgagcaactcaagcatgatacatccagtgcgaactgtcgaggaggacagtaacgaatgcgacagtggtcttgacaatgccagtaccagcagcttcgagttccatggaggtgagaagacggcggcgaagaacccaacggcggggtacttctcgagacaggcttcctccaagtggaacgacgcggagaaatggattgtgaacaagcagactgttcagcagaacaccaccaccaagggcgcatcgcagaaccagagtgcgcaccaggtgagttccgctgcgcccaggggcggtggcgttgtgcccaaacaccacggaacatttgctcgccccattcagaacatgaagagattcaatccggcttcgtcagcctctcggagcatattagagaggctgtctttcgcttcgcatcagccgaagctggtcaggcatgctgatgtctgtgcagatcaaggttctagcgccatctcggactatcagaagggtcaagctgaaaccgattcaattgcaattaagccctgcaatgatactgaagctatttctacagttcaggcggtgtctgtgagagatgtgggcacagaaatgactccaataccaagtcaagatccgtcaagaacaggaacaccacttgggtctgtgacaccgactcgcagccctaattgttcgataccatcaactcctgtaggtggacgatcgtcggcatcaataggagaagacaacgcagatgatggtccttatttcaacagaaaaggtggcatgaatgaaatgtcagaggatgaaatcaggctcaaggcaaggaaagaaatcgctgccctaggtgtacaactaggaaagatgaacattgcttcatgggctagtaaagaggagctagaattagtctctgcgacaccgagcatcgctgatctggagcggatgaagcaggaatacgctactcgtgctgcagcattcgaggatgctgaaaattctaaacacacggcacgattcaagaaggaagagctgaagatcgaagcatgggagagccgccaaagaacaaaagttgaatccgaaatgaagagactagaggaacgcgcggagaaaatgagaagcgaggccatggcgaggatggccgaaaggctggagctggcacgccgtgtggccgaggagaagcgggcatcagccaacgccaagatgaacaagcaagcagcaagggcagttcagaaggccgatctgattcgccagacaggacggattccagggtcgcgtatcctatgctgcggctgcttctgtgaaccttagcacttgtttaactactagcctgttaaaatatggtcgtgagaggaatctaatttcctcctatagtcagcattccctggttttttagtatgcaaaagggaatgtctggtctaggtgattcaggtgtacacattcttcattgtcatataaataatttgcttagtgtgaggtgtgccaggttcttgttttttttagaaaaaaaaaaaaaaaaaaaaaaaaaaaaaaaaaaaaaaaaaaaaag

SEQ ID NO: 66128 - protein, 594 aa, Triticum aestivum
  peptide (1)..(594): Ceres Seq. ID no. 14302459
  misc_feature (476)..(583): Pfam Name: Remorin, C-terminal region Pfam Description: Remorin, C-terminal region
  misc_feature (476)..(584): Homolog of NCBI NO: 33146770 NR Description: remorin-like protein [Oryza sativa (japonica
  misc_feature (346)..(584): Homolog of NCBI NO: 30103007 NR Description: remorin-like protein [Oryza sativa (japonica
  misc_feature (482)..(583): Homolog of NCBI NO: 28393368 NR Description: unknown protein [Arabidopsis thaliana]
  misc_feature (482)..(583): Homolog of NCBI NO: 21536537 NR Description: unknown [Arabidopsis thaliana]
  misc_feature (482)..(583): Homolog of NCBI NO: 18408804 NR Description: expressed protein [Arabidopsis thaliana]
  misc_feature (66)..(550): Homolog of NCBI NO: 15220725 NR Description: expressed protein [Arabidopsis thaliana]
  misc_feature (302)..(592): Homolog of NCBI NO: 34902218 NR Description: Unknown protein [Oryza sativa (japonica
  misc_feature (351)..(592): Homolog of NCBI NO: 18395321 NR Description: expressed protein [Arabidopsis thaliana]
  misc_feature (314)..(591): Homolog of NCBI NO: 15220725 NR Description: expressed protein [Arabidopsis thaliana]
  misc_feature (66)..(593): Homolog of NCBI NO: 38344336 NR Description: OSJNBa0058K23.18 [Oryza sativa (japonica
VRSLLTVAESPLCSVVCSLLFSRHAHPPSSPLTLPPTLSAAAAQAERAGHTQRHASGQQTSTVRAMEYERIHKPQAGALSPTKLRMKLLGAHNRVRVISSSSSRTSPSKNAEPSLAHNRLLVCDVLDEVSDSSGASKCPAAVSNTEVIDKDPAVDRYKVQNTPKSSVHQPAPSNSSMIHPVRTVEEDSNECDSGLDNASTSSFEFHGGEKTAAKNPTAGYFSRQASSKWNDAEKWIVNKQTVQQNTTTKGASQNQSAHQVSSAAPRGGGVVPKHHGTFARPIQNMKRFNPASSASRSILERLSFASHQPKLVRHADVCADQGSSAISDYQKGQAETDSIAIKPCNDTEAISTVQAVSVRDVGTEMTPIPSQDPSRTGTPLGSVTPTRSPNCSIPSTPVGGRSSASIGEDNADDGPYFNRKGGMNEMSEDEIRLKARKEIAALGVQLGKMNIASWASKEELELVSATPSIADLERMKQEYATRAAAFEDAENSKHTARFKKEELKIEAWESRQRTKVESEMKRLEERAEKMRSEAMARMAERLELARRVAEEKRASANAKMNKQAARAVQKADLIRQTGRIPGSRILCCGCFCEP

SEQ ID NO: 66129 - protein, 529 aa, Triticum aestivum
  peptide (1)..(529): Ceres Seq. ID no. 14302460
  misc_feature (411)..(518): Pfam Name: Remorin, C-terminal region Pfam Description: Remorin, C-terminal region
  misc_feature (411)..(519): Homolog of NCBI NO: 33146770 NR Description: remorin-like protein [Oryza sativa (japonica
  misc_feature (281)..(519): Homolog of NCBI NO: 30103007 NR Description: remorin-like protein [Oryza sativa (japonica
  misc_feature (417)..(518): Homolog of NCBI NO: 28393368 NR Description: unknown protein [Arabidopsis thaliana]
  misc_feature (417)..(518): Homolog of NCBI NO: 21536537 NR Description: unknown [Arabidopsis thaliana]
  misc_feature (417)..(518): Homolog of NCBI NO: 18408804 NR Description: expressed protein [Arabidopsis thaliana]
  misc_feature (1)..(485): Homolog of NCBI NO: 15220725 NR Description: expressed protein [Arabidopsis thaliana]
  misc_feature (237)..(527): Homolog of NCBI NO: 34902218 NR Description: Unknown protein [Oryza sativa (japonica
  misc_feature (286)..(527): Homolog of NCBI NO: 18395321 NR Description: expressed protein [Arabidopsis thaliana]
  misc_feature (249)..(526): Homolog of NCBI NO: 15220725 NR Description: expressed protein [Arabidopsis thaliana]
  misc_feature (1)..(528): Homolog of NCBI NO: 38344336 NR Description: OSJNBa0058K23.18 [Oryza sativa (japonica
MEYERIHKPQAGALSPTKLRMKLLGAHNRVRVISSSSSRTSPSKNAEPSLAHNRLLVCDVLDEVSDSSGASKCPAAVSNTEVIDKDPAVDRYKVQNTPKSSVHQPAPSNSSMIHPVRTVEEDSNECDSGLDNASTSSFEFHGGEKTAAKNPTAGYFSRQASSKWNDAEKWIVNKQTVQQNTTTKGASQNQSAHQVSSAAPRGGGVVPKHHGTFARPIQNMKRFNPASSASRSILERLSFASHQPKLVRHADVCADQGSSAISDYQKGQAETDSIAIKPCNDTEAISTVQAVSVRDVGTEMTPIPSQDPSRTGTPLGSVTPTRSPNCSIPSTPVGGRSSASIGEDNADDGPYFNRKGGMNEMSEDEIRLKARKEIAALGVQLGKMNIASWASKEELELVSATPSIADLERMKQEYATRAAAFEDAENSKHTARFKKEELKIEAWESRQRTKVESEMKRLEERAEKMRSEAMARMAERLELARRVAEEKRASANAKMNKQAARAVQKADLIRQTGRIPGSRILCCGCFCEP

SEQ ID NO: 66130 - protein, 509 aa, Triticum aestivum
  peptide (1)..(509): Ceres Seq. ID no. 14302461
  misc_feature (391)..(498): Pfam Name: Remorin, C-terminal region Pfam Description: Remorin, C-terminal region
  misc_feature (391)..(499): Homolog of NCBI NO: 33146770 NR Description: remorin-like protein [Oryza sativa (japonica
  misc_feature (261)..(499): Homolog of NCBI NO: 30103007 NR Description: remorin-like protein [Oryza sativa (japonica
  misc_feature (397)..(498): Homolog of NCBI NO: 28393368 NR Description: unknown protein [Arabidopsis thaliana]
  misc_feature (397)..(498): Homolog of NCBI NO: 21536537 NR Description: unknown [Arabidopsis thaliana]
  misc_feature (397)..(498): Homolog of NCBI NO: 18408804 NR Description: expressed protein [Arabidopsis thaliana]
  misc_feature (1)..(465): Homolog of NCBI NO: 15220725 NR Description: expressed protein [Arabidopsis thaliana]
  misc_feature (217)..(507): Homolog of NCBI NO: 34902218 NR Description: Unknown protein [Oryza sativa (japonica
  misc_feature (266)..(507): Homolog of NCBI NO: 18395321 NR Description: expressed protein [Arabidopsis thaliana]
  misc_feature (229)..(506): Homolog of NCBI NO: 15220725 NR Description: expressed protein [Arabidopsis thaliana]
  misc_feature (1)..(508): Homolog of NCBI NO: 38344336 NR Description: OSJNBa0058K23.18 [Oryza sativa (japonica
MKLLGAHNRVRVISSSSSRTSPSKNAEPSLAHNRLLVCDVLDEVSDSSGASKCPAAVSNTEVIDKDPAVDRYKVQNTPKSSVHQPAPSNSSMIHPVRTVEEDSNECDSGLDNASTSSFEFHGGEKTAAKNPTAGYFSRQASSKWNDAEKWIVNKQTVQQNTTTKGASQNQSAHQVSSAAPRGGGVVPKHHGTFARPIQNMKRFNPASSASRSILERLSFASHQPKLVRHADVCADQGSSAISDYQKGQAETDSIAIKPCNDTEAISTVQAVSVRDVGTEMTPIPSQDPSRTGTPLGSVTPTRSPNCSIPSTPVGGRSSASIGEDNADDGPYFNRKGGMNEMSEDEIRLKARKEIAALGVQLGKMNIASWASKEELELVSATPSIADLERMKQEYATRAAAFEDAENSKHTARFKKEELKIEAWESRQRTKVESEMKRLEERAEKMRSEAMARMAERLELARRVAEEKRASANAKMNKQAARAVQKADLIRQTGRIPGSRILCCGCFCEP

SEQ ID NO: 66131 - DNA, 3063 bp, Triticum aestivum
  misc_feature (1)..(3063): Ceres Seq. ID no. 15224315
ttcaacatgctaccacttgatggctaagaaacatcaaacctgaagtctctggtgtacgcacaccacaaccgtgccctcaccaaatccactactactgtttgcatctctctctatacatgtcctgcacattcttgcttccttggctaccaaaaaactcgccatcgagctctgcttccattcttcagactatcagcgcagctgtttctggacgcggcgttgctcgctagtttgcttcacgaccgcggctgacgggcatggagaggaacggcaatgccaatgccgggccaccgctggaagagaacaagggcgcggacggcaagagcgggagccggcggagcacgcggttcaaggaggagaacgagtacgtggaggtcacgctcgacgtcggggccgacgacgccgtggccgtccagggcgtcagggccgccggcgagacccccgaggcggcgctgctgccccggagcggcggcctgtcctcgaggctcaaggccgagctgaggcgcatcgcgtcggccaagcgtgggggcggcgacaacgcgccggcgagccagccccggctggaccggagcatgaccggcgccgcgcgcgcgctcaggggcctccacttcctcaaccagagcgtggtcacgcggggcagctggcccgaggtggacaagcggttcgaccgcctcgccgtcgacggcctgctcctccgctcacgcttcggccagtgcattgggatggttggatcggaggaattcgcggcgcagatgtacgacgcgcttgcacggcgaaggggggtcgttgctcaggtgctgaccaaggatgagctgagggagttctgggagcagctatccgacccaggctttgatgccaagctgcagactttctttgacatggttgacaagaacgcagacggtcggatcaccgaagaggagctcaaagaggtcctcactctgacggcctctgcaaacaagctcaccaagatcctggagcgcgtcgacgagtacacggcgttgatcatggaggagctcgaccccgaccagctcggctacatcgagcttgcgacactggagtccctgctgctgctgcccccttcccaggcgccgacgagcctggtggcgcacagctccaacatcagccagctgatcagccagaggctggtgccggcgcgggacgcgaacccgctccggcggggcctcacggcggcgcgctacttcctggaggacaactggaagcgcgtgtgggtgatgtcgctgtggctgtccatcaacgccggcctcttcgcctggaagttctacgcgtaccgccgccacccgacgttcgacgtgatgggctactgcgtgtgcgtggccaagggcggcgccgagaccaccaagttcaacatggccctcatcctcctccccgtctgccgcaacaccctcacctggctccgctcccggaccagcctcggcgccgccgtgcccttcaacgacaacatcaacttccacaaggtggtggccgggggcgtggccgtcggcgtggcgctgcacggggtgacccacctgacttgcgacttcccgcgcctgctccacgccagcgacgaggcctacgagccgatgaagcgctactttgggcagacgagggtcccggactactggtggttcgtgaggggcgtggagggcgtcaccggcgtcctcatggtggtgctcatggccgtcgcctacacgctggcgcacccgcggttccgccggagcaagctcggcgccgggaacccgctcaagaggctcagcggcttcaacatgttctggtactcccaccacctcttcgtcgtcgtctacgtcgccttggtcgtccacggcgtctgcctctacatcaaccggacatggtacaagcagacgacatggatgtaccttgccgtccccgtgctgctgtacgccggcgagcggcttcttcgggcgctgaggtcgcacggactcaccacggtgaggatcgagaaggtggcggtgtatcctgggaatgtgatagccatccacatgagtaagccccacggcttcaggtacaggagcggccagtacatctacgtcaactgcggcgaggtctcgccgttcgagtggcacccattcaccatcacctcggctcccggcgacgactacctcagcatgcacatccggtgccggggcgactggacgagcagattcagagccatcttctcccagatatgcaggccaccgttggcagggcagagcggtctcctgagagccgacttcacgtccatggtggagcacaacgccaacgccaagttcccgcggctgctgatcgacgggccctacggcgcgccggcgcaggactaccgcaagtacgacgtgctcctcctcatcggcctcggcatcggcgccacgccgctcatcagcatcgtcaaggacgtgctcaacaacgtccaccggcagggtcaggagcaggagggcgacgaggggttcatgacgaagcgggtctacttctactggtgcacgcgggaggagggctccttcgagtggttccgcggcgtgatgaacgaggtggcggagcgcgacgccgccggcgaggagtccgtggtggagctgcacaaccactgcaccagcgtgtacgaggaaggcgacgcgcggtcggccatggtggtgatgctgcaggcgctccaccacgccaagagcggcgtggacgtggtgtccgggacccgcgtgcgcacgcacttcgccaggccctgctggcgcgacgtcttcaagcgcgtcgcctgcgaccaccaggggcagcgcgtcggggtcttctactgcggcgaccagaagctcacgccggagctcaggcggctgtcccaggacttctcgcaccggaccaccaccaagttcgtcttccacaaggagaacttctgacctgaatttcgacatgcatgttaattaggctatatatatacatgaacgtagaacatatacactttattcgcttgctgtttgctagtagtatcagacacgtacggtcttgcattgggtatgcacatttcttcctttcttctttgcgtatcttattaactaatacaagtaggagagcatctctcaaatcattaatttccac

SEQ ID NO: 66132 - protein, 869 aa, Triticum aestivum
  peptide (1)..(869): Ceres Seq. ID no. 15224316
  misc_feature (353)..(868): Pfam Name: Ferric reductase like transmembrane component Pfam Description: Ferric reductase like transmembrane component
  misc_feature (34)..(726): Homolog of NCBI NO: 19715905 NR Description: NADPH oxidase [Nicotiana tabacum]
  misc_feature (33)..(869): Homolog of NCBI NO: 15238842 NR Description: respiratory burst oxidase protein D (NADPH
  misc_feature (33)..(869): Homolog of NCBI NO: 11358758 NR Description: respiratory burst oxidase protein D
  misc_feature (710)..(869): Homolog of NCBI NO: 20805911 NR Description: NADPH oxidase [Nicotiana tabacum]
  misc_feature (34)..(726): Homolog of NCBI NO: 20805911 NR Description: NADPH oxidase [Nicotiana tabacum]
  misc_feature (713)..(869): Homolog of NCBI NO: 8131846 NR Description: whitefly-induced gp91-phox [Lycopersicon
  misc_feature (34)..(726): Homolog of NCBI NO: 8131846 NR Description: whitefly-induced gp91-phox [Lycopersicon
  misc_feature (710)..(869): Homolog of NCBI NO: 28268680 NR Description: respiratory burst oxidase homolog [Nicotiana
  misc_feature (34)..(726): Homolog of NCBI NO: 28268680 NR Description: respiratory burst oxidase homolog [Nicotiana
  misc_feature (21)..(869): Homolog of NCBI NO: 16549089 NR Description: respiratory burst oxidase homolog [Solanum
MERNGNANAGPPLEENKGADGKSGSRRSTRFKEENEYVEVTLDVGADDAVAVQGVRAAGETPEAALLPRSGGLSSRLKAELRRIASAKRGGGDNAPASQPRLDRSMTGAARALRGLHFLNQSVVTRGSWPEVDKRFDRLAVDGLLLRSRFGQCIGMVGSEEFAAQMYDALARRRGVVAQVLTKDELREFWEQLSDPGFDAKLQTFFDMVDKNADGRITEEELKEVLTLTASANKLTKILERVDEYTALIMEELDPDQLGYIELATLESLLLLPPSQAPTSLVAHSSNISQLISQRLVPARDANPLRRGLTAARYFLEDNWKRVWVMSLWLSINAGLFAWKFYAYRRHPTFDVMGYCVCVAKGGAETTKFNMALILLPVCRNTLTWLRSRTSLGAAVPFNDNINFHKVVAGGVAVGVALHGVTHLTCDFPRLLHASDEAYEPMKRYFGQTRVPDYWWFVRGVEGVTGVLMVVLMAVAYTLAHPRFRRSKLGAGNPLKRLSGFNMFWYSHHLFVVVYVALVVHGVCLYINRTWYKQTTWMYLAVPVLLYAGERLLRALRSHGLTTVRIEKVAVYPGNVIAIHMSKPHGFRYRSGQYIYVNCGEVSPFEWHPFTITSAPGDDYLSMHIRCRGDWTSRFRAIFSQICRPPLAGQSGLLRADFTSMVEHNANAKFPRLLIDGPYGAPAQDYRKYDVLLLIGLGIGATPLISIVKDVLNNVHRQGQEQEGDEGFMTKRVYFYWCTREEGSFEWFRGVMNEVAERDAAGEESVVELHNHCTSVYEEGDARSAMVVMLQALHHAKSGVDVVSGTRVRTHFARPCWRDVFKRVACDHQGQRVGVFYCGDQKLTPELRRLSQDFSHRTTTKFVFHKENF

SEQ ID NO: 66133 - protein, 764 aa, Triticum aestivum
  peptide (1)..(764): Ceres Seq. ID no. 15224317
  misc_feature (248)..(763): Pfam Name: Ferric reductase like transmembrane component Pfam Description: Ferric reductase like transmembrane component
  misc_feature (1)..(621): Homolog of NCBI NO: 19715905 NR Description: NADPH oxidase [Nicotiana tabacum]
  misc_feature (1)..(764): Homolog of NCBI NO: 15238842 NR Description: respiratory burst oxidase protein D (NADPH
  misc_feature (1)..(764): Homolog of NCBI NO: 11358758 NR Description: respiratory burst oxidase protein D
  misc_feature (605)..(764): Homolog of NCBI NO: 20805911 NR Description: NADPH oxidase [Nicotiana tabacum]
  misc_feature (1)..(621): Homolog of NCBI NO: 20805911 NR Description: NADPH oxidase [Nicotiana tabacum]
  misc_feature (608)..(764): Homolog of NCBI NO: 8131846 NR Description: whitefly-induced gp91-phox [Lycopersicon
  misc_feature (1)..(621): Homolog of NCBI NO: 8131846 NR Description: whitefly-induced gp91-phox [Lycopersicon
  misc_feature (605)..(764): Homolog of NCBI NO: 28268680 NR Description: respiratory burst oxidase homolog [Nicotiana
  misc_feature (1)..(621): Homolog of NCBI NO: 28268680 NR Description: respiratory burst oxidase homolog [Nicotiana
  misc_feature (1)..(764): Homolog of NCBI NO: 16549089 NR Description: respiratory burst oxidase homolog [Solanum
MTGAARALRGLHFLNQSVVTRGSWPEVDKRFDRLAVDGLLLRSRFGQCIGMVGSEEFAAQMYDALARRRGVVAQVLTKDELREFWEQLSDPGFDAKLQTFFDMVDKNADGRITEEELKEVLTLTASANKLTKILERVDEYTALIMEELDPDQLGYIELATLESLLLLPPSQAPTSLVAHSSNISQLISQRLVPARDANPLRRGLTAARYFLEDNWKRVWVMSLWLSINAGLFAWKFYAYRRHPTFDVMGYCVCVAKGGAETTKFNMALILLPVCRNTLTWLRSRTSLGAAVPFNDNINFHKVVAGGVAVGVALHGVTHLTCDFPRLLHASDEAYEPMKRYFGQTRVPDYWWFVRGVEGVTGVLMVVLMAVAYTLAHPRFRRSKLGAGNPLKRLSGFNMFWYSHHLFVVVYVALVVHGVCLYINRTWYKQTTWMYLAVPVLLYAGERLLRALRSHGLTTVRIEKVAVYPGNVIAIHMSKPHGFRYRSGQYIYVNCGEVSPFEWHPFTITSAPGDDYLSMHIRCRGDWTSRFRAIFSQICRPPLAGQSGLLRADFTSMVEHNANAKFPRLLIDGPYGAPAQDYRKYDVLLLIGLGIGATPLISIVKDVLNNVHRQGQEQEGDEGFMTKRVYFYWCTREEGSFEWFRGVMNEVAERDAAGEESVVELHNHCTSVYEEGDARSAMVVMLQALHHAKSGVDVVSGTRVRTHFARPCWRDVFKRVACDHQGQRVGVFYCGDQKLTPELRRLSQDFSHRTTTKFVFHKENF

SEQ ID NO: 66134 - protein, 714 aa, Triticum aestivum
  peptide (1)..(714): Ceres Seq. ID no. 15224318
  misc_feature (198)..(713): Pfam Name: Ferric reductase like transmembrane component Pfam Description: Ferric reductase like transmembrane component
  misc_feature (1)..(571): Homolog of NCBI NO: 19715905 NR Description: NADPH oxidase [Nicotiana tabacum]
  misc_feature (1)..(714): Homolog of NCBI NO: 15238842 NR Description: respiratory burst oxidase protein D (NADPH
  misc_feature (1)..(714): Homolog of NCBI NO: 11358758 NR Description: respiratory burst oxidase protein D
  misc_feature (555)..(714): Homolog of NCBI NO: 20805911 NR Description: NADPH oxidase [Nicotiana tabacum]
  misc_feature (1)..(571): Homolog of NCBI NO: 20805911 NR Description: NADPH oxidase [Nicotiana tabacum]
  misc_feature (558)..(714): Homolog of NCBI NO: 8131846 NR Description: whitefly-induced gp91-phox [Lycopersicon
  misc_feature (1)..(571): Homolog of NCBI NO: 8131846 NR Description: whitefly-induced gp91-phox [Lycopersicon
  misc_feature (555)..(714): Homolog of NCBI NO: 28268680 NR Description: respiratory burst oxidase homolog [Nicotiana
  misc_feature (1)..(571): Homolog of NCBI NO: 28268680 NR Description: respiratory burst oxidase homolog [Nicotiana
  misc_feature (1)..(714): Homolog of NCBI NO: 16549089 NR Description: respiratory burst oxidase homolog [Solanum
MVGSEEFAAQMYDALARRRGVVAQVLTKDELREFWEQLSDPGFDAKLQTFFDMVDKNADGRITEEELKEVLTLTASANKLTKILERVDEYTALIMEELDPDQLGYIELATLESLLLLPPSQAPTSLVAHSSNISQLISQRLVPARDANPLRRGLTAARYFLEDNWKRVWVMSLWLSINAGLFAWKFYAYRRHPTFDVMGYCVCVAKGGAETTKFNMALILLPVCRNTLTWLRSRTSLGAAVPFNDNINFHKVVAGGVAVGVALHGVTHLTCDFPRLLHASDEAYEPMKRYFGQTRVPDYWWFVRGVEGVTGVLMVVLMAVAYTLAHPRFRRSKLGAGNPLKRLSGFNMFWYSHHLFVVVYVALVVHGVCLYINRTWYKQTTWMYLAVPVLLYAGERLLRALRSHGLTTVRIEKVAVYPGNVIAIHMSKPHGFRYRSGQYIYVNCGEVSPFEWHPFTITSAPGDDYLSMHIRCRGDWTSRFRAIFSQICRPPLAGQSGLLRADFTSMVEHNANAKFPRLLIDGPYGAPAQDYRKYDVLLLIGLGIGATPLISIVKDVLNNVHRQGQEQEGDEGFMTKRVYFYWCTREEGSFEWFRGVMNEVAERDAAGEESVVELHNHCTSVYEEGDARSAMVVMLQALHHAKSGVDVVSGTRVRTHFARPCWRDVFKRVACDHQGQRVGVFYCGDQKLTPELRRLSQDFSHRTTTKFVFHKENF

SEQ ID NO: 66135 - DNA, 1784 bp, Triticum aestivum
  misc_feature (1)..(1784): Ceres Seq. ID no. 15169466
aagtctttcctactactaccattccaacccccacccccttaccctgtcccgtccgcctcggctgccgtagctctgctcacctccccccaaaccgccgacgcgtcctccctctccctcacagccatggcgaagctcaagcacctgcccgtgtgctctctgctgctggccgtcttgctcctcgcgctctcctccttctcctgcagcgctggcaccaactcgacggcctcggccggaccactgtatggcatcgagttcccgccgtacaacacggccgtcgccgacgccggctgcgacggcaggctcgtggccgaggaggaggagctcgcgcgccgggcaccctccctcaagctccacatgacacaccgctccgccgcggagggcgcgacggggaaaggctccttcgtcctcgactcggccaagaaagacgccgcccgcatcggcaccatgcacggcattagggccgcgctgtccaggaagggctcgcggccgcgccgggcgctgtcggagcgggtggtggccacggtggggtcaggcgtggcggtgggctccggggagtacctggtggacgtgtacgttggcacgccgccgcgccggttccgcatgatcatggacaccggcagcgacctcaactggctgcagtgcgcgccctgcctcgactgcttccaccagaccggccccgtcttcgaccccgccgcctccgcctcctaccgcaacgtcacctgcggcgacgcgcgctgcggcctcgtctccccgccgccagagtctccggcggcgccgcccgggaggacgtgccgcaggccgcggagcgacccctgcccgtattactactggtacggcgaccagtccaacaccacgggggacctggcgctggaggccttcaccgtgaacctcacgggcgccgccgggtcgacccggcgcgtggacggcgtggcgttcgggtgcggccaccggaaccgcggcctcttccacggcgccgcggggctgctggggctcggccgcggcccgctctcgttcgcgtcgcagctgcgcggcgtctacggcgggcacgccttctcctactgcctcgtggagcacggcagcgccgccgggagcaagatcgtcttcggccacgacgacgcgctgctcgcgcacccgcggctcaactacacggccttcgccccggccgcggccgacgcggcggacaccttctactacgtgcagctcaggtccgtcctcgtgggcggggaggcggttgacatcccgtcgggcacgctggccgccggcggcaccatcatcgactccggcacgacgctgagctacttcccggagccggcgtaccgggcgatccggcaggcgttcatcgaccgcatgagcccgtcctacccgctcatcgccgggttcccggtgctgagcccgtgctacaacgtgtcgggggcggagagggtggaggtgccggagctgtcgctggtgttcgcggacggcgcggcgtgggagttcccggcggagaactacttcatccggctggagccggagggggtgatgtgcctggccgtcctgggcacgccgcgctccggcatgtccatcatcggcaactaccagcagcagaatttccacgtcttgtacgacctggagcacaaccggctcggcttcgcgccgcgccggtgcgccgacgtctaattagtccggcctccgtgcgtccattttgacttgctgattgggttgattgtttgaccggtaggagtatgtaggcggctctgctgactggatgggaagaagaaagaaggaagcaacggggttgggtgtag

SEQ ID NO: 66136 - protein, 551 aa, Triticum aestivum
  peptide (1)..(551): Ceres Seq. ID no. 15169467
  misc_feature (170)..(545): Pfam Name: Eukaryotic aspartyl protease Pfam Description: Eukaryotic aspartyl protease
  misc_feature (114)..(299): Homolog of NCBI NO: 19424106 NR Description: putative chloroplast nucleoid DNA-binding protein
  misc_feature (268)..(548): Homolog of NCBI NO: 19424106 NR Description: putative chloroplast nucleoid DNA-binding protein
  misc_feature (114)..(299): Homolog of NCBI NO: 15229656 NR Description: chloroplast nucleoid DNA-binding protein -related
  misc_feature (268)..(548): Homolog of NCBI NO: 15229656 NR Description: chloroplast nucleoid DNA-binding protein -related
  misc_feature (49)..(548): Homolog of NCBI NO: 15290061 NR Description: nucleoid DNA-binding protein cnd41-like protein
  misc_feature (37)..(295): Homolog of NCBI NO: 34895664 NR Description: nucleoid DNA-binding protein cnd41-like protein
  misc_feature (264)..(548): Homolog of NCBI NO: 34895664 NR Description: nucleoid DNA-binding protein cnd41-like protein
  misc_feature (135)..(551): Homolog of NCBI NO: 25408826 NR Description: hypothetical protein At2g42980 [imported] -
  misc_feature (135)..(551): Homolog of NCBI NO: 15228044 NR Description: chloroplast nucleoid DNA binding protein -related
  misc_feature (170)..(551): Homolog of NCBI NO: 15231625 NR Description: expressed protein [Arabidopsis thaliana]
KSFLLLPFQPPPPYPVPSASAAVALLTSPQTADASSLSLTAMAKLKHLPVCSLLLAVLLLALSSFSCSAGTNSTASAGPLYGIEFPPYNTAVADAGCDGRLVAEEEELARRAPSLKLHMTHRSAAEGATGKGSFVLDSAKKDAARIGTMHGIRAALSRKGSRPRRALSERVVATVGSGVAVGSGEYLVDVYVGTPPRRFRMIMDTGSDLNWLQCAPCLDCFHQTGPVFDPAASASYRNVTCGDARCGLVSPPPESPAAPPGRTCRRPRSDPCPYYYWYGDQSNTTGDLALEAFTVNLTGAAGSTRRVDGVAFGCGHRNRGLFHGAAGLLGLGRGPLSFASQLRGVYGGHAFSYCLVEHGSAAGSKIVFGHDDALLAHPRLNYTAFAPAAADAADTFYYVQLRSVLVGGEAVDIPSGTLAAGGTIIDSGTTLSYFPEPAYRAIRQAFIDRMSPSYPLIAGFPVLSPCYNVSGAERVEVPELSLVFADGAAWEFPAENYFIRLEPEGVMCLAVLGTPRSGMSIIGNYQQQNFHVLYDLEHNRLGFAPRRCADV

SEQ ID NO: 66137 - protein, 510 aa, Triticum aestivum
  peptide (1)..(510): Ceres Seq. ID no. 15169468
  misc_feature (129)..(504): Pfam Name: Eukaryotic aspartyl protease Pfam Description: Eukaryotic aspartyl protease
  misc_feature (73)..(258): Homolog of NCBI NO: 19424106 NR Description: putative chloroplast nucleoid DNA-binding protein
  misc_feature (227)..(507): Homolog of NCBI NO: 19424106 NR Description: putative chloroplast nucleoid DNA-binding protein
  misc_feature (73)..(258): Homolog of NCBI NO: 15229656 NR Description: chloroplast nucleoid DNA-binding protein -related
  misc_feature (227)..(507): Homolog of NCBI NO: 15229656 NR Description: chloroplast nucleoid DNA-binding protein -related
  misc_feature (8)..(507): Homolog of NCBI NO: 15290061 NR Description: nucleoid DNA-binding protein cnd41-like protein
  misc_feature (1)..(254): Homolog of NCBI NO: 34895664 NR Description: nucleoid DNA-binding protein cnd41-like protein
  misc_feature (223)..(507): Homolog of NCBI NO: 34895664 NR Description: nucleoid DNA-binding protein cnd41-like protein
  misc_feature (94)..(510): Homolog of NCBI NO: 25408826 NR Description: hypothetical protein At2g42980 [imported] -
  misc_feature (94)..(510): Homolog of NCBI NO: 15228044 NR Description: chloroplast nucleoid DNA binding protein -related
  misc_feature (129)..(510): Homolog of NCBI NO: 15231625 NR Description: expressed protein [Arabidopsis thaliana]
MAKLKHLPVCSLLLAVLLLALSSFSCSAGTNSTASAGPLYGIEFPPYNTAVADAGCDGRLVAEEEELARRAPSLKLHMTHRSAAEGATGKGSFVLDSAKKDAARIGTMHGIRAALSRKGSRPRRALSERVVATVGSGVAVGSGEYLVDVYVGTPPRRFRMIMDTGSDLNWLQCAPCLDCFHQTGPVFDPAASASYRNVTCGDARCGLVSPPPESPAAPPGRTCRRPRSDPCPYYYWYGDQSNTTGDLALEAFTVNLTGAAGSTRRVDGVAFGCGHRNRGLFHGAAGLLGLGRGPLSFASQLRGVYGGHAFSYCLVEHGSAAGSKIVFGHDDALLAHPRLNYTAFAPAAADAADTFYYVQLRSVLVGGEAVDIPSGTLAAGGTIIDSGTTLSYFPEPAYRAIRQAFIDRMSPSYPLIAGFPVLSPCYNVSGAERVEVPELSLVFADGAAWEFPAENYFIRLEPEGVMCLAVLGTPRSGMSIIGNYQQQNFHVLYDLEHNRLGFAPRRCADV

SEQ ID NO: 66138 - protein, 433 aa, Triticum aestivum
  peptide (1)..(433): Ceres Seq. ID no. 15169469
  misc_feature (52)..(427): Pfam Name: Eukaryotic aspartyl protease Pfam Description: Eukaryotic aspartyl protease
  misc_feature (1)..(181): Homolog of NCBI NO: 19424106 NR Description: putative chloroplast nucleoid DNA-binding protein
  misc_feature (150)..(430): Homolog of NCBI NO: 19424106 NR Description: putative chloroplast nucleoid DNA-binding protein
  misc_feature (1)..(181): Homolog of NCBI NO: 15229656 NR Description: chloroplast nucleoid DNA-binding protein -related
  misc_feature (150)..(430): Homolog of NCBI NO: 15229656 NR Description: chloroplast nucleoid DNA-binding protein -related
  misc_feature (1)..(430): Homolog of NCBI NO: 15290061 NR Description: nucleoid DNA-binding protein cnd41-like protein
  misc_feature (1)..(177): Homolog of NCBI NO: 34895664 NR Description: nucleoid DNA-binding protein cnd41-like protein
  misc_feature (146)..(430): Homolog of NCBI NO: 34895664 NR Description: nucleoid DNA-binding protein cnd41-like protein
  misc_feature (17)..(433): Homolog of NCBI NO: 25408826 NR Description: hypothetical protein At2g42980 [imported] -
  misc_feature (17)..(433): Homolog of NCBI NO: 15228044 NR Description: chloroplast nucleoid DNA binding protein -related
  misc_feature (52)..(433): Homolog of NCBI NO: 15231625 NR Description: expressed protein [Arabidopsis thaliana]
MTHRSAAEGATGKGSFVLDSAKKDAARIGTMHGIRAALSRKGSRPRRALSERVVATVGSGVAVGSGEYLVDVYVGTPPRRFRMIMDTGSDLNWLQCAPCLDCFHQTGPVFDPAASASYRNVTCGDARCGLVSPPPESPAAPPGRTCRRPRSDPCPYYYWYGDQSNTTGDLALEAFTVNLTGAAGSTRRVDGVAFGCGHRNRGLFHGAAGLLGLGRGPLSFASQLRGVYGGHAFSYCLVEHGSAAGSKIVFGHDDALLAHPRLNYTAFAPAAADAADTFYYVQLRSVLVGGEAVDIPSGTLAAGGTIIDSGTTLSYFPEPAYRAIRQAFIDRMSPSYPLIAGFPVLSPCYNVSGAERVEVPELSLVFADGAAWEFPAENYFIRLEPEGVMCLAVLGTPRSGMSIIGNYQQQNFHVLYDLEHNRLGFAPRRCADV

SEQ ID NO: 66139 - DNA, 2111 bp, Triticum aestivum
  misc_feature (1)..(2111): Ceres Seq. ID no. 15169474
accaccgcattcccattccgcggcacacgacacgaaccctggccgcggcacggagcgcgccaaatggacccccgccgcttcctctgctgcctcttgctcgccctcgccctcgccttccgccgctgcggcgcgcagggcgccgccaacggcaccgggcgcttcgcgtgcctcgtgccggccccgtgcgacacgttcgtcctgtaccgcacgcaggccccggggtccctcgacctcggcgccatctcggacctcttcggcgtgagccgggccatgatcgccagcgccaacggcctcagcctcgacgccgagggcgcggcgctgctgcccgaccagccgctgctcgtgcccgtccgctgcggctgcaccggcaaccgctccttcgtcaacgtcacctaccccatccgctccggcgacaccttctacgcgctcgcgctcaccggcttcgagaacctcaccacccccgacgtcatccaggagctcaacccgcaggcggtcttcaacaagctcaatgtctcgcagctggtcaccgtgccgctcttctgccggtgccccacgccggcggagcggagcggcggggcgcagctgctcgtcacctacatgtggcgacctgtcgacaccatgtccgaggtgagcaagctgatgaactctagcgcgagcgcgatcgctgcggtgaacaacgtcagcgccgacttcacctccacgacgatgctgccgatgctgatcccggtggcgcggccgccggtgcttcctccgctgcaatatggcgcgagcgcgagcaccggcgatcccggagttagcaagcgcttctcgggtgccaccgtcgcggcgagcatcgccgggtctctcatcgcggtcgccgccttgtgcgcggcgatcttcgcgtaccggaggtaccgcgagaagaaggccacggtgcactcggcgtccaggttcgcgagcccgaggttttgtttcaaccagaacgcctacgggattcagagcagcagttccatcgcgcgcatgatcaacggaggggacaagctgctcaccagcgtgtcgcagttcatcgacaagcctgtcatcttcggcacagcggagatcatggaagcgacgatgaacttggacgaacggtgcaggatcggcagctcctactaccgggccaagctagaaggcgaggtgttcgcggtgaagccggcgaaaggcgacgtgtcggcggagctgaggatgatgcagatggtcaaccacgccaacctcatcaggctggccggcatatccatcggcgccgatggggactacaccttcctcgtgtacgagttcgccgagaagggctcgctcgacaagtggctgtaccagaagcctccgtcctcgctgccgtcgtcgagctcatcagcggacacgctctcgtggaaccagaggctgggcatcgcgttcgacgtcgccaacggcctactatacatgcacgagcacactcagccgagcatggtgcacggtgacgtccgcgcacggaacatcctcctcaccgcggacttcagggccaggatatccaacttctccgtggccacgccggcgatggccgacgccgcggcgacgagcagcgacgtgttcgccttcggcctacttgtcctcgagcttctctccggcaggacggccatggagacgcgcgtcggcgcggagatcggcatgctatggagggacatccgggcggtgctggaggccggggacaagagggacgccaagctgaggaagtggatggaccccgcccttggggacgagtactacttggatgcggcactcagcctggccggcatggcgagggcttgcacggaggaggacgcggcgcggcggccgaagatggccgacgtggtgttcagcctctcgatgctggtgcagccgttgccggtgggcgacgcgttcgagaagctatggcagcccagctcggaggagaacattaggattgtcaatgaagtggcagccagatgatatcggagcataactgaatttagcgactgatctagaaagttcttagtttgggtgttgcgtgcagtgatttggttcgttttgtgaatgtgtgtcactgtaatttactgcaatgctttgctttactctgaagaccaaagatcaggttttgttgc

SEQ ID NO: 66140 - protein, 652 aa, Triticum aestivum
  peptide (1)..(652): Ceres Seq. ID no. 15169475
  misc_feature (399)..(508): Pfam Name: Protein kinase domain Pfam Description: Protein kinase domain
  misc_feature (42)..(513): Homolog of NCBI NO: 15226133 NR Description: protein kinase -related [Arabidopsis thaliana]
  misc_feature (526)..(642): Homolog of NCBI NO: 5441881 NR Description: Similar to putative receptor kinase. (AC002332)
  misc_feature (49)..(527): Homolog of NCBI NO: 5441881 NR Description: Similar to putative receptor kinase. (AC002332)
  misc_feature (31)..(263): Homolog of NCBI NO: 37651066 NR Description: SYM10 protein [Pisum sativum]
  misc_feature (325)..(652): Homolog of NCBI NO: 37651066 NR Description: SYM10 protein [Pisum sativum]
  misc_feature (31)..(263): Homolog of NCBI NO: 37651070 NR Description: SYM10 protein [Pisum sativum]
  misc_feature (325)..(652): Homolog of NCBI NO: 37651070 NR Description: SYM10 protein [Pisum sativum]
  misc_feature (31)..(285): Homolog of NCBI NO: 37651074 NR Description: Nod-factor receptor 5 [Lotus corniculatus var.
  misc_feature (339)..(652): Homolog of NCBI NO: 37651074 NR Description: Nod-factor receptor 5 [Lotus corniculatus var.
  misc_feature (28)..(652): Homolog of NCBI NO: 20330767 NR Description: Putative protein kinase [Oryza sativa (japonica
TTAFPFRGTRHEPWPRHGARQMDPRRFLCCLLLALALAFRRCGAQGAANGTGRFACLVPAPCDTFVLYRTQAPGSLDLGAISDLFGVSRAMIASANGLSLDAEGAALLPDQPLLVPVRCGCTGNRSFVNVTYPIRSGDTFYALALTGFENLTTPDVIQELNPQAVFNKLNVSQLVTVPLFCRCPTPAERSGGAQLLVTYMWRPVDTMSEVSKLMNSSASAIAAVNNVSADFTSTTMLPMLIPVARPPVLPPLQYGASASTGDPGVSKRFSGATVAASIAGSLIAVAALCAAIFAYRRYREKKATVHSASRFASPRFCFNQNAYGIQSSSSIARMINGGDKLLTSVSQFIDKPVIFGTAEIMEATMNLDERCRIGSSYYRAKLEGEVFAVKPAKGDVSAELRMMQMVNHANLIRLAGISIGADGDYTFLVYEFAEKGSLDKWLYQKPPSSLPSSSSSADTLSWNQRLGIAFDVANGLLYMHEHTQPSMVHGDVRARNILLTADFRARISNFSVATPAMADAAATSSDVFAFGLLVLELLSGRTAMETRVGAEIGMLWRDIRAVLEAGDKRDAKLRKWMDPALGDEYYLDAALSLAGMARACTEEDAARRPKMADVVFSLSMLVQPLPVGDAFEKLWQPSSEENIRIVNEVAAR

SEQ ID NO: 66141 - protein, 631 aa, Triticum aestivum
  peptide (1)..(631): Ceres Seq. ID no. 15169476
  misc_feature (378)..(487): Pfam Name: Protein kinase domain Pfam Description: Protein kinase domain
  misc_feature (21)..(492): Homolog of NCBI NO: 15226133 NR Description: protein kinase -related [Arabidopsis thaliana]
  misc_feature (505)..(621): Homolog of NCBI NO: 5441881 NR Description: Similar to putative receptor kinase. (AC002332)
  misc_feature (28)..(506): Homolog of NCBI NO: 5441881 NR Description: Similar to putative receptor kinase. (AC002332)
  misc_feature (10)..(242): Homolog of NCBI NO: 37651066 NR Description: SYM10 protein [Pisum sativum]
  misc_feature (304)..(631): Homolog of NCBI NO: 37651066 NR Description: SYM10 protein [Pisum sativum]
  misc_feature (10)..(242): Homolog of NCBI NO: 37651070 NR Description: SYM10 protein [Pisum sativum]
  misc_feature (304)..(631): Homolog of NCBI NO: 37651070 NR Description: SYM10 protein [Pisum sativum]
  misc_feature (10)..(264): Homolog of NCBI NO: 37651074 NR Description: Nod-factor receptor 5 [Lotus corniculatus var.
  misc_feature (318)..(631): Homolog of NCBI NO: 37651074 NR Description: Nod-factor receptor 5 [Lotus corniculatus var.
  misc_feature (7)..(631): Homolog of NCBI NO: 20330767 NR Description: Putative protein kinase [Oryza sativa (japonica
MDPRRFLCCLLLALALAFRRCGAQGAANGTGRFACLVPAPCDTFVLYRTQAPGSLDLGAISDLFGVSRAMIASANGLSLDAEGAALLPDQPLLVPVRCGCTGNRSFVNVTYPIRSGDTFYALALTGFENLTTPDVIQELNPQAVFNKLNVSQLVTVPLFCRCPTPAERSGGAQLLVTYMWRPVDTMSEVSKLMNSSASAIAAVNNVSADFTSTTMLPMLIPVARPPVLPPLQYGASASTGDPGVSKRFSGATVAASIAGSLIAVAALCAAIFAYRRYREKKATVHSASRFASPRFCFNQNAYGIQSSSSIARMINGGDKLLTSVSQFIDKPVIFGTAEIMEATMNLDERCRIGSSYYRAKLEGEVFAVKPAKGDVSAELRMMQMVNHANLIRLAGISIGADGDYTFLVYEFAEKGSLDKWLYQKPPSSLPSSSSSADTLSWNQRLGIAFDVANGLLYMHEHTQPSMVHGDVRARNILLTADFRARISNFSVATPAMADAAATSSDVFAFGLLVLELLSGRTAMETRVGAEIGMLWRDIRAVLEAGDKRDAKLRKWMDPALGDEYYLDAALSLAGMARACTEEDAARRPKMADVVFSLSMLVQPLPVGDAFEKLWQPSSEENIRIVNEVAAR

SEQ ID NO: 66142 - protein, 562 aa, Triticum aestivum
  peptide (1)..(562): Ceres Seq. ID no. 15169477
  misc_feature (309)..(418): Pfam Name: Protein kinase domain Pfam Description: Protein kinase domain
  misc_feature (1)..(423): Homolog of NCBI NO: 15226133 NR Description: protein kinase -related [Arabidopsis thaliana]
  misc_feature (436)..(552): Homolog of NCBI NO: 5441881 NR Description: Similar to putative receptor kinase. (AC002332)
  misc_feature (1)..(437): Homolog of NCBI NO: 5441881 NR Description: Similar to putative receptor kinase. (AC002332)
  misc_feature (1)..(173): Homolog of NCBI NO: 37651066 NR Description: SYM10 protein [Pisum sativum]
  misc_feature (235)..(562): Homolog of NCBI NO: 37651066 NR Description: SYM10 protein [Pisum sativum]
  misc_feature (1)..(173): Homolog of NCBI NO: 37651070 NR Description: SYM10 protein [Pisum sativum]
  misc_feature (235)..(562): Homolog of NCBI NO: 37651070 NR Description: SYM10 protein [Pisum sativum]
  misc_feature (1)..(195): Homolog of NCBI NO: 37651074 NR Description: Nod-factor receptor 5 [Lotus corniculatus var.
  misc_feature (249)..(562): Homolog of NCBI NO: 37651074 NR Description: Nod-factor receptor 5 [Lotus corniculatus var.
  misc_feature (1)..(562): Homolog of NCBI NO: 20330767 NR Description: Putative protein kinase [Oryza sativa (japonica
MIASANGLSLDAEGAALLPDQPLLVPVRCGCTGNRSFVNVTYPIRSGDTFYALALTGFENLTTPDVIQELNPQAVFNKLNVSQLVTVPLFCRCPTPAERSGGAQLLVTYMWRPVDTMSEVSKLMNSSASAIAAVNNVSADFTSTTMLPMLIPVARPPVLPPLQYGASASTGDPGVSKRFSGATVAASIAGSLIAVAALCAAIFAYRRYREKKATVHSASRFASPRFCFNQNAYGIQSSSSIARMINGGDKLLTSVSQFIDKPVIFGTAEIMEATMNLDERCRIGSSYYRAKLEGEVFAVKPAKGDVSAELRMMQMVNHANLIRLAGISIGADGDYTFLVYEFAEKGSLDKWLYQKPPSSLPSSSSSADTLSWNQRLGIAFDVANGLLYMHEHTQPSMVHGDVRARNILLTADFRARISNFSVATPAMADAAATSSDVFAFGLLVLELLSGRTAMETRVGAEIGMLWRDIRAVLEAGDKRDAKLRKWMDPALGDEYYLDAALSLAGMARACTEEDAARRPKMADVVFSLSMLVQPLPVGDAFEKLWQPSSEENIRIVNEVAAR

SEQ ID NO: 66143 - DNA, 1367 bp, Triticum aestivum
  misc_feature (1)..(1367): Ceres Seq. ID no. 14302404
ctccttttgccacggcccgcgcgcaccggtcacacatggctgagaccccccgtgccccgccgccactgaggcctccgccgcccgttccgctgccggacacgccgcctcgcccggattcgtcgccttccacgcccggcgaggattaccacacgccgacgccctcgctggacgaggcgcgcgaagaaacgccaccgtggtcgcaagaaaccaacggcaacgagagagcggccagcaaaagcccggccctctcgcccgtgcgcctcccctcgccgcaccgcctgctgccgcccaactcccccaccggcaacggcgatgacggtgccgccgccgggcatgcgccggtgccgggccgccgcccgcagctccgcctcgcgcccggcctcgtccggacgccgtcggaagggtccgtcgccaagtctccctcgccgtcgccctcttcgtcgctgacgtcgccatcgcctctaaccctggctcccacaatcacaaccaacagcaagagcgcccagagcacgccgaagcgcacggaggcatggaagccgccggccacggggatcgcggtgcagttcgaccctgtcgaggaagccgtcacgtcgccgctgcaactgggcaaggcccgaatcgaccgccatcgcgccactacgatggcggcagcagagaacggaggcgcgcccaacacggtgcctcgcgacgtggcggcggtggccgctgtcggggagaggaggccactgtcggtggcgctgcggctggccacggcagtgctcagcctggcgtccttcgcggtgatggccagcgcccggacgtccggctgggacggcgatcacttcgatcgctacgatcagtacaggtacgccctggcgatgaacgtgatcgtctgcgcctactcaatcgcgcaatcgcttggtgagatccgccgtctggtcgcggcgaggtttatttacaggagcatgtcaagctactacgtcagcctgttccttgatcaggtcctggcgtatctcctcatgtcggcgtcctcggctgccgcgtcgcgcaacgatctgtgggtgtcgaggttcagccaggacgccttcaacaggaagatcaccagctccgtgtggctgtccttccttgccttcatagcgctcgccgcaagctcgctcatctccacggctaatctcttcagcatggtctaattatgatagatacggttcatccctttccctctggggatgagtaactgccgacgttcttcatgtaaattttgcattttatattgcgagaaatcatacgatcgacttataccgtacgttgttctcggtcctgacctctgactcgtcagaaatcccttgtaaagaggttcatatagtgctctaattaagcttttcactgtc

SEQ ID NO: 66144 - protein, 388 aa, Triticum aestivum
  peptide (1)..(388): Ceres Seq. ID no. 14302405
  misc_feature (236)..(317): Pfam Name: Domain of unknown function (DUF588) Pfam Description: Domain of unknown function (DUF588)
  misc_feature (244)..(386): Homolog of NCBI NO: 34898210 NR Description: P0034A04.16 [Oryza sativa (japonica
  misc_feature (318)..(386): Homolog of NCBI NO: 15227628 NR Description: expressed protein [Arabidopsis thaliana]
  misc_feature (115)..(282): Homolog of NCBI NO: 15227628 NR Description: expressed protein [Arabidopsis thaliana]
  misc_feature (246)..(384): Homolog of NCBI NO: 28876007 NR Description: hypothetical protein [Oryza sativa (japonica
  misc_feature (224)..(380): Homolog of NCBI NO: 15242642 NR Description: expressed protein [Arabidopsis thaliana]
  misc_feature (139)..(386): Homolog of NCBI NO: 15241975 NR Description: hypothetical protein [Arabidopsis thaliana]
  misc_feature (12)..(137): Homolog of NCBI NO: 34911616 NR Description: P0039G05.10 [Oryza sativa (japonica
  misc_feature (130)..(386): Homolog of NCBI NO: 27754604 NR Description: unknown protein [Arabidopsis thaliana]
  misc_feature (327)..(388): Homolog of NCBI NO: 34911616 NR Description: P0039G05.10 [Oryza sativa (japonica
  misc_feature (14)..(317): Homolog of NCBI NO: 34911616 NR Description: P0039G05.10 [Oryza sativa (japonica
PFATARAHRSHMAETPRAPPPLRPPPPVPLPDTPPRPDSSPSTPGEDYHTPTPSLDEAREETPPWSQETNGNERAASKSPALSPVRLPSPHRLLPPNSPTGNGDDGAAAGHAPVPGRRPQLRLAPGLVRTPSEGSVAKSPSPSPSSSLTSPSPLTLAPTITTNSKSAQSTPKRTEAWKPPATGIAVQFDPVEEAVTSPLQLGKARIDRHRATTMAAAENGGAPNTVPRDVAAVAAVGERRPLSVALRLATAVLSLASFAVMASARTSGWDGDHFDRYDQYRYALAMNVIVCAYSIAQSLGEIRRLVAARFIYRSMSSYYVSLFLDQVLAYLLMSASSAAASRNDLWVSRFSQDAFNRKITSSVWLSFLAFIALAASSLISTANLFSMV

SEQ ID NO: 66145 - protein, 377 aa, Triticum aestivum
  peptide (1)..(377): Ceres Seq. ID no. 14302406
  misc_feature (225)..(306): Pfam Name: Domain of unknown function (DUF588) Pfam Description: Domain of unknown function (DUF588)
  misc_feature (233)..(375): Homolog of NCBI NO: 34898210 NR Description: P0034A04.16 [Oryza sativa (japonica
  misc_feature (307)..(375): Homolog of NCBI NO: 15227628 NR Description: expressed protein [Arabidopsis thaliana]
  misc_feature (104)..(271): Homolog of NCBI NO: 15227628 NR Description: expressed protein [Arabidopsis thaliana]
  misc_feature (235)..(373): Homolog of NCBI NO: 28876007 NR Description: hypothetical protein [Oryza sativa (japonica
  misc_feature (213)..(369): Homolog of NCBI NO: 15242642 NR Description: expressed protein [Arabidopsis thaliana]
  misc_feature (128)..(375): Homolog of NCBI NO: 15241975 NR Description: hypothetical protein [Arabidopsis thaliana]
  misc_feature (1)..(126): Homolog of NCBI NO: 34911616 NR Description: P0039G05.10 [Oryza sativa (japonica
  misc_feature (119)..(375): Homolog of NCBI NO: 27754604 NR Description: unknown protein [Arabidopsis thaliana]
  misc_feature (316)..(377): Homolog of NCBI NO: 34911616 NR Description: P0039G05.10 [Oryza sativa (japonica
  misc_feature (3)..(306): Homolog of NCBI NO: 34911616 NR Description: P0039G05.10 [Oryza sativa (japonica
MAETPRAPPPLRPPPPVPLPDTPPRPDSSPSTPGEDYHTPTPSLDEAREETPPWSQETNGNERAASKSPALSPVRLPSPHRLLPPNSPTGNGDDGAAAGHAPVPGRRPQLRLAPGLVRTPSEGSVAKSPSPSPSSSLTSPSPLTLAPTITTNSKSAQSTPKRTEAWKPPATGIAVQFDPVEEAVTSPLQLGKARIDRHRATTMAAAENGGAPNTVPRDVAAVAAVGERRPLSVALRLATAVLSLASFAVMASARTSGWDGDHFDRYDQYRYALAMNVIVCAYSIAQSLGEIRRLVAARFIYRSMSSYYVSLFLDQVLAYLLMSASSAAASRNDLWVSRFSQDAFNRKITSSVWLSFLAFIALAASSLISTANLFSMV

SEQ ID NO: 66146 - DNA, 1573 bp, Triticum aestivum
  misc_feature (1)..(1573): Ceres Seq. ID no. 14302887
gttaaccacacgcagcagccggagggaggagcgagcgaggaagccaccagtataaaaccaacgccgcgtccttggcagccagcgatcccgcgactcagccgacggttttctgttcccccctctgacctgtccctccatcctcctcaattctcctccccggcgcccgccgttgacgaggcctcggaggaggaggactcgagcgcgccgctgtctcctgctccgccggctgccctcgcgttgagtttcacagggttgagttaggaggactgcgaccatgaaggccctcattcttgtgggaggattcggcacccgcctgcggccgctgacgctcagcgtgcccaagccgctcgtcgatttcgccaacaagcccatgatcctgcatcagatcgaggctctgaaagatgtgggagttacagaagttgtcctagccatcaattaccagccagaggtcatgctcaactttctcaaggacttcgagagcaagcttggcatcaagatcacctgctcccaggagacagagccaatgggaaccgctggaccgctggccctggcccgcgacaagctcgacgacggatccggcgagcctttcttcgtcctcaacagtgacgtgatcagcgagtacccgttcgcagagctcatcgagttccacaagtcccatggcggcgaggccacgatcatggtcaccaaggtggagcggttcgtggagaagcccaaggtgttcgtgggcaacaagatcaacgccggcatctacctgctgagcccgtccgtgctggaccgcatcgagctgaagccgacgtccatcgagaaggaggtgttcccgcgcatcgccgccgacaagggcctgttcgccatggtgctgccggggttctggatggacatcgggcagccgagggactacatcacggggctgaggctctacctggagtccctgaggaagagggcgccggcgaggctggcggcgggcgcgcacgtgctgggcaacgtgctggtacacgagacggcgacgatcggggaggggtgcctgatcgggccggacgtggccgtcggccccgggtgcgtggtggaggccggggtgcggctgtcgaggtgcaccgtgatgcggggcgcccgcgtgaagaagcacgcgtgcatctccggcagcatcgtggggtggcactcgacggtgggcaagtgggcgcgcgtggagaacatgaccatcctcggcgaggacgtgcacgtctgcgacgaggtgtacagcaacggcggcgtcgtgctcccgcacaaggagatcaagtccagcatcctcaagcccgagatcgtcatgtgatcgggaccatcgcccgcgccacatggtgaaaaagggtcgtatatttcttcatgcgtttgttggtttatttgtctgtctgtctgcaagtgtaaccagaggtgtccaccaaactgccaagtgtctatcaagctctatgtatgtctagacgtgtcgcaagtttttttttctttcttttttgaagacaaaatgcgtctcggttaaatttaagccccgggcttcaatttgtagataggtgtcagatgcatgggaataaagcatcagttttac

SEQ ID NO: 66147 - protein, 343 aa, Triticum aestivum
  peptide (1)..(343): Ceres Seq. ID no. 14302888
  misc_feature (2)..(140): Pfam Name: Nucleotidyl transferase Pfam Description: Nucleotidyl transferase
  misc_feature (21)..(140): Homolog of NCBI NO: 15234771 NR Description: GDP-mannose pyrophosphorylase, putative
  misc_feature (138)..(327): Homolog of NCBI NO: 15234771 NR Description: GDP-mannose pyrophosphorylase, putative
  misc_feature (1)..(140): Homolog of NCBI NO: 25317396 NR Description: GDP-mannose pyrophosphorylase like protein
  misc_feature (138)..(327): Homolog of NCBI NO: 25317396 NR Description: GDP-mannose pyrophosphorylase like protein
  misc_feature (1)..(140): Homolog of NCBI NO: 15233308 NR Description: GDP-mannose pyrophosphorylase, putative
  misc_feature (138)..(343): Homolog of NCBI NO: 15233308 NR Description: GDP-mannose pyrophosphorylase, putative
  misc_feature (1)..(140): Homolog of NCBI NO: 14971013 NR Description: GDP-D-mannose pyrophosphorylase [Nicotiana
  misc_feature (138)..(343): Homolog of NCBI NO: 14971013 NR Description: GDP-D-mannose pyrophosphorylase [Nicotiana
  misc_feature (1)..(140): Homolog of NCBI NO: 4103324 NR Description: GDP-mannose pyrophosphorylase [Solanum tuberosum]
  misc_feature (138)..(343): Homolog of NCBI NO: 4103324 NR Description: GDP-mannose pyrophosphorylase [Solanum tuberosum]
MKALILVGGFGTRLRPLTLSVPKPLVDFANKPMILHQIEALKDVGVTEVVLAINYQPEVMLNFLKDFESKLGIKITCSQETEPMGTAGPLALARDKLDDGSGEPFFVLNSDVISEYPFAELIEFHKSHGGEATIMVTKVERFVEKPKVFVGNKINAGIYLLSPSVLDRIELKPTSIEKEVFPRIAADKGLFAMVLPGFWMDIGQPRDYITGLRLYLESLRKRAPARLAAGAHVLGNVLVHETATIGEGCLIGPDVAVGPGCVVEAGVRLSRCTVMRGARVKKHACISGSIVGWHSTVGKWARVENMTILGEDVHVCDEVYSNGGVVLPHKEIKSSILKPEIVM

SEQ ID NO: 66148 - protein, 311 aa, Triticum aestivum
  peptide (1)..(311): Ceres Seq. ID no. 14302889
  misc_feature (1)..(108): Pfam Name: Nucleotidyl transferase Pfam Description: Nucleotidyl transferase
  misc_feature (1)..(108): Homolog of NCBI NO: 15234771 NR Description: GDP-mannose pyrophosphorylase, putative
  misc_feature (106)..(295): Homolog of NCBI NO: 15234771 NR Description: GDP-mannose pyrophosphorylase, putative
  misc_feature (1)..(108): Homolog of NCBI NO: 25317396 NR Description: GDP-mannose pyrophosphorylase like protein
  misc_feature (106)..(295): Homolog of NCBI NO: 25317396 NR Description: GDP-mannose pyrophosphorylase like protein
  misc_feature (1)..(108): Homolog of NCBI NO: 15233308 NR Description: GDP-mannose pyrophosphorylase, putative
  misc_feature (106)..(311): Homolog of NCBI NO: 15233308 NR Description: GDP-mannose pyrophosphorylase, putative
  misc_feature (1)..(108): Homolog of NCBI NO: 14971013 NR Description: GDP-D-mannose pyrophosphorylase [Nicotiana
  misc_feature (106)..(311): Homolog of NCBI NO: 14971013 NR Description: GDP-D-mannose pyrophosphorylase [Nicotiana
  misc_feature (1)..(108): Homolog of NCBI NO: 4103324 NR Description: GDP-mannose pyrophosphorylase [Solanum tuberosum]
  misc_feature (106)..(311): Homolog of NCBI NO: 4103324 NR Description: GDP-mannose pyrophosphorylase [Solanum tuberosum]
MILHQIEALKDVGVTEVVLAINYQPEVMLNFLKDFESKLGIKITCSQETEPMGTAGPLALARDKLDDGSGEPFFVLNSDVISEYPFAELIEFHKSHGGEATIMVTKVERFVEKPKVFVGNKINAGIYLLSPSVLDRIELKPTSIEKEVFPRIAADKGLFAMVLPGFWMDIGQPRDYITGLRLYLESLRKRAPARLAAGAHVLGNVLVHETATIGEGCLIGPDVAVGPGCVVEAGVRLSRCTVMRGARVKKHACISGSIVGWHSTVGKWARVENMTILGEDVHVCDEVYSNGGVVLPHKEIKSSILKPEIVM

SEQ ID NO: 66149 - protein, 284 aa, Triticum aestivum
  peptide (1)..(284): Ceres Seq. ID no. 14302890
  misc_feature (1)..(81): Pfam Name: Nucleotidyl transferase Pfam Description: Nucleotidyl transferase
  misc_feature (1)..(81): Homolog of NCBI NO: 15234771 NR Description: GDP-mannose pyrophosphorylase, putative
  misc_feature (79)..(268): Homolog of NCBI NO: 15234771 NR Description: GDP-mannose pyrophosphorylase, putative
  misc_feature (1)..(81): Homolog of NCBI NO: 25317396 NR Description: GDP-mannose pyrophosphorylase like protein
  misc_feature (79)..(268): Homolog of NCBI NO: 25317396 NR Description: GDP-mannose pyrophosphorylase like protein
  misc_feature (1)..(81): Homolog of NCBI NO: 15233308 NR Description: GDP-mannose pyrophosphorylase, putative
  misc_feature (79)..(284): Homolog of NCBI NO: 15233308 NR Description: GDP-mannose pyrophosphorylase, putative
  misc_feature (1)..(81): Homolog of NCBI NO: 14971013 NR Description: GDP-D-mannose pyrophosphorylase [Nicotiana
  misc_feature (79)..(284): Homolog of NCBI NO: 14971013 NR Description: GDP-D-mannose pyrophosphorylase [Nicotiana
  misc_feature (1)..(81): Homolog of NCBI NO: 4103324 NR Description: GDP-mannose pyrophosphorylase [Solanum tuberosum]
  misc_feature (79)..(284): Homolog of NCBI NO: 4103324 NR Description: GDP-mannose pyrophosphorylase [Solanum tuberosum]
MLNFLKDFESKLGIKITCSQETEPMGTAGPLALARDKLDDGSGEPFFVLNSDVISEYPFAELIEFHKSHGGEATIMVTKVERFVEKPKVFVGNKINAGIYLLSPSVLDRIELKPTSIEKEVFPRIAADKGLFAMVLPGFWMDIGQPRDYITGLRLYLESLRKRAPARLAAGAHVLGNVLVHETATIGEGCLIGPDVAVGPGCVVEAGVRLSRCTVMRGARVKKHACISGSIVGWHSTVGKWARVENMTILGEDVHVCDEVYSNGGVVLPHKEIKSSILKPEIVM

SEQ ID NO: 66150 - DNA, 1283 bp, Triticum aestivum
  misc_feature (1)..(1283): Ceres Seq. ID no. 13662654
ataatttcgcctaatatcctcccgcgccgcgcgtctgcgcgggcaccacaaaccagaagaagaaatggcagcgggccccacgccatccaccgccgcgtccttccggccgcccctgccgcctccgccgccgtgcttcgactatcggtccgcgtcgctcgccgacacgcgtgccagcgcagccgcggcggacccagcgttggctgggttggtcgagtccggcgcactggtacgcgtcccgcggcggcggttcgggccggtgccggcgtggcggccgccggacttcgctgagcccgaggacgtgtggatcctcgggacctcgcacctctccgcggagtccgccgacgaggtcgagcgcgtgctccgtgccgtccgccccgacaacgtcgtcgtcgaactctgccggagcagagccgggatcatgtacgcttccgacgacgcctccggcgagccgctgttgaaatccaacatgttctcgctcggcggcgccaagttcttcggagccgtcaaccggagcatcaacctgggtggacagagtgctcttgctctgcgtttgctcctagctgttttttcgtccaagatttcttctggcgcgaaccggccgtttggggaggagttccgagcagctaggagggtgtctgaagatattggcgctcagctcgttcttggggatcgccctattgaaataactcttgaacgagctttgaaatccctcagctgggatgaaaagactaaactcgtaatctcattattccgtggaatcacttcaacgactgatatgccgcaggatgagaaagctgcggttagcccgtacgagctgtacgagaagcttagcagctcatatccttcactgctacagcctctcgtacatgagcgcgacatgttcatggcttggtccctaaagaggagcaaggccgtgaacaagagcaagacggtggttggggtcatcgggaaggggcatatgaacggcgtggtgtacgcgctgatctctgaccagggggacctgaggttccgcgacctcgtcggcagggaatcgtcggagacctgggctagctccgtcgtcaagggcctggtcagggatacggtgatagggctcgctctctgggctctgtacgaactgctgcaagctgccgccgtacatataaagctgtagctgaagtccatttttactggcaaagactgacattcgtaaccgtgcacgctctttgcaacgtccatgcagcttgagattgtaaagtcaagtgaagtactccatatgtaacttctataagacgttaagggattcc

SEQ ID NO: 66151 - protein, 361 aa, Triticum aestivum
  peptide (1)..(361): Ceres Seq. ID no. 13662655
  misc_feature (75)..(315): Pfam Name: TraB family Pfam Description: TraB family
  misc_feature (79)..(303): Homolog of NCBI NO: 30794613 NR Description: Hypothetical protein F38A5.2a [Caenorhabditis
  misc_feature (79)..(303): Homolog of NCBI NO: 17540248 NR Description: TraB family [Caenorhabditis elegans]
  misc_feature (79)..(302): Homolog of NCBI NO: 21357445 NR Description: CG12360-PA [Drosophila melanogaster]
  misc_feature (78)..(119): Homolog of NCBI NO: 30679206 NR Description: expressed protein [Arabidopsis thaliana]
  misc_feature (163)..(302): Homolog of NCBI NO: 30679206 NR Description: expressed protein [Arabidopsis thaliana]
  misc_feature (81)..(134): Homolog of NCBI NO: 28828782 NR Description: similar to Plasmodium falciparum (isolate 3D7).
  misc_feature (149)..(303): Homolog of NCBI NO: 28828782 NR Description: similar to Plasmodium falciparum (isolate 3D7).
  misc_feature (119)..(350): Homolog of NCBI NO: 22327748 NR Description: expressed protein [Arabidopsis thaliana]
  misc_feature (20)..(350): Homolog of NCBI NO: 10177738 NR Description: gene_id:MSG15.11~pir||C69291~similar to unknown
  misc_feature (6)..(350): Homolog of NCBI NO: 19699285 NR Description: AT5g52030/MSG15_11 [Arabidopsis thaliana]
MAAGPTPSTAASFRPPLPPPPPCFDYRSASLADTRASAAAADPALAGLVESGALVRVPRRRFGPVPAWRPPDFAEPEDVWILGTSHLSAESADEVERVLRAVRPDNVVVELCRSRAGIMYASDDASGEPLLKSNMFSLGGAKFFGAVNRSINLGGQSALALRLLLAVFSSKISSGANRPFGEEFRAARRVSEDIGAQLVLGDRPIEITLERALKSLSWDEKTKLVISLFRGITSTTDMPQDEKAAVSPYELYEKLSSSYPSLLQPLVHERDMFMAWSLKRSKAVNKSKTVVGVIGKGHMNGVVYALISDQGDLRFRDLVGRESSETWASSVVKGLVRDTVIGLALWALYELLQAAAVHIKL

SEQ ID NO: 66152 - protein, 243 aa, Triticum aestivum
  peptide (1)..(243): Ceres Seq. ID no. 13662656
  misc_feature (1)..(197): Pfam Name: TraB family Pfam Description: TraB family
  misc_feature (1)..(185): Homolog of NCBI NO: 30794614 NR Description: Hypothetical protein F38A5.2b [Caenorhabditis
  misc_feature (1)..(185): Homolog of NCBI NO: 30794613 NR Description: Hypothetical protein F38A5.2a [Caenorhabditis
  misc_feature (1)..(185): Homolog of NCBI NO: 17540248 NR Description: TraB family [Caenorhabditis elegans]
  misc_feature (1)..(184): Homolog of NCBI NO: 21357445 NR Description: CG12360-PA [Drosophila melanogaster]
  misc_feature (45)..(184): Homolog of NCBI NO: 30679206 NR Description: expressed protein [Arabidopsis thaliana]
  misc_feature (1)..(16): Homolog of NCBI NO: 28828782 NR Description: similar to Plasmodium falciparum (isolate 3D7).
  misc_feature (31)..(185): Homolog of NCBI NO: 28828782 NR Description: similar to Plasmodium falciparum (isolate 3D7).
  misc_feature (1)..(232): Homolog of NCBI NO: 22327748 NR Description: expressed protein [Arabidopsis thaliana]
  misc_feature (1)..(232): Homolog of NCBI NO: 10177738 NR Description: gene_id:MSG15.11~pir||C69291~similar to unknown
  misc_feature (1)..(232): Homolog of NCBI NO: 19699285 NR Description: AT5g52030/MSG15_11 [Arabidopsis thaliana]
MYASDDASGEPLLKSNMFSLGGAKFFGAVNRSINLGGQSALALRLLLAVFSSKISSGANRPFGEEFRAARRVSEDIGAQLVLGDRPIEITLERALKSLSWDEKTKLVISLFRGITSTTDMPQDEKAAVSPYELYEKLSSSYPSLLQPLVHERDMFMAWSLKRSKAVNKSKTVVGVIGKGHMNGVVYALISDQGDLRFRDLVGRESSETWASSVVKGLVRDTVIGLALWALYELLQAAAVHIKL

SEQ ID NO: 66153 - protein, 227 aa, Triticum aestivum
  peptide (1)..(227): Ceres Seq. ID no. 13662657
  misc_feature (1)..(181): Pfam Name: TraB family Pfam Description: TraB family
  misc_feature (1)..(169): Homolog of NCBI NO: 17540246 NR Description: TraB family [Caenorhabditis elegans]
  misc_feature (1)..(169): Homolog of NCBI NO: 30794614 NR Description: Hypothetical protein F38A5.2b [Caenorhabditis
  misc_feature (1)..(169): Homolog of NCBI NO: 30794613 NR Description: Hypothetical protein F38A5.2a [Caenorhabditis
  misc_feature (1)..(169): Homolog of NCBI NO: 17540248 NR Description: TraB family [Caenorhabditis elegans]
  misc_feature (1)..(168): Homolog of NCBI NO: 21357445 NR Description: CG12360-PA [Drosophila melanogaster]
  misc_feature (29)..(168): Homolog of NCBI NO: 30679206 NR Description: expressed protein [Arabidopsis thaliana]
  misc_feature (15)..(169): Homolog of NCBI NO: 28828782 NR Description: similar to Plasmodium falciparum (isolate 3D7).
  misc_feature (1)..(216): Homolog of NCBI NO: 22327748 NR Description: expressed protein [Arabidopsis thaliana]
  misc_feature (1)..(216): Homolog of NCBI NO: 10177738 NR Description: gene_id:MSG15.11~pir||C69291~similar to unknown
  misc_feature (1)..(216): Homolog of NCBI NO: 19699285 NR Description: AT5g52030/MSG15_11 [Arabidopsis thaliana]
MFSLGGAKFFGAVNRSINLGGQSALALRLLLAVFSSKISSGANRPFGEEFRAARRVSEDIGAQLVLGDRPIEITLERALKSLSWDEKTKLVISLFRGITSTTDMPQDEKAAVSPYELYEKLSSSYPSLLQPLVHERDMFMAWSLKRSKAVNKSKTVVGVIGKGHMNGVVYALISDQGDLRFRDLVGRESSETWASSVVKGLVRDTVIGLALWALYELLQAAAVHIKL

SEQ ID NO: 66154 - DNA, 1644 bp, Triticum aestivum
  misc_feature (1)..(1644): Ceres Seq. ID no. 13657789
atccaattccaaaaccacgcactagtcgacgacggccacctcgccgccgccgtaacgcgcacggtctcaccttaccactcattaccgcgcttccagttccgtacgcctcatgccgccggccgcgcgggtcaaacctcccaaaacatgaaactcggtgcaatggggtcgtgccgcttgcccccggccatcgcggccgccgcgctggccgcggctgcgctgctggtgctcttccgcgcctccccgtacgggctcgcctacccccgcgcgggcgtccagccagggccgccgctcgtggcgaggggtcccgggagcccgccctccttcgcgtactggatatccggcacgggcggagagggccgcagggtcctcaggctgctcagggcggtgtatcacccgaggaaccggtacctgctgcacctggacgcgggggcgtcgcgggacgagcggacggagctggccgccgctgcgcgggacgaggcggcgtggagggagttctcaaacgtcgacgtggtaggggagagctacgcggtagacaggacgggctcctcggtgctcgccgcggcgctgcacggcgccgccgtgctgctcaggattggggctgactgggactggttcgtcacgctcagctcctgggactatcctctcgtcacgcaggacgatctcttttatgcattttcttctgtaccaaggcacctcaactttattgatcacacaagtaacctcggatggaaagagcatgaaaggtttgaaaaacttattgtcgacgcaagtctatatatggacaagaatacccagccctttcctgcgacagaaacaagacaaatgcctgaggcattcaagatattcacaggctctccatgggtaattctgagtaggaacttcactgaacattgcgtgcatggctgggacaacctcccccgcaggctactgatgtactttgccaacgctgcttactccatggaatcatatttccagactgtcatatgcagttcatctgactttagaaacaccactgtcaacggcgatctacgtttctttgtttgggacgatcctcctgggctggagccgcgtattcttgatgaaacgcatctcgataacatggtgaacagcagcgctgccttcgcaaggcggtttgtggaggaagcaccagtgctgaagaaggttgatgatgagctactgaaccgttcttcggcccagttggttcctggtgtgtggtgccggaatttgggtgaaaagcaaggaggcggggatgtggaggcgtgctcggaatggggcgacattaacgttgtcaggcctgggcgtgctggagagcggttgaggcgcttcatatctgagatcattcatataagaggatgcacggtcgcagcagctagctgaaagccgaacccaccacaagtctggaattctttgtcaagagagcagttaaacaaagaatttaaggaacacattcttcgctgcaggtaaagcacgcgttgctgcagtcgacagttctaccaggctgcataataccactgacgctccttctacacaaactaggtacaagtattttcgaacgaagggaactgtataaagctgtaactgatttgccctttttttaaccatatggataggacatagaataggttacactgcagtagttacagt

SEQ ID NO: 66155 - protein, 458 aa, Triticum aestivum
  peptide (1)..(458): Ceres Seq. ID no. 13657790
  misc_feature (108)..(334): Pfam Name: Core-2/I-Branching enzyme Pfam Description: Core-2/I-Branching enzyme
  misc_feature (106)..(448): Homolog of NCBI NO: 15146308 NR Description: AT3g15350/K7L4_15 [Arabidopsis thaliana]
  misc_feature (106)..(447): Homolog of NCBI NO: 15236287 NR Description: N-acetylglucosaminyltransferase family
  misc_feature (56)..(447): Homolog of NCBI NO: 34909950 NR Description: P0695H10.11 [Oryza sativa (japonica
  misc_feature (105)..(446): Homolog of NCBI NO: 15218824 NR Description: N-acetylglucosaminyltransferase family
  misc_feature (104)..(447): Homolog of NCBI NO: 15229570 NR Description: expressed protein [Arabidopsis thaliana]
  misc_feature (98)..(447): Homolog of NCBI NO: 15242199 NR Description: N-acetylglucosaminyltransferase family
  misc_feature (92)..(447): Homolog of NCBI NO: 18409754 NR Description: N-acetylglucosaminyltransferase family
  misc_feature (95)..(447): Homolog of NCBI NO: 15242532 NR Description: N-acetylglucosaminyltransferase family
  misc_feature (51)..(447): Homolog of NCBI NO: 34895394 NR Description: P0445D12.4 [Oryza sativa (japonica
  misc_feature (58)..(453): Homolog of NCBI NO: 32489778 NR Description: OSJNBb0018A10.9 [Oryza sativa (japonica
IQFQNHALVDDGHLAAAVTRTVSPYHSLPRFQFRTPHAAGRAGQTSQNMKLGAMGSCRLPPAIAAAALAAAALLVLFRASPYGLAYPRAGVQPGPPLVARGPGSPPSFAYWISGTGGEGRRVLRLLRAVYHPRNRYLLHLDAGASRDERTELAAAARDEAAWREFSNVDVVGESYAVDRTGSSVLAAALHGAAVLLRIGADWDWFVTLSSWDYPLVTQDDLFYAFSSVPRHLNFIDHTSNLGWKEHERFEKLIVDASLYMDKNTQPFPATETRQMPEAFKIFTGSPWVILSRNFTEHCVHGWDNLPRRLLMYFANAAYSMESYFQTVICSSSDFRNTTVNGDLRFFVWDDPPGLEPRILDETHLDNMVNSSAAFARRFVEEAPVLKKVDDELLNRSSAQLVPGVWCRNLGEKQGGGDVEACSEWGDINVVRPGRAGERLRRFISEIIHIRGCTVAAAS

SEQ ID NO: 66156 - protein, 410 aa, Triticum aestivum
  peptide (1)..(410): Ceres Seq. ID no. 13657791
  misc_feature (60)..(286): Pfam Name: Core-2/I-Branching enzyme Pfam Description: Core-2/I-Branching enzyme
  misc_feature (58)..(400): Homolog of NCBI NO: 15146308 NR Description: AT3g15350/K7L4_15 [Arabidopsis thaliana]
  misc_feature (58)..(399): Homolog of NCBI NO: 15236287 NR Description: N-acetylglucosaminyltransferase family
  misc_feature (8)..(399): Homolog of NCBI NO: 34909950 NR Description: P0695H10.11 [Oryza sativa (japonica
  misc_feature (57)..(398): Homolog of NCBI NO: 15218824 NR Description: N-acetylglucosaminyltransferase family
  misc_feature (56)..(399): Homolog of NCBI NO: 15229570 NR Description: expressed protein [Arabidopsis thaliana]
  misc_feature (50)..(399): Homolog of NCBI NO: 15242199 NR Description: N-acetylglucosaminyltransferase family
  misc_feature (44)..(399): Homolog of NCBI NO: 18409754 NR Description: N-acetylglucosaminyltransferase family
  misc_feature (47)..(399): Homolog of NCBI NO: 15242532 NR Description: N-acetylglucosaminyltransferase family
  misc_feature (3)..(399): Homolog of NCBI NO: 34895394 NR Description: P0445D12.4 [Oryza sativa (japonica
  misc_feature (10)..(405): Homolog of NCBI NO: 32489778 NR Description: OSJNBb0018A10.9 [Oryza sativa (japonica
MKLGAMGSCRLPPAIAAAALAAAALLVLFRASPYGLAYPRAGVQPGPPLVARGPGSPPSFAYWISGTGGEGRRVLRLLRAVYHPRNRYLLHLDAGASRDERTELAAAARDEAAWREFSNVDVVGESYAVDRTGSSVLAAALHGAAVLLRIGADWDWFVTLSSWDYPLVTQDDLFYAFSSVPRHLNFIDHTSNLGWKEHERFEKLIVDASLYMDKNTQPFPATETRQMPEAFKIFTGSPWVILSRNFTEHCVHGWDNLPRRLLMYFANAAYSMESYFQTVICSSSDFRNTTVNGDLRFFVWDDPPGLEPRILDETHLDNMVNSSAAFARRFVEEAPVLKKVDDELLNRSSAQLVPGVWCRNLGEKQGGGDVEACSEWGDINVVRPGRAGERLRRFISEIIHIRGCTVAAAS

SEQ ID NO: 66157 - protein, 405 aa, Triticum aestivum
  peptide (1)..(405): Ceres Seq. ID no. 13657792
  misc_feature (55)..(281): Pfam Name: Core-2/I-Branching enzyme Pfam Description: Core-2/I-Branching enzyme
  misc_feature (53)..(395): Homolog of NCBI NO: 15146308 NR Description: AT3g15350/K7L4_15 [Arabidopsis thaliana]
  misc_feature (53)..(394): Homolog of NCBI NO: 15236287 NR Description: N-acetylglucosaminyltransferase family
  misc_feature (3)..(394): Homolog of NCBI NO: 34909950 NR Description: P0695H10.11 [Oryza sativa (japonica
  misc_feature (52)..(393): Homolog of NCBI NO: 15218824 NR Description: N-acetylglucosaminyltransferase family
  misc_feature (51)..(394): Homolog of NCBI NO: 15229570 NR Description: expressed protein [Arabidopsis thaliana]
  misc_feature (45)..(394): Homolog of NCBI NO: 15242199 NR Description: N-acetylglucosaminyltransferase family
  misc_feature (39)..(394): Homolog of NCBI NO: 18409754 NR Description: N-acetylglucosaminyltransferase family
  misc_feature (42)..(394): Homolog of NCBI NO: 15242532 NR Description: N-acetylglucosaminyltransferase family
  misc_feature (1)..(394): Homolog of NCBI NO: 34895394 NR Description: P0445D12.4 [Oryza sativa (japonica
  misc_feature (5)..(400): Homolog of NCBI NO: 32489778 NR Description: OSJNBb0018A10.9 [Oryza sativa (japonica
MGSCRLPPAIAAAALAAAALLVLFRASPYGLAYPRAGVQPGPPLVARGPGSPPSFAYWISGTGGEGRRVLRLLRAVYHPRNRYLLHLDAGASRDERTELAAAARDEAAWREFSNVDVVGESYAVDRTGSSVLAAALHGAAVLLRIGADWDWFVTLSSWDYPLVTQDDLFYAFSSVPRHLNFIDHTSNLGWKEHERFEKLIVDASLYMDKNTQPFPATETRQMPEAFKIFTGSPWVILSRNFTEHCVHGWDNLPRRLLMYFANAAYSMESYFQTVICSSSDFRNTTVNGDLRFFVWDDPPGLEPRILDETHLDNMVNSSAAFARRFVEEAPVLKKVDDELLNRSSAQLVPGVWCRNLGEKQGGGDVEACSEWGDINVVRPGRAGERLRRFISEIIHIRGCTVAAAS

SEQ ID NO: 66158 - DNA, 1410 bp, Triticum aestivum
  misc_feature (1)..(1410): Ceres Seq. ID no. 13657609
aatcgaaaaggaaaagtccattcaaccttcggaaaactttctacgccgtagctgcagcactgcacttccgctatgcaccgctcaaccaccattgccaagctcgccttgctcctcctcgccactgcagccatgtcatgcggcttcttcgccgtcgcccatgcgcatgcgcggaagagctgctggccgcgcgagagggacgtgttgctggccttgaagcagggcatcaacgacaccgacggcgtcctcgcctcatggcaaaaactgcgccatgactgctgccgctggacgggcgtcgcctgcagcaacgaaaccggccatgtcaccgagcttgacatcggtctcagctggttgttcggccagataagtccttccttgctttctctccagcatctcgactacctggatctcagcaccacctccctagttggaccaaacggcagcagtgtattcccagatttcttgtcttctttgcacaacttgagacatctcgatctcgcccgcacgccatactctggtagaattcctgctcagctttccaatctttcaaatttggagtatctcgatctcagttggacatccctgcatggtcgtgctcagttcctgttttcttacaaaaacttgagacatctcgatctctccagaatgctcttttctggtacactgccgcgacagctaggcaatctatcaaacttgcaacaccttgacctccgttatatgcaaaatatacacacagcagatgtctcatggataactcatatgcatttcctggaatatcttgacatgagtgacataaatctcagcaccgccgacgtgttccctgtgtccaacacaatcccaactctcaaggacctcattcttagtaactgctcacttccaaatgcaaaccagccgctaaaacacctaaacctcacaagacttgagctgcttgatctcagcagcaactatctaggccatcgaattgatacgagttggttttggaacataacaggcatcacaggtcagggtggacgcggtccggtccggtccgggctttgaccgagccagcctttggaccggccgcggccggtccggtccggaccggaccaaggtggccagcgagcctactatccaggaccggaccgagaggagcaaagctcggccagcccgaatggaccgaatgggaccgatggctgggactctgtttaggctattttccagcctgggagtgctttgttggccattgtttaggctgttttgacgtatttagactgtagctgtacctgggagtgctctattaagcgttttggccattatttagcagtgccctgttgcgctttttggccacaatttaggctgtccaaatttagtgagtgctctgtttctgtataatgactagtatggcataagtaatttggacagcattttatttgc

SEQ ID NO: 66159 - protein, 320 aa, Triticum aestivum
  peptide (1)..(320): Ceres Seq. ID no. 15220613
  misc_feature (1)..(290): Homolog of NCBI NO: 14330718 NR Description: HcrVf3 protein [Malus floribunda]
  misc_feature (148)..(307): Homolog of NCBI NO: 34912370 NR Description: putative Cf2/Cf5 disease resistance protein
  misc_feature (1)..(290): Homolog of NCBI NO: 14330716 NR Description: HcrVf2 protein [Malus floribunda]
  misc_feature (1)..(305): Homolog of NCBI NO: 34912372 NR Description: putative Cf2/Cf5 disease resistance protein
  misc_feature (10)..(292): Homolog of NCBI NO: 34912370 NR Description: putative Cf2/Cf5 disease resistance protein
  misc_feature (12)..(299): Homolog of NCBI NO: 38636680 NR Description: putative HcrVf3 protein [Oryza sativa (japonica
  misc_feature (139)..(307): Homolog of NCBI NO: 5739323 NR Description: Cf2/Cf5 disease resistance protein homolog
  misc_feature (106)..(307): Homolog of NCBI NO: 37530640 NR Description: putative Cf2/Cf5 disease resistance protein
  misc_feature (6)..(229): Homolog of NCBI NO: 37530640 NR Description: putative Cf2/Cf5 disease resistance protein
  misc_feature (4)..(238): Homolog of NCBI NO: 5739323 NR Description: Cf2/Cf5 disease resistance protein homolog
MHRSTTIAKLALLLLATAAMSCGFFAVAHAHARKSCWPRERDVLLALKQGINDTDGVLASWQKLRHDCCRWTGVACSNETGHVTELDIGLSWLFGQISPSLLSLQHLDYLDLSTTSLVGPNGSSVFPDFLSSLHNLRHLDLARTPYSGRIPAQLSNLSNLEYLDLSWTSLHGRAQFLFSYKNLRHLDLSRMLFSGTLPRQLGNLSNLQHLDLRYMQNIHTADVSWITHMHFLEYLDMSDINLSTADVFPVSNTIPTLKDLILSNCSLPNANQPLKHLNLTRLELLDLSSNYLGHRIDTSWFWNITGITGQGGRGPVRSGL

SEQ ID NO: 66160 - protein, 301 aa, Triticum aestivum
  peptide (1)..(301): Ceres Seq. ID no. 15220614
  misc_feature (1)..(271): Homolog of NCBI NO: 14330718 NR Description: HcrVf3 protein [Malus floribunda]
  misc_feature (129)..(288): Homolog of NCBI NO: 34912370 NR Description: putative Cf2/Cf5 disease resistance protein
  misc_feature (1)..(271): Homolog of NCBI NO: 14330716 NR Description: HcrVf2 protein [Malus floribunda]
  misc_feature (1)..(286): Homolog of NCBI NO: 34912372 NR Description: putative Cf2/Cf5 disease resistance protein
  misc_feature (1)..(273): Homolog of NCBI NO: 34912370 NR Description: putative Cf2/Cf5 disease resistance protein
  misc_feature (1)..(280): Homolog of NCBI NO: 38636680 NR Description: putative HcrVf3 protein [Oryza sativa (japonica
  misc_feature (120)..(288): Homolog of NCBI NO: 5739323 NR Description: Cf2/Cf5 disease resistance protein homolog
  misc_feature (87)..(288): Homolog of NCBI NO: 37530640 NR Description: putative Cf2/Cf5 disease resistance protein
  misc_feature (1)..(210): Homolog of NCBI NO: 37530640 NR Description: putative Cf2/Cf5 disease resistance protein
  misc_feature (1)..(219): Homolog of NCBI NO: 5739323 NR Description: Cf2/Cf5 disease resistance protein homolog
MSCGFFAVAHAHARKSCWPRERDVLLALKQGINDTDGVLASWQKLRHDCCRWTGVACSNETGHVTELDIGLSWLFGQISPSLLSLQHLDYLDLSTTSLVGPNGSSVFPDFLSSLHNLRHLDLARTPYSGRIPAQLSNLSNLEYLDLSWTSLHGRAQFLFSYKNLRHLDLSRMLFSGTLPRQLGNLSNLQHLDLRYMQNIHTADVSWITHMHFLEYLDMSDINLSTADVFPVSNTIPTLKDLILSNCSLPNANQPLKHLNLTRLELLDLSSNYLGHRIDTSWFWNITGITGQGGRGPVRSGL

SEQ ID NO: 66161 - DNA, 956 bp, Triticum aestivum
  misc_feature (1)..(956): Ceres Seq. ID no. 12620168
acaagtaaaagaaacttcgggtcgccatcctgataaggatctaaagggaaatatgaacttgctgcagcaacttggtatacttccttgtggtgctacggcatggttgagtttcgcacagtcagcacagtctagtgaaggagtaaagttaaatatggtttacgaggttggggagctgtttgagctgggaattcagctttcttatctgctcatactacttggtctgcttggaactggtacattttttgtcatccgccaggttcttgtccgcagggagcttgatctttctgcgaaagacttgcaggaacaagtgagaagtggtgagggaagcgctactgaactatttgagcttggagcagtcatgctccggagaaaattttaccctgcagctatcaaatatctacagcaagcaatccaaaaatgggatagagatgagcaagatcttgcacaggtgtacaatgccctgggggtgagctacaagcgggagaacaaactggacaaggcaatcaagcaattcgagaaggccgtggagctccaaccaggctatgtgacggcatggaacaacctcggcgatgcatatgagcagcagaaggacctcgcgtcagcgctcagggcgttcgaggaggtattgctctttgatccgaacaacaaggtggcaaggccgcgccgagacgacctcaagtcgcgtgtgggcatgtacaagggggtgccggtgaagacgacggacaagcgatagccgccacgggtggacgaattcgtgcctcagttttggacagtagcatttgtaaacatgatgagaagttgtatgtagcatattggcggcgtcatccgtccgatctggccattgtagaatgtttcgaatattagcgcaaaaaaaaagtagaatttgcttttgaggtccgctccaagcccataacagctattttttgcgcttgctaacaaataaattatttgtatcc

SEQ ID NO: 66162 - protein, 243 aa, Triticum aestivum
  peptide (1)..(243): Ceres Seq. ID no. 12620169
  misc_feature (110)..(143): Pfam Name: TPR Domain Pfam Description: TPR Domain
  misc_feature (67)..(229): Homolog of NCBI NO: 23129236 NR Description: hypothetical protein [Nostoc punctiforme]
  misc_feature (67)..(229): Homolog of NCBI NO: 23042213 NR Description: hypothetical protein [Trichodesmium erythraeum
  misc_feature (67)..(229): Homolog of NCBI NO: 22299949 NR Description: photosystem I assembly related protein
  misc_feature (33)..(150): Homolog of NCBI NO: 38636894 NR Description: stress inducible protein-like
  misc_feature (21)..(150): Homolog of NCBI NO: 37535100 NR Description: unknown protein [Oryza sativa (japonica
  misc_feature (39)..(243): Homolog of NCBI NO: 21537104 NR Description: unknown [Arabidopsis thaliana]
  misc_feature (39)..(243): Homolog of NCBI NO: 30687988 NR Description: tetratricopeptide repeat (TPR)-containing protein
  misc_feature (39)..(243): Homolog of NCBI NO: 22329737 NR Description: expressed protein
  misc_feature (39)..(243): Homolog of NCBI NO: 7487355 NR Description: hypothetical protein T22J18.13 - Arabidopsis
  misc_feature (21)..(243): Homolog of NCBI NO: 37535090 NR Description: putative stress inducible protein
QVKETSGRHPDKDLKGNMNLLQQLGILPCGATAWLSFAQSAQSSEGVKLNMVYEVGELFELGIQLSYLLILLGLLGTGTFFVIRQVLVRRELDLSAKDLQEQVRSGEGSATELFELGAVMLRRKFYPAAIKYLQQAIQKWDRDEQDLAQVYNALGVSYKRENKLDKAIKQFEKAVELQPGYVTAWNNLGDAYEQQKDLASALRAFEEVLLFDPNNKVARPRRDDLKSRVGMYKGVPVKTTDKR

SEQ ID NO: 66163 - protein, 226 aa, Triticum aestivum
  peptide (1)..(226): Ceres Seq. ID no. 12620170
  misc_feature (93)..(126): Pfam Name: TPR Domain Pfam Description: TPR Domain
  misc_feature (50)..(212): Homolog of NCBI NO: 23129236 NR Description: hypothetical protein [Nostoc punctiforme]
  misc_feature (50)..(212): Homolog of NCBI NO: 23042213 NR Description: hypothetical protein [Trichodesmium erythraeum
  misc_feature (50)..(212): Homolog of NCBI NO: 22299949 NR Description: photosystem I assembly related protein
  misc_feature (16)..(133): Homolog of NCBI NO: 38636894 NR Description: stress inducible protein-like
  misc_feature (4)..(133): Homolog of NCBI NO: 37535100 NR Description: unknown protein [Oryza sativa (japonica
  misc_feature (22)..(226): Homolog of NCBI NO: 21537104 NR Description: unknown [Arabidopsis thaliana]
  misc_feature (22)..(226): Homolog of NCBI NO: 30687988 NR Description: tetratricopeptide repeat (TPR)-containing protein
  misc_feature (22)..(226): Homolog of NCBI NO: 22329737 NR Description: expressed protein
  misc_feature (22)..(226): Homolog of NCBI NO: 7487355 NR Description: hypothetical protein T22J18.13 - Arabidopsis
  misc_feature (4)..(226): Homolog of NCBI NO: 37535090 NR Description: putative stress inducible protein
MNLLQQLGILPCGATAWLSFAQSAQSSEGVKLNMVYEVGELFELGIQLSYLLILLGLLGTGTFFVIRQVLVRRELDLSAKDLQEQVRSGEGSATELFELGAVMLRRKFYPAAIKYLQQAIQKWDRDEQDLAQVYNALGVSYKRENKLDKAIKQFEKAVELQPGYVTAWNNLGDAYEQQKDLASALRAFEEVLLFDPNNKVARPRRDDLKSRVGMYKGVPVKTTDKR

SEQ ID NO: 66164 - protein, 193 aa, Triticum aestivum
  peptide (1)..(193): Ceres Seq. ID no. 12620171
  misc_feature (60)..(93): Pfam Name: TPR Domain Pfam Description: TPR Domain
  misc_feature (17)..(179): Homolog of NCBI NO: 23129236 NR Description: hypothetical protein [Nostoc punctiforme]
  misc_feature (17)..(179): Homolog of NCBI NO: 23042213 NR Description: hypothetical protein [Trichodesmium erythraeum
  misc_feature (17)..(179): Homolog of NCBI NO: 22299949 NR Description: photosystem I assembly related protein
  misc_feature (1)..(100): Homolog of NCBI NO: 38636894 NR Description: stress inducible protein-like
  misc_feature (1)..(100): Homolog of NCBI NO: 37535100 NR Description: unknown protein [Oryza sativa (japonica
  misc_feature (1)..(193): Homolog of NCBI NO: 21537104 NR Description: unknown [Arabidopsis thaliana]
  misc_feature (1)..(193): Homolog of NCBI NO: 30687988 NR Description: tetratricopeptide repeat (TPR)-containing protein
  misc_feature (1)..(193): Homolog of NCBI NO: 22329737 NR Description: expressed protein
  misc_feature (1)..(193): Homolog of NCBI NO: 7487355 NR Description: hypothetical protein T22J18.13 - Arabidopsis
  misc_feature (1)..(193): Homolog of NCBI NO: 37535090 NR Description: putative stress inducible protein
MVYEVGELFELGIQLSYLLILLGLLGTGTFFVIRQVLVRRELDLSAKDLQEQVRSGEGSATELFELGAVMLRRKFYPAAIKYLQQAIQKWDRDEQDLAQVYNALGVSYKRENKLDKAIKQFEKAVELQPGYVTAWNNLGDAYEQQKDLASALRAFEEVLLFDPNNKVARPRRDDLKSRVGMYKGVPVKTTDKR

SEQ ID NO: 66165 - DNA, 2052 bp, Triticum aestivum
  misc_feature (1)..(2052): Ceres Seq. ID no. 13657610
accctcaccaccaccaccgcccatccatcggtcggctcgccgccaccagtcgagcccgcccgaccccggccatggcgcgggaggagctgtcgacggagatcgtgaaccgcggcgtggagccgtcgggcccggacgccgggtcgccgaccttctcggtgcgcgtgcgccgccggctgcccgacttcttgcagtcggtgaacctcaagtacgtgcggctcggctaccactacctgctgagccacggcgtgtacctggccaccatcccggtgatcgtgctggtgtgcggcgccgaggtgggcagcctcagccgcgacgagctgtggcgcaaggtgtgggacgaggccacctacgacctcgccaccgtgctcgccttcctcgccgtcctcgccttcaccatctccgtctacatcatgtcccgccccaggcccatctacctcatcgacttcgccacctacaagcccgccgacgaactcaaggtgtccaaggcggagttcatcgagctggcgcgcaagtcgggcaagttcgacgaggagagcctggcgttccaggcgcggctgctggccaagtccggcatcggggacgagtcctacatgccgcgctgcgtcttccagcccgacgccaactgcgccaccatgaaggagggccgcgccgaggcctccgccgccatgttcgccgcgctcgacgagctcttcgacaagtgccgcgtccgccccaaggacgtcggcgtgctcgtcgtcaactgcagcctcttcaaccccaccccctccctctccgccatgatcgtcaaccactacaagatgcgcggcaacatcctcagctacaatctggggggcatgggctgcagcgcgggcgtcatctccatcgacctggcgcgtgacatgctccaggccagcggcgctgggctcgccgtcgtggtgagcaccgaggccgtgtcattcacgtggtacgccgggaagcgccggtccatgctcatccccaacgccttcttccgcgcgggcgccgccgccgtgctgctgtcgaaccgccgcagggacttccgccgcgccaagtaccagctggagcacgtggtgcgcacgcacaagggcgccgacgaccgcgccttccgctccgtgtaccaggaggaggacgagcagcggatcaagggcctgtccatcagccgcgacctggtggaggtcggcggccacgcgctcaagaccaacatcaccaccctcggcccgctggtgctgcccttctcggagcagctcctcttcttcgccggcgtgctgttccgccacctctacccgtccaagacgtccaccccgccgccgccggccgccaacggggacacctcggccgccgcgccctacatcccggacttcaagcgcgcgttcgagcacttctgcatgcacgcggccagccgcgacgtgctggagcacctgcagcgcaacctgggcctccgcgacgccgacctggaggcctcccgcgccgcgctgcaccgcttcggcaacacctccagcagcagcatctggtacgagctggcctacctggaggccaagggccgcgtccgccgcggcgaccgcgtgtggcagctcgccttcggctccgggttcaagtgcaacagcgccgtgtggcgcgccgtccgccgcgtgcgccgcccgtccaggagcccgtggctggactgcgtcgaccagtacccggcgcgcatggacgcctgacccgatcgagatggcgaagcaggcgcacgtgctaataattaagcgaggtaaaggaacacgtccgtcgtcgtcgcgcccgcgttgggtaagtgcaggctaatggagatggtgctatcgatttgcatgtaactgcatgcatgcagtgccgctggtttaaggtttgagctttgcttaatttgtgctggtgttgtagcggttatctattgttaaggggtttaatcatagactacgtaccataatgcgcaagtgtgtgtgcgcgctcttgtgaaacttatgtgaacttgattatctacgtgcaatttcatttaaaaaaaaaaaaaaaaagaaaaaaaaaaaaaaaaaagcttatcgataccgt

SEQ ID NO: 66166 - protein, 563 aa, Triticum aestivum
  peptide (1)..(563): Ceres Seq. ID no. 15219868
  misc_feature (354)..(540): Pfam Name: Chalcone and stilbene synthases, C-terminal domain Pfam Description: Chalcone and stilbene synthases, C-terminal
  misc_feature (25)..(563): Homolog of NCBI NO: 29417540 NR Description: beta-ketoacyl-CoA-synthase [Marchantia polymorpha]
  misc_feature (29)..(520): Homolog of NCBI NO: 8177719 NR Description: fiddlehead protein [Arabidopsis thaliana]
  misc_feature (29)..(561): Homolog of NCBI NO: 28864534 NR Description: fiddlehead-like protein [Tropaeolum majus]
  misc_feature (24)..(558): Homolog of NCBI NO: 19351907 NR Description: putative beta-ketoacyl-CoA synthase [Antirrhinum
  misc_feature (29)..(558): Homolog of NCBI NO: 8177723 NR Description: fiddlehead protein [Arabidopsis thaliana]
  misc_feature (29)..(558): Homolog of NCBI NO: 8177711 NR Description: fiddlehead protein [Arabidopsis thaliana]
  misc_feature (29)..(558): Homolog of NCBI NO: 8177727 NR Description: fiddlehead protein [Arabidopsis thaliana]
  misc_feature (29)..(558): Homolog of NCBI NO: 15225270 NR Description: beta-ketoacyl-CoA synthase family (FIDDLEHEAD)
  misc_feature (24)..(560): Homolog of NCBI NO: 18447765 NR Description: fiddlehead-like protein [Gossypium hirsutum]
  misc_feature (12)..(563): Homolog of NCBI NO: 24960748 NR Description: Putative fiddlehead-like protein
PHHHHRPSIGRLAATSRARPTPAMAREELSTEIVNRGVEPSGPDAGSPTFSVRVRRRLPDFLQSVNLKYVRLGYHYLLSHGVYLATIPVIVLVCGAEVGSLSRDELWRKVWDEATYDLATVLAFLAVLAFTISVYIMSRPRPIYLIDFATYKPADELKVSKAEFIELARKSGKFDEESLAFQARLLAKSGIGDESYMPRCVFQPDANCATMKEGRAEASAAMFAALDELFDKCRVRPKDVGVLVVNCSLFNPTPSLSAMIVNHYKMRGNILSYNLGGMGCSAGVISIDLARDMLQASGAGLAVVVSTEAVSFTWYAGKRRSMLIPNAFFRAGAAAVLLSNRRRDFRRAKYQLEHVVRTHKGADDRAFRSVYQEEDEQRIKGLSISRDLVEVGGHALKTNITTLGPLVLPFSEQLLFFAGVLFRHLYPSKTSTPPPPAANGDTSAAAPYIPDFKRAFEHFCMHAASRDVLEHLQRNLGLRDADLEASRAALHRFGNTSSSSIWYELAYLEAKGRVRRGDRVWQLAFGSGFKCNSAVWRAVRRVRRPSRSPWLDCVDQYPARMDA

SEQ ID NO: 66167 - protein, 540 aa, Triticum aestivum
  peptide (1)..(540): Ceres Seq. ID no. 15219869
  misc_feature (331)..(517): Pfam Name: Chalcone and stilbene synthases, C-terminal domain Pfam Description: Chalcone and stilbene synthases, C-terminal
  misc_feature (2)..(540): Homolog of NCBI NO: 29417540 NR Description: beta-ketoacyl-CoA-synthase [Marchantia polymorpha]
  misc_feature (6)..(497): Homolog of NCBI NO: 8177719 NR Description: fiddlehead protein [Arabidopsis thaliana]
  misc_feature (6)..(538): Homolog of NCBI NO: 28864534 NR Description: fiddlehead-like protein [Tropaeolum majus]
  misc_feature (1)..(535): Homolog of NCBI NO: 19351907 NR Description: putative beta-ketoacyl-CoA synthase [Antirrhinum
  misc_feature (6)..(535): Homolog of NCBI NO: 8177723 NR Description: fiddlehead protein [Arabidopsis thaliana]
  misc_feature (6)..(535): Homolog of NCBI NO: 8177711 NR Description: fiddlehead protein [Arabidopsis thaliana]
  misc_feature (6)..(535): Homolog of NCBI NO: 8177727 NR Description: fiddlehead protein [Arabidopsis thaliana]
  misc_feature (6)..(535): Homolog of NCBI NO: 15225270 NR Description: beta-ketoacyl-CoA synthase family (FIDDLEHEAD)
  misc_feature (1)..(537): Homolog of NCBI NO: 18447765 NR Description: fiddlehead-like protein [Gossypium hirsutum]
  misc_feature (1)..(540): Homolog of NCBI NO: 24960748 NR Description: Putative fiddlehead-like protein
MAREELSTEIVNRGVEPSGPDAGSPTFSVRVRRRLPDFLQSVNLKYVRLGYHYLLSHGVYLATIPVIVLVCGAEVGSLSRDELWRKVWDEATYDLATVLAFLAVLAFTISVYIMSRPRPIYLIDFATYKPADELKVSKAEFIELARKSGKFDEESLAFQARLLAKSGIGDESYMPRCVFQPDANCATMKEGRAEASAAMFAALDELFDKCRVRPKDVGVLVVNCSLFNPTPSLSAMIVNHYKMRGNILSYNLGGMGCSAGVISIDLARDMLQASGAGLAVVVSTEAVSFTWYAGKRRSMLIPNAFFRAGAAAVLLSNRRRDFRRAKYQLEHVVRTHKGADDRAFRSVYQEEDEQRIKGLSISRDLVEVGGHALKTNITTLGPLVLPFSEQLLFFAGVLFRHLYPSKTSTPPPPAANGDTSAAAPYIPDFKRAFEHFCMHAASRDVLEHLQRNLGLRDADLEASRAALHRFGNTSSSSIWYELAYLEAKGRVRRGDRVWQLAFGSGFKCNSAVWRAVRRVRRPSRSPWLDCVDQYPARMDA

SEQ ID NO: 66168 - protein, 427 aa, Triticum aestivum
  peptide (1)..(427): Ceres Seq. ID no. 15219870
  misc_feature (218)..(404): Pfam Name: Chalcone and stilbene synthases, C-terminal domain Pfam Description: Chalcone and stilbene synthases, C-terminal
  misc_feature (1)..(427): Homolog of NCBI NO: 29417540 NR Description: beta-ketoacyl-CoA-synthase [Marchantia polymorpha]
  misc_feature (1)..(384): Homolog of NCBI NO: 8177719 NR Description: fiddlehead protein [Arabidopsis thaliana]
  misc_feature (1)..(425): Homolog of NCBI NO: 28864534 NR Description: fiddlehead-like protein [Tropaeolum majus]
  misc_feature (1)..(422): Homolog of NCBI NO: 19351907 NR Description: putative beta-ketoacyl-CoA synthase [Antirrhinum
  misc_feature (1)..(422): Homolog of NCBI NO: 8177723 NR Description: fiddlehead protein [Arabidopsis thaliana]
  misc_feature (1)..(422): Homolog of NCBI NO: 8177711 NR Description: fiddlehead protein [Arabidopsis thaliana]
  misc_feature (1)..(422): Homolog of NCBI NO: 8177727 NR Description: fiddlehead protein [Arabidopsis thaliana]
  misc_feature (1)..(422): Homolog of NCBI NO: 15225270 NR Description: beta-ketoacyl-CoA synthase family (FIDDLEHEAD)
  misc_feature (1)..(424): Homolog of NCBI NO: 18447765 NR Description: fiddlehead-like protein [Gossypium hirsutum]
  misc_feature (1)..(427): Homolog of NCBI NO: 24960748 NR Description: Putative fiddlehead-like protein
MSRPRPIYLIDFATYKPADELKVSKAEFIELARKSGKFDEESLAFQARLLAKSGIGDESYMPRCVFQPDANCATMKEGRAEASAAMFAALDELFDKCRVRPKDVGVLVVNCSLFNPTPSLSAMIVNHYKMRGNILSYNLGGMGCSAGVISIDLARDMLQASGAGLAVVVSTEAVSFTWYAGKRRSMLIPNAFFRAGAAAVLLSNRRRDFRRAKYQLEHVVRTHKGADDRAFRSVYQEEDEQRIKGLSISRDLVEVGGHALKTNITTLGPLVLPFSEQLLFFAGVLFRHLYPSKTSTPPPPAANGDTSAAAPYIPDFKRAFEHFCMHAASRDVLEHLQRNLGLRDADLEASRAALHRFGNTSSSSIWYELAYLEAKGRVRRGDRVWQLAFGSGFKCNSAVWRAVRRVRRPSRSPWLDCVDQYPARMDA

SEQ ID NO: 66169 - DNA, 1778 bp, Triticum aestivum
  misc_feature (1)..(1778): Ceres Seq. ID no. 13657220
acatcctaatcgaaaaataaaatccattcccctataacaaaccgacccaatcgcattcgccagcccccgaatcgcgatcccctccgcacctcggccccgccatggaggtgttctactacctcgtcttcggcggcctcgccgccgtcgtggcggcgctggagctcggcaagtccggcaaggaccgcgtcgccaccccgacggccttcaactccttcaagaacaactacgtcctcgtctactccctcatgatgtctggggactggctgcaggggccctacgtgtactacctctacagccagtacgggttcgacaagggcgacatcggccgcctcttcatcgccggcttcggctcctccatgctcttcggcaccatcgtcgggtcgctcgccgacaagcagggaaggaagagggcgtgcatcacctactgtatcacctacatcctcagctgcatcacgaagcactccccgcagtacaggattctgatgattggccgtgtgcttggaggcattgcaacatcgctgctcttctcggcgttcgagtcgtggctcgtcgcggagcacaacaagagaggttttgatccgcagtggctgtcaataacattctccaaggctatatttcttgggaatggcctagttgccattgtcgcagggctatttgcaaatctactggctgataacttgggttttggccctgtcgctccatttgatgctactgcttgcttcctagcaataggcatggcaatcatcttatcgtcgtggggtgagaactatggagatgcatctgaaggaaaggacttgatggcccagttcaaggttgcagctaaagccattgcttccgatgaaaagattgcattgcttggagccatacagtcattgtttgagggttcaatgtacacttttgttttcttgtggactcctgctttgagcccaaatgaagaagacattcctcatggcttcatatttgccacattcatgctctcctcgatgttgggtagctcaattgcatctcgtctattagctcggaagatgaaggtcgaaggttatatgcagattgtgttctcaatatcagctttcactcttttcctccctgttgttaccaatttcatagtacccccctcagagaaaggtggaagcatctccttcggaggctgtgtacagcttcttggtttctgcatattcgagtcatgtgttggcatattctggccctcaatcatgaagatgagatctcaatatatccccgaggaggcgagaagcactatcatgaacttcttccgcataccacttaacctgtttgtatgtgtggtgctttacaatgtgaatgccttcccaatcgctgtcatgtttggcatgtgctccattttcctattcatcgcagcaattttgcagaggcggctgatgtccgtgtccgaccttcacagatcaactaccgcagagatgacagcagaagatgagccactaaacccttgaaacacaccagcagccattgacgtgaaccgggcatggaacggtctccaacttcatctgcttctctgcagggctgctgaataagatgggaaaccgaaggctgcaacaaaacctcgtttagtttgctttgttaggtgctctcacggtattcagttttgtcgggagagaggacacggctcggcatgtattgagatatatgcactgcacagtagagctttggcatagtaccggatctgtactttccctcctattcttacgtttgctaataggatgatggtatttgtatttaaatccaaccagtctcttgatgaaagc

SEQ ID NO: 66170 - protein, 454 aa, Triticum aestivum
  peptide (1)..(454): Ceres Seq. ID no. 15219860
  misc_feature (4)..(356): Pfam Name: Protein of unknown function (DUF791) Pfam Description: Protein of unknown function (DUF791)
  misc_feature (349)..(404): Homolog of NCBI NO: 7487513 NR Description: hypothetical protein T29A15.210 - Arabidopsis
  misc_feature (1)..(331): Homolog of NCBI NO: 7487513 NR Description: hypothetical protein T29A15.210 - Arabidopsis
  misc_feature (1)..(155): Homolog of NCBI NO: 11292198 NR Description: hypothetical protein F2K15.170 - Arabidopsis
  misc_feature (144)..(452): Homolog of NCBI NO: 11292198 NR Description: hypothetical protein F2K15.170 - Arabidopsis
  misc_feature (1)..(452): Homolog of NCBI NO: 30693172 NR Description: expressed protein [Arabidopsis thaliana]
  misc_feature (1)..(453): Homolog of NCBI NO: 18417054 NR Description: expressed protein [Arabidopsis thaliana]
  misc_feature (1)..(450): Homolog of NCBI NO: 6633826 NR Description: F1N19.22 [Arabidopsis thaliana]
  misc_feature (1)..(454): Homolog of NCBI NO: 15217708 NR Description: expressed protein [Arabidopsis thaliana]
  misc_feature (1)..(454): Homolog of NCBI NO: 34902182 NR Description: Putative transporter [Oryza sativa (japonica
  misc_feature (1)..(454): Homolog of NCBI NO: 37536124 NR Description: putative transporter [Oryza sativa (japonica
MEVFYYLVFGGLAAVVAALELGKSGKDRVATPTAFNSFKNNYVLVYSLMMSGDWLQGPYVYYLYSQYGFDKGDIGRLFIAGFGSSMLFGTIVGSLADKQGRKRACITYCITYILSCITKHSPQYRILMIGRVLGGIATSLLFSAFESWLVAEHNKRGFDPQWLSITFSKAIFLGNGLVAIVAGLFANLLADNLGFGPVAPFDATACFLAIGMAIILSSWGENYGDASEGKDLMAQFKVAAKAIASDEKIALLGAIQSLFEGSMYTFVFLWTPALSPNEEDIPHGFIFATFMLSSMLGSSIASRLLARKMKVEGYMQIVFSISAFTLFLPVVTNFIVPPSEKGGSISFGGCVQLLGFCIFESCVGIFWPSIMKMRSQYIPEEARSTIMNFFRIPLNLFVCVVLYNVNAFPIAVMFGMCSIFLFIAAILQRRLMSVSDLHRSTTAEMTAEDEPLNP

SEQ ID NO: 66171 - protein, 406 aa, Triticum aestivum
  peptide (1)..(406): Ceres Seq. ID no. 15219861
  misc_feature (1)..(308): Pfam Name: Protein of unknown function (DUF791) Pfam Description: Protein of unknown function (DUF791)
  misc_feature (301)..(356): Homolog of NCBI NO: 7487513 NR Description: hypothetical protein T29A15.210 - Arabidopsis
  misc_feature (1)..(283): Homolog of NCBI NO: 7487513 NR Description: hypothetical protein T29A15.210 - Arabidopsis
  misc_feature (1)..(107): Homolog of NCBI NO: 11292198 NR Description: hypothetical protein F2K15.170 - Arabidopsis
  misc_feature (96)..(404): Homolog of NCBI NO: 11292198 NR Description: hypothetical protein F2K15.170 - Arabidopsis
  misc_feature (1)..(404): Homolog of NCBI NO: 30693172 NR Description: expressed protein [Arabidopsis thaliana]
  misc_feature (1)..(405): Homolog of NCBI NO: 18417054 NR Description: expressed protein [Arabidopsis thaliana]
  misc_feature (1)..(402): Homolog of NCBI NO: 6633826 NR Description: F1N19.22 [Arabidopsis thaliana]
  misc_feature (1)..(406): Homolog of NCBI NO: 15217708 NR Description: expressed protein [Arabidopsis thaliana]
  misc_feature (1)..(406): Homolog of NCBI NO: 34902182 NR Description: Putative transporter [Oryza sativa (japonica
  misc_feature (1)..(406): Homolog of NCBI NO: 37536124 NR Description: putative transporter [Oryza sativa (japonica
MMSGDWLQGPYVYYLYSQYGFDKGDIGRLFIAGFGSSMLFGTIVGSLADKQGRKRACITYCITYILSCITKHSPQYRILMIGRVLGGIATSLLFSAFESWLVAEHNKRGFDPQWLSITFSKAIFLGNGLVAIVAGLFANLLADNLGFGPVAPFDATACFLAIGMAIILSSWGENYGDASEGKDLMAQFKVAAKAIASDEKIALLGAIQSLFEGSMYTFVFLWTPALSPNEEDIPHGFIFATFMLSSMLGSSIASRLLARKMKVEGYMQIVFSISAFTLFLPVVTNFIVPPSEKGGSISFGGCVQLLGFCIFESCVGIFWPSIMKMRSQYIPEEARSTIMNFFRIPLNLFVCVVLYNVNAFPIAVMFGMCSIFLFIAAILQRRLMSVSDLHRSTTAEMTAEDEPLNP

SEQ ID NO: 66172 - protein, 405 aa, Triticum aestivum
  peptide (1)..(405): Ceres Seq. ID no. 15219862
  misc_feature (1)..(307): Pfam Name: Protein of unknown function (DUF791) Pfam Description: Protein of unknown function (DUF791)
  misc_feature (300)..(355): Homolog of NCBI NO: 7487513 NR Description: hypothetical protein T29A15.210 - Arabidopsis
  misc_feature (1)..(282): Homolog of NCBI NO: 7487513 NR Description: hypothetical protein T29A15.210 - Arabidopsis
  misc_feature (1)..(106): Homolog of NCBI NO: 11292198 NR Description: hypothetical protein F2K15.170 - Arabidopsis
  misc_feature (95)..(403): Homolog of NCBI NO: 11292198 NR Description: hypothetical protein F2K15.170 - Arabidopsis
  misc_feature (1)..(403): Homolog of NCBI NO: 30693172 NR Description: expressed protein [Arabidopsis thaliana]
  misc_feature (1)..(404): Homolog of NCBI NO: 18417054 NR Description: expressed protein [Arabidopsis thaliana]
  misc_feature (1)..(401): Homolog of NCBI NO: 6633826 NR Description: F1N19.22 [Arabidopsis thaliana]
  misc_feature (1)..(405): Homolog of NCBI NO: 15217708 NR Description: expressed protein [Arabidopsis thaliana]
  misc_feature (1)..(405): Homolog of NCBI NO: 34902182 NR Description: Putative transporter [Oryza sativa (japonica
  misc_feature (1)..(405): Homolog of NCBI NO: 37536124 NR Description: putative transporter [Oryza sativa (japonica
MSGDWLQGPYVYYLYSQYGFDKGDIGRLFIAGFGSSMLFGTIVGSLADKQGRKRACITYCITYILSCITKHSPQYRILMIGRVLGGIATSLLFSAFESWLVAEHNKRGFDPQWLSITFSKAIFLGNGLVAIVAGLFANLLADNLGFGPVAPFDATACFLAIGMAIILSSWGENYGDASEGKDLMAQFKVAAKAIASDEKIALLGAIQSLFEGSMYTFVFLWTPALSPNEEDIPHGFIFATFMLSSMLGSSIASRLLARKMKVEGYMQIVFSISAFTLFLPVVTNFIVPPSEKGGSISFGGCVQLLGFCIFESCVGIFWPSIMKMRSQYIPEEARSTIMNFFRIPLNLFVCVVLYNVNAFPIAVMFGMCSIFLFIAAILQRRLMSVSDLHRSTTAEMTAEDEPLNP

SEQ ID NO: 66173 - DNA, 1725 bp, Triticum aestivum
  misc_feature (1)..(1725): Ceres Seq. ID no. 14301572
aaagcttcacctcccctcaaaaaaaaaagatttaccttcaccggtctctctcgcgccaaccggcggcgctcgtctccctcgccgccgtaagcacggtggcgaagccgaacccaagcgaggtggccaagtagtcggtgagatgctgctagtagagctgctccgctgccagatccaggagtggtacccggcattccgccgccacaccgtccccaccgtcaccatccccctccccgccgccttcctccgctacctcgccggccagcccgcccaccccgtccccgacgcccctcaccaggacgcggaagggcctcccccattcctcctcccgtcgctcgcctccggccgcacccccttcccgccgctccacctcccggaccccgtcgaccacgacgacagctccgacctcttctccgtctgcgacgacgacgacgacgacgagagcccgcccctccccgccttccccgagctggaggccgcggtcgacgcggccatcgccgagctcggcggcgccgcgctccccaagctcaactggagcgcgcccaaggacgccgccttcatgtccgccgacggcaccgtccgctgcacctgcttcgccgaggtcgccatgctgctccgctcctcggactgcgtcgcgcacgacctctcctccgcgcgcccgtcctgccaggacttcgtgtgcgccagggaaggtgttcgacggaatgccggacagggcagtggtgccaaccaggcgggtgctccatcgaatggcggagggagcaccagtggtgctggttctctgagtgatcctcccactgaggatcgcaatgagggaggcaggcaagctgctgccgacagtgatgcttcggaagacgatgttggacaagaaagcggcgatgatagttgggtggacgatgggttccagtactacctcgccctccgcaagtggtacccgggcctgcgccccgaggcagagttccgatgcttcgtgcggggacggaagctggtcggcgtgtcgcagagggacacatctgcttactacccatcgttgcctgggtggagttctgaggtgcagccgaagatcgaggagttcttcgaagaagttgttgagtcgcagtttgcttctcagaattacacatttgatgtgtatgtcagagcagatggccgggtgaagctgattgatttcaatccttggggtggctatacattgccgcttatgtttacatgggaggagcttgaggatgagaagagaggagaggacaagctggagtttagagtggtaatggagcaaggtgcagtgaggccaggattaatgacagcagtgccgtatgatatgacggattggggagaagggagcggctgggatgtttttctgaagaaggctgacaatgaactgaatagacagatggcctcattagctatggattcgtaattgacatctggaacaaagcagcgcttgaggactccagtagttgaacaacttcaaccgtcgcctgtttgtaatgtttcacctgtcaaacgctagaagtaacagccttctttagattgtgatgcaaacctcacggcaatcggccgtttccccccatggcttttgcaatgctagattgctagtatgggagtaccgcatgctgcttcatctcagttttatgatatttacagaaaaatatttgtagtggaagtatatggcccatggctgaaattgcaaactctgaaacatgaatacacattccatatgcctttgctgtt

SEQ ID NO: 66174 - protein, 469 aa, Triticum aestivum
  peptide (1)..(469): Ceres Seq. ID no. 14301573
  misc_feature (292)..(444): Homolog of NCBI NO: 5174423 NR Description: D123 gene product [Homo sapiens]
  misc_feature (52)..(84): Homolog of NCBI NO: 3551742 NR Description: HT-1080 protein [Homo sapiens]
  misc_feature (111)..(223): Homolog of NCBI NO: 3551742 NR Description: HT-1080 protein [Homo sapiens]
  misc_feature (292)..(444): Homolog of NCBI NO: 3551742 NR Description: HT-1080 protein [Homo sapiens]
  misc_feature (55)..(84): Homolog of NCBI NO: 25742671 NR Description: D123 gene product [Rattus norvegicus]
  misc_feature (111)..(223): Homolog of NCBI NO: 25742671 NR Description: D123 gene product [Rattus norvegicus]
  misc_feature (292)..(444): Homolog of NCBI NO: 25742671 NR Description: D123 gene product [Rattus norvegicus]
  misc_feature (51)..(84): Homolog of NCBI NO: 15235584 NR Description: D123 -related protein [Arabidopsis thaliana]
  misc_feature (105)..(228): Homolog of NCBI NO: 15235584 NR Description: D123 -related protein [Arabidopsis thaliana]
  misc_feature (302)..(460): Homolog of NCBI NO: 15235584 NR Description: D123 -related protein [Arabidopsis thaliana]
KLHLPSKKKDLPSPVSLAPTGGARLPRRRKHGGEAEPKRGGQVVGEMLLVELLRCQIQEWYPAFRRHTVPTVTIPLPAAFLRYLAGQPAHPVPDAPHQDAEGPPPFLLPSLASGRTPFPPLHLPDPVDHDDSSDLFSVCDDDDDDESPPLPAFPELEAAVDAAIAELGGAALPKLNWSAPKDAAFMSADGTVRCTCFAEVAMLLRSSDCVAHDLSSARPSCQDFVCAREGVRRNAGQGSGANQAGAPSNGGGSTSGAGSLSDPPTEDRNEGGRQAAADSDASEDDVGQESGDDSWVDDGFQYYLALRKWYPGLRPEAEFRCFVRGRKLVGVSQRDTSAYYPSLPGWSSEVQPKIEEFFEEVVESQFASQNYTFDVYVRADGRVKLIDFNPWGGYTLPLMFTWEELEDEKRGEDKLEFRVVMEQGAVRPGLMTAVPYDMTDWGEGSGWDVFLKKADNELNRQMASLAMDS

SEQ ID NO: 66175 - protein, 423 aa, Triticum aestivum
  peptide (1)..(423): Ceres Seq. ID no. 14301574
  misc_feature (246)..(398): Homolog of NCBI NO: 5174423 NR Description: D123 gene product [Homo sapiens]
  misc_feature (6)..(38): Homolog of NCBI NO: 3551742 NR Description: HT-1080 protein [Homo sapiens]
  misc_feature (65)..(177): Homolog of NCBI NO: 3551742 NR Description: HT-1080 protein [Homo sapiens]
  misc_feature (246)..(398): Homolog of NCBI NO: 3551742 NR Description: HT-1080 protein [Homo sapiens]
  misc_feature (9)..(38): Homolog of NCBI NO: 25742671 NR Description: D123 gene product [Rattus norvegicus]
  misc_feature (65)..(177): Homolog of NCBI NO: 25742671 NR Description: D123 gene product [Rattus norvegicus]
  misc_feature (246)..(398): Homolog of NCBI NO: 25742671 NR Description: D123 gene product [Rattus norvegicus]
  misc_feature (5)..(38): Homolog of NCBI NO: 15235584 NR Description: D123 -related protein [Arabidopsis thaliana]
  misc_feature (59)..(182): Homolog of NCBI NO: 15235584 NR Description: D123 -related protein [Arabidopsis thaliana]
  misc_feature (256)..(414): Homolog of NCBI NO: 15235584 NR Description: D123 -related protein [Arabidopsis thaliana]
MLLVELLRCQIQEWYPAFRRHTVPTVTIPLPAAFLRYLAGQPAHPVPDAPHQDAEGPPPFLLPSLASGRTPFPPLHLPDPVDHDDSSDLFSVCDDDDDDESPPLPAFPELEAAVDAAIAELGGAALPKLNWSAPKDAAFMSADGTVRCTCFAEVAMLLRSSDCVAHDLSSARPSCQDFVCAREGVRRNAGQGSGANQAGAPSNGGGSTSGAGSLSDPPTEDRNEGGRQAAADSDASEDDVGQESGDDSWVDDGFQYYLALRKWYPGLRPEAEFRCFVRGRKLVGVSQRDTSAYYPSLPGWSSEVQPKIEEFFEEVVESQFASQNYTFDVYVRADGRVKLIDFNPWGGYTLPLMFTWEELEDEKRGEDKLEFRVVMEQGAVRPGLMTAVPYDMTDWGEGSGWDVFLKKADNELNRQMASLAMDS

SEQ ID NO: 66176 - protein, 284 aa, Triticum aestivum
  peptide (1)..(284): Ceres Seq. ID no. 14301575
  misc_feature (1)..(38): Homolog of NCBI NO: 19527052 NR Description: RIKEN cDNA G431001I09 [Mus musculus]
  misc_feature (107)..(272): Homolog of NCBI NO: 19527052 NR Description: RIKEN cDNA G431001I09 [Mus musculus]
  misc_feature (1)..(38): Homolog of NCBI NO: 5174423 NR Description: D123 gene product [Homo sapiens]
  misc_feature (107)..(259): Homolog of NCBI NO: 5174423 NR Description: D123 gene product [Homo sapiens]
  misc_feature (1)..(38): Homolog of NCBI NO: 3551742 NR Description: HT-1080 protein [Homo sapiens]
  misc_feature (107)..(259): Homolog of NCBI NO: 3551742 NR Description: HT-1080 protein [Homo sapiens]
  misc_feature (1)..(38): Homolog of NCBI NO: 25742671 NR Description: D123 gene product [Rattus norvegicus]
  misc_feature (107)..(259): Homolog of NCBI NO: 25742671 NR Description: D123 gene product [Rattus norvegicus]
  misc_feature (1)..(43): Homolog of NCBI NO: 15235584 NR Description: D123 -related protein [Arabidopsis thaliana]
  misc_feature (117)..(275): Homolog of NCBI NO: 15235584 NR Description: D123 -related protein [Arabidopsis thaliana]
MSADGTVRCTCFAEVAMLLRSSDCVAHDLSSARPSCQDFVCAREGVRRNAGQGSGANQAGAPSNGGGSTSGAGSLSDPPTEDRNEGGRQAAADSDASEDDVGQESGDDSWVDDGFQYYLALRKWYPGLRPEAEFRCFVRGRKLVGVSQRDTSAYYPSLPGWSSEVQPKIEEFFEEVVESQFASQNYTFDVYVRADGRVKLIDFNPWGGYTLPLMFTWEELEDEKRGEDKLEFRVVMEQGAVRPGLMTAVPYDMTDWGEGSGWDVFLKKADNELNRQMASLAMDS

SEQ ID NO: 66177 - DNA, 1866 bp, Triticum aestivum
  misc_feature (1)..(1866): Ceres Seq. ID no. 13657240
gaccaaacccaaagccccgtgttccccatctctcctcccagaaacctcctcttcttcctcctcctcctcctcgccgccgccgccgccaccgccgaggatggcggcgaagcagccgttggcggacgtggaggacgggctcctcgcccacctcaacgcgaacgccgagatccccgactcccggtccttcgcctcctccctcggcgtcccgcacaaagacgtggaggacgtcatcaagaggctcaccgccttccgcatcgttgagagtgcggtacggtaccctccccctccccaattcccccgagcctcgcttcgtccctgccccgatttcccccaagacccaacgagctttgctgcaggacatcaccaaggagacgtgggtgctcaccgatgaggccaaggggtatgccgcgaggggctcccccgaggtgcagctcgtcgcggccatcccgcccgagggtgcctccaagggcgcgctcaaggagagtttgggggacgtgttcgatattggaatgaaggctgcagccaagaacaagtggattggatttgagaagggaaacaaagacctcgtactgagaaaggttgaggataccaatgatgaattgcaagagcagcttataagactggagaatggggaggttattgctgacaaagtaatagatgatttgaagagaagaaagcttgtaacaaaagagaaatctatttggtattcactgaagaaggggcctgaatttgttgcaaagagaaaaacattggcaaccgatgtgacacgagaacatctcaagagtggcgactggaaggatctggaatttaaagattataactatggagctcaaggacaacctattgcgataggatatagccaaccgttgttagaggtccgtgaggcaatccagaacatttttctcgagatggggttcagtgagatgccaacgaacatgtatgtagagagcagcttctggaatttcgatgcactgttccagccacaacagcatcctgctcgtgattcacacgatacctttttcctcaaagcccctgctacaacaacacaattacccgatgactatcttgagaaagtaaagcaagtacatcagtctggtggccatggctccaaaggatatggttacaactggaagcgagatgaagcagagaaaaacctgcttcgtactcacacaactgcagtttcaacaaggatgctatacaagctagcacaggagaaaacttttgctcctaagagatactattctattgatcgtgttttccggaatgaagctgtggaccgaactcatcttgcagaattccaccagatagaaggtcttatttgtgattatggtttgacgcttggtgatctgataggtgtattggaagatttcttctccagactaggcatgtcaaagctgcgtttcaaacctgcctacaacccgtacactgaaccaagcatggaaattttcagctaccacgatggtctgaagaaatgggtggagataggcaactcaggcatgttcaggcctgaaatgttacttcccatgggactgccagagggcgttaatgttatcgcatggggtctttcacttgaaaggccaacaatgattctgtatgggattgacaacatacgtgatctctttgggccaaaggtcgacttcaatctgatcaagagcagcccgatttgccgcttggggctgtagtgtagtgagcttgatagaactttatctggatgtctggatgcgaagcatgtttatttgtggttataactttgaaaaccagtactttgcatttaacagagggagtgcagaaatacacacatgtagctctgaattgcaattttgaggtgttcatgttcgatacaagtagggtcttccatttctatgc

SEQ ID NO: 66178 - protein, 559 aa, Triticum aestivum
  peptide (1)..(559): Ceres Seq. ID no. 15219863
  misc_feature (121)..(557): Homolog of NCBI NO: 30585361 NR Description: Homo sapiens phenylalanine-tRNA synthetase-like
  misc_feature (121)..(557): Homolog of NCBI NO: 4758340 NR Description: phenylalanine-tRNA synthetase-like protein
  misc_feature (121)..(557): Homolog of NCBI NO: 7804452 NR Description: phenylalanyl tRNA synthetase beta subunit [Homo
  misc_feature (118)..(557): Homolog of NCBI NO: 18858079 NR Description: CG2263-PA [Drosophila melanogaster]
  misc_feature (117)..(280): Homolog of NCBI NO: 7437805 NR Description: phenylalanine-tRNA ligase (EC 6.1.1.20) beta
  misc_feature (314)..(559): Homolog of NCBI NO: 7437805 NR Description: phenylalanine-tRNA ligase (EC 6.1.1.20) beta
  misc_feature (117)..(559): Homolog of NCBI NO: 22329256 NR Description: phenylalanyl-trna synthetase - like protein
  misc_feature (453)..(559): Homolog of NCBI NO: 37534124 NR Description: putative phenylalanyl-tRNA synthetase alpha chain
  misc_feature (93)..(219): Homolog of NCBI NO: 37534124 NR Description: putative phenylalanyl-tRNA synthetase alpha chain
  misc_feature (212)..(438): Homolog of NCBI NO: 37534124 NR Description: putative phenylalanyl-tRNA synthetase alpha chain
PNPKPRVPHLSSQKPPLLPPPPPRRRRRHRRGWRRSSRWRTWRTGSSPTSTRTPRSPTPGPSPPPSASRTKTWRTSSRGSPPSASLRVRYGTLPLPNSPEPRFVPAPISPKTQRALLQDITKETWVLTDEAKGYAARGSPEVQLVAAIPPEGASKGALKESLGDVFDIGMKAAAKNKWIGFEKGNKDLVLRKVEDTNDELQEQLIRLENGEVIADKVIDDLKRRKLVTKEKSIWYSLKKGPEFVAKRKTLATDVTREHLKSGDWKDLEFKDYNYGAQGQPIAIGYSQPLLEVREAIQNIFLEMGFSEMPTNMYVESSFWNFDALFQPQQHPARDSHDTFFLKAPATTTQLPDDYLEKVKQVHQSGGHGSKGYGYNWKRDEAEKNLLRTHTTAVSTRMLYKLAQEKTFAPKRYYSIDRVFRNEAVDRTHLAEFHQIEGLICDYGLTLGDLIGVLEDFFSRLGMSKLRFKPAYNPYTEPSMEIFSYHDGLKKWVEIGNSGMFRPEMLLPMGLPEGVNVIAWGLSLERPTMILYGIDNIRDLFGPKVDFNLIKSSPICRLGL

SEQ ID NO: 66179 - protein, 390 aa, Triticum aestivum
  peptide (1)..(390): Ceres Seq. ID no. 15219864
  misc_feature (1)..(388): Homolog of NCBI NO: 28175596 NR Description: similar to phenylalanine-tRNA synthetase-like
  misc_feature (1)..(388): Homolog of NCBI NO: 4758340 NR Description: phenylalanine-tRNA synthetase-like protein
  misc_feature (1)..(388): Homolog of NCBI NO: 7804452 NR Description: phenylalanyl tRNA synthetase beta subunit [Homo
  misc_feature (1)..(388): Homolog of NCBI NO: 18858079 NR Description: CG2263-PA [Drosophila melanogaster]
  misc_feature (1)..(111): Homolog of NCBI NO: 7437805 NR Description: phenylalanine-tRNA ligase (EC 6.1.1.20) beta
  misc_feature (145)..(390): Homolog of NCBI NO: 7437805 NR Description: phenylalanine-tRNA ligase (EC 6.1.1.20) beta
  misc_feature (1)..(390): Homolog of NCBI NO: 22329256 NR Description: phenylalanyl-trna synthetase - like protein
  misc_feature (284)..(390): Homolog of NCBI NO: 37534124 NR Description: putative phenylalanyl-tRNA synthetase alpha chain
  misc_feature (1)..(50): Homolog of NCBI NO: 37534124 NR Description: putative phenylalanyl-tRNA synthetase alpha chain
  misc_feature (43)..(269): Homolog of NCBI NO: 37534124 NR Description: putative phenylalanyl-tRNA synthetase alpha chain
MKAAAKNKWIGFEKGNKDLVLRKVEDTNDELQEQLIRLENGEVIADKVIDDLKRRKLVTKEKSIWYSLKKGPEFVAKRKTLATDVTREHLKSGDWKDLEFKDYNYGAQGQPIAIGYSQPLLEVREAIQNIFLEMGFSEMPTNMYVESSFWNFDALFQPQQHPARDSHDTFFLKAPATTTQLPDDYLEKVKQVHQSGGHGSKGYGYNWKRDEAEKNLLRTHTTAVSTRMLYKLAQEKTFAPKRYYSIDRVFRNEAVDRTHLAEFHQIEGLICDYGLTLGDLIGVLEDFFSRLGMSKLRFKPAYNPYTEPSMEIFSYHDGLKKWVEIGNSGMFRPEMLLPMGLPEGVNVIAWGLSLERPTMILYGIDNIRDLFGPKVDFNLIKSSPICRLGL

SEQ ID NO: 66180 - DNA, 1862 bp, Triticum aestivum
  misc_feature (1)..(1862): Ceres Seq. ID no. 14302451
cccatcccctctcttctctatagcttactagcagcagcgctctcttcttgctcttcgctatctagctccactttgctcgttgtcctctccctcttggatcgatccggccttcggcggccatgaattgcgccggggtcgccgatgggttgcctgcaggcgagccggataccggcgtcgtcgaccagccacggaggaggagctgcctgtagcgtagctgagctatagtgctcggtcgatctgctgcttcttgggggcgaggaagaagaataaccgaggcttactctcgacgacaggtgcttcgcacagtcgcgatgtttaggaaggacacgtcggacagaagcatccgtttcaagagaaggggcacaaggcggagccagataatttccggtgacgcacaccatggatccccagacatttgtgaggctctcagtcgggcagcttggcctgaggctccccggcgcaagtgccagaaaggctttccactgcgagatccggctccgaggcttcccggttcagttagctccggtgcctctggaaaattcttcagagtttcatcttgatccgcacgcgaatgcggcggtgttctccctggacgagcccggcctcaaggcgctgccgacgtcgaggtggttccgaaccccggagccgccgtacctcgagatcgctgtgtacgtgagcaggcgcgacggcggcgggcattgcgtcgggttgaagcggcggctggtcggggctgtcagggtggatgtcgggccggagtggcgcgacggcaagcctgtgctgcttcgccatagctggacgggcatcggcagggcggcggagctgcacgtgagagtgagggtggaggctgaccctcggtacgtgttccggttcgaggacgaggtcgcgctgaacccgcaggtggtccagctccatggcggcgccagccagcccatctttagctgcaagttcatccgcgacgtgaggcgggcgtcgcagccggatcatttgggcgggaagtattggtcgagctccggaagcggcgaagagaaggagacggagatggcggggaggaggagggagaggaagggctggaaggtggcgatccacgacctgtccggctccgccgtggccgcggcgttcatggccacgccgttcgtgccggcgacgggctccgacacggtggcgcggtccaacccaggcgcgtggctcatcgtccgcgccgacacaacgggatcgtcggagagctggcagccgtggggccggctggaggcgtggcgggagtgcgctgcgccggcgggcggcaaggacgccgtgtgccttcggctgcatctcctcccggagcggcgggacgcgtgcgtactcgtgtccgagacgcctctgagctgtgataagggcggggagttctccatcgacatggacagacagtcgatcctcccggaggacgcagtggcgtcggagacgacgtcgtcgtcgtactgcgcagcgagcatgggacagtcgtgcgcgggcggcggcttcgtgatgagctgcagcgtgcagggcgaggcggcgacgagcagcaggccgccgctggtgcacctcgccgcgcggcacgtcatgtgcatggaagacgcagccatgttcctcgcgcttgcggctgccgtcgacctcagtgtcaaggcgtgccggccgttccggagcaagacggcggcggctaagaagaagacggctgctggctcctcttcccccgattccctggagctcgacacatagattagctagagctagcagtcctcactcctcagtcaagcatcagatcatccatggtcactctgtaaatccacttgtttcgaccaaacttgttgaaaactctaccagttttttctaggcctaacctgtagacg

SEQ ID NO: 66181 - protein, 443 aa, Triticum aestivum
  peptide (1)..(443): Ceres Seq. ID no. 14302452
  misc_feature (241)..(419): Pfam Name: Protein of unknown function (DUF1005) Pfam Description: Protein of unknown function (DUF1005)
  misc_feature (107)..(421): Homolog of NCBI NO: 15230917 NR Description: expressed protein [Arabidopsis thaliana]
  misc_feature (28)..(421): Homolog of NCBI NO: 15222861 NR Description: expressed protein [Arabidopsis thaliana]
  misc_feature (57)..(421): Homolog of NCBI NO: 34896878 NR Description: unknown protein [Oryza sativa (japonica
  misc_feature (37)..(418): Homolog of NCBI NO: 32352156 NR Description: hypothetical protein [Oryza sativa (japonica
  misc_feature (1)..(421): Homolog of NCBI NO: 36104436 NR Description: unknown protein [Oryza sativa (japonica
  misc_feature (1)..(421): Homolog of NCBI NO: 15218372 NR Description: expressed protein [Arabidopsis thaliana]
  misc_feature (365)..(421): Homolog of NCBI NO: 15233530 NR Description: expressed protein [Arabidopsis thaliana]
  misc_feature (1)..(367): Homolog of NCBI NO: 15233530 NR Description: expressed protein [Arabidopsis thaliana]
  misc_feature (1)..(419): Homolog of NCBI NO: 15238004 NR Description: expressed protein [Arabidopsis thaliana]
  misc_feature (1)..(443): Homolog of NCBI NO: 34905328 NR Description: OJ9990_A01.12 [Oryza sativa (japonica
MDPQTFVRLSVGQLGLRLPGASARKAFHCEIRLRGFPVQLAPVPLENSSEFHLDPHANAAVFSLDEPGLKALPTSRWFRTPEPPYLEIAVYVSRRDGGGHCVGLKRRLVGAVRVDVGPEWRDGKPVLLRHSWTGIGRAAELHVRVRVEADPRYVFRFEDEVALNPQVVQLHGGASQPIFSCKFIRDVRRASQPDHLGGKYWSSSGSGEEKETEMAGRRRERKGWKVAIHDLSGSAVAAAFMATPFVPATGSDTVARSNPGAWLIVRADTTGSSESWQPWGRLEAWRECAAPAGGKDAVCLRLHLLPERRDACVLVSETPLSCDKGGEFSIDMDRQSILPEDAVASETTSSSYCAASMGQSCAGGGFVMSCSVQGEAATSSRPPLVHLAARHVMCMEDAAMFLALAAAVDLSVKACRPFRSKTAAAKKKTAAGSSSPDSLELDT

SEQ ID NO: 66182 - protein, 230 aa, Triticum aestivum
  peptide (1)..(230): Ceres Seq. ID no. 14302453
  misc_feature (28)..(206): Pfam Name: Protein of unknown function (DUF1005) Pfam Description: Protein of unknown function (DUF1005)
  misc_feature (1)..(208): Homolog of NCBI NO: 15230917 NR Description: expressed protein [Arabidopsis thaliana]
  misc_feature (1)..(208): Homolog of NCBI NO: 15222861 NR Description: expressed protein [Arabidopsis thaliana]
  misc_feature (1)..(208): Homolog of NCBI NO: 34896878 NR Description: unknown protein [Oryza sativa (japonica
  misc_feature (1)..(205): Homolog of NCBI NO: 32352156 NR Description: hypothetical protein [Oryza sativa (japonica
  misc_feature (1)..(208): Homolog of NCBI NO: 36104436 NR Description: unknown protein [Oryza sativa (japonica
  misc_feature (1)..(208): Homolog of NCBI NO: 15218372 NR Description: expressed protein [Arabidopsis thaliana]
  misc_feature (152)..(208): Homolog of NCBI NO: 15233530 NR Description: expressed protein [Arabidopsis thaliana]
  misc_feature (1)..(154): Homolog of NCBI NO: 15233530 NR Description: expressed protein [Arabidopsis thaliana]
  misc_feature (1)..(206): Homolog of NCBI NO: 15238004 NR Description: expressed protein [Arabidopsis thaliana]
  misc_feature (1)..(230): Homolog of NCBI NO: 34905328 NR Description: OJ9990_A01.12 [Oryza sativa (japonica
MAGRRRERKGWKVAIHDLSGSAVAAAFMATPFVPATGSDTVARSNPGAWLIVRADTTGSSESWQPWGRLEAWRECAAPAGGKDAVCLRLHLLPERRDACVLVSETPLSCDKGGEFSIDMDRQSILPEDAVASETTSSSYCAASMGQSCAGGGFVMSCSVQGEAATSSRPPLVHLAARHVMCMEDAAMFLALAAAVDLSVKACRPFRSKTAAAKKKTAAGSSSPDSLELDT

SEQ ID NO: 66183 - DNA, 1804 bp, Triticum aestivum
  misc_feature (1)..(1804): Ceres Seq. ID no. 14301554
ccaaatccagctgaacccacccacgctctacatcacactcatcagtccccactcctcacaggcaaacgccataccatatcacacgggctagccagccatcccatcatggagaaggcgcagaagcgggtggccatcgtcggcgccggcgcgagcggcctggcggcgtgcaagcacgcgctggagcgcggcctccggccggtcgtattcgagtcctcgggcgccatcggcggcgtgtgggtgcgcgcgctggcgtccacgcgcctgcagacgccgcgcacgctctacgagttctccgacttcccctggccgccggaggtcgccgaggtgttcccggaccacgcccaggccgcggcgtacctgcgctcctacgcggagcggttcggcgtgctggaccgcgtccggttcggatgccgcgtgacaggcatggagtacgccggcgtcggcgaggacgaggtccgggcgtgggaccggtgggccggcgatgggtcggcgttcggggatggccgcggccagtggcggctcaccgtgcagcagcagggtgccggcgacgtcgagacatatgttgcggattttgtgatcctgtgcgccgggagattcagcggcatcccgaatatacccacattccctcccgacaaagggccggagaagttcgacggcacggtgatccgctccatggactactccgacatgggcaccgaaaaggccaccgagctcatcaggggcaagctcgtcaccgtcgtcggctaccagaagtccgctatcgacatcgctgcagagtgcgcaaacacaaacggagccaagtatccatgcacaataatatgtcgaacgaagaggtggatcatacccgactactacgcttggggcgttcccattgcattcttctacctcaaccgcttctcggagctcctagtacacaagccaggagaggggctgctccttagcattcttgctaccttcttatcacccttgagatggttgttctcgaagttcgtcgagagctactacagatgggcggtgcccatggataagcacggcatggtgccagaccacagtttcttccaggccatcagctcttgcttggttgcaatattgccagacaagttctatgacatggttgatcaaggaagcattgttctcaagaaagcaaagagcttcagcttctgcaaacaaggtgtgattgtcgaaggtgattccgcgccgataaagagcgacgtggtcatattcgccaccggatacaagggagaccaaaagctaaaggagatgttggcatcatccttgttcagagacattgtgactggcccaccatccagtattattcctctctacaggcaatgcgtgcatcctaggatcccacagctggcgatcatcggctactccgagagcatagcaaacctgcacacattcgacatgcgctccaaatggttggcgcatttccttgacggggtgtttcagttgcctagcataaaatctatggagatggatataaaggaatgggatgaatacatgaagaggtactctcgtgaatacttccgtcgatcttgcgttggagctctccacatctggtacaatgaccagttgtgccaggacatggggtgtgaacccaggaggaagaaagggttctttgcagattggctgttgccatatcttccatcagattacaaggatgtcggtctgaagaagtgacatgagagatctgtcgtgccatcgccgcgcttaaatcaaacagaaacattgccattccagcgattctgtgctgactattgtacaaactaaatgtcatggaataagctcttcggttgaacct

SEQ ID NO: 66184 - protein, 560 aa, Triticum aestivum
  peptide (1)..(560): Ceres Seq. ID no. 14301555
  misc_feature (41)..(229): Pfam Name: Flavin-binding monooxygenase-like Pfam Description: Flavin-binding monooxygenase-like
  misc_feature (182)..(560): Homolog of NCBI NO: 23012092 NR Description: hypothetical protein [Magnetospirillum
  misc_feature (339)..(554): Homolog of NCBI NO: 15221981 NR Description: flavin-containing monooxygenase (FMO) family
  misc_feature (42)..(184): Homolog of NCBI NO: 15221981 NR Description: flavin-containing monooxygenase (FMO) family
  misc_feature (188)..(511): Homolog of NCBI NO: 15221981 NR Description: flavin-containing monooxygenase (FMO) family
  misc_feature (328)..(534): Homolog of NCBI NO: 15242332 NR Description: flavin-containing monooxygenase (FMO) family
  misc_feature (42)..(294): Homolog of NCBI NO: 15242332 NR Description: flavin-containing monooxygenase (FMO) family
  misc_feature (42)..(554): Homolog of NCBI NO: 25513456 NR Description: T29M8.12 protein - Arabidopsis thaliana
  misc_feature (42)..(555): Homolog of NCBI NO: 24960753 NR Description: Hypothetical protein [Oryza sativa (japonica
  misc_feature (36)..(560): Homolog of NCBI NO: 38344126 NR Description: OSJNBb0072N21.5 [Oryza sativa (japonica
  misc_feature (36)..(560): Homolog of NCBI NO: 38344124 NR Description: OSJNBb0072N21.3 [Oryza sativa (japonica
PNPAEPTHALHHTHQSPLLTGKRHTISHGLASHPIMEKAQKRVAIVGAGASGLAACKHALERGLRPVVFESSGAIGGVWVRALASTRLQTPRTLYEFSDFPWPPEVAEVFPDHAQAAAYLRSYAERFGVLDRVRFGCRVTGMEYAGVGEDEVRAWDRWAGDGSAFGDGRGQWRLTVQQQGAGDVETYVADFVILCAGRFSGIPNIPTFPPDKGPEKFDGTVIRSMDYSDMGTEKATELIRGKLVTVVGYQKSAIDIAAECANTNGAKYPCTIICRTKRWIIPDYYAWGVPIAFFYLNRFSELLVHKPGEGLLLSILATFLSPLRWLFSKFVESYYRWAVPMDKHGMVPDHSFFQAISSCLVAILPDKFYDMVDQGSIVLKKAKSFSFCKQGVIVEGDSAPIKSDVVIFATGYKGDQKLKEMLASSLFRDIVTGPPSSIIPLYRQCVHPRIPQLAIIGYSESIANLHTFDMRSKWLAHFLDGVFQLPSIKSMEMDIKEWDEYMKRYSREYFRRSCVGALHIWYNDQLCQDMGCEPRRKKGFFADWLLPYLPSDYKDVGLKK

SEQ ID NO: 66185 - protein, 525 aa, Triticum aestivum
  peptide (1)..(525): Ceres Seq. ID no. 14301556
  misc_feature (6)..(194): Pfam Name: Flavin-binding monooxygenase-like Pfam Description: Flavin-binding monooxygenase-like
  misc_feature (147)..(525): Homolog of NCBI NO: 23012092 NR Description: hypothetical protein [Magnetospirillum
  misc_feature (304)..(519): Homolog of NCBI NO: 15221981 NR Description: flavin-containing monooxygenase (FMO) family
  misc_feature (7)..(149): Homolog of NCBI NO: 15221981 NR Description: flavin-containing monooxygenase (FMO) family
  misc_feature (153)..(476): Homolog of NCBI NO: 15221981 NR Description: flavin-containing monooxygenase (FMO) family
  misc_feature (293)..(499): Homolog of NCBI NO: 15242332 NR Description: flavin-containing monooxygenase (FMO) family
  misc_feature (7)..(259): Homolog of NCBI NO: 15242332 NR Description: flavin-containing monooxygenase (FMO) family
  misc_feature (7)..(519): Homolog of NCBI NO: 25513456 NR Description: T29M8.12 protein - Arabidopsis thaliana
  misc_feature (7)..(520): Homolog of NCBI NO: 24960753 NR Description: Hypothetical protein [Oryza sativa (japonica
  misc_feature (1)..(525): Homolog of NCBI NO: 38344126 NR Description: OSJNBb0072N21.5 [Oryza sativa (japonica
  misc_feature (1)..(525): Homolog of NCBI NO: 38344124 NR Description: OSJNBb0072N21.3 [Oryza sativa (japonica
MEKAQKRVAIVGAGASGLAACKHALERGLRPVVFESSGAIGGVWVRALASTRLQTPRTLYEFSDFPWPPEVAEVFPDHAQAAAYLRSYAERFGVLDRVRFGCRVTGMEYAGVGEDEVRAWDRWAGDGSAFGDGRGQWRLTVQQQGAGDVETYVADFVILCAGRFSGIPNIPTFPPDKGPEKFDGTVIRSMDYSDMGTEKATELIRGKLVTVVGYQKSAIDIAAECANTNGAKYPCTIICRTKRWIIPDYYAWGVPIAFFYLNRFSELLVHKPGEGLLLSILATFLSPLRWLFSKFVESYYRWAVPMDKHGMVPDHSFFQAISSCLVAILPDKFYDMVDQGSIVLKKAKSFSFCKQGVIVEGDSAPIKSDVVIFATGYKGDQKLKEMLASSLFRDIVTGPPSSIIPLYRQCVHPRIPQLAIIGYSESIANLHTFDMRSKWLAHFLDGVFQLPSIKSMEMDIKEWDEYMKRYSREYFRRSCVGALHIWYNDQLCQDMGCEPRRKKGFFADWLLPYLPSDYKDVGLKK

SEQ ID NO: 66186 - protein, 419 aa, Triticum aestivum
  peptide (1)..(419): Ceres Seq. ID no. 14301557
  misc_feature (1)..(88): Pfam Name: Flavin-binding monooxygenase-like Pfam Description: Flavin-binding monooxygenase-like
  misc_feature (41)..(419): Homolog of NCBI NO: 23012092 NR Description: hypothetical protein [Magnetospirillum
  misc_feature (198)..(413): Homolog of NCBI NO: 15221981 NR Description: flavin-containing monooxygenase (FMO) family
  misc_feature (1)..(43): Homolog of NCBI NO: 15221981 NR Description: flavin-containing monooxygenase (FMO) family
  misc_feature (47)..(370): Homolog of NCBI NO: 15221981 NR Description: flavin-containing monooxygenase (FMO) family
  misc_feature (187)..(393): Homolog of NCBI NO: 15242332 NR Description: flavin-containing monooxygenase (FMO) family
  misc_feature (1)..(153): Homolog of NCBI NO: 15242332 NR Description: flavin-containing monooxygenase (FMO) family
  misc_feature (1)..(413): Homolog of NCBI NO: 25513456 NR Description: T29M8.12 protein - Arabidopsis thaliana
  misc_feature (1)..(414): Homolog of NCBI NO: 24960753 NR Description: Hypothetical protein [Oryza sativa (japonica
  misc_feature (1)..(419): Homolog of NCBI NO: 38344126 NR Description: OSJNBb0072N21.5 [Oryza sativa (japonica
  misc_feature (1)..(419): Homolog of NCBI NO: 38344124 NR Description: OSJNBb0072N21.3 [Oryza sativa (japonica
MEYAGVGEDEVRAWDRWAGDGSAFGDGRGQWRLTVQQQGAGDVETYVADFVILCAGRFSGIPNIPTFPPDKGPEKFDGTVIRSMDYSDMGTEKATELIRGKLVTVVGYQKSAIDIAAECANTNGAKYPCTIICRTKRWIIPDYYAWGVPIAFFYLNRFSELLVHKPGEGLLLSILATFLSPLRWLFSKFVESYYRWAVPMDKHGMVPDHSFFQAISSCLVAILPDKFYDMVDQGSIVLKKAKSFSFCKQGVIVEGDSAPIKSDVVIFATGYKGDQKLKEMLASSLFRDIVTGPPSSIIPLYRQCVHPRIPQLAIIGYSESIANLHTFDMRSKWLAHFLDGVFQLPSIKSMEMDIKEWDEYMKRYSREYFRRSCVGALHIWYNDQLCQDMGCEPRRKKGFFADWLLPYLPSDYKDVGLKK

SEQ ID NO: 66187 - DNA, 1842 bp, Triticum aestivum
  misc_feature (1)..(1842): Ceres Seq. ID no. 14307960
actgccacacaagacacacacatccaatcaacccgagacctcaagtgtcacgactcgagacacaacacttcccccggaccaccatggataaggcatacattgccgtcctcaccatcgccttcctcttcctgctccactacatttcaggcaagatcagcaatggcaggcgcggcaagggcgccgtgcagctgccgccaagccccccggtcatccccttcctcggccatctccacctcgtggagaaaccgttccacgccgcgctgcgccgcctggccgcgcgcctcggcccggtcttctcgctgcggctcggctcgcgccgcgccgtggtggtgtcgtcggcggagtgcgccagggagtgcttcacggagcacgacgtgacgttcgccaaccggccccggttcccgtcgcagctgctcgtgtccttcgacggcgccgcgctcgccacgtccagctacggcccgcactggcgcaacctccgccgcgtcgccgccgtgcagctgctctccgcgcaccgcgtcgcctgcatgtcgggcgtcatcgccggcgaggtgcgcgccatggcgcgccggctgttccgcgccgccgccgccgcccccggcgacgccgcgcgggtccagctgaagcggaggctgttcgagctctccctcagcgtgctcatggagaccatcgcgcagaccaaggggacccggtcggaggccgacgccgacacggacatgtccgtggaggcccaggagttcaagaaggtggtggacgagatcatcccctacctcggcgccgccaacacgtgggactacctgccggtgttgcggtggttcgacgtgttcggcgtgaggaacaagatcctggccgccgtgagcaggagggacgccttcctgcatcgtctcatcgacaacgagcgccggaggctcgacgacgccggcgccgaaggcgacaagaagagcatgatcgccgtgctcctcaatctccagaagacggagccggaggtgtacacccataccatgatcacggccctctgcgcgaatttatttggggccggaacggagaccacgtcgacgacgacggagtgggcgatgtcgctgctgctgaaccacccggaggcgctgaggaaggcgcaggccgagatcgacgcaaccgtcggaaccacccggctggtcaccgccgacgacgtgccgcggctggcctacctgcagtgcatcgtgagcgagacgctgcgactgtacccggcggcgccgatgctgctgccgcaccagtcctcagcggactgcaaggtcggcggctacaacgtgccgagcggcacgatgctgatggtgaacgcgtacgccatccaccgcgacccggcggcatgggagcggccgctggagttcgtcccggagcggttcgagggcgggaaggccgaggggcggttcatgatcccgttcgggatgggccggcggcggtgccccggggagacgctggcgctgcggaccatcggcatggtgctggccacgctggtgcagtgcttcgactgggagcgcgtggacggcgcggaggtggacatgacggagggcggcgggctcaccatccccaaggccgtgccgctcgaggccgtgtgcaggccgcgcccggccatgcgcgacgtgcttcagagcctctgatcgccgagcttgttggcgtaataatgcatggttttgatagcctgctgatgtcgtagcaaataaactagtgagttgtgactttgagagcagagtcaggctagctaccatctgtaaattactcgtaacgaataagggttttgtaagaaccactagccgtagctatcttgcggtagcactgaaccagcaatctgtaatttagcttgcaacc

SEQ ID NO: 66188 - protein, 543 aa, Triticum aestivum
  peptide (1)..(543): Ceres Seq. ID no. 14307961
  misc_feature (28)..(543): Homolog of NCBI NO: 7430635 NR Description: cytochrome P450 (EC 1.14.-.-) 81B1c - Jerusalem
  misc_feature (55)..(543): Homolog of NCBI NO: 3059131 NR Description: cytochrome P450 [Helianthus tuberosus]
  misc_feature (64)..(543): Homolog of NCBI NO: 38344454 NR Description: OSJNBa0017P10.2 [Oryza sativa (japonica
  misc_feature (28)..(543): Homolog of NCBI NO: 14488355 NR Description: putative cytochrome P450 [Oryza sativa (japonica
  misc_feature (28)..(541): Homolog of NCBI NO: 14488358 NR Description: putative cytochrome P450 [Oryza sativa (japonica
  misc_feature (28)..(543): Homolog of NCBI NO: 14488373 NR Description: putative cytochrome P450 [Oryza sativa (japonica
  misc_feature (16)..(543): Homolog of NCBI NO: 14488353 NR Description: putative cytochrome P450 [Oryza sativa (japonica
  misc_feature (28)..(543): Homolog of NCBI NO: 13661744 NR Description: putative cytochrome P450 [Lolium rigidum]
  misc_feature (28)..(543): Homolog of NCBI NO: 13661748 NR Description: putative cytochrome P450 [Lolium rigidum]
  misc_feature (28)..(543): Homolog of NCBI NO: 13661746 NR Description: putative cytochrome P450 [Lolium rigidum]
CHTRHTHPINPRPQVSRLETQHFPRTTMDKAYIAVLTIAFLFLLHYISGKISNGRRGKGAVQLPPSPPVIPFLGHLHLVEKPFHAALRRLAARLGPVFSLRLGSRRAVVVSSAECARECFTEHDVTFANRPRFPSQLLVSFDGAALATSSYGPHWRNLRRVAAVQLLSAHRVACMSGVIAGEVRAMARRLFRAAAAAPGDAARVQLKRRLFELSLSVLMETIAQTKGTRSEADADTDMSVEAQEFKKVVDEIIPYLGAANTWDYLPVLRWFDVFGVRNKILAAVSRRDAFLHRLIDNERRRLDDAGAEGDKKSMIAVLLNLQKTEPEVYTHTMITALCANLFGAGTETTSTTTEWAMSLLLNHPEALRKAQAEIDATVGTTRLVTADDVPRLAYLQCIVSETLRLYPAAPMLLPHQSSADCKVGGYNVPSGTMLMVNAYAIHRDPAAWERPLEFVPERFEGGKAEGRFMIPFGMGRRRCPGETLALRTIGMVLATLVQCFDWERVDGAEVDMTEGGGLTIPKAVPLEAVCRPRPAMRDVLQSL

SEQ ID NO: 66189 - protein, 516 aa, Triticum aestivum
  peptide (1)..(516): Ceres Seq. ID no. 14307962
  misc_feature (1)..(516): Homolog of NCBI NO: 7430635 NR Description: cytochrome P450 (EC 1.14.-.-) 81B1c - Jerusalem
  misc_feature (28)..(516): Homolog of NCBI NO: 3059131 NR Description: cytochrome P450 [Helianthus tuberosus]
  misc_feature (37)..(516): Homolog of NCBI NO: 38344454 NR Description: OSJNBa0017P10.2 [Oryza sativa (japonica
  misc_feature (1)..(516): Homolog of NCBI NO: 14488355 NR Description: putative cytochrome P450 [Oryza sativa (japonica
  misc_feature (1)..(514): Homolog of NCBI NO: 14488358 NR Description: putative cytochrome P450 [Oryza sativa (japonica
  misc_feature (1)..(516): Homolog of NCBI NO: 14488373 NR Description: putative cytochrome P450 [Oryza sativa (japonica
  misc_feature (1)..(516): Homolog of NCBI NO: 14488353 NR Description: putative cytochrome P450 [Oryza sativa (japonica
  misc_feature (1)..(516): Homolog of NCBI NO: 13661744 NR Description: putative cytochrome P450 [Lolium rigidum]
  misc_feature (1)..(516): Homolog of NCBI NO: 13661748 NR Description: putative cytochrome P450 [Lolium rigidum]
  misc_feature (1)..(516): Homolog of NCBI NO: 13661746 NR Description: putative cytochrome P450 [Lolium rigidum]
MDKAYIAVLTIAFLFLLHYISGKISNGRRGKGAVQLPPSPPVIPFLGHLHLVEKPFHAALRRLAARLGPVFSLRLGSRRAVVVSSAECARECFTEHDVTFANRPRFPSQLLVSFDGAALATSSYGPHWRNLRRVAAVQLLSAHRVACMSGVIAGEVRAMARRLFRAAAAAPGDAARVQLKRRLFELSLSVLMETIAQTKGTRSEADADTDMSVEAQEFKKVVDEIIPYLGAANTWDYLPVLRWFDVFGVRNKILAAVSRRDAFLHRLIDNERRRLDDAGAEGDKKSMIAVLLNLQKTEPEVYTHTMITALCANLFGAGTETTSTTTEWAMSLLLNHPEALRKAQAEIDATVGTTRLVTADDVPRLAYLQCIVSETLRLYPAAPMLLPHQSSADCKVGGYNVPSGTMLMVNAYAIHRDPAAWERPLEFVPERFEGGKAEGRFMIPFGMGRRRCPGETLALRTIGMVLATLVQCFDWERVDGAEVDMTEGGGLTIPKAVPLEAVCRPRPAMRDVLQSL

SEQ ID NO: 66190 - protein, 369 aa, Triticum aestivum
  peptide (1)..(369): Ceres Seq. ID no. 14307963
  misc_feature (1)..(369): Homolog of NCBI NO: 7430635 NR Description: cytochrome P450 (EC 1.14.-.-) 81B1c - Jerusalem
  misc_feature (1)..(369): Homolog of NCBI NO: 3059131 NR Description: cytochrome P450 [Helianthus tuberosus]
  misc_feature (1)..(369): Homolog of NCBI NO: 38344454 NR Description: OSJNBa0017P10.2 [Oryza sativa (japonica
  misc_feature (1)..(369): Homolog of NCBI NO: 14488355 NR Description: putative cytochrome P450 [Oryza sativa (japonica
  misc_feature (1)..(367): Homolog of NCBI NO: 14488358 NR Description: putative cytochrome P450 [Oryza sativa (japonica
  misc_feature (1)..(369): Homolog of NCBI NO: 14488373 NR Description: putative cytochrome P450 [Oryza sativa (japonica
  misc_feature (1)..(369): Homolog of NCBI NO: 14488353 NR Description: putative cytochrome P450 [Oryza sativa (japonica
  misc_feature (1)..(369): Homolog of NCBI NO: 13661744 NR Description: putative cytochrome P450 [Lolium rigidum]
  misc_feature (1)..(369): Homolog of NCBI NO: 13661748 NR Description: putative cytochrome P450 [Lolium rigidum]
  misc_feature (1)..(369): Homolog of NCBI NO: 13661746 NR Description: putative cytochrome P450 [Lolium rigidum]
MSGVIAGEVRAMARRLFRAAAAAPGDAARVQLKRRLFELSLSVLMETIAQTKGTRSEADADTDMSVEAQEFKKVVDEIIPYLGAANTWDYLPVLRWFDVFGVRNKILAAVSRRDAFLHRLIDNERRRLDDAGAEGDKKSMIAVLLNLQKTEPEVYTHTMITALCANLFGAGTETTSTTTEWAMSLLLNHPEALRKAQAEIDATVGTTRLVTADDVPRLAYLQCIVSETLRLYPAAPMLLPHQSSADCKVGGYNVPSGTMLMVNAYAIHRDPAAWERPLEFVPERFEGGKAEGRFMIPFGMGRRRCPGETLALRTIGMVLATLVQCFDWERVDGAEVDMTEGGGLTIPKAVPLEAVCRPRPAMRDVLQSL

SEQ ID NO: 66191 - DNA, 1755 bp, Triticum aestivum
  misc_feature (1)..(1755): Ceres Seq. ID no. 14307964
tcaccttcgaaccatttgcttccaagaaacttctcaagaatcccacgccaggcactgccatggatctttccatggctaccggcccggaagactccctcctcctgctcctcctcccggctaccaccctgctcccacctcctcttccaccgcgcaatgggcttcgccccgtcgggcgacgctcactggcgtgccctccgccgtctcgccgcggcgcacctcttcggcccgcgccgcgtggcggcctccgcaccccatcgctcctctattgggacgcgcatgctcggcgacgtcgcctccctcatggcccgccacggcgaagtcgcccctcggcggttcctgcacgcggcgtccctaaaccacgtcatggccgtcgtcttcggcaagcgctacgatgacttcacaagccaagaaggagtcgtcgtggaggagatggtaaacgaagggtacgacctcctcggcacgttcaactgggcagatcacctgccattcctcaagtggctcgacctccagggcgtgcgacgccggtgcaacaggttagtccggcaggtggaggcgtatgtcggtaacatcattcaggagcacaaagcgaggcgcgccagcggatcaggcattgcggatgagctctccggcgacttcgtcgatgtgctcctcggcctcgacggagaagacaagatgtcagagtccgacatgatcgccgttctttgggagatgatctttcgagggacggacacggtggcgatcttgatggagtggatcatggccaggatggtgctgcacccggagatccagtcgaaggcccgggcggagctggacgccgtggtggggcggggcagggccgtgatggacgaggacgtggcgaggctcccctacatccagtgcatcgtcaaggagacgctgcgcatgcacccgccgggcccgctcctctcgtgggcgcggctggccgtgcacgacgcgcacgtcggcggccacctcgtcccggccggcacgacggcgatggtgaacatgtgggccatcgcgcacgacgcggcggtgtggcccgagccggagctgttccggccggagcggttcatggaggaggaggtgagcgtgctgggcagcgacctccgcctggccccgttcggcgccgggcggcgcgtgtgccccggcaagatgctggccctcgccaccgtccacctctggctcgcccagctgctgcaccggttcgagtgggctcccgcgaccgcggcctcggggggcgtcgacctgtcagagcgcctgaagatgtcgctggagatggccacgccgctggtctgcagggccgtggctcgctagggccagagagagctgcacctgcatgctaccgccgccgtctacgttacctagcctgtcggcggcgccagcgttacttgctttattgcctagtatttattggctagccgttggaggctagcttgccagggtctagtagcactactgctttttggtcatctccatgcatgtacggctagctagctccgtctttgcgcggccgatccgttagccattgaaggaagctatagctagccatgggttactcctgctcgaggtcagcgagcaatcgcgcatgctgtcttgatggggtaattttggtcttctagatggagagttattagtgtgttttgtttttgttcgggagaaacatctggtgtctgtgagtgtgagttgtcatgtcgagtcgtagtagcgtggtgcttcaagaaaatttgtagtgagattttgaatattttttaatccgcg

SEQ ID NO: 66192 - protein, 436 aa, Triticum aestivum
  peptide (1)..(436): Ceres Seq. ID no. 14307965
  misc_feature (46)..(429): Homolog of NCBI NO: 15226422 NR Description: cytochrome P450, putative [Arabidopsis thaliana]
  misc_feature (46)..(436): Homolog of NCBI NO: 30962524 NR Description: cytochrome P450 78A11 [Oryza sativa (japonica
  misc_feature (46)..(436): Homolog of NCBI NO: 37534160 NR Description: putative cytochrome 450 [Oryza sativa (japonica
  misc_feature (46)..(436): Homolog of NCBI NO: 1352187 NR Description: Cytochrome P450 78A1 (CYPLXXVIII)
  misc_feature (46)..(436): Homolog of NCBI NO: 5921925 NR Description: Cytochrome P450 78A4
  misc_feature (46)..(436): Homolog of NCBI NO: 15222937 NR Description: cytochrome P450 family [Arabidopsis thaliana]
  misc_feature (46)..(436): Homolog of NCBI NO: 15221132 NR Description: cytochrome P450 family [Arabidopsis thaliana]
  misc_feature (46)..(436): Homolog of NCBI NO: 1173624 NR Description: cytochrome P-450
  misc_feature (46)..(436): Homolog of NCBI NO: 31126705 NR Description: putative cytochrome P-450 [Oryza sativa (japonica
  misc_feature (46)..(436): Homolog of NCBI NO: 34394563 NR Description: putative cytochrome P-450
SPSNHLLPRNFSRIPRQALPWIFPWLPARKTPSSCSSSRLPPCSHLLFHRAMGFAPSGDAHWRALRRLAAAHLFGPRRVAASAPHRSSIGTRMLGDVASLMARHGEVAPRRFLHAASLNHVMAVVFGKRYDDFTSQEGVVVEEMVNEGYDLLGTFNWADHLPFLKWLDLQGVRRRCNRLVRQVEAYVGNIIQEHKARRASGSGIADELSGDFVDVLLGLDGEDKMSESDMIAVLWEMIFRGTDTVAILMEWIMARMVLHPEIQSKARAELDAVVGRGRAVMDEDVARLPYIQCIVKETLRMHPPGPLLSWARLAVHDAHVGGHLVPAGTTAMVNMWAIAHDAAVWPEPELFRPERFMEEEVSVLGSDLRLAPFGAGRRVCPGKMLALATVHLWLAQLLHRFEWAPATAASGGVDLSERLKMSLEMATPLVCRAVAR

SEQ ID NO: 66193 - protein, 385 aa, Triticum aestivum
  peptide (1)..(385): Ceres Seq. ID no. 14307966
  misc_feature (1)..(378): Homolog of NCBI NO: 15226422 NR Description: cytochrome P450, putative [Arabidopsis thaliana]
  misc_feature (1)..(385): Homolog of NCBI NO: 30962524 NR Description: cytochrome P450 78A11 [Oryza sativa (japonica
  misc_feature (1)..(385): Homolog of NCBI NO: 37534160 NR Description: putative cytochrome 450 [Oryza sativa (japonica
  misc_feature (1)..(385): Homolog of NCBI NO: 1352187 NR Description: Cytochrome P450 78A1 (CYPLXXVIII)
  misc_feature (1)..(385): Homolog of NCBI NO: 5921925 NR Description: Cytochrome P450 78A4
  misc_feature (1)..(385): Homolog of NCBI NO: 15222937 NR Description: cytochrome P450 family [Arabidopsis thaliana]
  misc_feature (1)..(385): Homolog of NCBI NO: 15221132 NR Description: cytochrome P450 family [Arabidopsis thaliana]
  misc_feature (1)..(385): Homolog of NCBI NO: 1173624 NR Description: cytochrome P-450
  misc_feature (1)..(385): Homolog of NCBI NO: 31126705 NR Description: putative cytochrome P-450 [Oryza sativa (japonica
  misc_feature (1)..(385): Homolog of NCBI NO: 34394563 NR Description: putative cytochrome P-450
MGFAPSGDAHWRALRRLAAAHLFGPRRVAASAPHRSSIGTRMLGDVASLMARHGEVAPRRFLHAASLNHVMAVVFGKRYDDFTSQEGVVVEEMVNEGYDLLGTFNWADHLPFLKWLDLQGVRRRCNRLVRQVEAYVGNIIQEHKARRASGSGIADELSGDFVDVLLGLDGEDKMSESDMIAVLWEMIFRGTDTVAILMEWIMARMVLHPEIQSKARAELDAVVGRGRAVMDEDVARLPYIQCIVKETLRMHPPGPLLSWARLAVHDAHVGGHLVPAGTTAMVNMWAIAHDAAVWPEPELFRPERFMEEEVSVLGSDLRLAPFGAGRRVCPGKMLALATVHLWLAQLLHRFEWAPATAASGGVDLSERLKMSLEMATPLVCRAVAR

SEQ ID NO: 66194 - protein, 344 aa, Triticum aestivum
  peptide (1)..(344): Ceres Seq. ID no. 14307967
  misc_feature (1)..(337): Homolog of NCBI NO: 15226422 NR Description: cytochrome P450, putative [Arabidopsis thaliana]
  misc_feature (1)..(344): Homolog of NCBI NO: 30962524 NR Description: cytochrome P450 78A11 [Oryza sativa (japonica
  misc_feature (1)..(344): Homolog of NCBI NO: 37534160 NR Description: putative cytochrome 450 [Oryza sativa (japonica
  misc_feature (1)..(344): Homolog of NCBI NO: 1352187 NR Description: Cytochrome P450 78A1 (CYPLXXVIII)
  misc_feature (1)..(344): Homolog of NCBI NO: 5921925 NR Description: Cytochrome P450 78A4
  misc_feature (1)..(344): Homolog of NCBI NO: 15222937 NR Description: cytochrome P450 family [Arabidopsis thaliana]
  misc_feature (1)..(344): Homolog of NCBI NO: 15221132 NR Description: cytochrome P450 family [Arabidopsis thaliana]
  misc_feature (1)..(344): Homolog of NCBI NO: 1173624 NR Description: cytochrome P-450
  misc_feature (1)..(344): Homolog of NCBI NO: 31126705 NR Description: putative cytochrome P-450 [Oryza sativa (japonica
  misc_feature (1)..(344): Homolog of NCBI NO: 34394563 NR Description: putative cytochrome P-450
MLGDVASLMARHGEVAPRRFLHAASLNHVMAVVFGKRYDDFTSQEGVVVEEMVNEGYDLLGTFNWADHLPFLKWLDLQGVRRRCNRLVRQVEAYVGNIIQEHKARRASGSGIADELSGDFVDVLLGLDGEDKMSESDMIAVLWEMIFRGTDTVAILMEWIMARMVLHPEIQSKARAELDAVVGRGRAVMDEDVARLPYIQCIVKETLRMHPPGPLLSWARLAVHDAHVGGHLVPAGTTAMVNMWAIAHDAAVWPEPELFRPERFMEEEVSVLGSDLRLAPFGAGRRVCPGKMLALATVHLWLAQLLHRFEWAPATAASGGVDLSERLKMSLEMATPLVCRAVAR

SEQ ID NO: 66195 - DNA, 1535 bp, Triticum aestivum
  misc_feature (1)..(1535): Ceres Seq. ID no. 13657850
cccacctagaacatcctaatcgataagccgtcgtcctcgtcctcgccttccccatcaagctaaaacctccctcttttcgtcgaatccagccaccatgaaaccctaagaccaccgtcctcccgaatcctccattgccctccccgatgcaggcgttcgcgcgcctctcctcccccgccgcctccagaaaggtgatttcgggcgtctctggagcggtcgcaaggccgtgctaccggacatggcggtggaaggcgcatgcggcgccgctgtcggctccgggcccacccaagggcaagaagagggaatacatatccaagaatgaaaggaaggctaggatgaaggagtttattgagggttatcaggcatcaaatgacggtagatttccgactatgcaaatgattcgtcaaagtgttggagggggtcactacacaattagggatgtactctcggaagtgaagtataaccagataaagtttccgtttgataagtctaaggcagcccagcttcaggagacagctgaaggtgctgagcagtcaaggccagaggaggagagtggaaacagttcatttaactctcagagctttaacggaaatcaggatgaagatgacacgctcctatcccagaaagattctcctgctggcaatacaatcatggaaaacactgaagcttccatatctttggacgcaaaggaggtgaagttaccgctatataactccgaggcagcccagctccatgagacaggtgaatgtgctgagcaatcaaggctcggggaaagcgggagcagtgcattgaacccagatgacacactcctctcccagaaagactctgctatgggcactacaatcatagaaaacaatcaaccattgggatctctagagtcacaagactcctctcattacagtggagaaactgaggttgccaagcaagattcatgtactgcagcagcagatgcaaatgacctgactgtatcgaaacaagcagaaattgatggcatgaagactgaagcacccatatctttggaactggagactaagtcagacaacgggaatcgtcaaggggaaactgaagttaacaaggtgcattcgaacaatgtgaaaaaattccaggatccaactgaaccaactgtatctgatcaaactgaacatgacatagtgatcaaaggaaatgtacttcacagagaagagaaccccgaggtcgaggagcagggatcaagcaagacaagtcttttagggagcctgaaatcgcttgcttctgggatcagaaacttctggagaaatctgtaaatttgtctcattttggcttggagctaacacacatgaagtccccttatttatcattttgtgagcctggagcagcttgtgaagctttgtcaaggctacagagttaatgatccaagtgccccttgtttagtgttttttgcgaggctgaagaaagctgtaaagttttattttttgcactactgaacactggtctgactcctgcaaaaaaaaaaaaaaaaaagcttatcgataccgtcgacctcgagggggggcccggta

SEQ ID NO: 66196 - protein, 378 aa, Triticum aestivum
  peptide (1)..(378): Ceres Seq. ID no. 15219880
  misc_feature (34)..(308): Homolog of NCBI NO: 7488796 NR Description: DNA-binding protein PD2 - garden pea
MQAFARLSSPAASRKVISGVSGAVARPCYRTWRWKAHAAPLSAPGPPKGKKREYISKNERKARMKEFIEGYQASNDGRFPTMQMIRQSVGGGHYTIRDVLSEVKYNQIKFPFDKSKAAQLQETAEGAEQSRPEEESGNSSFNSQSFNGNQDEDDTLLSQKDSPAGNTIMENTEASISLDAKEVKLPLYNSEAAQLHETGECAEQSRLGESGSSALNPDDTLLSQKDSAMGTTIIENNQPLGSLESQDSSHYSGETEVAKQDSCTAAADANDLTVSKQAEIDGMKTEAPISLELETKSDNGNRQGETEVNKVHSNNVKKFQDPTEPTVSDQTEHDIVIKGNVLHREENPEVEEQGSSKTSLLGSLKSLASGIRNFWRNL

SEQ ID NO: 66197 - protein, 315 aa, Triticum aestivum
  peptide (1)..(315): Ceres Seq. ID no. 15219881
  misc_feature (1)..(245): Homolog of NCBI NO: 7488796 NR Description: DNA-binding protein PD2 - garden pea
MKEFIEGYQASNDGRFPTMQMIRQSVGGGHYTIRDVLSEVKYNQIKFPFDKSKAAQLQETAEGAEQSRPEEESGNSSFNSQSFNGNQDEDDTLLSQKDSPAGNTIMENTEASISLDAKEVKLPLYNSEAAQLHETGECAEQSRLGESGSSALNPDDTLLSQKDSAMGTTIIENNQPLGSLESQDSSHYSGETEVAKQDSCTAAADANDLTVSKQAEIDGMKTEAPISLELETKSDNGNRQGETEVNKVHSNNVKKFQDPTEPTVSDQTEHDIVIKGNVLHREENPEVEEQGSSKTSLLGSLKSLASGIRNFWRNL

SEQ ID NO: 66198 - protein, 297 aa, Triticum aestivum
  peptide (1)..(297): Ceres Seq. ID no. 15219882
  misc_feature (1)..(227): Homolog of NCBI NO: 7488796 NR Description: DNA-binding protein PD2 - garden pea
MQMIRQSVGGGHYTIRDVLSEVKYNQIKFPFDKSKAAQLQETAEGAEQSRPEEESGNSSFNSQSFNGNQDEDDTLLSQKDSPAGNTIMENTEASISLDAKEVKLPLYNSEAAQLHETGECAEQSRLGESGSSALNPDDTLLSQKDSAMGTTIIENNQPLGSLESQDSSHYSGETEVAKQDSCTAAADANDLTVSKQAEIDGMKTEAPISLELETKSDNGNRQGETEVNKVHSNNVKKFQDPTEPTVSDQTEHDIVIKGNVLHREENPEVEEQGSSKTSLLGSLKSLASGIRNFWRNL

SEQ ID NO: 66199 - DNA, 1373 bp, Triticum aestivum
  misc_feature (1)..(1373): Ceres Seq. ID no. 13662898
agaacatcctaatcgaaaaacgctctcaagcaacaatctcaagtagtaggctggcagttcttctcttcccattgaaccatctgtacaagggagagaaaatcctgaagcctgactatcatcctaactagctagcttggtagaactatctcattgtgatctcctcatcaactccaaaggtagtcttttttttgagggggactccaaaggtagttaagatcttgcaatgggtggtctctctcttcagcacccgtgggcctttgcctttggcctcctaggcaacgtcatctcgttcatgacctacctggccccactgccgacgttctaccgaatctaccggagcaagtcgacgcaggggttccagtcggtcccttacgtggtggcgctctttagcgcgatgttgtggatctactacgcgctgctcaagtctgacgagtgcctcctcatcaccatcaactccgccggctgtgtcattgagaccatctacatcatcatctacctcacctatgcaccaaagcaagccaagctcttcacggcgaagatcctcctcctcctgaatgtgggtgtgttcggtcttatcctcctcctcaccctactcctgtcggagggcgagaagcgcgtcgtcatgctcgggtgggtttgcgtcggcttctctgtcagcgtcttcatcgcgcccctcagcgtcatccgccttgtggtgcgtacccggagcgtggagttcatgcctttttccctctccctctccctcactgtcagcgccgtcgtctggttcctctacggcctcctcatcaaggacaaatatgttgccctgccaaacattcttgggtttgccttcggtgtgattcaaatggggctttacgccctctaccgcaacgccatgccttcaccggctcccaagcaggtggacgatgctgatgccatcaaggtgcccgagcatgtcatccacatcgctaagcttggcccagcagctgccatcgagctcaacacacacaatcccatggaacgggggatgccaccgccgatggaggataacggcttggcctgcgccagcgacatgaccaaggggggcattgacatggttgagaaagcaacccgcgtcgagcaagtctaggcagtcatgcgttcatgcctaggatatatgcgtgcacttaagccatgatgggcaggggtcgagcaaaggagctatagggagagaaatgcatgcgcgtgagcttgtgatttccactgtcgacgttccattagttgctcgagccagttattttatcctggtcgtattcattagtatgttcatctatcaattccatgtaatggtcttattataaaagttgccattttctaatgaagcatagcaggataagaaaatggcatctcagtcc

SEQ ID NO: 66200 - protein, 294 aa, Triticum aestivum
  peptide (1)..(294): Ceres Seq. ID no. 15220195
  misc_feature (12)..(99): Pfam Name: MtN3/saliva family Pfam Description: MtN3/saliva family
  misc_feature (1)..(221): Homolog of NCBI NO: 15240040 NR Description: nodulin MtN3 family protein [Arabidopsis
  misc_feature (8)..(245): Homolog of NCBI NO: 21554178 NR Description: similar to MtN3 protein [Arabidopsis thaliana]
  misc_feature (8)..(245): Homolog of NCBI NO: 15225014 NR Description: nodulin MtN3 family protein [Arabidopsis
  misc_feature (11)..(279): Homolog of NCBI NO: 15234863 NR Description: nodulin MtN3 family protein [Arabidopsis
  misc_feature (10)..(257): Homolog of NCBI NO: 21593109 NR Description: MtN3-like protein [Arabidopsis thaliana]
  misc_feature (10)..(257): Homolog of NCBI NO: 15241278 NR Description: nodulin MtN3 family protein [Arabidopsis
  misc_feature (4)..(239): Homolog of NCBI NO: 1619602 NR Description: MtN3 [Medicago truncatula]
  misc_feature (10)..(245): Homolog of NCBI NO: 14715258 NR Description: N3 like protein [Medicago truncatula]
  misc_feature (10)..(251): Homolog of NCBI NO: 15237803 NR Description: nodulin MtN3 family protein [Arabidopsis
  misc_feature (1)..(251): Homolog of NCBI NO: 15229019 NR Description: nodulin MtN3 family protein [Arabidopsis
MGGLSLQHPWAFAFGLLGNVISFMTYLAPLPTFYRIYRSKSTQGFQSVPYVVALFSAMLWIYYALLKSDECLLITINSAGCVIETIYIIIYLTYAPKQAKLFTAKILLLLNVGVFGLILLLTLLLSEGEKRVVMLGWVCVGFSVSVFIAPLSVIRLVVRTRSVEFMPFSLSLSLTVSAVVWFLYGLLIKDKYVALPNILGFAFGVIQMGLYALYRNAMPSPAPKQVDDADAIKVPEHVIHIAKLGPAAAIELNTHNPMERGMPPPMEDNGLACASDMTKGGIDMVEKATRVEQV

SEQ ID NO: 66201 - protein, 271 aa, Triticum aestivum
  peptide (1)..(271): Ceres Seq. ID no. 15220196
  misc_feature (1)..(76): Pfam Name: MtN3/saliva family Pfam Description: MtN3/saliva family
  misc_feature (1)..(198): Homolog of NCBI NO: 15240040 NR Description: nodulin MtN3 family protein [Arabidopsis
  misc_feature (1)..(222): Homolog of NCBI NO: 21554178 NR Description: similar to MtN3 protein [Arabidopsis thaliana]
  misc_feature (1)..(222): Homolog of NCBI NO: 15225014 NR Description: nodulin MtN3 family protein [Arabidopsis
  misc_feature (1)..(256): Homolog of NCBI NO: 15234863 NR Description: nodulin MtN3 family protein [Arabidopsis
  misc_feature (1)..(234): Homolog of NCBI NO: 21593109 NR Description: MtN3-like protein [Arabidopsis thaliana]
  misc_feature (1)..(234): Homolog of NCBI NO: 15241278 NR Description: nodulin MtN3 family protein [Arabidopsis
  misc_feature (1)..(216): Homolog of NCBI NO: 1619602 NR Description: MtN3 [Medicago truncatula]
  misc_feature (1)..(222): Homolog of NCBI NO: 14715258 NR Description: N3 like protein [Medicago truncatula]
  misc_feature (1)..(228): Homolog of NCBI NO: 15237803 NR Description: nodulin MtN3 family protein [Arabidopsis
  misc_feature (1)..(228): Homolog of NCBI NO: 15229019 NR Description: nodulin MtN3 family protein [Arabidopsis
MTYLAPLPTFYRIYRSKSTQGFQSVPYVVALFSAMLWIYYALLKSDECLLITINSAGCVIETIYIIIYLTYAPKQAKLFTAKILLLLNVGVFGLILLLTLLLSEGEKRVVMLGWVCVGFSVSVFIAPLSVIRLVVRTRSVEFMPFSLSLSLTVSAVVWFLYGLLIKDKYVALPNILGFAFGVIQMGLYALYRNAMPSPAPKQVDDADAIKVPEHVIHIAKLGPAAAIELNTHNPMERGMPPPMEDNGLACASDMTKGGIDMVEKATRVEQV

SEQ ID NO: 66202 - protein, 237 aa, Triticum aestivum
  peptide (1)..(237): Ceres Seq. ID no. 15220197
  misc_feature (1)..(164): Homolog of NCBI NO: 15240040 NR Description: nodulin MtN3 family protein [Arabidopsis
  misc_feature (1)..(188): Homolog of NCBI NO: 21554178 NR Description: similar to MtN3 protein [Arabidopsis thaliana]
  misc_feature (1)..(188): Homolog of NCBI NO: 15225014 NR Description: nodulin MtN3 family protein [Arabidopsis
  misc_feature (1)..(222): Homolog of NCBI NO: 15234863 NR Description: nodulin MtN3 family protein [Arabidopsis
  misc_feature (1)..(200): Homolog of NCBI NO: 21593109 NR Description: MtN3-like protein [Arabidopsis thaliana]
  misc_feature (1)..(200): Homolog of NCBI NO: 15241278 NR Description: nodulin MtN3 family protein [Arabidopsis
  misc_feature (1)..(182): Homolog of NCBI NO: 1619602 NR Description: MtN3 [Medicago truncatula]
  misc_feature (1)..(188): Homolog of NCBI NO: 14715258 NR Description: N3 like protein [Medicago truncatula]
  misc_feature (1)..(194): Homolog of NCBI NO: 15237803 NR Description: nodulin MtN3 family protein [Arabidopsis
  misc_feature (1)..(194): Homolog of NCBI NO: 15229019 NR Description: nodulin MtN3 family protein [Arabidopsis
MLWIYYALLKSDECLLITINSAGCVIETIYIIIYLTYAPKQAKLFTAKILLLLNVGVFGLILLLTLLLSEGEKRVVMLGWVCVGFSVSVFIAPLSVIRLVVRTRSVEFMPFSLSLSLTVSAVVWFLYGLLIKDKYVALPNILGFAFGVIQMGLYALYRNAMPSPAPKQVDDADAIKVPEHVIHIAKLGPAAAIELNTHNPMERGMPPPMEDNGLACASDMTKGGIDMVEKATRVEQV

SEQ ID NO: 66203 - DNA, 1632 bp, Triticum aestivum
  misc_feature (1)..(1632): Ceres Seq. ID no. 14308049
atccaatcgccagcctccttgtattcatgcgttggtgcaacttctttcttagcttcgtacgttcagctagctcagtatgaagatcacagtgcggtcatccaagtccatcaagcctgactatggcagcggccacctgatggctccggccacggccaacgtcgtcccgctcacagtgttcgacaaagccaacttcgacatgcacgtctctgtcatctacaccttccacccaccagccccgtcccatgacgtcctcgaggccgggctcgccaaggccctcgccgactaccgcgagtgggccggccgtctcaccctggacgccaacggcaagcgctgcgccatcctactcaacgacgccggtgcgcgattcgtcgaagcgacggccggcgtggcgctcgacagcgtcatgcctctgcagcccactcccgaggtgctgagcctgcacccgaccggcggtggcgacgagctgctgttgatccaggccacgaggttcgcatgcgggtccctcgtcgttggcctgactgggcaccacatggtcaccgacggtggcggctggtgcaacctcatcatcgcgtggggtcaggccacgcgaggcgcctccattgaccctgtcccagtgcacgatcggccgtccttcttcctgccgcgcaacccgcttaagatagagtacgagcaccacagcatcgagttcaagccatacgacgaccgcaatagtacggccggcggcggcgacgacgaggtggtggtagagagggtccacttcagtatggaccacatcgcaaaactgaagtcgcaggcgtcagctgtggccggcacgggccggccgtacagcaccgtgcagtgcgtggtggcgcacctgtggcggtgcatgacgctggcgcgcggcctcgatgggcgtgacgtcaccggtctgttcatcgcagtggacgggcgagcgcggatgagccagcgggtgccggacgggtacaccggcaacgtggtgctctgggcgcggcctacagccaccgcgggggaggtcgtgaacaggccgctgcaccacctggcggagctcatcagcggggcggttgcccggattgacgacgcctacttcaagtctttcatcgacttcgcctgctccggggccgtggaggaggaggggctggtgccgactgctgacccggcggtgacggtgcttagccccaacgtcgaggtggacagctggctgcggatcccgttctatgatctggatctgggcagcggccggcccttcttcttcatgcccagctacctgccagtggagggaggggtcatcctcgtgccttccttctatggcgatgggagcgtggatgcctacgtgccccttttcagccgccacatggacgccttcaagaactgctgcacatccggcctccccaaactctgatttttatcccgggattgtaactctcagtcagtcaatgcggtagccgtctgatctggtgcgatatgattcgtaccatcttctggcgttgtattgctttggtggtcttctgaatggccttctatttgtgcctttgtatgcacaaggagatgcattgtgtgcgtgagtgttttgaaatttgtatttcgctttagctacaggtcagtcgcctgaaaaattaagttagggtcactatc

SEQ ID NO: 66204 - protein, 440 aa, Triticum aestivum
  peptide (1)..(440): Ceres Seq. ID no. 14308050
  misc_feature (3)..(435): Pfam Name: Transferase family Pfam Description: Transferase family
  misc_feature (1)..(430): Homolog of NCBI NO: 15239747 NR Description: anthranilate
  misc_feature (1)..(430): Homolog of NCBI NO: 21536883 NR Description: anthranilate N-benzoyltransferase [Arabidopsis
  misc_feature (137)..(433): Homolog of NCBI NO: 31712073 NR Description: putative hydroxycinnamoyl transferase
  misc_feature (1)..(435): Homolog of NCBI NO: 37533700 NR Description: putative anthranilate N-benzoyltransferase
  misc_feature (128)..(435): Homolog of NCBI NO: 32490472 NR Description: putative anthranilate N-benzoyltransferase
  misc_feature (1)..(435): Homolog of NCBI NO: 32490471 NR Description: putative anthranilate N-benzoyltransferase
  misc_feature (88)..(433): Homolog of NCBI NO: 30025137 NR Description: putative agmatine coumaroyltransferase [Triticum
  misc_feature (1)..(435): Homolog of NCBI NO: 32488651 NR Description: OSJNBa0087O24.1 [Oryza sativa (japonica
  misc_feature (1)..(440): Homolog of NCBI NO: 32488652 NR Description: OSJNBa0087O24.2 [Oryza sativa (japonica
  misc_feature (1)..(435): Homolog of NCBI NO: 30025135 NR Description: agmatine coumaroyltransferase [Hordeum vulgare]
MKITVRSSKSIKPDYGSGHLMAPATANVVPLTVFDKANFDMHVSVIYTFHPPAPSHDVLEAGLAKALADYREWAGRLTLDANGKRCAILLNDAGARFVEATAGVALDSVMPLQPTPEVLSLHPTGGGDELLLIQATRFACGSLVVGLTGHHMVTDGGGWCNLIIAWGQATRGASIDPVPVHDRPSFFLPRNPLKIEYEHHSIEFKPYDDRNSTAGGGDDEVVVERVHFSMDHIAKLKSQASAVAGTGRPYSTVQCVVAHLWRCMTLARGLDGRDVTGLFIAVDGRARMSQRVPDGYTGNVVLWARPTATAGEVVNRPLHHLAELISGAVARIDDAYFKSFIDFACSGAVEEEGLVPTADPAVTVLSPNVEVDSWLRIPFYDLDLGSGRPFFFMPSYLPVEGGVILVPSFYGDGSVDAYVPLFSRHMDAFKNCCTSGLPKL

SEQ ID NO: 66205 - protein, 420 aa, Triticum aestivum
  peptide (1)..(420): Ceres Seq. ID no. 14308051
  misc_feature (1)..(415): Pfam Name: Transferase family Pfam Description: Transferase family
  misc_feature (1)..(410): Homolog of NCBI NO: 15239747 NR Description: anthranilate
  misc_feature (1)..(410): Homolog of NCBI NO: 21536883 NR Description: anthranilate N-benzoyltransferase [Arabidopsis
  misc_feature (117)..(413): Homolog of NCBI NO: 31712073 NR Description: putative hydroxycinnamoyl transferase
  misc_feature (1)..(415): Homolog of NCBI NO: 37533700 NR Description: putative anthranilate N-benzoyltransferase
  misc_feature (108)..(415): Homolog of NCBI NO: 32490472 NR Description: putative anthranilate N-benzoyltransferase
  misc_feature (1)..(415): Homolog of NCBI NO: 32490471 NR Description: putative anthranilate N-benzoyltransferase
  misc_feature (68)..(413): Homolog of NCBI NO: 30025137 NR Description: putative agmatine coumaroyltransferase [Triticum
  misc_feature (1)..(415): Homolog of NCBI NO: 32488651 NR Description: OSJNBa0087O24.1 [Oryza sativa (japonica
  misc_feature (1)..(420): Homolog of NCBI NO: 32488652 NR Description: OSJNBa0087O24.2 [Oryza sativa (japonica
  misc_feature (1)..(415): Homolog of NCBI NO: 30025135 NR Description: agmatine coumaroyltransferase [Hordeum vulgare]
MAPATANVVPLTVFDKANFDMHVSVIYTFHPPAPSHDVLEAGLAKALADYREWAGRLTLDANGKRCAILLNDAGARFVEATAGVALDSVMPLQPTPEVLSLHPTGGGDELLLIQATRFACGSLVVGLTGHHMVTDGGGWCNLIIAWGQATRGASIDPVPVHDRPSFFLPRNPLKIEYEHHSIEFKPYDDRNSTAGGGDDEVVVERVHFSMDHIAKLKSQASAVAGTGRPYSTVQCVVAHLWRCMTLARGLDGRDVTGLFIAVDGRARMSQRVPDGYTGNVVLWARPTATAGEVVNRPLHHLAELISGAVARIDDAYFKSFIDFACSGAVEEEGLVPTADPAVTVLSPNVEVDSWLRIPFYDLDLGSGRPFFFMPSYLPVEGGVILVPSFYGDGSVDAYVPLFSRHMDAFKNCCTSGLPKL

SEQ ID NO: 66206 - protein, 400 aa, Triticum aestivum
  peptide (1)..(400): Ceres Seq. ID no. 14308052
  misc_feature (1)..(395): Pfam Name: Transferase family Pfam Description: Transferase family
  misc_feature (1)..(390): Homolog of NCBI NO: 15239747 NR Description: anthranilate
  misc_feature (1)..(390): Homolog of NCBI NO: 21536883 NR Description: anthranilate N-benzoyltransferase [Arabidopsis
  misc_feature (97)..(393): Homolog of NCBI NO: 31712073 NR Description: putative hydroxycinnamoyl transferase
  misc_feature (1)..(395): Homolog of NCBI NO: 37533700 NR Description: putative anthranilate N-benzoyltransferase
  misc_feature (88)..(395): Homolog of NCBI NO: 32490472 NR Description: putative anthranilate N-benzoyltransferase
  misc_feature (1)..(395): Homolog of NCBI NO: 32490471 NR Description: putative anthranilate N-benzoyltransferase
  misc_feature (48)..(393): Homolog of NCBI NO: 30025137 NR Description: putative agmatine coumaroyltransferase [Triticum
  misc_feature (1)..(395): Homolog of NCBI NO: 32488651 NR Description: OSJNBa0087O24.1 [Oryza sativa (japonica
  misc_feature (1)..(400): Homolog of NCBI NO: 32488652 NR Description: OSJNBa0087O24.2 [Oryza sativa (japonica
  misc_feature (1)..(395): Homolog of NCBI NO: 30025135 NR Description: agmatine coumaroyltransferase [Hordeum vulgare]
MHVSVIYTFHPPAPSHDVLEAGLAKALADYREWAGRLTLDANGKRCAILLNDAGARFVEATAGVALDSVMPLQPTPEVLSLHPTGGGDELLLIQATRFACGSLVVGLTGHHMVTDGGGWCNLIIAWGQATRGASIDPVPVHDRPSFFLPRNPLKIEYEHHSIEFKPYDDRNSTAGGGDDEVVVERVHFSMDHIAKLKSQASAVAGTGRPYSTVQCVVAHLWRCMTLARGLDGRDVTGLFIAVDGRARMSQRVPDGYTGNVVLWARPTATAGEVVNRPLHHLAELISGAVARIDDAYFKSFIDFACSGAVEEEGLVPTADPAVTVLSPNVEVDSWLRIPFYDLDLGSGRPFFFMPSYLPVEGGVILVPSFYGDGSVDAYVPLFSRHMDAFKNCCTSGLPKL

SEQ ID NO: 66207 - DNA, 1681 bp, Triticum aestivum
  misc_feature (1)..(1681): Ceres Seq. ID no. 14307976
aacccgaacagttagacagagaaaaatcctccaagcgcatcgccacccgctgccgcgagccgccgcccgccggccccagccccgccacaggctacagcgcgccgccaccgcctaccccgccggcactcctacccctaccccaagtgcctcccacgctcgctacgttctaccgccggcgacactcgacgccgcggccgttgccggctcccacacccgcgggcctttatctccccggcggccgccgccgccgccctgctcgtccagcgggctggccctgtccatggggcgtacgggctacccgcgcccttcgacgcccgcacgcgcctccttctgcccttccgccgcggacgatgccgacttctctgagtctaatgcgatcctggtggtggccacgccctgcgagagtctgttgctgctcagcccagcgtcttgccgtggcgggcgcctgtcgtcggagctctggttgtcggttccagagtcgggtggttccacacaggggcgcatatcccgttgtgccaccaatcacttaattcggctctcttgagctgcccggcttcggcggcgaagatgatggcgatgcctaggacacaacggccacatgggatgaaactagcagagatgaagaaggcggtggtcgttgggaggagaagattgcccggaagctggaggacgtgcaccagctgcggttgctggacaaccgctacgtttagtggctgagggaattgttgggctacgagaatcagtcgctgataagagggctgaggctgagaagatcaagagggatcagagattgtgctcaattgttggtggtcaggacgtcaggagttatctgaagaaaggactcactatctggttaaatgttccattggatgcccttgcaagaaggattgctgcggtggttcagcgtcactgcccctcctgcatcaacaatctggtgatccatatgcaaaggttcagaagagctattttgtgtacatgagttgctactggcagtggacagattgtctatgcagagtgcgtagagaaaaaaatgctcacatacaaacacaaacgacatccagtaggcgcttggaacacccgacagattgaaagcacagaagcaaagatttccaatacgaggccacgatgcccgacagagatgtagccaatatgtgcccaatccttatttcttgatgttggaacaacaagtgttgaggcagggaaaaggcagcagtagaggcatgggcacttcagaaaagggtgttgactgttctgattgaggccagttgaaggcttccacgtgccacctccttcgcctcctacgccgcgtcgagaaaggcggacacgtgcggtaggagccaagggggaacagggaaaggcggacacgagattcgtgaacccagagaagagaatgtatgcgagcttgtccacctcggcggtgtcagccgccagtgccaccgtgtcccgcctccgcctggcctggtcgcaacaaaagtatgactgcaggtgtggttcattcagttttgaagtttgatttacttgcttgtgcatgtgtgtgtgtattctaagagagagggagagattattctgttctagccagtcgtatttctggacaaatctgctcccctccactccttttttatttgccttaaatctgaacatgaaaagcagttacaaattgagagcaacagagtaaacgttc

SEQ ID NO: 66208 - protein, 180 aa, Triticum aestivum
  peptide (1)..(180): Ceres Seq. ID no. 14307977
TRTVRQRKILQAHRHPLPRAAARRPQPRHRLQRAATAYPAGTPTPTPSASHARYVLPPATLDAAAVAGSHTRGPLSPRRPPPPPCSSSGLALSMGRTGYPRPSTPARASFCPSAADDADFSESNAILVVATPCESLLLLSPASCRGGRLSSELWLSVPESGGSTQGRISRCATNHLIRLS

SEQ ID NO: 66209 - protein, 175 aa, Triticum aestivum
  peptide (1)..(175): Ceres Seq. ID no. 14307978
  misc_feature (20)..(120): Homolog of NCBI NO: 27375632 NR Description: blr0521 [Bradyrhizobium japonicum]
PEQLDREKSSKRIATRCREPPPAGPSPATGYSAPPPPTPPALLPLPQVPPTLATFYRRRHSTPRPLPAPTPAGLYLPGGRRRRPARPAGWPCPWGVRATRALRRPHAPPSALPPRTMPTSLSLMRSWWWPRPARVCCCSAQRLAVAGACRRSSGCRFQSRVVPHRGAYPVVPPIT

SEQ ID NO: 66210 - protein, 87 aa, Triticum aestivum
  peptide (1)..(87): Ceres Seq. ID no. 14307979
MGRTGYPRPSTPARASFCPSAADDADFSESNAILVVATPCESLLLLSPASCRGGRLSSELWLSVPESGGSTQGRISRCATNHLIRLS

SEQ ID NO: 66211 - DNA, 1134 bp, Triticum aestivum
  misc_feature (1)..(1134): Ceres Seq. ID no. 14301822
acatgctatagtccacaggtccgggcagtccagttttccctccattcccccgcggagaaaaaaaaggggaaccgcgggatttcgccggagatgtcgtcggcggccacgaagctcgccaccgcggccgacgctacctcgacggaggcccaaaccctcgtcttggacatgcgcaaggcgctcagctccatgaagtccctcgccgtggagtacgagagggccggcaagcccgacaaggtgaagcagctggaggacgcggtgcaggagctggtggcctcgtacgaggactgcgcgtacctcgccgaggcggtgaagaaggtgcccggggcgtaccagccgtccgaccaggcgactgatttcagaaagctgatcgatgcggaggttgagaaagtcaaggggacctcgcgatcgtcgggacacaaggaccagctcatacggcagttcaaagaggctgtttgggatgttcaccatgcaggtcaaccgatgcctggtgatgaacaagaggaacttgttatgactagcacccagaacaacatcctaaatacagtatgcccattgactatgaagcctatagtcgacttggaaaatcctgttcgctgcatcgattgcaggcacatctatgacaaggatccaatcctgaggtacatccggacgaacaaagctccgaattgccccattgcaggctgcccggcggtcctgcaaccggcgaagatcgtctgcgacaccttccttcgtatggagatcgaggagctgcgggcgtcgggcccggccgctccgaacgcctctgagatagaggatatctcggaccacgacgaggacgaggacgaggatccgatggacgaagacgatgacgagtgatacgcgtctggagaaaccaaccttggtggattcttggtattttgtagggatgatgataggtgttggtactctgttttcaggtcgcactggtatgtcgtcgtgtgtggaatcgggggatgtggctcccctggcaattagcttaaccaacgtaacaagcttagctatgaggatatttattcttgttctgccctgcttttcatcagtctgcagtgctcgttcgtttgtctgattggtgatgatttggtgagactgaatgaccccaatctaaaaatatttcac

SEQ ID NO: 66212 - protein, 284 aa, Triticum aestivum
  peptide (1)..(284): Ceres Seq. ID no. 14301823
  misc_feature (158)..(269): Homolog of NCBI NO: 24642218 NR Description: CG15645-PB [Drosophila melanogaster]
  misc_feature (49)..(269): Homolog of NCBI NO: 24642216 NR Description: CG15645-PA [Drosophila melanogaster]
  misc_feature (26)..(274): Homolog of NCBI NO: 30683483 NR Description: expressed protein [Arabidopsis thaliana]
  misc_feature (26)..(274): Homolog of NCBI NO: 11994504 NR Description: emb|CAB09999.1~gene_id:F4B12.6~similar to unknown
TCYSPQVRAVQFSLHSPAEKKKGNRGISPEMSSAATKLATAADATSTEAQTLVLDMRKALSSMKSLAVEYERAGKPDKVKQLEDAVQELVASYEDCAYLAEAVKKVPGAYQPSDQATDFRKLIDAEVEKVKGTSRSSGHKDQLIRQFKEAVWDVHHAGQPMPGDEQEELVMTSTQNNILNTVCPLTMKPIVDLENPVRCIDCRHIYDKDPILRYIRTNKAPNCPIAGCPAVLQPAKIVCDTFLRMEIEELRASGPAAPNASEIEDISDHDEDEDEDPMDEDDDE

SEQ ID NO: 66213 - protein, 254 aa, Triticum aestivum
  peptide (1)..(254): Ceres Seq. ID no. 14301824
  misc_feature (128)..(239): Homolog of NCBI NO: 24642218 NR Description: CG15645-PB [Drosophila melanogaster]
  misc_feature (19)..(239): Homolog of NCBI NO: 24642216 NR Description: CG15645-PA [Drosophila melanogaster]
  misc_feature (1)..(244): Homolog of NCBI NO: 30683483 NR Description: expressed protein [Arabidopsis thaliana]
  misc_feature (1)..(244): Homolog of NCBI NO: 11994504 NR Description: emb|CAB09999.1~gene_id:F4B12.6~similar to unknown
MSSAATKLATAADATSTEAQTLVLDMRKALSSMKSLAVEYERAGKPDKVKQLEDAVQELVASYEDCAYLAEAVKKVPGAYQPSDQATDFRKLIDAEVEKVKGTSRSSGHKDQLIRQFKEAVWDVHHAGQPMPGDEQEELVMTSTQNNILNTVCPLTMKPIVDLENPVRCIDCRHIYDKDPILRYIRTNKAPNCPIAGCPAVLQPAKIVCDTFLRMEIEELRASGPAAPNASEIEDISDHDEDEDEDPMDEDDDE

SEQ ID NO: 66214 - protein, 229 aa, Triticum aestivum
  peptide (1)..(229): Ceres Seq. ID no. 14301825
  misc_feature (103)..(214): Homolog of NCBI NO: 24642218 NR Description: CG15645-PB [Drosophila melanogaster]
  misc_feature (1)..(214): Homolog of NCBI NO: 24642216 NR Description: CG15645-PA [Drosophila melanogaster]
  misc_feature (1)..(219): Homolog of NCBI NO: 30683483 NR Description: expressed protein [Arabidopsis thaliana]
  misc_feature (1)..(219): Homolog of NCBI NO: 11994504 NR Description: emb|CAB09999.1~gene_id:F4B12.6~similar to unknown
MRKALSSMKSLAVEYERAGKPDKVKQLEDAVQELVASYEDCAYLAEAVKKVPGAYQPSDQATDFRKLIDAEVEKVKGTSRSSGHKDQLIRQFKEAVWDVHHAGQPMPGDEQEELVMTSTQNNILNTVCPLTMKPIVDLENPVRCIDCRHIYDKDPILRYIRTNKAPNCPIAGCPAVLQPAKIVCDTFLRMEIEELRASGPAAPNASEIEDISDHDEDEDEDPMDEDDDE

SEQ ID NO: 66215 - DNA, 926 bp, Triticum aestivum
  misc_feature (1)..(926): Ceres Seq. ID no. 14301874
ccgtgtctccctccctccctccctctccaccgcccccctagtctgacaccgccaaaatcccaccgcgccacgctgatggcttcgccgccgacgggacccgcggcgccggcgggcttggagagcatggaggggctcgccctcgacatcatcatcgccaaggccggcgcgcgccccgcggccgcgctcgcctgcgccagcacgcacctgcgcgccgccgtggccgaggacgccgtctggcgcagcttctgcgcccgagacctcggcctcgacgcgcccctcgaccccgaggaccgcccgctcccctccttcaaggtacgtgcatctgctgtctttgtgccagaacatcctcgtcgggggcatttgggcacacatctgtacagctattccatccgcctgtcagttcctgaggcatgcatgctaggtggggtttacttttcttcctgccagcttcactcacgccactggatcatccgatgtaaagacacggttgtttcggatatgcatggggaaggtgttattggggagcaccctttacttttaccagggcaggacgagtttgtctatgagagctgcacgccgctgaatggcagtagtggatctgtggagggctcttttacatttgtgcctgggaggttgacccagccagaaggaaaaccattcgacgtcacggtggctccgttccctctggaagtacccgactacatcttctgagcatagtatgtgcacctaataacagtgtagtatcttggtagaaacaccgaacatatctctagtactctgtctgctgtagcaaagttgctctgcctggagttgatcttgtcgatgtaatgttaactaaaggacgcaaatggttgtcgtgcgccgaccttcttccggttcctggctgtggccctaaaggaatctgtagcaggtggagcttgtttgtt

SEQ ID NO: 66216 - protein, 236 aa, Triticum aestivum
  peptide (1)..(236): Ceres Seq. ID no. 14301875
  misc_feature (104)..(232): Pfam Name: Protein of unknown function (DUF525) Pfam Description: Protein of unknown function (DUF525)
  misc_feature (97)..(233): Homolog of NCBI NO: 22966573 NR Description: hypothetical protein [Rhodospirillum rubrum]
  misc_feature (105)..(234): Homolog of NCBI NO: 12839470 NR Description: unnamed protein product [Mus musculus]
  misc_feature (96)..(232): Homolog of NCBI NO: 22997541 NR Description: hypothetical protein [Xylella fastidiosa Ann-1]
  misc_feature (96)..(232): Homolog of NCBI NO: 22994587 NR Description: hypothetical protein [Xylella fastidiosa Dixon]
  misc_feature (105)..(232): Homolog of NCBI NO: 22999506 NR Description: hypothetical protein [Magnetococcus sp. MC-1]
  misc_feature (96)..(232): Homolog of NCBI NO: 15838740 NR Description: ApaG protein [Xylella fastidiosa 9a5c]
  misc_feature (105)..(232): Homolog of NCBI NO: 23108582 NR Description: hypothetical protein [Novosphingobium
  misc_feature (102)..(232): Homolog of NCBI NO: 30249542 NR Description: conserved hypothetical protein [Nitrosomonas
  misc_feature (38)..(104): Homolog of NCBI NO: 18390613 NR Description: F-box protein family [Arabidopsis thaliana]
  misc_feature (104)..(236): Homolog of NCBI NO: 18390613 NR Description: F-box protein family [Arabidopsis thaliana]
PCLPPSLPLHRPPSLTPPKSHRATLMASPPTGPAAPAGLESMEGLALDIIIAKAGARPAAALACASTHLRAAVAEDAVWRSFCARDLGLDAPLDPEDRPLPSFKVRASAVFVPEHPRRGHLGTHLYSYSIRLSVPEACMLGGVYFSSCQLHSRHWIIRCKDTVVSDMHGEGVIGEHPLLLPGQDEFVYESCTPLNGSSGSVEGSFTFVPGRLTQPEGKPFDVTVAPFPLEVPDYIF

SEQ ID NO: 66217 - protein, 211 aa, Triticum aestivum
  peptide (1)..(211): Ceres Seq. ID no. 14301876
  misc_feature (79)..(207): Pfam Name: Protein of unknown function (DUF525) Pfam Description: Protein of unknown function (DUF525)
  misc_feature (72)..(208): Homolog of NCBI NO: 22966573 NR Description: hypothetical protein [Rhodospirillum rubrum]
  misc_feature (80)..(209): Homolog of NCBI NO: 12839470 NR Description: unnamed protein product [Mus musculus]
  misc_feature (71)..(207): Homolog of NCBI NO: 22997541 NR Description: hypothetical protein [Xylella fastidiosa Ann-1]
  misc_feature (71)..(207): Homolog of NCBI NO: 22994587 NR Description: hypothetical protein [Xylella fastidiosa Dixon]
  misc_feature (80)..(207): Homolog of NCBI NO: 22999506 NR Description: hypothetical protein [Magnetococcus sp. MC-1]
  misc_feature (71)..(207): Homolog of NCBI NO: 15838740 NR Description: ApaG protein [Xylella fastidiosa 9a5c]
  misc_feature (80)..(207): Homolog of NCBI NO: 23108582 NR Description: hypothetical protein [Novosphingobium
  misc_feature (77)..(207): Homolog of NCBI NO: 30249542 NR Description: conserved hypothetical protein [Nitrosomonas
  misc_feature (13)..(79): Homolog of NCBI NO: 18390613 NR Description: F-box protein family [Arabidopsis thaliana]
  misc_feature (79)..(211): Homolog of NCBI NO: 18390613 NR Description: F-box protein family [Arabidopsis thaliana]
MASPPTGPAAPAGLESMEGLALDIIIAKAGARPAAALACASTHLRAAVAEDAVWRSFCARDLGLDAPLDPEDRPLPSFKVRASAVFVPEHPRRGHLGTHLYSYSIRLSVPEACMLGGVYFSSCQLHSRHWIIRCKDTVVSDMHGEGVIGEHPLLLPGQDEFVYESCTPLNGSSGSVEGSFTFVPGRLTQPEGKPFDVTVAPFPLEVPDYIF

SEQ ID NO: 66218 - protein, 195 aa, Triticum aestivum
  peptide (1)..(195): Ceres Seq. ID no. 14301877
  misc_feature (63)..(191): Pfam Name: Protein of unknown function (DUF525) Pfam Description: Protein of unknown function (DUF525)
  misc_feature (56)..(192): Homolog of NCBI NO: 22966573 NR Description: hypothetical protein [Rhodospirillum rubrum]
  misc_feature (64)..(193): Homolog of NCBI NO: 12839470 NR Description: unnamed protein product [Mus musculus]
  misc_feature (55)..(191): Homolog of NCBI NO: 22997541 NR Description: hypothetical protein [Xylella fastidiosa Ann-1]
  misc_feature (55)..(191): Homolog of NCBI NO: 22994587 NR Description: hypothetical protein [Xylella fastidiosa Dixon]
  misc_feature (64)..(191): Homolog of NCBI NO: 22999506 NR Description: hypothetical protein [Magnetococcus sp. MC-1]
  misc_feature (55)..(191): Homolog of NCBI NO: 15838740 NR Description: ApaG protein [Xylella fastidiosa 9a5c]
  misc_feature (64)..(191): Homolog of NCBI NO: 23108582 NR Description: hypothetical protein [Novosphingobium
  misc_feature (61)..(191): Homolog of NCBI NO: 30249542 NR Description: conserved hypothetical protein [Nitrosomonas
  misc_feature (1)..(63): Homolog of NCBI NO: 18390613 NR Description: F-box protein family [Arabidopsis thaliana]
  misc_feature (63)..(195): Homolog of NCBI NO: 18390613 NR Description: F-box protein family [Arabidopsis thaliana]
MEGLALDIIIAKAGARPAAALACASTHLRAAVAEDAVWRSFCARDLGLDAPLDPEDRPLPSFKVRASAVFVPEHPRRGHLGTHLYSYSIRLSVPEACMLGGVYFSSCQLHSRHWIIRCKDTVVSDMHGEGVIGEHPLLLPGQDEFVYESCTPLNGSSGSVEGSFTFVPGRLTQPEGKPFDVTVAPFPLEVPDYIF

SEQ ID NO: 66219 - DNA, 775 bp, Triticum aestivum
  misc_feature (1)..(775): Ceres Seq. ID no. 13598028
atcggtccatctccatcgctctctcctcttctacctcgccggccagccttctccttggatctcgtcgcagcacggcaacggcaacggcaatggtggtctcgtacacgcaggagcacgtgtacctccacccctggcaccgggtcaccgcggcggcgtggcgcaagttcaccgacccggcggcgctctcccacatcctggacgtgcagacgctgtcccgggacgtcgacccgcgcgccggccggctccacgccgtgcgggccatcgcgggccggcccccgccgctcccgctcctcctccgcggcctcgcggccaccgccggcgccggcgacgtggtgctctgcgtggagcgcacctccgtggacgcggccgcgcgcgccatgcgggtggtctcccgcaacgccacgttccggcggctggtggacgtggaggagcggtgcagctacgcgccccacccggagcggccggacgagtggacggtgttcacgcaggagacgagcatccggtgcgcgccgctggcggccgtgtcggccacggtggccgagatggtggagcggcggtgcgccgagagcttcgcgcagaacgccgccagggggcaggaggtcgtcgagaggatctgcgacggcctcgcgctcgccggccgcgtgccaggaccctcccctgccgacggagaagaaccgtagagacagagcactgcgcagagcatgctcgctctctgttatttactgatgtgtaaatactggctgggaggcaataagaagtgaaattctgtaaattc

SEQ ID NO: 66220 - protein, 243 aa, Triticum aestivum
  peptide (1)..(243): Ceres Seq. ID no. 13598029
  misc_feature (35)..(216): Homolog of NCBI NO: 23018788 NR Description: hypothetical protein [Thermobifida fusca]
  misc_feature (36)..(212): Homolog of NCBI NO: 29830954 NR Description: putative GntR-family transcriptional regulator
SVHLHRSLLFYLAGQPSPWISSQHGNGNGNGGLVHAGARVPPPLAPGHRGGVAQVHRPGGALPHPGRADAVPGRRPARRPAPRRAGHRGPAPAAPAPPPRPRGHRRRRRRGALRGAHLRGRGRARHAGGLPQRHVPAAGGRGGAVQLRAPPGAAGRVDGVHAGDEHPVRAAGGRVGHGGRDGGAAVRRELRAERRQGAGGRREDLRRPRARRPRARTLPCRRRRTVETEHCAEHARSLLFTDV

SEQ ID NO: 66221 - protein, 241 aa, Triticum aestivum
  peptide (1)..(241): Ceres Seq. ID no. 13598030
  misc_feature (38)..(241): Homolog of NCBI NO: 29250754 NR Description: GLP_49_64409_65443 [Giardia lamblia ATCC 50803]
  misc_feature (3)..(227): Homolog of NCBI NO: 25143299 NR Description: pre-mRNA splicing SR protein related RSR-1 (68.2
IGPSPSLSPLLPRRPAFSLDLVAARQRQRQWWSRTRRSTCTSTPGTGSPRRRGASSPTRRRSPTSWTCRRCPGTSTRAPAGSTPCGPSRAGPRRSRSSSAASRPPPAPATWCSAWSAPPWTRPRAPCGWSPATPRSGGWWTWRSGAATRPTRSGRTSGRCSRRRRASGARRWRPCRPRWPRWWSGGAPRASRRTPPGGRRSSRGSATASRSPAACQDPPLPTEKNRRDRALRRACSLSVIY

SEQ ID NO: 66222 - protein, 225 aa, Triticum aestivum
  peptide (1)..(225): Ceres Seq. ID no. 13598031
  misc_feature (49)..(205): Pfam Name: MSF1-like conserved region Pfam Description: MSF1-like conserved region
  misc_feature (34)..(202): Homolog of NCBI NO: 28279126 NR Description: Similar to chromosome 20 open reading frame 45
  misc_feature (34)..(216): Homolog of NCBI NO: 34932182 NR Description: similar to hypothetical protein MGC28728 [Rattus
  misc_feature (34)..(202): Homolog of NCBI NO: 12850407 NR Description: unnamed protein product [Mus musculus]
  misc_feature (34)..(206): Homolog of NCBI NO: 38678528 NR Description: erythroid differentiation and denucleation factor
  misc_feature (34)..(202): Homolog of NCBI NO: 13384954 NR Description: RIKEN cDNA 2310042G06 [Mus musculus]
  misc_feature (34)..(206): Homolog of NCBI NO: 21450093 NR Description: hypothetical protein MGC28728 [Mus musculus]
  misc_feature (34)..(202): Homolog of NCBI NO: 26392626 NR Description: Protein C20orf45 (CGI-107)
  misc_feature (34)..(202): Homolog of NCBI NO: 7705610 NR Description: CGI-107 protein [Homo sapiens]
  misc_feature (34)..(202): Homolog of NCBI NO: 37577049 NR Description: BCR/ABL-regulated protein [Cricetulus griseus]
  misc_feature (30)..(205): Homolog of NCBI NO: 15240002 NR Description: expressed protein [Arabidopsis thaliana]
RSISIALSSSTSPASLLLGSRRSTATATAMVVSYTQEHVYLHPWHRVTAAAWRKFTDPAALSHILDVQTLSRDVDPRAGRLHAVRAIAGRPPPLPLLLRGLAATAGAGDVVLCVERTSVDAAARAMRVVSRNATFRRLVDVEERCSYAPHPERPDEWTVFTQETSIRCAPLAAVSATVAEMVERRCAESFAQNAARGQEVVERICDGLALAGRVPGPSPADGEEP

SEQ ID NO: 66223 - protein, 196 aa, Triticum aestivum
  peptide (1)..(196): Ceres Seq. ID no. 13598032
  misc_feature (20)..(176): Pfam Name: MSF1-like conserved region Pfam Description: MSF1-like conserved region
  misc_feature (5)..(173): Homolog of NCBI NO: 28279126 NR Description: Similar to chromosome 20 open reading frame 45
  misc_feature (5)..(187): Homolog of NCBI NO: 34932182 NR Description: similar to hypothetical protein MGC28728 [Rattus
  misc_feature (5)..(173): Homolog of NCBI NO: 12850407 NR Description: unnamed protein product [Mus musculus]
  misc_feature (5)..(177): Homolog of NCBI NO: 38678528 NR Description: erythroid differentiation and denucleation factor
  misc_feature (5)..(173): Homolog of NCBI NO: 13384954 NR Description: RIKEN cDNA 2310042G06 [Mus musculus]
  misc_feature (5)..(177): Homolog of NCBI NO: 21450093 NR Description: hypothetical protein MGC28728 [Mus musculus]
  misc_feature (5)..(173): Homolog of NCBI NO: 26392626 NR Description: Protein C20orf45 (CGI-107)
  misc_feature (5)..(173): Homolog of NCBI NO: 7705610 NR Description: CGI-107 protein [Homo sapiens]
  misc_feature (5)..(173): Homolog of NCBI NO: 37577049 NR Description: BCR/ABL-regulated protein [Cricetulus griseus]
  misc_feature (1)..(176): Homolog of NCBI NO: 15240002 NR Description: expressed protein [Arabidopsis thaliana]
MVVSYTQEHVYLHPWHRVTAAAWRKFTDPAALSHILDVQTLSRDVDPRAGRLHAVRAIAGRPPPLPLLLRGLAATAGAGDVVLCVERTSVDAAARAMRVVSRNATFRRLVDVEERCSYAPHPERPDEWTVFTQETSIRCAPLAAVSATVAEMVERRCAESFAQNAARGQEVVERICDGLALAGRVPGPSPADGEEP

SEQ ID NO: 66224 - DNA, 1808 bp, Triticum aestivum
  misc_feature (1)..(1808): Ceres Seq. ID no. 15170167
gtttctccctgtctcagtccctagctaccaccaccgcagcgtgcgcagccatggacgcggccacctcgacgacgctcctctacggggcgctgctcgcggctgctttcctctacgtcgccaccatccagcgtggccgcggcaggggcgaaggcggcctgccgccgggccccaggggcctgccgctcttgggcagcctcctgtccctcgacccggacctgcacacctacttcgccggcctcgccaacaagtacagccccatcttctccatccgactcggctccaagctgggtattgtcatcacctccccggcgctggcccgcgaggtgctgcgcgacaacgacctcgtcttctccaaccgggacatcccggacgccgcgcgctccatctcctacggcggtggccagaacatcgtctggaaccccgtcggtcccacctggcgtctgctccgccgcgtctgcgtccgcgagatgctcagccctgctggcctgcagaatgtgcacggcctccgccgccgcgagttcagggccacgctcgcgcacctgcactccatggccagcgccggcatgccggttgacgtcggcgcccagatgttcctcaccaccatgaacgtcatcaccggcacgctgtggggaggcaacatagggaccgagagcgagcggacggcggtgggcaaggagttccgggagcttgtcgcggagatcaccgagatgctcggcgcacccaacgtgtcagacttcttcccggcgctggcgccgttcgacctgcagggaatccggaagaagtcggacgcgctcaaggagcggttcgacgagatcttcggcaggatcatagagaagagggtcgaggccgaccacgccggcggcgacacggcggaagacttcctcgaatacatgctcaagatggagaaggaaggtggcgacgggaaggccgccttcaccatgaccaacgtcaaggccctgctcatggatatggtggttgggggcacagagacgacgtcgaacacggtggaatgggccatggcggagatgctacaaaaccgggggatactgcggaaggtgcgggaggaactcgacgcggtggttggtatcgatggcgtggtggaggaatcggatctcccgcagctgcactatctgcatctggtggtcaaggagacgctccggctgcacccggcgctgccgctcatggtgccgcactgccccagcgaagacacgaccgtcggcggccaccgcgtcccggcgggaagccgcgtgtttgtcaacgcgtgggcgatcatgagggaccccgctgcgtggaaggatccggcgaagttcatcccggagaggttcgcctctcaggcgagcgacggtgacagcgggcggaaggtggacttcaccggcagcgagctggactacgtgccgttcgggtcggggaggaggatctgcgcgggcatcgccatggccgagaggatgacggcatactctgtggccatgctgctgcaggccttcgactgggagctgccggagggagcggcgctggacctgacagagaagttcggcatcgtcatgaagaaggccacgccgctggtcgccgttccgacgccgaggctttccagacccgagctctattccgcatagatagctgatcctactccatgaccatgactccgtgctcgaatcagttcagcctgcagtacatttcccctctcgtgctgttggtccaaacaaaagtttgcttttctacggtttcaattgtctgcttcttctgtagtagcactagcagtgtgcagacagcatctattatatctatatacctattacaatatttatatg

SEQ ID NO: 66225 - protein, 536 aa, Triticum aestivum
  peptide (1)..(536): Ceres Seq. ID no. 15170168
  misc_feature (53)..(523): Pfam Name: Cytochrome P450 Pfam Description: Cytochrome P450
  misc_feature (52)..(529): Homolog of NCBI NO: 37531412 NR Description: putative cytochrome P450 [Oryza sativa (japonica
  misc_feature (22)..(536): Homolog of NCBI NO: 30685891 NR Description: cytochrome P450 family [Arabidopsis thaliana]
  misc_feature (22)..(536): Homolog of NCBI NO: 7430667 NR Description: cytochrome P450 homolog T12H17.80 - Arabidopsis
  misc_feature (22)..(536): Homolog of NCBI NO: 15235775 NR Description: cytochrome P450 family [Arabidopsis thaliana]
  misc_feature (52)..(534): Homolog of NCBI NO: 15241541 NR Description: cytochrome P450 family [Arabidopsis thaliana]
  misc_feature (30)..(534): Homolog of NCBI NO: 15234521 NR Description: cytochrome P450 family [Arabidopsis thaliana]
  misc_feature (52)..(534): Homolog of NCBI NO: 11345411 NR Description: putative cytochrome P450 [Matthiola incana]
  misc_feature (52)..(534): Homolog of NCBI NO: 15234517 NR Description: cytochrome P450, putative [Arabidopsis thaliana]
  misc_feature (52)..(534): Homolog of NCBI NO: 15234514 NR Description: cytochrome p450 family [Arabidopsis thaliana]
  misc_feature (17)..(534): Homolog of NCBI NO: 34911488 NR Description: putative flavonoid 3',5'-hydroxylase
FSLSQSLATTTAACAAMDAATSTTLLYGALLAAAFLYVATIQRGRGRGEGGLPPGPRGLPLLGSLLSLDPDLHTYFAGLANKYSPIFSIRLGSKLGIVITSPALAREVLRDNDLVFSNRDIPDAARSISYGGGQNIVWNPVGPTWRLLRRVCVREMLSPAGLQNVHGLRRREFRATLAHLHSMASAGMPVDVGAQMFLTTMNVITGTLWGGNIGTESERTAVGKEFRELVAEITEMLGAPNVSDFFPALAPFDLQGIRKKSDALKERFDEIFGRIIEKRVEADHAGGDTAEDFLEYMLKMEKEGGDGKAAFTMTNVKALLMDMVVGGTETTSNTVEWAMAEMLQNRGILRKVREELDAVVGIDGVVEESDLPQLHYLHLVVKETLRLHPALPLMVPHCPSEDTTVGGHRVPAGSRVFVNAWAIMRDPAAWKDPAKFIPERFASQASDGDSGRKVDFTGSELDYVPFGSGRRICAGIAMAERMTAYSVAMLLQAFDWELPEGAALDLTEKFGIVMKKATPLVAVPTPRLSRPELYSA

SEQ ID NO: 66226 - protein, 520 aa, Triticum aestivum
  peptide (1)..(520): Ceres Seq. ID no. 15170169
  misc_feature (37)..(507): Pfam Name: Cytochrome P450 Pfam Description: Cytochrome P450
  misc_feature (36)..(513): Homolog of NCBI NO: 37531412 NR Description: putative cytochrome P450 [Oryza sativa (japonica
  misc_feature (6)..(520): Homolog of NCBI NO: 30685891 NR Description: cytochrome P450 family [Arabidopsis thaliana]
  misc_feature (6)..(520): Homolog of NCBI NO: 7430667 NR Description: cytochrome P450 homolog T12H17.80 - Arabidopsis
  misc_feature (6)..(520): Homolog of NCBI NO: 15235775 NR Description: cytochrome P450 family [Arabidopsis thaliana]
  misc_feature (36)..(518): Homolog of NCBI NO: 15241541 NR Description: cytochrome P450 family [Arabidopsis thaliana]
  misc_feature (14)..(518): Homolog of NCBI NO: 15234521 NR Description: cytochrome P450 family [Arabidopsis thaliana]
  misc_feature (36)..(518): Homolog of NCBI NO: 11345411 NR Description: putative cytochrome P450 [Matthiola incana]
  misc_feature (36)..(518): Homolog of NCBI NO: 15234517 NR Description: cytochrome P450, putative [Arabidopsis thaliana]
  misc_feature (36)..(518): Homolog of NCBI NO: 15234514 NR Description: cytochrome p450 family [Arabidopsis thaliana]
  misc_feature (1)..(518): Homolog of NCBI NO: 34911488 NR Description: putative flavonoid 3',5'-hydroxylase
MDAATSTTLLYGALLAAAFLYVATIQRGRGRGEGGLPPGPRGLPLLGSLLSLDPDLHTYFAGLANKYSPIFSIRLGSKLGIVITSPALAREVLRDNDLVFSNRDIPDAARSISYGGGQNIVWNPVGPTWRLLRRVCVREMLSPAGLQNVHGLRRREFRATLAHLHSMASAGMPVDVGAQMFLTTMNVITGTLWGGNIGTESERTAVGKEFRELVAEITEMLGAPNVSDFFPALAPFDLQGIRKKSDALKERFDEIFGRIIEKRVEADHAGGDTAEDFLEYMLKMEKEGGDGKAAFTMTNVKALLMDMVVGGTETTSNTVEWAMAEMLQNRGILRKVREELDAVVGIDGVVEESDLPQLHYLHLVVKETLRLHPALPLMVPHCPSEDTTVGGHRVPAGSRVFVNAWAIMRDPAAWKDPAKFIPERFASQASDGDSGRKVDFTGSELDYVPFGSGRRICAGIAMAERMTAYSVAMLLQAFDWELPEGAALDLTEKFGIVMKKATPLVAVPTPRLSRPELYSA

SEQ ID NO: 66227 - protein, 381 aa, Triticum aestivum
  peptide (1)..(381): Ceres Seq. ID no. 15170170
  misc_feature (1)..(368): Pfam Name: Cytochrome P450 Pfam Description: Cytochrome P450
  misc_feature (1)..(374): Homolog of NCBI NO: 37531412 NR Description: putative cytochrome P450 [Oryza sativa (japonica
  misc_feature (1)..(381): Homolog of NCBI NO: 30685891 NR Description: cytochrome P450 family [Arabidopsis thaliana]
  misc_feature (1)..(381): Homolog of NCBI NO: 7430667 NR Description: cytochrome P450 homolog T12H17.80 - Arabidopsis
  misc_feature (1)..(381): Homolog of NCBI NO: 15235775 NR Description: cytochrome P450 family [Arabidopsis thaliana]
  misc_feature (1)..(379): Homolog of NCBI NO: 15241541 NR Description: cytochrome P450 family [Arabidopsis thaliana]
  misc_feature (1)..(379): Homolog of NCBI NO: 15234521 NR Description: cytochrome P450 family [Arabidopsis thaliana]
  misc_feature (1)..(379): Homolog of NCBI NO: 11345411 NR Description: putative cytochrome P450 [Matthiola incana]
  misc_feature (1)..(379): Homolog of NCBI NO: 15234517 NR Description: cytochrome P450, putative [Arabidopsis thaliana]
  misc_feature (1)..(379): Homolog of NCBI NO: 15234514 NR Description: cytochrome p450 family [Arabidopsis thaliana]
  misc_feature (1)..(379): Homolog of NCBI NO: 34911488 NR Description: putative flavonoid 3',5'-hydroxylase
MLSPAGLQNVHGLRRREFRATLAHLHSMASAGMPVDVGAQMFLTTMNVITGTLWGGNIGTESERTAVGKEFRELVAEITEMLGAPNVSDFFPALAPFDLQGIRKKSDALKERFDEIFGRIIEKRVEADHAGGDTAEDFLEYMLKMEKEGGDGKAAFTMTNVKALLMDMVVGGTETTSNTVEWAMAEMLQNRGILRKVREELDAVVGIDGVVEESDLPQLHYLHLVVKETLRLHPALPLMVPHCPSEDTTVGGHRVPAGSRVFVNAWAIMRDPAAWKDPAKFIPERFASQASDGDSGRKVDFTGSELDYVPFGSGRRICAGIAMAERMTAYSVAMLLQAFDWELPEGAALDLTEKFGIVMKKATPLVAVPTPRLSRPELYSA

SEQ ID NO: 66228 - DNA, 1207 bp, Triticum aestivum
  misc_feature (1)..(1207): Ceres Seq. ID no. 14303704
aaaaccctaaactcaaccccgcacctccgccatgcgaggccgccatcatctgcttggcttcctccgccgcgccgcggcaggctccttctccgcggcccgccatgctgattctctctccctcctacaccccatcccgccgggaaatggcgccgccgttcccatcagcacccgcttcctctcctcgcgcaccggcggcgccgcgcggagcctaatcgaggacgaggctgacctcagcgactgggtcagcgacatcaaggccgactccttcaaccttggtctcagcagcggcgacgagcgcgaggcctccacccgcaaacccgctgcctccaggggaggccgaagagggagggattcggggggaccgccgacgaggtcgaggtttgatggcggtgagttcggcggagagagacgcggcggggattttggcggtgataggcgcggtggtcggttcggcggcgatagtcgtggtggtcggtttggtggcgacaggcgtggtggtcgattcggcagcgatagtcgtggtggtcggttcgggggcgataggcctggctctgatcgaagggggagggtggtgagttctgatctcagtgatgatggtgaatctgggtttggttctgcgaggggaaggcgagggcggggcgggatgtcatcgggtgtgtcacacaggggagggaggtatggtgatttggatgatgaagaatctgggattgggtctcccaggggaaggcgaggtcgtggtgggaggacaacagatttgtcaggtagaggacgcaggggaagcgatggccgcctccaccgtcgcatccaaggccctggccctcgtcgccatcctgtcggtcgccgccttctccgtcgtctccgcccaggaggccccggcgcccagccccgtgtccgccgccggcgtcgcgatgccgtccctcgccgctgcgctcgtcgcctccggtgccgccttcctcttcgccgccgttcgccactgaagagactgcctccgtcttccccgtcgacctacctagtacaaccacatatagatccatttatttatcactagtgatttgttcgttcgtgtcattttgcccagatctgctactgtgtgtcactcggtgatggtgattagtatctccttattagtagagattgtacccgtgtgcttgtagatactatttatccggtttgatctagtattcgtatgatcgctccatttagtttt

SEQ ID NO: 66229 - protein, 338 aa, Triticum aestivum
  peptide (1)..(338): Ceres Seq. ID no. 14303705
  misc_feature (112)..(252): Homolog of NCBI NO: 21327701 NR Description: TBP-associated factor 15 isoform 1
  misc_feature (86)..(267): Homolog of NCBI NO: 17542802 NR Description: putative nuclear protein (4B256) [Caenorhabditis
  misc_feature (112)..(252): Homolog of NCBI NO: 4507353 NR Description: TBP-associated factor 15 isoform 2
  misc_feature (112)..(252): Homolog of NCBI NO: 28279785 NR Description: Similar to TAF15 RNA polymerase II, TATA box
  misc_feature (98)..(257): Homolog of NCBI NO: 34903212 NR Description: unnamed protein product [Oryza sativa (japonica
  misc_feature (100)..(301): Homolog of NCBI NO: 34393238 NR Description: putative PE_PGRS family protein
  misc_feature (69)..(252): Homolog of NCBI NO: 30794412 NR Description: TAF15 RNA polymerase II, TATA box binding protein
  misc_feature (82)..(252): Homolog of NCBI NO: 21327701 NR Description: TBP-associated factor 15 isoform 1
  misc_feature (82)..(252): Homolog of NCBI NO: 4507353 NR Description: TBP-associated factor 15 isoform 2
  misc_feature (82)..(252): Homolog of NCBI NO: 28279785 NR Description: Similar to TAF15 RNA polymerase II, TATA box
MRGRHHLLGFLRRAAAGSFSAARHADSLSLLHPIPPGNGAAVPISTRFLSSRTGGAARSLIEDEADLSDWVSDIKADSFNLGLSSGDEREASTRKPAASRGGRRGRDSGGPPTRSRFDGGEFGGERRGGDFGGDRRGGRFGGDSRGGRFGGDRRGGRFGSDSRGGRFGGDRPGSDRRGRVVSSDLSDDGESGFGSARGRRGRGGMSSGVSHRGGRYGDLDDEESGIGSPRGRRGRGGRTTDLSGRGRRGSDGRLHRRIQGPGPRRHPVGRRLLRRLRPGGPGAQPRVRRRRRDAVPRRCARRLRCRLPLRRRSPLKRLPPSSPSTYLVQPHIDPFIYH

SEQ ID NO: 66230 - DNA, 1448 bp, Triticum aestivum
  misc_feature (1)..(1448): Ceres Seq. ID no. 13657914
gtttgaccggcacacggtacagggctagaagaacggcggcaagcacggagccatttttttctcgtttatttactacggcggggagcacagggctatcgggagcatctcctccgcgcactccccgccgtgtcccattcgccgatgcttcgccgtcgcccatattcatcttccaagaagctcactcctccgctgccatagccgcccgccgcgccatccttgattccttgccgcatcgtttcgcccgtcagatggaccctgaatccgaggtcacgttcgagttcgtgccggtgatccggcagtacaggagcggccgcgtcgagcgcctgctccccgtagaccccgtcccgccctccgtcgacgccgccaccggagtcgcctcaagggacgtcgtcttcgacccggccaccggcgcgtgggcccgcctctacctccccgcgcgccctcccggcggcgcgggcgacaggctccccatcatggtgtacctccatggaggcggcctcgtcggcggctcggccgcggacgggcccgagcacgcgttcctcaaccgcctgtgcgcccgcgcgcgcgtcctggtcgtgtccgtcgagtaccgcctcgcgccggagcaccccgtcccggcctgctacgacgacgcgtgggccgcgctccggtgggccgccgagggcgccgacccgtggctccgggaccgcggcgaccgcggccggatgttcgtggtcgggtacagcgccggcggcaacgttgcccacaacgtggcgctccgcgcgggctcggaggccggcgcgctcccccgcggcgcccgggtcaggggcatcgggctcctgcacccatacttcctctcggccgagaaggccgacggcgagacggagcagtcgtggctgaggggcaagctggaggagctgtggccgttcgcgtgcggcggccgcaccgccgggctggacgacccgcgggtcaacccggtggccgacggggcgccgagcttgcggcggctcggttgcgaccgcgtcctcgtctgcgtcgccgaggacgagctgcggctccggggcaaggcgtaccacgacggactgctggggagcgggtgggcggagggcgacgttgagctgctcgactccatcggcgaggaccaccagttcttcctccgggagcccccgagcgcgacggcgctggttctcatggaccggctggccgcgctcctcgccgccggcgcgaaccagcagtagaccagacgtcaggcgctggtactagtgtgtttggtgttgtactagtactctgttctactccgcgtgtatctggaattttagggtcccgataactgccacacgtgtggtgtatcgggtagttgtgccacacgcctcgtgtggcatggacagcaaccagcccacacacctacgtgtgagcaaaacaactaatgttcacacacatctttttccaaaaaaaaaaaaaaaaaagct

SEQ ID NO: 66231 - protein, 404 aa, Triticum aestivum
  peptide (1)..(404): Ceres Seq. ID no. 15219890
  misc_feature (142)..(200): Pfam Name: Carboxylesterase Pfam Description: Carboxylesterase
  misc_feature (87)..(397): Homolog of NCBI NO: 34393969 NR Description: putative PrMC3 [Oryza sativa (japonica
  misc_feature (86)..(397): Homolog of NCBI NO: 15222795 NR Description: expressed protein [Arabidopsis thaliana]
  misc_feature (86)..(400): Homolog of NCBI NO: 15228425 NR Description: expressed protein [Arabidopsis thaliana]
  misc_feature (86)..(400): Homolog of NCBI NO: 18086341 NR Description: AT3g48690/T8P19_200 [Arabidopsis thaliana]
  misc_feature (87)..(397): Homolog of NCBI NO: 34393975 NR Description: putative PrMC3 [Oryza sativa (japonica
  misc_feature (89)..(402): Homolog of NCBI NO: 34393323 NR Description: putative cell death associated protein
  misc_feature (86)..(397): Homolog of NCBI NO: 21536771 NR Description: unknown [Arabidopsis thaliana]
  misc_feature (86)..(397): Homolog of NCBI NO: 18401743 NR Description: expressed protein [Arabidopsis thaliana]
  misc_feature (88)..(397): Homolog of NCBI NO: 34393904 NR Description: putative cell death associated protein
  misc_feature (86)..(399): Homolog of NCBI NO: 38344841 NR Description: OSJNBa0064H22.22 [Oryza sativa (japonica
LTGTRYRARRTAASTEPFFSRLFTTAGSTGLSGASPPRTPRRVPFADASPSPIFIFQEAHSSAAIAARRAILDSLPHRFARQMDPESEVTFEFVPVIRQYRSGRVERLLPVDPVPPSVDAATGVASRDVVFDPATGAWARLYLPARPPGGAGDRLPIMVYLHGGGLVGGSAADGPEHAFLNRLCARARVLVVSVEYRLAPEHPVPACYDDAWAALRWAAEGADPWLRDRGDRGRMFVVGYSAGGNVAHNVALRAGSEAGALPRGARVRGIGLLHPYFLSAEKADGETEQSWLRGKLEELWPFACGGRTAGLDDPRVNPVADGAPSLRRLGCDRVLVCVAEDELRLRGKAYHDGLLGSGWAEGDVELLDSIGEDHQFFLREPPSATALVLMDRLAALLAAGANQQ

SEQ ID NO: 66232 - protein, 322 aa, Triticum aestivum
  peptide (1)..(322): Ceres Seq. ID no. 15219891
  misc_feature (60)..(118): Pfam Name: Carboxylesterase Pfam Description: Carboxylesterase
  misc_feature (5)..(315): Homolog of NCBI NO: 34393969 NR Description: putative PrMC3 [Oryza sativa (japonica
  misc_feature (4)..(315): Homolog of NCBI NO: 15222795 NR Description: expressed protein [Arabidopsis thaliana]
  misc_feature (4)..(318): Homolog of NCBI NO: 15228425 NR Description: expressed protein [Arabidopsis thaliana]
  misc_feature (4)..(318): Homolog of NCBI NO: 18086341 NR Description: AT3g48690/T8P19_200 [Arabidopsis thaliana]
  misc_feature (5)..(315): Homolog of NCBI NO: 34393975 NR Description: putative PrMC3 [Oryza sativa (japonica
  misc_feature (7)..(320): Homolog of NCBI NO: 34393323 NR Description: putative cell death associated protein
  misc_feature (4)..(315): Homolog of NCBI NO: 21536771 NR Description: unknown [Arabidopsis thaliana]
  misc_feature (4)..(315): Homolog of NCBI NO: 18401743 NR Description: expressed protein [Arabidopsis thaliana]
  misc_feature (6)..(315): Homolog of NCBI NO: 34393904 NR Description: putative cell death associated protein
  misc_feature (4)..(317): Homolog of NCBI NO: 38344841 NR Description: OSJNBa0064H22.22 [Oryza sativa (japonica
MDPESEVTFEFVPVIRQYRSGRVERLLPVDPVPPSVDAATGVASRDVVFDPATGAWARLYLPARPPGGAGDRLPIMVYLHGGGLVGGSAADGPEHAFLNRLCARARVLVVSVEYRLAPEHPVPACYDDAWAALRWAAEGADPWLRDRGDRGRMFVVGYSAGGNVAHNVALRAGSEAGALPRGARVRGIGLLHPYFLSAEKADGETEQSWLRGKLEELWPFACGGRTAGLDDPRVNPVADGAPSLRRLGCDRVLVCVAEDELRLRGKAYHDGLLGSGWAEGDVELLDSIGEDHQFFLREPPSATALVLMDRLAALLAAGANQQ

SEQ ID NO: 66233 - protein, 247 aa, Triticum aestivum
  peptide (1)..(247): Ceres Seq. ID no. 15219892
  misc_feature (1)..(43): Pfam Name: Carboxylesterase Pfam Description: Carboxylesterase
  misc_feature (1)..(240): Homolog of NCBI NO: 34393969 NR Description: putative PrMC3 [Oryza sativa (japonica
  misc_feature (1)..(240): Homolog of NCBI NO: 15222795 NR Description: expressed protein [Arabidopsis thaliana]
  misc_feature (1)..(243): Homolog of NCBI NO: 15228425 NR Description: expressed protein [Arabidopsis thaliana]
  misc_feature (1)..(243): Homolog of NCBI NO: 18086341 NR Description: AT3g48690/T8P19_200 [Arabidopsis thaliana]
  misc_feature (1)..(240): Homolog of NCBI NO: 34393975 NR Description: putative PrMC3 [Oryza sativa (japonica
  misc_feature (1)..(245): Homolog of NCBI NO: 34393323 NR Description: putative cell death associated protein
  misc_feature (1)..(240): Homolog of NCBI NO: 21536771 NR Description: unknown [Arabidopsis thaliana]
  misc_feature (1)..(240): Homolog of NCBI NO: 18401743 NR Description: expressed protein [Arabidopsis thaliana]
  misc_feature (1)..(240): Homolog of NCBI NO: 34393904 NR Description: putative cell death associated protein
  misc_feature (1)..(242): Homolog of NCBI NO: 38344841 NR Description: OSJNBa0064H22.22 [Oryza sativa (japonica
MVYLHGGGLVGGSAADGPEHAFLNRLCARARVLVVSVEYRLAPEHPVPACYDDAWAALRWAAEGADPWLRDRGDRGRMFVVGYSAGGNVAHNVALRAGSEAGALPRGARVRGIGLLHPYFLSAEKADGETEQSWLRGKLEELWPFACGGRTAGLDDPRVNPVADGAPSLRRLGCDRVLVCVAEDELRLRGKAYHDGLLGSGWAEGDVELLDSIGEDHQFFLREPPSATALVLMDRLAALLAAGANQQ

SEQ ID NO: 66234 - DNA, 1948 bp, Triticum aestivum
  misc_feature (1)..(1948): Ceres Seq. ID no. 14301490
atctctccctccttccccctctctctctctctctctctctgacgactctgacgacttgctagctagctcctccggctcaacggaagctagcgatcgccatagcctctgcgactgctgcacccgcacttgaacaagaagaagcagcagcagaagcagaattattagaggcgcaaaggcttgcgtgcggtctcaaggaaccccgaaaaaggccgagaagaaaagaagataaaaggtagttgagtagtcttgcacgcgtccatgggttgcggcttatcgacgccggacaacgacggcgggggcggcgcgcggaggaagcaggggagcgtgggggacgtcgtcgtcttcctcccggggctccgggcgcccatgggcgtggacttgtcccaggcgctcgcggggcgcctggacaagggcgccgtggagaggctgtcggccctgagagcgcgcgtcgtcgacatggcaatgcaagaatcggcggtggccctgaagcccaggcggaaggccgccgcacggcaaggatctagcactgccaatctcttgcaggcgctggaagactacttgccacttctgctaggattggtgaaagaaggtggtgagttgaggcacagcgtgcagtttgtgtggactaaccaagaggacaaggccgaggagacggccatggcggatgcatggtacgaggtgctgtccgtgctgcatttgatggccatggtctgcttgctgcaggccaactccctgctccttccaagggcttacggcgatggttacgggccacaggtctctgaagagagcagacgtgccactgtcgacgttttcttgaaagcatctggctacttggactgcgcaattcgacaagtgctcccacagataccatcagaactaaggagacaacttccagtagacctggctgaaggcaacctcaaagctcttagcctgcaagctctcggtcagggtgttgacatgcagcttgggctggcaatcgatagcccaaaggccacactagctgtaaaaaggcgcttagcttgtgagatggtcaaatattggcaccaggttcaggagagcattccagatcttcctgtgtccgacggatgggggaaaaaacatctactatttgtcaaatggaagtacgtcgaagcgaagtctgcagcatactacttccatggtttgattcttgacgaaggaaacagtgagaaatctcacggaatggcaatagcagcattggaagcttcggaggaatttctgaaagaaagcaaaagggcctctgaagttttccatgcaactcctccaacatctaggagccccactccatttggaacagctaagtatctgtttgacaagatcccgaaagaggcttcaagcaaggtccggatcaaccaggacctatataccccagaaagggtcattggagcaccacccccgttgccggatttctcgttggcactaacacctgaagactatgatcttcctccattagacccactttggaacaaagaagacggccaccagtaagtgtacattcagcattcagcaagagtgtcttctgatgggaaggctctggcgctactgagaaagcaacgaccaggattctgccatgcggaggccggacacgacgcaaaggaagtgtacaaagatatgttccgacaaaaaaaatttgatgtcggcaaactggaagcaaattttagaaaggcctgaagatatctgaagagcatttttacagttaaatcttctctgacaatggaaacacattgtcaaaagcttgctttccaacaattcctgtaaaaattatatttccaatgagcgccatggttcctttttcttaggattttctgaacatggcttagttttggggccattctgagcctattaatgtggtaaatttgccaaacatgatcctgatcttcattcaatgcttgagacagaagcagcaacgatgaaatttaaactactcaac

SEQ ID NO: 66235 - protein, 415 aa, Triticum aestivum
  peptide (1)..(415): Ceres Seq. ID no. 14301491
  misc_feature (1)..(405): Homolog of NCBI NO: 30684716 NR Description: expressed protein [Arabidopsis thaliana]
  misc_feature (1)..(402): Homolog of NCBI NO: 15220908 NR Description: hypothetical protein [Arabidopsis thaliana]
  misc_feature (1)..(402): Homolog of NCBI NO: 25372891 NR Description: protein F2H15.16 [imported] - Arabidopsis
  misc_feature (1)..(410): Homolog of NCBI NO: 15219459 NR Description: expressed protein [Arabidopsis thaliana]
  misc_feature (1)..(415): Homolog of NCBI NO: 38344447 NR Description: OSJNBa0038O10.19 [Oryza sativa (japonica
MGCGLSTPDNDGGGGARRKQGSVGDVVVFLPGLRAPMGVDLSQALAGRLDKGAVERLSALRARVVDMAMQESAVALKPRRKAAARQGSSTANLLQALEDYLPLLLGLVKEGGELRHSVQFVWTNQEDKAEETAMADAWYEVLSVLHLMAMVCLLQANSLLLPRAYGDGYGPQVSEESRRATVDVFLKASGYLDCAIRQVLPQIPSELRRQLPVDLAEGNLKALSLQALGQGVDMQLGLAIDSPKATLAVKRRLACEMVKYWHQVQESIPDLPVSDGWGKKHLLFVKWKYVEAKSAAYYFHGLILDEGNSEKSHGMAIAALEASEEFLKESKRASEVFHATPPTSRSPTPFGTAKYLFDKIPKEASSKVRINQDLYTPERVIGAPPPLPDFSLALTPEDYDLPPLDPLWNKEDGHQ

SEQ ID NO: 66236 - protein, 379 aa, Triticum aestivum
  peptide (1)..(379): Ceres Seq. ID no. 14301492
  misc_feature (1)..(369): Homolog of NCBI NO: 30684716 NR Description: expressed protein [Arabidopsis thaliana]
  misc_feature (1)..(366): Homolog of NCBI NO: 15220908 NR Description: hypothetical protein [Arabidopsis thaliana]
  misc_feature (1)..(366): Homolog of NCBI NO: 25372891 NR Description: protein F2H15.16 [imported] - Arabidopsis
  misc_feature (1)..(374): Homolog of NCBI NO: 15219459 NR Description: expressed protein [Arabidopsis thaliana]
  misc_feature (1)..(379): Homolog of NCBI NO: 38344447 NR Description: OSJNBa0038O10.19 [Oryza sativa (japonica
MGVDLSQALAGRLDKGAVERLSALRARVVDMAMQESAVALKPRRKAAARQGSSTANLLQALEDYLPLLLGLVKEGGELRHSVQFVWTNQEDKAEETAMADAWYEVLSVLHLMAMVCLLQANSLLLPRAYGDGYGPQVSEESRRATVDVFLKASGYLDCAIRQVLPQIPSELRRQLPVDLAEGNLKALSLQALGQGVDMQLGLAIDSPKATLAVKRRLACEMVKYWHQVQESIPDLPVSDGWGKKHLLFVKWKYVEAKSAAYYFHGLILDEGNSEKSHGMAIAALEASEEFLKESKRASEVFHATPPTSRSPTPFGTAKYLFDKIPKEASSKVRINQDLYTPERVIGAPPPLPDFSLALTPEDYDLPPLDPLWNKEDGHQ

SEQ ID NO: 66237 - protein, 349 aa, Triticum aestivum
  peptide (1)..(349): Ceres Seq. ID no. 14301493
  misc_feature (1)..(339): Homolog of NCBI NO: 30684716 NR Description: expressed protein [Arabidopsis thaliana]
  misc_feature (1)..(336): Homolog of NCBI NO: 15220908 NR Description: hypothetical protein [Arabidopsis thaliana]
  misc_feature (1)..(336): Homolog of NCBI NO: 25372891 NR Description: protein F2H15.16 [imported] - Arabidopsis
  misc_feature (1)..(344): Homolog of NCBI NO: 15219459 NR Description: expressed protein [Arabidopsis thaliana]
  misc_feature (1)..(349): Homolog of NCBI NO: 38344447 NR Description: OSJNBa0038O10.19 [Oryza sativa (japonica
MAMQESAVALKPRRKAAARQGSSTANLLQALEDYLPLLLGLVKEGGELRHSVQFVWTNQEDKAEETAMADAWYEVLSVLHLMAMVCLLQANSLLLPRAYGDGYGPQVSEESRRATVDVFLKASGYLDCAIRQVLPQIPSELRRQLPVDLAEGNLKALSLQALGQGVDMQLGLAIDSPKATLAVKRRLACEMVKYWHQVQESIPDLPVSDGWGKKHLLFVKWKYVEAKSAAYYFHGLILDEGNSEKSHGMAIAALEASEEFLKESKRASEVFHATPPTSRSPTPFGTAKYLFDKIPKEASSKVRINQDLYTPERVIGAPPPLPDFSLALTPEDYDLPPLDPLWNKEDGHQ

SEQ ID NO: 66238 - DNA, 1715 bp, Triticum aestivum
  misc_feature (1)..(1715): Ceres Seq. ID no. 12779893
atccatccatccctccccgcgatccgctcccgtccgcaggctccccctcctcctccgttcctcttcctccccctggccccggccgtctccgaccccgcgttgcttcttcttccctcactgctcgagtctggaaccagggaggagtatctagaggagagatggcggcggagagggtcaaggacgtcggcatcctcgccatggacatctacttcccgcccaactgcgtcctccaggaagaattggaagctcatgatggcgtgagcaaagggaagtacaccattgggcttgggcaggatagcatggccttttgcactgaagtggaggatgtcatttcaatgagcttgacagtggtgaagactctcctgaaaaattataacatcgatccaaagtgcattggtcgtttggaagttggcagtgaaactgtaatagacaagagcaagtctataaagacatggttgatgcaaatatttgaggagtgtggcaatactgatattgaaggagttgattcctcaaacgcatgttatggtggaacagctgctttgtttaattgtgttaattgggttgagagcaactcatgggatggacgttatgggctcgttgtttgcacagacagcgcggtttatgctgaagggccggctcgtcctactggcggtgcagctgctattgcaatgctgattggaccaaatgctcctatttcattggaaagcaaatttagagggtcacatatggcacatgtttatgacttttacaagcctgatcttgcgagcgaatatccggtggtcgatgggaagctgtcacagacatgctatctcatggcactggattcttgctacaagaccttttgcaaaaggtacgaaaagattgaagggaagccattttcaatcgtcgacgcagattcttttgtatttcattctccatacaacaagcttgtacagaaaagttttgctcgtttatactacaatgacttcttgagaagctgcagcattgttgacaaagactcgagagaaaaattggagccctactcgggcctgtcatccgaagaaagctatcagagtcgggaccttgagaaggtttgtcagcaagttgcgaagcctctgtatgataccaaggttcaaccaacaacattgatcccaaagcaactcgggaacatgtatacggcgtcactctatgctgcttttgcatcagttgtccacaataaacgcgatgctctggtgggccagaggatcgtcatgttctcttacggcagtggcatgacatcgacaatgttctccttcaaaatcaacgaatgccagcatccgttcagcctatcaaacattgcaaacatactggatatctccaacaagttggagtctaggcatgtggttccgccgaagaaattcgtcgaggcactgaagctgatggagcaccgctacggcgccaaggacttcgtcaccagccaggacacgcgcttgctcgtcccaggcacctactacctcacccttgtcgactccatgtaccgccggttctacgccgtgaaaggcgacgctgccgccactccggtaaccaatggccattgactgattgcccttgctcagcctgaagctgcaataagcgccgcaggcgctcttagattatttatctggcagggaaggggaagggaagggtggagcttgcccagattaatctctctgtaaacttgttctaagtttgtaaagttagatagtgctgccattgcc

SEQ ID NO: 66239 - protein, 517 aa, Triticum aestivum
  peptide (1)..(517): Ceres Seq. ID no. 12779894
  misc_feature (59)..(505): Pfam Name: Hydroxymethylglutaryl-coenzyme A synthase Pfam Description: Hydroxymethylglutaryl-coenzyme A synthase
  misc_feature (112)..(517): Homolog of NCBI NO: 30681902 NR Description: hydroxymethylglutaryl-CoA synthase [Arabidopsis
  misc_feature (55)..(505): Homolog of NCBI NO: 7436678 NR Description: hydroxymethylglutaryl-CoA synthase (EC 4.1.3.5),
  misc_feature (59)..(516): Homolog of NCBI NO: 11192007 NR Description: HMG-CoA synthase [Brassica juncea]
  misc_feature (59)..(517): Homolog of NCBI NO: 15234313 NR Description: hydroxymethylglutaryl-CoA synthase
  misc_feature (59)..(517): Homolog of NCBI NO: 1143390 NR Description: hydroxymethylglutaryl-CoA synthase [Arabidopsis
  misc_feature (59)..(517): Homolog of NCBI NO: 11192005 NR Description: HMG-CoA synthase [Brassica juncea]
  misc_feature (59)..(517): Homolog of NCBI NO: 11192003 NR Description: HMG-CoA synthase [Brassica juncea]
  misc_feature (59)..(516): Homolog of NCBI NO: 14916100 NR Description: hydroxymethylglutaryl coenzyme A synthase [Hevea
  misc_feature (59)..(517): Homolog of NCBI NO: 7799986 NR Description: HMG-CoA synthase [Brassica juncea]
  misc_feature (59)..(516): Homolog of NCBI NO: 16417956 NR Description: hydroxymethylglutaryl coenzyme A synthase [Hevea
PSIPPRDPLPSAGSPSSSVPLPPPGPGRLRPRVASSSLTARVWNQGGVSRGEMAAERVKDVGILAMDIYFPPNCVLQEELEAHDGVSKGKYTIGLGQDSMAFCTEVEDVISMSLTVVKTLLKNYNIDPKCIGRLEVGSETVIDKSKSIKTWLMQIFEECGNTDIEGVDSSNACYGGTAALFNCVNWVESNSWDGRYGLVVCTDSAVYAEGPARPTGGAAAIAMLIGPNAPISLESKFRGSHMAHVYDFYKPDLASEYPVVDGKLSQTCYLMALDSCYKTFCKRYEKIEGKPFSIVDADSFVFHSPYNKLVQKSFARLYYNDFLRSCSIVDKDSREKLEPYSGLSSEESYQSRDLEKVCQQVAKPLYDTKVQPTTLIPKQLGNMYTASLYAAFASVVHNKRDALVGQRIVMFSYGSGMTSTMFSFKINECQHPFSLSNIANILDISNKLESRHVVPPKKFVEALKLMEHRYGAKDFVTSQDTRLLVPGTYYLTLVDSMYRRFYAVKGDAAATPVTNGH

SEQ ID NO: 66240 - protein, 465 aa, Triticum aestivum
  peptide (1)..(465): Ceres Seq. ID no. 12779895
  misc_feature (7)..(453): Pfam Name: Hydroxymethylglutaryl-coenzyme A synthase Pfam Description: Hydroxymethylglutaryl-coenzyme A synthase
  misc_feature (60)..(465): Homolog of NCBI NO: 30681902 NR Description: hydroxymethylglutaryl-CoA synthase [Arabidopsis
  misc_feature (3)..(453): Homolog of NCBI NO: 7436678 NR Description: hydroxymethylglutaryl-CoA synthase (EC 4.1.3.5),
  misc_feature (7)..(464): Homolog of NCBI NO: 11192007 NR Description: HMG-CoA synthase [Brassica juncea]
  misc_feature (7)..(465): Homolog of NCBI NO: 15234313 NR Description: hydroxymethylglutaryl-CoA synthase
  misc_feature (7)..(465): Homolog of NCBI NO: 1143390 NR Description: hydroxymethylglutaryl-CoA synthase [Arabidopsis
  misc_feature (7)..(465): Homolog of NCBI NO: 11192005 NR Description: HMG-CoA synthase [Brassica juncea]
  misc_feature (7)..(465): Homolog of NCBI NO: 11192003 NR Description: HMG-CoA synthase [Brassica juncea]
  misc_feature (7)..(464): Homolog of NCBI NO: 14916100 NR Description: hydroxymethylglutaryl coenzyme A synthase [Hevea
  misc_feature (7)..(465): Homolog of NCBI NO: 7799986 NR Description: HMG-CoA synthase [Brassica juncea]
  misc_feature (7)..(464): Homolog of NCBI NO: 16417956 NR Description: hydroxymethylglutaryl coenzyme A synthase [Hevea
MAAERVKDVGILAMDIYFPPNCVLQEELEAHDGVSKGKYTIGLGQDSMAFCTEVEDVISMSLTVVKTLLKNYNIDPKCIGRLEVGSETVIDKSKSIKTWLMQIFEECGNTDIEGVDSSNACYGGTAALFNCVNWVESNSWDGRYGLVVCTDSAVYAEGPARPTGGAAAIAMLIGPNAPISLESKFRGSHMAHVYDFYKPDLASEYPVVDGKLSQTCYLMALDSCYKTFCKRYEKIEGKPFSIVDADSFVFHSPYNKLVQKSFARLYYNDFLRSCSIVDKDSREKLEPYSGLSSEESYQSRDLEKVCQQVAKPLYDTKVQPTTLIPKQLGNMYTASLYAAFASVVHNKRDALVGQRIVMFSYGSGMTSTMFSFKINECQHPFSLSNIANILDISNKLESRHVVPPKKFVEALKLMEHRYGAKDFVTSQDTRLLVPGTYYLTLVDSMYRRFYAVKGDAAATPVTNGH

SEQ ID NO: 66241 - protein, 452 aa, Triticum aestivum
  peptide (1)..(452): Ceres Seq. ID no. 12779896
  misc_feature (1)..(440): Pfam Name: Hydroxymethylglutaryl-coenzyme A synthase Pfam Description: Hydroxymethylglutaryl-coenzyme A synthase
  misc_feature (47)..(452): Homolog of NCBI NO: 30681902 NR Description: hydroxymethylglutaryl-CoA synthase [Arabidopsis
  misc_feature (1)..(440): Homolog of NCBI NO: 7436678 NR Description: hydroxymethylglutaryl-CoA synthase (EC 4.1.3.5),
  misc_feature (1)..(451): Homolog of NCBI NO: 11192007 NR Description: HMG-CoA synthase [Brassica juncea]
  misc_feature (1)..(452): Homolog of NCBI NO: 15234313 NR Description: hydroxymethylglutaryl-CoA synthase
  misc_feature (1)..(452): Homolog of NCBI NO: 1143390 NR Description: hydroxymethylglutaryl-CoA synthase [Arabidopsis
  misc_feature (1)..(452): Homolog of NCBI NO: 11192005 NR Description: HMG-CoA synthase [Brassica juncea]
  misc_feature (1)..(452): Homolog of NCBI NO: 11192003 NR Description: HMG-CoA synthase [Brassica juncea]
  misc_feature (1)..(451): Homolog of NCBI NO: 14916100 NR Description: hydroxymethylglutaryl coenzyme A synthase [Hevea
  misc_feature (1)..(452): Homolog of NCBI NO: 7799986 NR Description: HMG-CoA synthase [Brassica juncea]
  misc_feature (1)..(451): Homolog of NCBI NO: 16417956 NR Description: hydroxymethylglutaryl coenzyme A synthase [Hevea
MDIYFPPNCVLQEELEAHDGVSKGKYTIGLGQDSMAFCTEVEDVISMSLTVVKTLLKNYNIDPKCIGRLEVGSETVIDKSKSIKTWLMQIFEECGNTDIEGVDSSNACYGGTAALFNCVNWVESNSWDGRYGLVVCTDSAVYAEGPARPTGGAAAIAMLIGPNAPISLESKFRGSHMAHVYDFYKPDLASEYPVVDGKLSQTCYLMALDSCYKTFCKRYEKIEGKPFSIVDADSFVFHSPYNKLVQKSFARLYYNDFLRSCSIVDKDSREKLEPYSGLSSEESYQSRDLEKVCQQVAKPLYDTKVQPTTLIPKQLGNMYTASLYAAFASVVHNKRDALVGQRIVMFSYGSGMTSTMFSFKINECQHPFSLSNIANILDISNKLESRHVVPPKKFVEALKLMEHRYGAKDFVTSQDTRLLVPGTYYLTLVDSMYRRFYAVKGDAAATPVTNGH

SEQ ID NO: 66242 - DNA, 2088 bp, Triticum aestivum
  misc_feature (1)..(2088): Ceres Seq. ID no. 14302875
cctgccggaaacgaaacaccattcgtcgctccctcgcctcccatcagcgcgcactagtccttccctgcctcctcctcttctcgggcgcgcgccgcctctgccctgcctcggcaacgacagcaaacaccggctagccagccaagaaagaggcgccgacatggccatcccgctccaggcgaagaagcagcaggagaacggaagcaagggcggccaaggcagccacgtggacggcggcgacgacaacccttcggcggcggaggagctgcgggagctgtggcgcatggcggcgccgatcacagcgctcaactgcgtggtgtacctgcgcgccatggtgtccgtgctctgcctgggccgcctcggcccgcttgacctcgccggcggcgcgctcgcgatcgggctcaccaacatcactggccacagtgtgctcttcggcctcgcgtccgggttggagccgctctgcgcgcaggcctacggctcccgcaactacgacctgctcacgctctccctccaccgcgccgtgctgctgctcgccatcgccgccgtccccatcgcgctgctctggctcaacgtcggccccatcctggtcgcgctcggccaggacccagccatctccgcctccgccgccgcatacgccgcgtgggcgctcccggacctcgccgcgctggccgtgctccagccgctccgcgtctaccttaggtcccagggcatcaccaagcccatggccgcctgctccgccgccgccgtcgcgctgcacatcccgctcaactttctcctcgtcttccgcatgggcttcggcgtgcgcggcgtcgcggcagcgcaggcgctcacaaacacaaacatggtgctcttcctgctcgcctacgtccgctgggcgggtgcgtgcgacgacacgtggaggggcttcgcgcggcccgccgccgtagccagcgggctcggcggcctcgtccgcctcgccgtgcccagctgcatcggcgtctgcctcgagtggtggtggtacgaggtcgtcaccgtgctcgccggctaccttgccaaccccaccgccgccgtcggcgccgcgggagtcctcatccagacaaccagcctgatgtacaccgtgcccatggcgctcgccgcctgcgtctccacccgggtgggcaacgagctcggcgccgggaagccgcggcgtgcgcggatggcggcgacggtggcgctgtggtgcgcagcgggcgtgggcctcgcgcacgtggcgtggacggcggccttcagcgcgcagtgggtgtcgctcttcacccgggagccgtcggtggtgctgctggcgtcggcggcgatgccgctgctggggctgtgcgagctgggcaactgcccgcagaccacggggtgcggcgtgctgcgcggcacagccaggcccgccgtgggcgcccgcatcaacctgctctccttctacctcgtcggcacgcccgtggcggtgctgctggcgttcgggcacgggccgctgtccgggttccgcgggctgtggtacgggctgctgtccgcgcaggccgcctgcgtggctctggtgctggtcgccgtcgtgtggcgcaccgactggcgcgtcgaggccatgcgcgcgcggaagctgaccggcaccggcgcggacacgacggcgacggccaccgagggggaggagcaggaggagatgaggcgcctcgtggccggcaacggcctggaggcggacgtcgacgtgtagcgagccgttcctttcggtggaaccacctagtttagctctacgtgcggtgcatcgcggtgacatgctaaaattaagccagactagccattccactcgtagggcaggcatagcatattgcagcaccgagtagctggctagctttagttattgtggtgagccacacagctcacagatttgctgctgcatgcatgcttgcagctgggcctaagcggtggtgtgttcgcattgaagtagtacggttgctgcttggagaaatgggctagctagctagcaagctaatcaagctagagatcttgatcgagctaagcaagttcattccaagttacacgcacttcattttctgtatgggctaaacaagttcattagcgcttgattttgggatt

SEQ ID NO: 66243 - protein, 567 aa, Triticum aestivum
  peptide (1)..(567): Ceres Seq. ID no. 14302876
  misc_feature (320)..(482): Pfam Name: MatE Pfam Description: MatE
  misc_feature (71)..(538): Homolog of NCBI NO: 15235905 NR Description: MATE efflux protein - related [Arabidopsis
  misc_feature (84)..(533): Homolog of NCBI NO: 15233459 NR Description: MATE efflux protein - related [Arabidopsis
  misc_feature (82)..(534): Homolog of NCBI NO: 15239797 NR Description: MATE efflux protein - related [Arabidopsis
  misc_feature (86)..(533): Homolog of NCBI NO: 18406257 NR Description: MATE efflux protein - related [Arabidopsis
  misc_feature (87)..(552): Homolog of NCBI NO: 15241158 NR Description: MATE efflux protein - related [Arabidopsis
  misc_feature (85)..(549): Homolog of NCBI NO: 20532318 NR Description: Putative membrane protein
  misc_feature (83)..(562): Homolog of NCBI NO: 37536202 NR Description: putative membrane protein
  misc_feature (83)..(566): Homolog of NCBI NO: 38567909 NR Description: OSJNBa0088I22.5 [Oryza sativa (japonica
  misc_feature (82)..(533): Homolog of NCBI NO: 15217599 NR Description: MATE efflux protein - related [Arabidopsis
  misc_feature (53)..(567): Homolog of NCBI NO: 28376699 NR Description: putative MATE efflux membrane protein
LPETKHHSSLPRLPSARTSPSLPPPLLGRAPPLPCLGNDSKHRLASQERGADMAIPLQAKKQQENGSKGGQGSHVDGGDDNPSAAEELRELWRMAAPITALNCVVYLRAMVSVLCLGRLGPLDLAGGALAIGLTNITGHSVLFGLASGLEPLCAQAYGSRNYDLLTLSLHRAVLLLAIAAVPIALLWLNVGPILVALGQDPAISASAAAYAAWALPDLAALAVLQPLRVYLRSQGITKPMAACSAAAVALHIPLNFLLVFRMGFGVRGVAAAQALTNTNMVLFLLAYVRWAGACDDTWRGFARPAAVASGLGGLVRLAVPSCIGVCLEWWWYEVVTVLAGYLANPTAAVGAAGVLIQTTSLMYTVPMALAACVSTRVGNELGAGKPRRARMAATVALWCAAGVGLAHVAWTAAFSAQWVSLFTREPSVVLLASAAMPLLGLCELGNCPQTTGCGVLRGTARPAVGARINLLSFYLVGTPVAVLLAFGHGPLSGFRGLWYGLLSAQAACVALVLVAVVWRTDWRVEAMRARKLTGTGADTTATATEGEEQEEMRRLVAGNGLEADVDV

SEQ ID NO: 66244 - protein, 515 aa, Triticum aestivum
  peptide (1)..(515): Ceres Seq. ID no. 14302877
  misc_feature (268)..(430): Pfam Name: MatE Pfam Description: MatE
  misc_feature (19)..(486): Homolog of NCBI NO: 15235905 NR Description: MATE efflux protein - related [Arabidopsis
  misc_feature (32)..(481): Homolog of NCBI NO: 15233459 NR Description: MATE efflux protein - related [Arabidopsis
  misc_feature (30)..(482): Homolog of NCBI NO: 15239797 NR Description: MATE efflux protein - related [Arabidopsis
  misc_feature (34)..(481): Homolog of NCBI NO: 18406257 NR Description: MATE efflux protein - related [Arabidopsis
  misc_feature (35)..(500): Homolog of NCBI NO: 15241158 NR Description: MATE efflux protein - related [Arabidopsis
  misc_feature (33)..(497): Homolog of NCBI NO: 20532318 NR Description: Putative membrane protein
  misc_feature (31)..(510): Homolog of NCBI NO: 37536202 NR Description: putative membrane protein
  misc_feature (31)..(514): Homolog of NCBI NO: 38567909 NR Description: OSJNBa0088I22.5 [Oryza sativa (japonica
  misc_feature (30)..(481): Homolog of NCBI NO: 15217599 NR Description: MATE efflux protein - related [Arabidopsis
  misc_feature (1)..(515): Homolog of NCBI NO: 28376699 NR Description: putative MATE efflux membrane protein
MAIPLQAKKQQENGSKGGQGSHVDGGDDNPSAAEELRELWRMAAPITALNCVVYLRAMVSVLCLGRLGPLDLAGGALAIGLTNITGHSVLFGLASGLEPLCAQAYGSRNYDLLTLSLHRAVLLLAIAAVPIALLWLNVGPILVALGQDPAISASAAAYAAWALPDLAALAVLQPLRVYLRSQGITKPMAACSAAAVALHIPLNFLLVFRMGFGVRGVAAAQALTNTNMVLFLLAYVRWAGACDDTWRGFARPAAVASGLGGLVRLAVPSCIGVCLEWWWYEVVTVLAGYLANPTAAVGAAGVLIQTTSLMYTVPMALAACVSTRVGNELGAGKPRRARMAATVALWCAAGVGLAHVAWTAAFSAQWVSLFTREPSVVLLASAAMPLLGLCELGNCPQTTGCGVLRGTARPAVGARINLLSFYLVGTPVAVLLAFGHGPLSGFRGLWYGLLSAQAACVALVLVAVVWRTDWRVEAMRARKLTGTGADTTATATEGEEQEEMRRLVAGNGLEADVDV

SEQ ID NO: 66245 - protein, 474 aa, Triticum aestivum
  peptide (1)..(474): Ceres Seq. ID no. 14302878
  misc_feature (227)..(389): Pfam Name: MatE Pfam Description: MatE
  misc_feature (1)..(445): Homolog of NCBI NO: 15235905 NR Description: MATE efflux protein - related [Arabidopsis
  misc_feature (1)..(440): Homolog of NCBI NO: 15233459 NR Description: MATE efflux protein - related [Arabidopsis
  misc_feature (1)..(441): Homolog of NCBI NO: 15239797 NR Description: MATE efflux protein - related [Arabidopsis
  misc_feature (1)..(440): Homolog of NCBI NO: 18406257 NR Description: MATE efflux protein - related [Arabidopsis
  misc_feature (1)..(459): Homolog of NCBI NO: 15241158 NR Description: MATE efflux protein - related [Arabidopsis
  misc_feature (1)..(456): Homolog of NCBI NO: 20532318 NR Description: Putative membrane protein
  misc_feature (1)..(469): Homolog of NCBI NO: 37536202 NR Description: putative membrane protein
  misc_feature (1)..(473): Homolog of NCBI NO: 38567909 NR Description: OSJNBa0088I22.5 [Oryza sativa (japonica
  misc_feature (1)..(440): Homolog of NCBI NO: 15217599 NR Description: MATE efflux protein - related [Arabidopsis
  misc_feature (1)..(474): Homolog of NCBI NO: 28376699 NR Description: putative MATE efflux membrane protein
MAAPITALNCVVYLRAMVSVLCLGRLGPLDLAGGALAIGLTNITGHSVLFGLASGLEPLCAQAYGSRNYDLLTLSLHRAVLLLAIAAVPIALLWLNVGPILVALGQDPAISASAAAYAAWALPDLAALAVLQPLRVYLRSQGITKPMAACSAAAVALHIPLNFLLVFRMGFGVRGVAAAQALTNTNMVLFLLAYVRWAGACDDTWRGFARPAAVASGLGGLVRLAVPSCIGVCLEWWWYEVVTVLAGYLANPTAAVGAAGVLIQTTSLMYTVPMALAACVSTRVGNELGAGKPRRARMAATVALWCAAGVGLAHVAWTAAFSAQWVSLFTREPSVVLLASAAMPLLGLCELGNCPQTTGCGVLRGTARPAVGARINLLSFYLVGTPVAVLLAFGHGPLSGFRGLWYGLLSAQAACVALVLVAVVWRTDWRVEAMRARKLTGTGADTTATATEGEEQEEMRRLVAGNGLEADVDV

SEQ ID NO: 66246 - DNA, 1487 bp, Triticum aestivum
  misc_feature (1)..(1487): Ceres Seq. ID no. 14301542
ccaccagggcttccgcggcaaccagcagaacaccgccaagccctcggtcgacatccagcccgactggaccatcctcgagcagatccccttcgccaacttcaccaagctctccttcgccgtcgccgaccagcccgaggacctgctcgtctgcggcgccgtcgactcgtacgaccgcgcctacgaccgcgtcaaccccaagacggcccgccgcctcgagcgcttcaagaaccgccagttcttcaagatcaccaccaccgacgaccccatcatccgccgcctcgccgaggaggacaaggccaccgtcttcgccaccgacgccatcctcgccgccctcatgtgcacgccccgcagcatcctctcctgggacattgtcgtgcagcgcgtcggcaacaagctcttcttcgacaagcgcgagggctcccagctcgatctgctcactgtcaacgagactgcgcaggagcagctccctgagaacaaggatgacatcaattccgcgccggcccttgctgtcgaggccacctacatcaaccagaacttctcgcagcaggtgctggtgcgtgatggcgagaaggttacctttgatgagcctaacccgtttgcctctgagaatgaggaggcggcgcctgtttgctaccgttatcgccgctggaagctggatgatgatattagcatcattgcccgctgtgaagtgcatgctgctggtgttgatcccagtggtgctcgccagttcctcacgcttaatgcactcaatgagtttgatcctaagattactggtgttgactggaagcagaagctcgagtcccagcgtggtgctgtgcttgctacagagctcaagaacaatgccaacaagctcgctcgctggactgcccaggctttactttctggtgctgacatgatgaagttgggttatgtgtcacgtgtgcacccccgcgaccacttcaaccactccatactcactgtgatgggctacaagccaagggattttgctacccagatcaacctcaacactgcaaacatgtggggcattgtcaagtcgattgtggacatctgcatgaagtttgaagagggaaagtatgtgcttgtgaaagatcctgccaagccacagatgaggatttatcaggttcctaatgatgcatttgagaatgattatgttgaagagccacttccagaggaggagcagattcgtccggctacagatgatgtcgatgctactgcacaggagatggatgctgctgccgaggcagaggctaataaagcaactactcagggtggtgagggtgagaagagtgcagatgctgctgctgcttgaagggtataatgggccatctttgctttatctagataatgtgtcttttctgttttatgacctgtttttgtggattaaagagttgaactgccttgtcttgatacagtggtcttgttttggtccatgagaaaacttggtactcttaaatttcatgcttagatgtgctaagcttagcacctac

SEQ ID NO: 66247 - protein, 435 aa, Triticum aestivum
  peptide (1)..(435): Ceres Seq. ID no. 14301543
  misc_feature (13)..(392): Pfam Name: Eukaryotic translation initiation factor 3 Pfam Description: Eukaryotic translation initiation factor 3
  misc_feature (15)..(393): Homolog of NCBI NO: 38174024 NR Description: Unknown (protein for MGC:75703) [Silurana
  misc_feature (15)..(400): Homolog of NCBI NO: 31418925 NR Description: Unknown (protein for MGC:64097) [Danio rerio]
  misc_feature (9)..(393): Homolog of NCBI NO: 34866902 NR Description: similar to eukaryotic translation initiation
  misc_feature (15)..(394): Homolog of NCBI NO: 27882463 NR Description: Similar to eukaryotic translation initiation
  misc_feature (9)..(393): Homolog of NCBI NO: 4503523 NR Description: eukaryotic translation initiation factor 3
  misc_feature (3)..(430): Homolog of NCBI NO: 31207329 NR Description: ENSANGP00000015368 [Anopheles gambiae]
  misc_feature (13)..(406): Homolog of NCBI NO: 15241470 NR Description: eukaryotic translation initiation factor 3
  misc_feature (13)..(419): Homolog of NCBI NO: 17528988 NR Description: putative translation initiation factor eIF3
  misc_feature (13)..(419): Homolog of NCBI NO: 15233469 NR Description: translation initiation factor eIF3 - like protein
  misc_feature (13)..(419): Homolog of NCBI NO: 12407755 NR Description: initiation factor 3d [Arabidopsis thaliana]
HQGFRGNQQNTAKPSVDIQPDWTILEQIPFANFTKLSFAVADQPEDLLVCGAVDSYDRAYDRVNPKTARRLERFKNRQFFKITTTDDPIIRRLAEEDKATVFATDAILAALMCTPRSILSWDIVVQRVGNKLFFDKREGSQLDLLTVNETAQEQLPENKDDINSAPALAVEATYINQNFSQQVLVRDGEKVTFDEPNPFASENEEAAPVCYRYRRWKLDDDISIIARCEVHAAGVDPSGARQFLTLNALNEFDPKITGVDWKQKLESQRGAVLATELKNNANKLARWTAQALLSGADMMKLGYVSRVHPRDHFNHSILTVMGYKPRDFATQINLNTANMWGIVKSIVDICMKFEEGKYVLVKDPAKPQMRIYQVPNDAFENDYVEEPLPEEEQIRPATDDVDATAQEMDAAAEAEANKATTQGGEGEKSADAAAA

SEQ ID NO: 66248 - protein, 324 aa, Triticum aestivum
  peptide (1)..(324): Ceres Seq. ID no. 14301544
  misc_feature (1)..(281): Pfam Name: Eukaryotic translation initiation factor 3 Pfam Description: Eukaryotic translation initiation factor 3
  misc_feature (1)..(282): Homolog of NCBI NO: 38174024 NR Description: Unknown (protein for MGC:75703) [Silurana
  misc_feature (1)..(289): Homolog of NCBI NO: 31418925 NR Description: Unknown (protein for MGC:64097) [Danio rerio]
  misc_feature (1)..(282): Homolog of NCBI NO: 34866902 NR Description: similar to eukaryotic translation initiation
  misc_feature (1)..(283): Homolog of NCBI NO: 27882463 NR Description: Similar to eukaryotic translation initiation
  misc_feature (1)..(282): Homolog of NCBI NO: 4503523 NR Description: eukaryotic translation initiation factor 3
  misc_feature (1)..(319): Homolog of NCBI NO: 31207329 NR Description: ENSANGP00000015368 [Anopheles gambiae]
  misc_feature (1)..(295): Homolog of NCBI NO: 15241470 NR Description: eukaryotic translation initiation factor 3
  misc_feature (1)..(308): Homolog of NCBI NO: 17528988 NR Description: putative translation initiation factor eIF3
  misc_feature (1)..(308): Homolog of NCBI NO: 15233469 NR Description: translation initiation factor eIF3 - like protein
  misc_feature (1)..(308): Homolog of NCBI NO: 12407755 NR Description: initiation factor 3d [Arabidopsis thaliana]
MCTPRSILSWDIVVQRVGNKLFFDKREGSQLDLLTVNETAQEQLPENKDDINSAPALAVEATYINQNFSQQVLVRDGEKVTFDEPNPFASENEEAAPVCYRYRRWKLDDDISIIARCEVHAAGVDPSGARQFLTLNALNEFDPKITGVDWKQKLESQRGAVLATELKNNANKLARWTAQALLSGADMMKLGYVSRVHPRDHFNHSILTVMGYKPRDFATQINLNTANMWGIVKSIVDICMKFEEGKYVLVKDPAKPQMRIYQVPNDAFENDYVEEPLPEEEQIRPATDDVDATAQEMDAAAEAEANKATTQGGEGEKSADAAAA

SEQ ID NO: 66249 - protein, 297 aa, Triticum aestivum
  peptide (1)..(297): Ceres Seq. ID no. 14301545
  misc_feature (4)..(179): Pfam Name: Equine herpesvirus glycoprotein gp2 Pfam Description: Equine herpesvirus glycoprotein gp2
  misc_feature (3)..(181): Homolog of NCBI NO: 13592175 NR Description: ppg3 [Leishmania major]
  misc_feature (3)..(181): Homolog of NCBI NO: 11359723 NR Description: proteophosphoglycan, membrane-associated
  misc_feature (3)..(176): Homolog of NCBI NO: 13592175 NR Description: ppg3 [Leishmania major]
  misc_feature (3)..(181): Homolog of NCBI NO: 13592175 NR Description: ppg3 [Leishmania major]
  misc_feature (3)..(181): Homolog of NCBI NO: 5420387 NR Description: proteophosphoglycan [Leishmania major]
  misc_feature (3)..(179): Homolog of NCBI NO: 11359723 NR Description: proteophosphoglycan, membrane-associated
  misc_feature (3)..(181): Homolog of NCBI NO: 11359723 NR Description: proteophosphoglycan, membrane-associated
  misc_feature (4)..(181): Homolog of NCBI NO: 11359723 NR Description: proteophosphoglycan, membrane-associated
  misc_feature (3)..(181): Homolog of NCBI NO: 5420387 NR Description: proteophosphoglycan [Leishmania major]
  misc_feature (3)..(181): Homolog of NCBI NO: 11359723 NR Description: proteophosphoglycan, membrane-associated
TRASAATSRTPPSPRSTSSPTGPSSSRSPSPTSPSSPSPSPTSPRTCSSAAPSTRTTAPTTASTPRRPAASSASRTASSSRSPPPTTPSSAASPRRTRPPSSPPTPSSPPSCARPAASSPGTLSCSASATSSSSTSARAPSSICSLSTRLRRSSSLRTRMTSIPRRPLLSRPPTSTRTSRSRCWCVMARRLPLMSLTRLPLRMRRRRLFATVIAAGSWMMILASLPAVKCMLLVLIPVVLASSSRLMHSMSLILRLLVLTGSRSSSPSVVLCLLQSSRTMPTSSLAGLPRLYFLVLT

SEQ ID NO: 66250 - DNA, 1592 bp, Triticum aestivum
  misc_feature (1)..(1592): Ceres Seq. ID no. 15179824
accaatcatttcctcttcactctcgctcctccttttctgccttgcaaccaaagccccatcccttgattcgatcgatcgttcgggatcctcctctcgcgcgcttctaggacctgtccctcgaagcttcttcttcttctccttggacttgtgcttggtatggcgcagacgaccgtggtggtgccggaggtgggcatgactgcggccgcgcccacggcgtgctcctgccctggttcgctgttcccctacccgccgccgcgtgccgggatggccgtgagccgcaagtgcctgcgggcggcgcaggcggagcttggcgccgggatgctcagtggcctggtcgagtccatgcgggcgtcctcccccacgcacgccagggccgccgccgccctctccgccggcgtcgacgacgagcacgccgcctggatggcgaggcacccgtccgccctgggaaagttcgaggagatcgtggccgcgtccaaggggaagcagatcgtcatgttcctggactacgacggcacgctgtcccccatcgtcgatgaccccgacgccgccttcatgagcgagacgatgcggatggcagtgcgcagcgtggccaagcacttcccgacggcgatcgtcagcggtcggtgccgcgacaaggtgtttgatttcgtgaagctggcggagctctactacgccggcagccacggcatggacatcaagggcccggccaaatcctcaaagtccaaggccaaaggagttctcttccaaccggcaagcgagttcctgcccatgatagaagaggtgcatcaacggctgatagaggagacgaagcacgtagccggggccaaggtggagaacaacaagttctgcgtgtcagttcacttcagatgcgtcgacgaaaagagctggggcgcgctggcggagacggtgaagggcgtgatgcgggagtaccccaagctgcgcatgtcgcaggggcggatggtgttcgaggtgcggcccaccatcaagtgggacaagggcaaggccctcgagttcctgctcgagtcgctgggcttcgccgactgccccaacgtgctgcccgtctacatcggcgacgaccgcaccgacgaggacgccttcaaggtgctgcgccggcggggccagggcgtcgggatcctcgtctccaagcaccccaaggacaccagcgcctccttctcgctgcaggagccggccgaggtcatggagttcctgctccgcctcgtcgagtggaagcagctctccaaggcgcgcctcaggctgcggcgacaggccgacgcctgatcggacgacaaggatcggccggccggcgccggcgggctggactaattatttcactgctacgtgtagcttagctagttaatgaatcccctgctcgtccgaacaaagccaaaggctacgtacgtggatgggaagaaggaacgtactatggcgaacctgtggctgtggagcattgttgcgccacatgttgtcttctaattaaccgcccttctttttgtggggatgtataccgtacctaccgattatgcatgcatgtaaattacctttgtccacgtacaaggggaggaaccatggaataaagaaagagaaacatgagc

SEQ ID NO: 66251 - protein, 373 aa, Triticum aestivum
  peptide (1)..(373): Ceres Seq. ID no. 15179825
  misc_feature (114)..(344): Pfam Name: Trehalose-phosphatase Pfam Description: Trehalose-phosphatase
  misc_feature (13)..(358): Homolog of NCBI NO: 33146623 NR Description: putative trehalose-6-phosphate phosphatase
  misc_feature (42)..(359): Homolog of NCBI NO: 25354595 NR Description: trehalose-phosphatase (EC 3.1.3.12) B
  misc_feature (42)..(359): Homolog of NCBI NO: 15218205 NR Description: trehalose-6-phosphate phosphatase (TPPB)
  misc_feature (2)..(364): Homolog of NCBI NO: 11282598 NR Description: trehalose-6-phosphate phosphatase-like protein -
  misc_feature (31)..(355): Homolog of NCBI NO: 15238360 NR Description: trehalose-6-phosphate phosphatase, putative
  misc_feature (41)..(360): Homolog of NCBI NO: 30692524 NR Description: trehalose-6-phosphate phosphatase, putative
  misc_feature (33)..(361): Homolog of NCBI NO: 25354597 NR Description: probable trehalose-phosphatase [imported] -
  misc_feature (2)..(360): Homolog of NCBI NO: 30683008 NR Description: trehalose-6-phosphate phosphatase, putative
  misc_feature (33)..(361): Homolog of NCBI NO: 21554408 NR Description: trehalose-phosphatase, putative [Arabidopsis
  misc_feature (33)..(361): Homolog of NCBI NO: 18399940 NR Description: trehalose-6-phosphate phosphatase, putative
MAQTTVVVPEVGMTAAAPTACSCPGSLFPYPPPRAGMAVSRKCLRAAQAELGAGMLSGLVESMRASSPTHARAAAALSAGVDDEHAAWMARHPSALGKFEEIVAASKGKQIVMFLDYDGTLSPIVDDPDAAFMSETMRMAVRSVAKHFPTAIVSGRCRDKVFDFVKLAELYYAGSHGMDIKGPAKSSKSKAKGVLFQPASEFLPMIEEVHQRLIEETKHVAGAKVENNKFCVSVHFRCVDEKSWGALAETVKGVMREYPKLRMSQGRMVFEVRPTIKWDKGKALEFLLESLGFADCPNVLPVYIGDDRTDEDAFKVLRRRGQGVGILVSKHPKDTSASFSLQEPAEVMEFLLRLVEWKQLSKARLRLRRQADA

SEQ ID NO: 66252 - protein, 361 aa, Triticum aestivum
  peptide (1)..(361): Ceres Seq. ID no. 15179826
  misc_feature (102)..(332): Pfam Name: Trehalose-phosphatase Pfam Description: Trehalose-phosphatase
  misc_feature (1)..(346): Homolog of NCBI NO: 33146623 NR Description: putative trehalose-6-phosphate phosphatase
  misc_feature (30)..(347): Homolog of NCBI NO: 25354595 NR Description: trehalose-phosphatase (EC 3.1.3.12) B
  misc_feature (30)..(347): Homolog of NCBI NO: 15218205 NR Description: trehalose-6-phosphate phosphatase (TPPB)
  misc_feature (1)..(352): Homolog of NCBI NO: 11282598 NR Description: trehalose-6-phosphate phosphatase-like protein -
  misc_feature (19)..(343): Homolog of NCBI NO: 15238360 NR Description: trehalose-6-phosphate phosphatase, putative
  misc_feature (29)..(348): Homolog of NCBI NO: 30692524 NR Description: trehalose-6-phosphate phosphatase, putative
  misc_feature (21)..(349): Homolog of NCBI NO: 25354597 NR Description: probable trehalose-phosphatase [imported] -
  misc_feature (1)..(348): Homolog of NCBI NO: 30683008 NR Description: trehalose-6-phosphate phosphatase, putative
  misc_feature (21)..(349): Homolog of NCBI NO: 21554408 NR Description: trehalose-phosphatase, putative [Arabidopsis
  misc_feature (21)..(349): Homolog of NCBI NO: 18399940 NR Description: trehalose-6-phosphate phosphatase, putative
MTAAAPTACSCPGSLFPYPPPRAGMAVSRKCLRAAQAELGAGMLSGLVESMRASSPTHARAAAALSAGVDDEHAAWMARHPSALGKFEEIVAASKGKQIVMFLDYDGTLSPIVDDPDAAFMSETMRMAVRSVAKHFPTAIVSGRCRDKVFDFVKLAELYYAGSHGMDIKGPAKSSKSKAKGVLFQPASEFLPMIEEVHQRLIEETKHVAGAKVENNKFCVSVHFRCVDEKSWGALAETVKGVMREYPKLRMSQGRMVFEVRPTIKWDKGKALEFLLESLGFADCPNVLPVYIGDDRTDEDAFKVLRRRGQGVGILVSKHPKDTSASFSLQEPAEVMEFLLRLVEWKQLSKARLRLRRQADA

SEQ ID NO: 66253 - protein, 337 aa, Triticum aestivum
  peptide (1)..(337): Ceres Seq. ID no. 15179827
  misc_feature (78)..(308): Pfam Name: Trehalose-phosphatase Pfam Description: Trehalose-phosphatase
  misc_feature (1)..(322): Homolog of NCBI NO: 33146623 NR Description: putative trehalose-6-phosphate phosphatase
  misc_feature (6)..(323): Homolog of NCBI NO: 25354595 NR Description: trehalose-phosphatase (EC 3.1.3.12) B
  misc_feature (6)..(323): Homolog of NCBI NO: 15218205 NR Description: trehalose-6-phosphate phosphatase (TPPB)
  misc_feature (1)..(328): Homolog of NCBI NO: 11282598 NR Description: trehalose-6-phosphate phosphatase-like protein -
  misc_feature (1)..(319): Homolog of NCBI NO: 15238360 NR Description: trehalose-6-phosphate phosphatase, putative
  misc_feature (5)..(324): Homolog of NCBI NO: 30692524 NR Description: trehalose-6-phosphate phosphatase, putative
  misc_feature (1)..(325): Homolog of NCBI NO: 25354597 NR Description: probable trehalose-phosphatase [imported] -
  misc_feature (1)..(324): Homolog of NCBI NO: 30683008 NR Description: trehalose-6-phosphate phosphatase, putative
  misc_feature (1)..(325): Homolog of NCBI NO: 21554408 NR Description: trehalose-phosphatase, putative [Arabidopsis
  misc_feature (1)..(325): Homolog of NCBI NO: 18399940 NR Description: trehalose-6-phosphate phosphatase, putative
MAVSRKCLRAAQAELGAGMLSGLVESMRASSPTHARAAAALSAGVDDEHAAWMARHPSALGKFEEIVAASKGKQIVMFLDYDGTLSPIVDDPDAAFMSETMRMAVRSVAKHFPTAIVSGRCRDKVFDFVKLAELYYAGSHGMDIKGPAKSSKSKAKGVLFQPASEFLPMIEEVHQRLIEETKHVAGAKVENNKFCVSVHFRCVDEKSWGALAETVKGVMREYPKLRMSQGRMVFEVRPTIKWDKGKALEFLLESLGFADCPNVLPVYIGDDRTDEDAFKVLRRRGQGVGILVSKHPKDTSASFSLQEPAEVMEFLLRLVEWKQLSKARLRLRRQADA

SEQ ID NO: 66254 - DNA, 2581 bp, Triticum aestivum
  misc_feature (1)..(2581): Ceres Seq. ID no. 14303684
aaaaatgatgcgcgaccccagtcctactctccccagttgttactcccagccagcagcaccgtccagggcccggccgcacgctacaactagaaccaaccccagccccggtgcagtgcacagccagtgtagctaggctctctcgcagcgagagcaggacgcaggacggctagctagctttgatcggccggccggatcggagtgctcgtgtgtcgggggccatggccggcgccgcgggcgacagggcggaaggtgtgggcggtggcggggactggccgccgttcgccggcgacgccttcgcggagtactcgtcgtcggtgttcgcggagctcggtggatggtcggatggccttggcgcgggcgccggggagctgccgccgctggatctgccggcggcgagcgcgtccgggccggtcccgatggcgcggtcggacgagatcatgccggccgcgtcaggcgagcccgcaggcgccgcctcctcctgctccagcggcgacggcgccgcagccgccgcggagaacgccgacaagccgcaggaggccgccgacgcagcgagcatgaagccggcggcggcggcagggaagaaggggcagaagcgggcgcggcagcagcggttcgccttcgtgaccaagagcgaagttgatcacctcgaggatgggtacagatggaggaagtatgggcagaaagccgtcaagaacagccctttcccaaggagctactaccggtgcaccaacagcaagtgcaccgtgaagaagcgggtggagcggtcgtcggaggacccctccgtggtgatcaccacctacgagggccagcactgccaccaccagacctccttccagcgcggcggcatgcacttccacggcgccgccaccgttgcgctcgccgagcagatgtcgttcgtgtcaactcagcagctgtacaacctgccgcccctgcgccgacaacagatgaatcctgcatcgtcggagtccgccgttagctccgtgccgccgtctttgcagcagctcaacggcggcgacgaactgcgaaggtcaactagctatagccccacggcgtccgcggtgcagacaccgtcgtcgtcgttggtgcctccggacgtttcctttgacatgggactgcttggcgacatcgtgcctccaggagtaagaaatggatgaagatctataatggtaattattttaagataataggtttataagcgagaacggctacggtgtggacgagctcgtgcgctcccgctaactggacgaacgactccatgacgcgtagcacagcgtatttactgctatggtgtgcattgacgtcgagtacaggtgctccaccgtccaaactaacccgaaagtagcggctcagcttcgtgttgttccgttggaacatgaatgtcggagtggcccataaccgaatgccgccgtcaactttcgctactgagatggcgtcctccgaaagggtacttgggtgcccaactctcaaaagtaaatgggtacccatgtttgggcccatggttgtctcagcgtcgctgaccagtaaaagaaatatatcttccttctcccatagccgcctacagagcaggagctcatggcgatgcagatgtcgacatagccgcctacagagcaggagctcatggcgatgcagatatcggccgctggaggtgttgaagtcgagtttttgtcagatcccgtcgacagatttccactgcgagatctcgctgccgcacagcccttggttgcttacgagatgtacaaatccatggagtgtgagcctgctgagtccagcattggtgatgtggagacgctccggtcaacagtaattgcaatgcgattgccttgtctgcagcagcatctgagcattctacgggcaaagacacccctgaagccccaggctggaggaagagaatgcgagtcggaagttcatctagcgagcgccacccatgcgctgacaggatgagtgctttggaagcaacactaagaagctatgcagagaaaaaaaatggcactgtcgtagttcctactatggggacaaaatttgattctcttgaagaagcctgctagaacatgttcctggatgtgcatggatgcagaaaatgtccttgggatatagagctggaaatctgggacttagggtgttctagagcatccatgccatccaagtgagaggagaatatcctttgtctttaggacatgcttgctgaacatgcaagttcgctagacgaaggatgggtataactgatgaagctttatgcagtctattggcacccatctcatacagagctattgccgagagcgcctttgcatctgacgtcgtgcgccagagttggtcataggggaccacacgcagcttgatcagctcgacatggtcccgcaggcccgtttccttcccttggagagcctaaggctggccatagtgggggtaacataacctgtaacatgcacttgggactagcaaatatgtttatgtggcacataattaaagaggagagagagggttagagtaacataggtagataccatatcatgttaaatgctatgctactttgtgtcatgcatggcaataaatatgatcatctatgatactactttatgttact

SEQ ID NO: 66255 - protein, 311 aa, Triticum aestivum
  peptide (1)..(311): Ceres Seq. ID no. 14303685
  misc_feature (143)..(201): Pfam Name: WRKY DNA -binding domain Pfam Description: WRKY DNA -binding domain
  misc_feature (84)..(200): Homolog of NCBI NO: 21536889 NR Description: putative WRKY-type DNA binding protein
  misc_feature (84)..(200): Homolog of NCBI NO: 15226550 NR Description: WRKY family transcription factor [Arabidopsis
  misc_feature (57)..(208): Homolog of NCBI NO: 25518132 NR Description: F1N18.10 protein - Arabidopsis thaliana
  misc_feature (57)..(208): Homolog of NCBI NO: 15220582 NR Description: WRKY family transcription factor [Arabidopsis
  misc_feature (64)..(310): Homolog of NCBI NO: 15239913 NR Description: WRKY family transcription factor [Arabidopsis
  misc_feature (39)..(224): Homolog of NCBI NO: 34910900 NR Description: P0003E08.17 [Oryza sativa (japonica
  misc_feature (41)..(209): Homolog of NCBI NO: 34912866 NR Description: putative DNA-binding protein homolog
  misc_feature (24)..(210): Homolog of NCBI NO: 15222282 NR Description: WRKY family transcription factor [Arabidopsis
  misc_feature (12)..(310): Homolog of NCBI NO: 34899462 NR Description: WRKY transcription factor-like protein
  misc_feature (15)..(311): Homolog of NCBI NO: 13236648 NR Description: putative DNA binding protein [Oryza sativa]
MAGAAGDRAEGVGGGGDWPPFAGDAFAEYSSSVFAELGGWSDGLGAGAGELPPLDLPAASASGPVPMARSDEIMPAASGEPAGAASSCSSGDGAAAAAENADKPQEAADAASMKPAAAAGKKGQKRARQQRFAFVTKSEVDHLEDGYRWRKYGQKAVKNSPFPRSYYRCTNSKCTVKKRVERSSEDPSVVITTYEGQHCHHQTSFQRGGMHFHGAATVALAEQMSFVSTQQLYNLPPLRRQQMNPASSESAVSSVPPSLQQLNGGDELRRSTSYSPTASAVQTPSSSLVPPDVSFDMGLLGDIVPPGVRNG

SEQ ID NO: 66256 - protein, 245 aa, Triticum aestivum
  peptide (1)..(245): Ceres Seq. ID no. 14303686
  misc_feature (77)..(135): Pfam Name: WRKY DNA -binding domain Pfam Description: WRKY DNA -binding domain
  misc_feature (18)..(134): Homolog of NCBI NO: 21536889 NR Description: putative WRKY-type DNA binding protein
  misc_feature (18)..(134): Homolog of NCBI NO: 15226550 NR Description: WRKY family transcription factor [Arabidopsis
  misc_feature (1)..(142): Homolog of NCBI NO: 25518132 NR Description: F1N18.10 protein - Arabidopsis thaliana
  misc_feature (1)..(142): Homolog of NCBI NO: 15220582 NR Description: WRKY family transcription factor [Arabidopsis
  misc_feature (1)..(244): Homolog of NCBI NO: 15239913 NR Description: WRKY family transcription factor [Arabidopsis
  misc_feature (1)..(158): Homolog of NCBI NO: 34910900 NR Description: P0003E08.17 [Oryza sativa (japonica
  misc_feature (1)..(143): Homolog of NCBI NO: 34912866 NR Description: putative DNA-binding protein homolog
  misc_feature (1)..(144): Homolog of NCBI NO: 15222282 NR Description: WRKY family transcription factor [Arabidopsis
  misc_feature (1)..(244): Homolog of NCBI NO: 34899462 NR Description: WRKY transcription factor-like protein
  misc_feature (1)..(245): Homolog of NCBI NO: 13236648 NR Description: putative DNA binding protein [Oryza sativa]
MARSDEIMPAASGEPAGAASSCSSGDGAAAAAENADKPQEAADAASMKPAAAAGKKGQKRARQQRFAFVTKSEVDHLEDGYRWRKYGQKAVKNSPFPRSYYRCTNSKCTVKKRVERSSEDPSVVITTYEGQHCHHQTSFQRGGMHFHGAATVALAEQMSFVSTQQLYNLPPLRRQQMNPASSESAVSSVPPSLQQLNGGDELRRSTSYSPTASAVQTPSSSLVPPDVSFDMGLLGDIVPPGVRNG

SEQ ID NO: 66257 - protein, 238 aa, Triticum aestivum
  peptide (1)..(238): Ceres Seq. ID no. 14303687
  misc_feature (70)..(128): Pfam Name: WRKY DNA -binding domain Pfam Description: WRKY DNA -binding domain
  misc_feature (11)..(127): Homolog of NCBI NO: 21536889 NR Description: putative WRKY-type DNA binding protein
  misc_feature (11)..(127): Homolog of NCBI NO: 15226550 NR Description: WRKY family transcription factor [Arabidopsis
  misc_feature (1)..(135): Homolog of NCBI NO: 25518132 NR Description: F1N18.10 protein - Arabidopsis thaliana
  misc_feature (1)..(135): Homolog of NCBI NO: 15220582 NR Description: WRKY family transcription factor [Arabidopsis
  misc_feature (1)..(237): Homolog of NCBI NO: 15239913 NR Description: WRKY family transcription factor [Arabidopsis
  misc_feature (1)..(151): Homolog of NCBI NO: 34910900 NR Description: P0003E08.17 [Oryza sativa (japonica
  misc_feature (1)..(136): Homolog of NCBI NO: 34912866 NR Description: putative DNA-binding protein homolog
  misc_feature (1)..(137): Homolog of NCBI NO: 15222282 NR Description: WRKY family transcription factor [Arabidopsis
  misc_feature (1)..(237): Homolog of NCBI NO: 34899462 NR Description: WRKY transcription factor-like protein
  misc_feature (1)..(238): Homolog of NCBI NO: 13236648 NR Description: putative DNA binding protein [Oryza sativa]
MPAASGEPAGAASSCSSGDGAAAAAENADKPQEAADAASMKPAAAAGKKGQKRARQQRFAFVTKSEVDHLEDGYRWRKYGQKAVKNSPFPRSYYRCTNSKCTVKKRVERSSEDPSVVITTYEGQHCHHQTSFQRGGMHFHGAATVALAEQMSFVSTQQLYNLPPLRRQQMNPASSESAVSSVPPSLQQLNGGDELRRSTSYSPTASAVQTPSSSLVPPDVSFDMGLLGDIVPPGVRNG

SEQ ID NO: 66258 - DNA, 1809 bp, Triticum aestivum
  misc_feature (1)..(1809): Ceres Seq. ID no. 13657780
agctcccgtcactttccccctctggtcgagggtttcctctgccctgttacgttccccactccaatccaatggcgacgaccagcaacaagaaaatggcgtcgccgtcgcctatgacggacatgcccgaccagctcctcgccgagatcttcctccggctgcccaccccacaagacctcgcccgcgcctccgccgtttgcctcaccttccgccgaatctccaccgacaggtccttcctccgctgcttccgctgcctccacgcaccaccacttctcggattcctcgaccgcgacggcttccacccagccctaacctccacccccgccgttcgcgcggccgccgtcgccgccgatttcaccttatccttcctcccctaccaccgccgctggaccgtgcaggacgtccgcgacggccgcgtcctcctctgccgcagcatcggaaaacatgggcagcccccggtcttcagagatctcgcggtgtgcgaccccttgcaccggcgctacgtcctgctccccccgctacctcacgacctggctgctttgcttgggcaccctttccccccggtaaccgaggcctgctgcaagcgcttcctcgttcccctcggtgaggaggaggcagcggctggagacacaacattcatagtcatcttgatggcatattgcaaaaccagtctggctgcctttgtcttctcttccagcaacgatcaatggcaagctactgcatccaaggatttgagtgatttggcccttgacgagggcgacatggaggagatgtcaagggtccagccttttattcccatgcgccattatgcttatggctgtttctactgggactgggtgcaattcgggatgaagaagttgctcttgcttgacaccacgaacatggagttctccactgctgacctcccaccaggagaatggagcaaggaaggtatagccattgtggaggcaggggaaggcaggctcgggatctttggtttccatggtggacttgcatccaatctcagctatacagctgcacggaccaaaggcgagagtcccagccagtggcagatggagaagacaatctcactagattctggctacaaatattgtatcagagacgcaacacagaggtacttgctcttgacaaggatagaagcatcatctccaaataatcaccttgttggatatttctcaatggatatcaagacgttgcagcttcagagggtttatgagaaacagcactataagtatccgacatacgcatatatcaacttcccaccatcattgttgtcttcaaggagaatatgaagtggtttgacagagccatacccatacgtaatcatatcagcattcttaattcaaagcgaccatggtttcaacagcttggagttctcacatacgtgatcacgttgcctacaaaacaacaagatctacattgccttgcttggtggtggccatgtcaatgttttggttattaggtctaacatcaatgtggaatttccctgcctaagaatgtgactttgatattaggagttcaagtcaatttttcttcttcattatttgttagagttgctaaaacaggtacaatctgactagtggcagaacgatcacaacggaactgataaccaacataaggacaatwtaagcagcaccagcatgcagttggagggactcggttctttgttgctgctgctgctgtacggtgaagggtaggcagcaaaataggtttgtagagctgtagaaagaggtgagtggaagtcctaaatggtgctcatgtttggatcgccgaagtaccgataatttgtggaatcttgaatatgctgtwtgg

SEQ ID NO: 66259 - protein, 428 aa, Triticum aestivum
  peptide (1)..(428): Ceres Seq. ID no. 15219877
  misc_feature (34)..(235): Homolog of NCBI NO: 37530982 NR Description: unknown protein [Oryza sativa (japonica
  misc_feature (31)..(174): Homolog of NCBI NO: 34915428 NR Description: hypothetical protein~similar to Oryza sativa
  misc_feature (43)..(98): Homolog of NCBI NO: 37531752 NR Description: hypothetical protein [Oryza sativa (japonica
  misc_feature (89)..(253): Homolog of NCBI NO: 37531752 NR Description: hypothetical protein [Oryza sativa (japonica
  misc_feature (34)..(422): Homolog of NCBI NO: 37530888 NR Description: hypothetical protein [Oryza sativa (japonica
  misc_feature (23)..(425): Homolog of NCBI NO: 37530886 NR Description: hypothetical protein [Oryza sativa (japonica
  misc_feature (40)..(302): Homolog of NCBI NO: 32480316 NR Description: OSJNBa0042D13.1 [Oryza sativa (japonica
  misc_feature (31)..(424): Homolog of NCBI NO: 34393352 NR Description: hypothetical protein [Oryza sativa (japonica
  misc_feature (20)..(424): Homolog of NCBI NO: 34393354 NR Description: hypothetical protein [Oryza sativa (japonica
  misc_feature (30)..(400): Homolog of NCBI NO: 34393351 NR Description: hypothetical protein [Oryza sativa (japonica
LPSLSPSGRGFPLPCYVPHSNPMATTSNKKMASPSPMTDMPDQLLAEIFLRLPTPQDLARASAVCLTFRRISTDRSFLRCFRCLHAPPLLGFLDRDGFHPALTSTPAVRAAAVAADFTLSFLPYHRRWTVQDVRDGRVLLCRSIGKHGQPPVFRDLAVCDPLHRRYVLLPPLPHDLAALLGHPFPPVTEACCKRFLVPLGEEEAAAGDTTFIVILMAYCKTSLAAFVFSSSNDQWQATASKDLSDLALDEGDMEEMSRVQPFIPMRHYAYGCFYWDWVQFGMKKLLLLDTTNMEFSTADLPPGEWSKEGIAIVEAGEGRLGIFGFHGGLASNLSYTAARTKGESPSQWQMEKTISLDSGYKYCIRDATQRYLLLTRIEASSPNNHLVGYFSMDIKTLQLQRVYEKQHYKYPTYAYINFPPSLLSSRRI

SEQ ID NO: 66260 - protein, 406 aa, Triticum aestivum
  peptide (1)..(406): Ceres Seq. ID no. 15219878
  misc_feature (12)..(213): Homolog of NCBI NO: 37530982 NR Description: unknown protein [Oryza sativa (japonica
  misc_feature (9)..(152): Homolog of NCBI NO: 34915428 NR Description: hypothetical protein~similar to Oryza sativa
  misc_feature (21)..(76): Homolog of NCBI NO: 37531752 NR Description: hypothetical protein [Oryza sativa (japonica
  misc_feature (67)..(231): Homolog of NCBI NO: 37531752 NR Description: hypothetical protein [Oryza sativa (japonica
  misc_feature (12)..(400): Homolog of NCBI NO: 37530888 NR Description: hypothetical protein [Oryza sativa (japonica
  misc_feature (1)..(403): Homolog of NCBI NO: 37530886 NR Description: hypothetical protein [Oryza sativa (japonica
  misc_feature (18)..(280): Homolog of NCBI NO: 32480316 NR Description: OSJNBa0042D13.1 [Oryza sativa (japonica
  misc_feature (9)..(402): Homolog of NCBI NO: 34393352 NR Description: hypothetical protein [Oryza sativa (japonica
  misc_feature (1)..(402): Homolog of NCBI NO: 34393354 NR Description: hypothetical protein [Oryza sativa (japonica
  misc_feature (8)..(378): Homolog of NCBI NO: 34393351 NR Description: hypothetical protein [Oryza sativa (japonica
MATTSNKKMASPSPMTDMPDQLLAEIFLRLPTPQDLARASAVCLTFRRISTDRSFLRCFRCLHAPPLLGFLDRDGFHPALTSTPAVRAAAVAADFTLSFLPYHRRWTVQDVRDGRVLLCRSIGKHGQPPVFRDLAVCDPLHRRYVLLPPLPHDLAALLGHPFPPVTEACCKRFLVPLGEEEAAAGDTTFIVILMAYCKTSLAAFVFSSSNDQWQATASKDLSDLALDEGDMEEMSRVQPFIPMRHYAYGCFYWDWVQFGMKKLLLLDTTNMEFSTADLPPGEWSKEGIAIVEAGEGRLGIFGFHGGLASNLSYTAARTKGESPSQWQMEKTISLDSGYKYCIRDATQRYLLLTRIEASSPNNHLVGYFSMDIKTLQLQRVYEKQHYKYPTYAYINFPPSLLSSRRI

SEQ ID NO: 66261 - protein, 398 aa, Triticum aestivum
  peptide (1)..(398): Ceres Seq. ID no. 15219879
  misc_feature (4)..(205): Homolog of NCBI NO: 37530982 NR Description: unknown protein [Oryza sativa (japonica
  misc_feature (1)..(144): Homolog of NCBI NO: 34915428 NR Description: hypothetical protein~similar to Oryza sativa
  misc_feature (13)..(68): Homolog of NCBI NO: 37531752 NR Description: hypothetical protein [Oryza sativa (japonica
  misc_feature (59)..(223): Homolog of NCBI NO: 37531752 NR Description: hypothetical protein [Oryza sativa (japonica
  misc_feature (4)..(392): Homolog of NCBI NO: 37530888 NR Description: hypothetical protein [Oryza sativa (japonica
  misc_feature (1)..(395): Homolog of NCBI NO: 37530886 NR Description: hypothetical protein [Oryza sativa (japonica
  misc_feature (10)..(272): Homolog of NCBI NO: 32480316 NR Description: OSJNBa0042D13.1 [Oryza sativa (japonica
  misc_feature (1)..(394): Homolog of NCBI NO: 34393352 NR Description: hypothetical protein [Oryza sativa (japonica
  misc_feature (1)..(394): Homolog of NCBI NO: 34393354 NR Description: hypothetical protein [Oryza sativa (japonica
  misc_feature (1)..(370): Homolog of NCBI NO: 34393351 NR Description: hypothetical protein [Oryza sativa (japonica
MASPSPMTDMPDQLLAEIFLRLPTPQDLARASAVCLTFRRISTDRSFLRCFRCLHAPPLLGFLDRDGFHPALTSTPAVRAAAVAADFTLSFLPYHRRWTVQDVRDGRVLLCRSIGKHGQPPVFRDLAVCDPLHRRYVLLPPLPHDLAALLGHPFPPVTEACCKRFLVPLGEEEAAAGDTTFIVILMAYCKTSLAAFVFSSSNDQWQATASKDLSDLALDEGDMEEMSRVQPFIPMRHYAYGCFYWDWVQFGMKKLLLLDTTNMEFSTADLPPGEWSKEGIAIVEAGEGRLGIFGFHGGLASNLSYTAARTKGESPSQWQMEKTISLDSGYKYCIRDATQRYLLLTRIEASSPNNHLVGYFSMDIKTLQLQRVYEKQHYKYPTYAYINFPPSLLSSRRI

SEQ ID NO: 66262 - DNA, 1780 bp, Triticum aestivum
  misc_feature (1)..(1780): Ceres Seq. ID no. 15170163
agattcaaagcgatcgttcaaagccatggcagggcactcgcccactctccctcatcttgtcttacttgagcaccggcagccatcatccgcctcccattaagaactccagaccgtcaccatggctgcctcttctcctcccaagtcccaacccatcactatggggcctcttccgccgctcgtattagcactctttctcctacctctcctctacttgttcttcaggggcggtagcaagggacgatcgacacagggagcaagaaacgctcccgggccgccgaaacagcttcccgtgctcggcaacctcctgcagctcggcggccggccacaccggtacttccagtcgctcacccagaagtacgggccggtggtgcaggtgcagctcggccgcgtgcggatggtcgtcgtcgcgtcgcctgaggcggccaaggaggttctccggacgaacgacctgcactgctgcagccgcccaaattcaccaggtgcgaggatgctgagctacaacttcctcgacgtggctttcggcccctacagcgactactggcgcgagatgcggaagctcctcgtgctggagctgctgagcgtgaggcgcgtccagtccttcgcctacgcccgggccgcagaggtggaccgccttgtctcctccctcgccggcacccctccgggcaccccggtcgacctcagcgagcagctgtacgcgctctcggacggcatcatcggcacggtggccttcgggaagatgtacgggtcggagtcgttcgagaggaccagcttccagcggatgatggacgagacgctgcgggtgctcggcagcttcacgttcgaggacttcttcccgtcgtcggcgctcgcacggtgggcggacgccctcaccggcgtggcgtcgcggcggcggagggtcttcctcaggatcgataggttcttcgacgcggtcatcgacaagcacctcgagccggggaggctggcggccggggtgcaggaggacatggtcgacgcgctggtgaagatgtggagggatcaagatggggctctggcgctgacgcgtgataacatcaagggaatcctgatggatacattcgccggtgggatcgacacttgcgctgtgacgacgatctggatcatggcggagctgatgaggaacccaagggtgatgcggaaggcgcagtcggaggtacgcgccgcggtggggaacaaatccagagtgtacgaagaagacgcccagggcctcaagtacctcaagatgatagtgaaggagaacttcaggctccacccgccggggcctctgctgatcccaagagagaccatgcagagctgcgaggtcgccggctacagcgtgcccgcgggcaccaggatacacgtcaacgtctgggccatggggagagacccggagatatgggacaggccggaggagttcttccccgagcggttcgaggacgcgcaggttgatttcagggggctgcacttcgagctccttccgttcgggtcgggacgaagggcctgccctgccgtcgccatgggcgtggccaatgtggaggtcgtgctggccaacctgttgtattgcttcgactgggagcttcccgagggcgtgaaggaggacgacgtcgatatggaggaaacagggcagcttgttttcagcaagaaggtggctcttgagcttgtgccagttaagcggtagtgatatctttttttagtgatatcttttttttgagattctagtgatatctcatatgtttcaaatgccacctagtgcttcctcaataaactaaacagtagtttaaatccc

SEQ ID NO: 66263 - protein, 517 aa, Triticum aestivum
  peptide (1)..(517): Ceres Seq. ID no. 15170164
  misc_feature (22)..(516): Homolog of NCBI NO: 30696845 NR Description: cytochrome P450 71B10 [Arabidopsis thaliana]
  misc_feature (20)..(516): Homolog of NCBI NO: 15231538 NR Description: cytochrome P450 family [Arabidopsis thaliana]
  misc_feature (24)..(515): Homolog of NCBI NO: 16507125 NR Description: cytochrome P450 [Citrus sinensis]
  misc_feature (20)..(517): Homolog of NCBI NO: 25282603 NR Description: cytochrome P450 monooxygenase [imported] -
  misc_feature (22)..(517): Homolog of NCBI NO: 15231526 NR Description: cytochrome P450 71B23 [Arabidopsis thaliana]
  misc_feature (20)..(517): Homolog of NCBI NO: 15222174 NR Description: cytochrome P450 family [Arabidopsis thaliana]
  misc_feature (20)..(516): Homolog of NCBI NO: 34897434 NR Description: putative cytochrome P450 [Oryza sativa (japonica
  misc_feature (17)..(516): Homolog of NCBI NO: 37788136 NR Description: cytochrome P450 protein CYP71E [Manihot esculenta]
  misc_feature (1)..(516): Homolog of NCBI NO: 5915841 NR Description: Cytochrome P450 71E1 (4-hydroxyphenylacetaldehyde
  misc_feature (9)..(516): Homolog of NCBI NO: 27817968 NR Description: putative cytochrome P450 71E1
MAASSPPKSQPITMGPLPPLVLALFLLPLLYLFFRGGSKGRSTQGARNAPGPPKQLPVLGNLLQLGGRPHRYFQSLTQKYGPVVQVQLGRVRMVVVASPEAAKEVLRTNDLHCCSRPNSPGARMLSYNFLDVAFGPYSDYWREMRKLLVLELLSVRRVQSFAYARAAEVDRLVSSLAGTPPGTPVDLSEQLYALSDGIIGTVAFGKMYGSESFERTSFQRMMDETLRVLGSFTFEDFFPSSALARWADALTGVASRRRRVFLRIDRFFDAVIDKHLEPGRLAAGVQEDMVDALVKMWRDQDGALALTRDNIKGILMDTFAGGIDTCAVTTIWIMAELMRNPRVMRKAQSEVRAAVGNKSRVYEEDAQGLKYLKMIVKENFRLHPPGPLLIPRETMQSCEVAGYSVPAGTRIHVNVWAMGRDPEIWDRPEEFFPERFEDAQVDFRGLHFELLPFGSGRRACPAVAMGVANVEVVLANLLYCFDWELPEGVKEDDVDMEETGQLVFSKKVALELVPVKR

SEQ ID NO: 66264 - protein, 504 aa, Triticum aestivum
  peptide (1)..(504): Ceres Seq. ID no. 15170165
  misc_feature (9)..(503): Homolog of NCBI NO: 30696845 NR Description: cytochrome P450 71B10 [Arabidopsis thaliana]
  misc_feature (7)..(503): Homolog of NCBI NO: 15231538 NR Description: cytochrome P450 family [Arabidopsis thaliana]
  misc_feature (11)..(502): Homolog of NCBI NO: 16507125 NR Description: cytochrome P450 [Citrus sinensis]
  misc_feature (7)..(504): Homolog of NCBI NO: 25282603 NR Description: cytochrome P450 monooxygenase [imported] -
  misc_feature (9)..(504): Homolog of NCBI NO: 15231526 NR Description: cytochrome P450 71B23 [Arabidopsis thaliana]
  misc_feature (7)..(504): Homolog of NCBI NO: 15222174 NR Description: cytochrome P450 family [Arabidopsis thaliana]
  misc_feature (7)..(503): Homolog of NCBI NO: 34897434 NR Description: putative cytochrome P450 [Oryza sativa (japonica
  misc_feature (4)..(503): Homolog of NCBI NO: 37788136 NR Description: cytochrome P450 protein CYP71E [Manihot esculenta]
  misc_feature (1)..(503): Homolog of NCBI NO: 5915841 NR Description: Cytochrome P450 71E1 (4-hydroxyphenylacetaldehyde
  misc_feature (1)..(503): Homolog of NCBI NO: 27817968 NR Description: putative cytochrome P450 71E1
MGPLPPLVLALFLLPLLYLFFRGGSKGRSTQGARNAPGPPKQLPVLGNLLQLGGRPHRYFQSLTQKYGPVVQVQLGRVRMVVVASPEAAKEVLRTNDLHCCSRPNSPGARMLSYNFLDVAFGPYSDYWREMRKLLVLELLSVRRVQSFAYARAAEVDRLVSSLAGTPPGTPVDLSEQLYALSDGIIGTVAFGKMYGSESFERTSFQRMMDETLRVLGSFTFEDFFPSSALARWADALTGVASRRRRVFLRIDRFFDAVIDKHLEPGRLAAGVQEDMVDALVKMWRDQDGALALTRDNIKGILMDTFAGGIDTCAVTTIWIMAELMRNPRVMRKAQSEVRAAVGNKSRVYEEDAQGLKYLKMIVKENFRLHPPGPLLIPRETMQSCEVAGYSVPAGTRIHVNVWAMGRDPEIWDRPEEFFPERFEDAQVDFRGLHFELLPFGSGRRACPAVAMGVANVEVVLANLLYCFDWELPEGVKEDDVDMEETGQLVFSKKVALELVPVKR

SEQ ID NO: 66265 - protein, 425 aa, Triticum aestivum
  peptide (1)..(425): Ceres Seq. ID no. 15170166
  misc_feature (1)..(424): Homolog of NCBI NO: 30696845 NR Description: cytochrome P450 71B10 [Arabidopsis thaliana]
  misc_feature (1)..(424): Homolog of NCBI NO: 15231538 NR Description: cytochrome P450 family [Arabidopsis thaliana]
  misc_feature (1)..(423): Homolog of NCBI NO: 16507125 NR Description: cytochrome P450 [Citrus sinensis]
  misc_feature (1)..(425): Homolog of NCBI NO: 25282603 NR Description: cytochrome P450 monooxygenase [imported] -
  misc_feature (1)..(425): Homolog of NCBI NO: 15231526 NR Description: cytochrome P450 71B23 [Arabidopsis thaliana]
  misc_feature (1)..(425): Homolog of NCBI NO: 15222174 NR Description: cytochrome P450 family [Arabidopsis thaliana]
  misc_feature (1)..(424): Homolog of NCBI NO: 34897434 NR Description: putative cytochrome P450 [Oryza sativa (japonica
  misc_feature (1)..(424): Homolog of NCBI NO: 37788136 NR Description: cytochrome P450 protein CYP71E [Manihot esculenta]
  misc_feature (1)..(424): Homolog of NCBI NO: 5915841 NR Description: Cytochrome P450 71E1 (4-hydroxyphenylacetaldehyde
  misc_feature (1)..(424): Homolog of NCBI NO: 27817968 NR Description: putative cytochrome P450 71E1
MVVVASPEAAKEVLRTNDLHCCSRPNSPGARMLSYNFLDVAFGPYSDYWREMRKLLVLELLSVRRVQSFAYARAAEVDRLVSSLAGTPPGTPVDLSEQLYALSDGIIGTVAFGKMYGSESFERTSFQRMMDETLRVLGSFTFEDFFPSSALARWADALTGVASRRRRVFLRIDRFFDAVIDKHLEPGRLAAGVQEDMVDALVKMWRDQDGALALTRDNIKGILMDTFAGGIDTCAVTTIWIMAELMRNPRVMRKAQSEVRAAVGNKSRVYEEDAQGLKYLKMIVKENFRLHPPGPLLIPRETMQSCEVAGYSVPAGTRIHVNVWAMGRDPEIWDRPEEFFPERFEDAQVDFRGLHFELLPFGSGRRACPAVAMGVANVEVVLANLLYCFDWELPEGVKEDDVDMEETGQLVFSKKVALELVPVKR

SEQ ID NO: 66266 - DNA, 1351 bp, Triticum aestivum
  misc_feature (1)..(1351): Ceres Seq. ID no. 15225236
acctcattgatttgttttttcttccagctgttcgacactcgtctgtcacggcgacgggatgaactgacgctgcacggatctcagagaggaaccggatcccttcctccctccgaacggcagctcggcagctcaactcaacccaacccagcccagccgtcgtcgacccgagagaatctgcgaggagcagcagcggagaggaagaagacggtggtctctctccgccatggccagctcgtctgccgacccggagaagctcatggccaaggccgacaaactaaccaaactgagctttacaagatggaatgctgattggaagagtgctaccgccttgtacgaacaagctgcaattgcttatagattcagaaaggacaatgagaaagcaaaggatgcatttgagaaggcttcaaaaggacaagaaatgatctcatcaccgtgggatgctgctaagcatatggaaaatgctggtgctttagcaaaggagcttggactatggaatgaagtttcggacttttatcgcagagcatcagaattttaccgtgaatgtggaagatcacaacctgcctctgatgctcttgcaaagggtgccagtgccttggaagataaagctccagaagaagcaactaaattgtatgatgacgcttgcacacttctagaagaagatggaaaggagcagatggcttttgacttgtaccgtgctgctgcaagtttatatgtgaagcttgagaagtactcggatgccgctgcattccatttaagacttggttcagctgctgataagtgcaatgccgtcaacagccaatgcaaggcctatctgagtgcaatcattatctacctttatgcacatgattttcaacaagctcagaaatgctacaatgattgctcagaggttcaaggcttcctgagtagtgaccagaatcgatgtgcaatgaaactgttgtctgcttatgaggaaggtgatgctgaagaaatcaagcgtgctgctcaatcaagtgccattaatcacctcgaccatgtggtaattcggctcgcaaggaagctaccaacaggtgacctgcaggccatcaagaaagatgtaggaggcgacgacggggattccttggacgaggatgacctaacctgatcccaaactggctggcgagatgcagagagaaccacaatcaatcgagtgactacgccattgatgaacaggaaaggttgtaaaaacacattctggaatcgcatagaaagttgtaggcttcatctgtatcatggatttcgatccccttgttttcgttgtttcggatctgtgcacatacaccctacatctgtactgctggattgctgttgttgcgatattcttattggtttggtt

SEQ ID NO: 66267 - protein, 298 aa, Triticum aestivum
  peptide (1)..(298): Ceres Seq. ID no. 15225237
  misc_feature (12)..(278): Homolog of NCBI NO: 18272359 NR Description: Gamma-soluble NSF attachment protein (SNAP-gamma)
  misc_feature (12)..(278): Homolog of NCBI NO: 12804881 NR Description: N-ethylmaleimide-sensitive factor attachment
  misc_feature (1)..(278): Homolog of NCBI NO: 34932055 NR Description: similar to Gamma-soluble NSF attachment protein
  misc_feature (2)..(272): Homolog of NCBI NO: 5639862 NR Description: soluble NSF attachment protein gamma isoform
  misc_feature (94)..(210): Homolog of NCBI NO: 32308082 NR Description: gamma-SNAP [Hordeum vulgare subsp. vulgare]
  misc_feature (5)..(268): Homolog of NCBI NO: 7486759 NR Description: hypothetical protein F9F13.60 - Arabidopsis
  misc_feature (66)..(298): Homolog of NCBI NO: 5852090 NR Description: zwh13.1 [Oryza sativa (indica cultivar-group)]
  misc_feature (5)..(298): Homolog of NCBI NO: 18415496 NR Description: gamma-soluble NSF attachment protein (gamma-SNAP)
  misc_feature (5)..(298): Homolog of NCBI NO: 21554919 NR Description: unknown [Arabidopsis thaliana]
  misc_feature (1)..(298): Homolog of NCBI NO: 38344323 NR Description: OSJNBa0058K23.5 [Oryza sativa (japonica
MASSSADPEKLMAKADKLTKLSFTRWNADWKSATALYEQAAIAYRFRKDNEKAKDAFEKASKGQEMISSPWDAAKHMENAGALAKELGLWNEVSDFYRRASEFYRECGRSQPASDALAKGASALEDKAPEEATKLYDDACTLLEEDGKEQMAFDLYRAAASLYVKLEKYSDAAAFHLRLGSAADKCNAVNSQCKAYLSAIIIYLYAHDFQQAQKCYNDCSEVQGFLSSDQNRCAMKLLSAYEEGDAEEIKRAAQSSAINHLDHVVIRLARKLPTGDLQAIKKDVGGDDGDSLDEDDLT

SEQ ID NO: 66268 - protein, 287 aa, Triticum aestivum
  peptide (1)..(287): Ceres Seq. ID no. 15225238
  misc_feature (1)..(267): Homolog of NCBI NO: 18272359 NR Description: Gamma-soluble NSF attachment protein (SNAP-gamma)
  misc_feature (1)..(267): Homolog of NCBI NO: 12804881 NR Description: N-ethylmaleimide-sensitive factor attachment
  misc_feature (1)..(267): Homolog of NCBI NO: 34932055 NR Description: similar to Gamma-soluble NSF attachment protein
  misc_feature (1)..(261): Homolog of NCBI NO: 5639862 NR Description: soluble NSF attachment protein gamma isoform
  misc_feature (83)..(199): Homolog of NCBI NO: 32308082 NR Description: gamma-SNAP [Hordeum vulgare subsp. vulgare]
  misc_feature (1)..(257): Homolog of NCBI NO: 7486759 NR Description: hypothetical protein F9F13.60 - Arabidopsis
  misc_feature (55)..(287): Homolog of NCBI NO: 5852090 NR Description: zwh13.1 [Oryza sativa (indica cultivar-group)]
  misc_feature (1)..(287): Homolog of NCBI NO: 18415496 NR Description: gamma-soluble NSF attachment protein (gamma-SNAP)
  misc_feature (1)..(287): Homolog of NCBI NO: 21554919 NR Description: unknown [Arabidopsis thaliana]
  misc_feature (1)..(287): Homolog of NCBI NO: 38344323 NR Description: OSJNBa0058K23.5 [Oryza sativa (japonica
MAKADKLTKLSFTRWNADWKSATALYEQAAIAYRFRKDNEKAKDAFEKASKGQEMISSPWDAAKHMENAGALAKELGLWNEVSDFYRRASEFYRECGRSQPASDALAKGASALEDKAPEEATKLYDDACTLLEEDGKEQMAFDLYRAAASLYVKLEKYSDAAAFHLRLGSAADKCNAVNSQCKAYLSAIIIYLYAHDFQQAQKCYNDCSEVQGFLSSDQNRCAMKLLSAYEEGDAEEIKRAAQSSAINHLDHVVIRLARKLPTGDLQAIKKDVGGDDGDSLDEDDLT

SEQ ID NO: 66269 - protein, 233 aa, Triticum aestivum
  peptide (1)..(233): Ceres Seq. ID no. 15225239
  misc_feature (1)..(213): Homolog of NCBI NO: 18272359 NR Description: Gamma-soluble NSF attachment protein (SNAP-gamma)
  misc_feature (1)..(213): Homolog of NCBI NO: 12804881 NR Description: N-ethylmaleimide-sensitive factor attachment
  misc_feature (1)..(213): Homolog of NCBI NO: 34932055 NR Description: similar to Gamma-soluble NSF attachment protein
  misc_feature (1)..(207): Homolog of NCBI NO: 5639862 NR Description: soluble NSF attachment protein gamma isoform
  misc_feature (29)..(145): Homolog of NCBI NO: 32308082 NR Description: gamma-SNAP [Hordeum vulgare subsp. vulgare]
  misc_feature (1)..(203): Homolog of NCBI NO: 7486759 NR Description: hypothetical protein F9F13.60 - Arabidopsis
  misc_feature (1)..(233): Homolog of NCBI NO: 5852090 NR Description: zwh13.1 [Oryza sativa (indica cultivar-group)]
  misc_feature (1)..(233): Homolog of NCBI NO: 18415496 NR Description: gamma-soluble NSF attachment protein (gamma-SNAP)
  misc_feature (1)..(233): Homolog of NCBI NO: 21554919 NR Description: unknown [Arabidopsis thaliana]
  misc_feature (1)..(233): Homolog of NCBI NO: 38344323 NR Description: OSJNBa0058K23.5 [Oryza sativa (japonica
MISSPWDAAKHMENAGALAKELGLWNEVSDFYRRASEFYRECGRSQPASDALAKGASALEDKAPEEATKLYDDACTLLEEDGKEQMAFDLYRAAASLYVKLEKYSDAAAFHLRLGSAADKCNAVNSQCKAYLSAIIIYLYAHDFQQAQKCYNDCSEVQGFLSSDQNRCAMKLLSAYEEGDAEEIKRAAQSSAINHLDHVVIRLARKLPTGDLQAIKKDVGGDDGDSLDEDDLT

SEQ ID NO: 66270 - DNA, 1880 bp, Triticum aestivum
  misc_feature (1)..(1880): Ceres Seq. ID no. 13658728
agaacatcctaatcgaaaaaaggcccatctgagcccattccccattcccccaaaccctcaccctcctccgccggcatcgaaccgccggagcggccgcgccaccatgcaccacctcctccctcctcgcggctgcctgctccgacgcctgtccacggccgccgagaccgccgcagcctcgccccatccaccgcggcgcccgctggccgattcactctaccgccgcgtcactgccgtatggaacccgcgcctcccgctgactcccgtgctggagcaatgggcggtcacggagggccgggccgtcgagaagaacaacctcatgtgcatcgtcaagaagcccgtccgcatccgccgcttatcccacgcgctcgagctttcaatgtggatgaccgaccggcggtacatgtacctgtcgcctggcgacgtcgcgtaccggctggagctgatcagcaaggtgcagggccccgagagtgccgtgaactactggaagggcttgtcgatccaggtgaagaactctcattgctacggctccctcctgaaatgctatgcggaggcaaagtccgtagacgaggccgaaaagctcttcgcggagatgcaggacttgggaatgatgagatcatatccttacaatgtgatgatgaagctttactgggagaccgggcaggttgagagggtgcacgccatgtacaggaccatggaagagagcggcatcaagcctgatgtcttcagtatcaacattctgttgacggtgctcgcagctgctgggaattttgatggcattgaggaaattatcaagaaggtcgacccgaagatcgtgaattggcactcacatgccattgtagccagggccttcatggaagccgggcagcaaggaaaggccttgcgagctatccaggaatcagaaaagcagataggtcggaaggatgagagggttgcatatgggttcttgctttccatgtttgctgatttgggaatgagtagtgaggcggaccgggtttggaatgtctacaagtccaaagtgccggcatgcaactcgatgtacatgtgcaggataactgcgctgcttaagatgaatgacattgatggtgctgagaaagcctttggagagtgggaaagtaggtatgttcaccatgatatccacttaacaaacttactgctaaatgcttactgtgccaaaggtcttatggagaaggcagaagctctcctggatgaagccatcgccaaagggaggacacctcaccgtagtacttggtatagtttggctagtggatttttccaggacggccaggtgtcgaaggcggtggatatgacaaggaaagctcttgcttgtgcgtcttctcgatgggaacctgacctaacaaatgtgctaatgagcctggaacatttcatggagcaaaagaatgttgaagcagccgaggagatggcaagcctgctacggaatttagtacctttgacaagggatgtttaccacattttactgcagacatatgttcatgcaggacaaccagtgtcagatttacttgatcgcatgaaaaaagatggttttgaggctgatgaagaaacagataaaatcatcgctggaatatgccagtagatatccgcatcttcctatcactaagcaatttcgttggttgtttatttcccatggcaggtagctgctaaaccatccaattattaattagtttgacttccttccactgcttagtgcttatctaagacactgtaattctttaatcttctatatgacggtgtcacagggcagtggggatgtcaaatatattcttagagtatgttcatttgaaaaaaaaaaaaaaaaaagcttatcgataccgtcgacctcgagggggggcccggtacccaataaagtgggaacgggagggggg

SEQ ID NO: 66271 - protein, 529 aa, Triticum aestivum
  peptide (1)..(529): Ceres Seq. ID no. 15220659
  misc_feature (344)..(377): Pfam Name: PPR repeat Pfam Description: PPR repeat
  misc_feature (64)..(492): Homolog of NCBI NO: 20453085 NR Description: At1g02150/T7I23.8 [Arabidopsis thaliana]
  misc_feature (64)..(492): Homolog of NCBI NO: 22329290 NR Description: pentatricopeptide (PPR) repeat-containing protein
  misc_feature (45)..(525): Homolog of NCBI NO: 22328859 NR Description: pentatricopeptide (PPR) repeat-containing protein
  misc_feature (35)..(528): Homolog of NCBI NO: 25407143 NR Description: hypothetical protein AT4g01990 [imported] -
  misc_feature (35)..(528): Homolog of NCBI NO: 18411800 NR Description: pentatricopeptide (PPR) repeat-containing protein
  misc_feature (30)..(504): Homolog of NCBI NO: 34393591 NR Description: putative DNA-binding protein
  misc_feature (221)..(526): Homolog of NCBI NO: 37535770 NR Description: putative leaf protein [Oryza sativa (japonica
  misc_feature (38)..(477): Homolog of NCBI NO: 15225409 NR Description: pentatricopeptide (PPR) repeat-containing protein
  misc_feature (38)..(526): Homolog of NCBI NO: 37535776 NR Description: putative leaf protein [Oryza sativa (japonica
  misc_feature (15)..(526): Homolog of NCBI NO: 37535774 NR Description: putative leaf protein [Oryza sativa (japonica
EHPNRKKAHLSPFPIPPNPHPPPPASNRRSGRATMHHLLPPRGCLLRRLSTAAETAAASPHPPRRPLADSLYRRVTAVWNPRLPLTPVLEQWAVTEGRAVEKNNLMCIVKKPVRIRRLSHALELSMWMTDRRYMYLSPGDVAYRLELISKVQGPESAVNYWKGLSIQVKNSHCYGSLLKCYAEAKSVDEAEKLFAEMQDLGMMRSYPYNVMMKLYWETGQVERVHAMYRTMEESGIKPDVFSINILLTVLAAAGNFDGIEEIIKKVDPKIVNWHSHAIVARAFMEAGQQGKALRAIQESEKQIGRKDERVAYGFLLSMFADLGMSSEADRVWNVYKSKVPACNSMYMCRITALLKMNDIDGAEKAFGEWESRYVHHDIHLTNLLLNAYCAKGLMEKAEALLDEAIAKGRTPHRSTWYSLASGFFQDGQVSKAVDMTRKALACASSRWEPDLTNVLMSLEHFMEQKNVEAAEEMASLLRNLVPLTRDVYHILLQTYVHAGQPVSDLLDRMKKDGFEADEETDKIIAGICQ

SEQ ID NO: 66272 - protein, 495 aa, Triticum aestivum
  peptide (1)..(495): Ceres Seq. ID no. 15220660
  misc_feature (310)..(343): Pfam Name: PPR repeat Pfam Description: PPR repeat
  misc_feature (30)..(458): Homolog of NCBI NO: 20453085 NR Description: At1g02150/T7I23.8 [Arabidopsis thaliana]
  misc_feature (30)..(458): Homolog of NCBI NO: 22329290 NR Description: pentatricopeptide (PPR) repeat-containing protein
  misc_feature (11)..(491): Homolog of NCBI NO: 22328859 NR Description: pentatricopeptide (PPR) repeat-containing protein
  misc_feature (1)..(494): Homolog of NCBI NO: 25407143 NR Description: hypothetical protein AT4g01990 [imported] -
  misc_feature (1)..(494): Homolog of NCBI NO: 18411800 NR Description: pentatricopeptide (PPR) repeat-containing protein
  misc_feature (1)..(470): Homolog of NCBI NO: 34393591 NR Description: putative DNA-binding protein
  misc_feature (187)..(492): Homolog of NCBI NO: 37535770 NR Description: putative leaf protein [Oryza sativa (japonica
  misc_feature (4)..(443): Homolog of NCBI NO: 15225409 NR Description: pentatricopeptide (PPR) repeat-containing protein
  misc_feature (4)..(492): Homolog of NCBI NO: 37535776 NR Description: putative leaf protein [Oryza sativa (japonica
  misc_feature (1)..(492): Homolog of NCBI NO: 37535774 NR Description: putative leaf protein [Oryza sativa (japonica
MHHLLPPRGCLLRRLSTAAETAAASPHPPRRPLADSLYRRVTAVWNPRLPLTPVLEQWAVTEGRAVEKNNLMCIVKKPVRIRRLSHALELSMWMTDRRYMYLSPGDVAYRLELISKVQGPESAVNYWKGLSIQVKNSHCYGSLLKCYAEAKSVDEAEKLFAEMQDLGMMRSYPYNVMMKLYWETGQVERVHAMYRTMEESGIKPDVFSINILLTVLAAAGNFDGIEEIIKKVDPKIVNWHSHAIVARAFMEAGQQGKALRAIQESEKQIGRKDERVAYGFLLSMFADLGMSSEADRVWNVYKSKVPACNSMYMCRITALLKMNDIDGAEKAFGEWESRYVHHDIHLTNLLLNAYCAKGLMEKAEALLDEAIAKGRTPHRSTWYSLASGFFQDGQVSKAVDMTRKALACASSRWEPDLTNVLMSLEHFMEQKNVEAAEEMASLLRNLVPLTRDVYHILLQTYVHAGQPVSDLLDRMKKDGFEADEETDKIIAGICQ

SEQ ID NO: 66273 - protein, 424 aa, Triticum aestivum
  peptide (1)..(424): Ceres Seq. ID no. 15220661
  misc_feature (239)..(272): Pfam Name: PPR repeat Pfam Description: PPR repeat
  misc_feature (1)..(387): Homolog of NCBI NO: 20453085 NR Description: At1g02150/T7I23.8 [Arabidopsis thaliana]
  misc_feature (1)..(387): Homolog of NCBI NO: 22329290 NR Description: pentatricopeptide (PPR) repeat-containing protein
  misc_feature (1)..(420): Homolog of NCBI NO: 22328859 NR Description: pentatricopeptide (PPR) repeat-containing protein
  misc_feature (1)..(423): Homolog of NCBI NO: 25407143 NR Description: hypothetical protein AT4g01990 [imported] -
  misc_feature (1)..(423): Homolog of NCBI NO: 18411800 NR Description: pentatricopeptide (PPR) repeat-containing protein
  misc_feature (1)..(399): Homolog of NCBI NO: 34393591 NR Description: putative DNA-binding protein
  misc_feature (116)..(421): Homolog of NCBI NO: 37535770 NR Description: putative leaf protein [Oryza sativa (japonica
  misc_feature (1)..(372): Homolog of NCBI NO: 15225409 NR Description: pentatricopeptide (PPR) repeat-containing protein
  misc_feature (1)..(421): Homolog of NCBI NO: 37535776 NR Description: putative leaf protein [Oryza sativa (japonica
  misc_feature (1)..(421): Homolog of NCBI NO: 37535774 NR Description: putative leaf protein [Oryza sativa (japonica
MCIVKKPVRIRRLSHALELSMWMTDRRYMYLSPGDVAYRLELISKVQGPESAVNYWKGLSIQVKNSHCYGSLLKCYAEAKSVDEAEKLFAEMQDLGMMRSYPYNVMMKLYWETGQVERVHAMYRTMEESGIKPDVFSINILLTVLAAAGNFDGIEEIIKKVDPKIVNWHSHAIVARAFMEAGQQGKALRAIQESEKQIGRKDERVAYGFLLSMFADLGMSSEADRVWNVYKSKVPACNSMYMCRITALLKMNDIDGAEKAFGEWESRYVHHDIHLTNLLLNAYCAKGLMEKAEALLDEAIAKGRTPHRSTWYSLASGFFQDGQVSKAVDMTRKALACASSRWEPDLTNVLMSLEHFMEQKNVEAAEEMASLLRNLVPLTRDVYHILLQTYVHAGQPVSDLLDRMKKDGFEADEETDKIIAGICQ

SEQ ID NO: 66274 - DNA, 1034 bp, Triticum aestivum
  misc_feature (1)..(1034): Ceres Seq. ID no. 12620190
cttttttcttcgcacggatagacggacctccgactcccgtgagtccgctgggcgtggtgcgccatgacccccgccctgcttcccctcgccccctcgcctccttatccaaagccaccacggctatgcctcaaacccacccccgcgcgcccgctctaccggtgcgacgccacacgccgcgacttcgctatctacaccgcctccgctgccgcagccgcagccgcaatgagcctcgccgccgctactgcggcagatgaggcgctcccttcggcgtcacagtcaccgacgcctcaccctccaaacggcggggctacctcgttgctggtcggcatcgcaaacacgaggtcgtggtcgcagtactacggcagcggcttctccatccgcgtgccgccgtccttcgacaacatcttggagcccgaggatttcagcgccgccatgacctattatggcgacaaggccaaggtcagggcgtacgcagctcggttcgcatctccagataggtcagaacttgtaagcgtggtaatcaagccatctaatcagctcaagatcacattcctagaggccaaagatataacggagttgggcactctaaaggaggcgtccaagttatttgtacctggcggtgcgaaaatatactcagctcgaacaattaaagttaaggatcaggagggtatcaggacgtattacttctacgaatttcggtttgacagacaacatgttgctctaatggccaccgtggatagtgggaagacatatatcgctgccgccactgctccagagacgaggtgggagacggatggagtgacattgcgttcggctgctgtatctatgtctctcacatgatctacactagtgtcaaaaatgctcttatatttgttagacctttcagcctgagcattgatagttgtggatgacactaggagagttgggacaattttcgttggtttatttctcacacaatgccatgccaacctgaggggttggggatacatatttataggctgctagccagccaaggcatatgctaagatgctgcc

SEQ ID NO: 66275 - protein, 258 aa, Triticum aestivum
  peptide (1)..(258): Ceres Seq. ID no. 12620191
  misc_feature (23)..(204): Homolog of NCBI NO: 15240916 NR Description: putative protein; protein id: At5g27390.1
  misc_feature (23)..(257): Homolog of NCBI NO: 26452557 NR Description: unknown protein [Arabidopsis thaliana]
MTPALLPLAPSPPYPKPPRLCLKPTPARPLYRCDATRRDFAIYTASAAAAAAAMSLAAATAADEALPSASQSPTPHPPNGGATSLLVGIANTRSWSQYYGSGFSIRVPPSFDNILEPEDFSAAMTYYGDKAKVRAYAARFASPDRSELVSVVIKPSNQLKITFLEAKDITELGTLKEASKLFVPGGAKIYSARTIKVKDQEGIRTYYFYEFRFDRQHVALMATVDSGKTYIAAATAPETRWETDGVTLRSAAVSMSLT

SEQ ID NO: 66276 - protein, 205 aa, Triticum aestivum
  peptide (1)..(205): Ceres Seq. ID no. 12620192
  misc_feature (1)..(151): Homolog of NCBI NO: 15240916 NR Description: putative protein; protein id: At5g27390.1
  misc_feature (1)..(204): Homolog of NCBI NO: 26452557 NR Description: unknown protein [Arabidopsis thaliana]
MSLAAATAADEALPSASQSPTPHPPNGGATSLLVGIANTRSWSQYYGSGFSIRVPPSFDNILEPEDFSAAMTYYGDKAKVRAYAARFASPDRSELVSVVIKPSNQLKITFLEAKDITELGTLKEASKLFVPGGAKIYSARTIKVKDQEGIRTYYFYEFRFDRQHVALMATVDSGKTYIAAATAPETRWETDGVTLRSAAVSMSLT

SEQ ID NO: 66277 - protein, 135 aa, Triticum aestivum
  peptide (1)..(135): Ceres Seq. ID no. 12620193
  misc_feature (1)..(81): Homolog of NCBI NO: 15240916 NR Description: putative protein; protein id: At5g27390.1
  misc_feature (1)..(134): Homolog of NCBI NO: 26452557 NR Description: unknown protein [Arabidopsis thaliana]
MTYYGDKAKVRAYAARFASPDRSELVSVVIKPSNQLKITFLEAKDITELGTLKEASKLFVPGGAKIYSARTIKVKDQEGIRTYYFYEFRFDRQHVALMATVDSGKTYIAAATAPETRWETDGVTLRSAAVSMSLT

SEQ ID NO: 66278 - DNA, 1619 bp, Triticum aestivum
  misc_feature (1)..(1619): Ceres Seq. ID no. 12779909
ccaatccatagccgccacaccctccctcctcctatttcctccctcgtctgccgccgccacgccctccctcctcgtcgccctgtctctgcccagctttgccgcctcccacgcgctcgtcctctcatctcccatggaggggaggggtgaggatgttgggaaaggaggaagccggagatgaggaggtcgatgcaggggacgccatggatggtcggggcgctggctcctcctttccccatgccacggctgcccagatccggcgatcccctcccactccggcatccaggttggaggcattggcgtgaaggtgtcgtgagttatctgcaagggcattgttctgacgtgctcctccatgtctcccgcgagttcttggtgtggcgatcatggctccagatagcataaaatcgacatcatgggtgtcggtgcagaatgacggaggagcgggagaagcaggagctgctcggacgcgctagcgccagtgagatcttccagcatgcgccgacggacaagccggcattcacgctggcccagatcaaggaggcaatcccgcctcactactttcagtgctcgttgatcaagtccttctcctatgtggtctatgacctcgtcatcagcgcgtccctcctgtacgccgggttggtctggatcccagcactctcgagcatgcaatagctgggcgcctgtccgctctactgggtgcctcattttgattttcttaccttggtgggtttgtattcagaaaattaatttgcctatttttgctttttaatctgtgttgggagaaagatgttcctctttgttgagaaaatgtttattgtatggaccatacaaggttctttctccaaatgttattgtgtggtgcaactatgatctattttccttgtgcagaggtctgtgacgaggcagacaggtggcgggcggcaacaataggggttggcggatgctccgagaccaatagcctacttagtgatgggaaggaggatctgacaagttaacccccacaattgtgttgttggaggacttctgcgagctcagtaaaataatgaatcttcatctccgatgttttctctcgaaaatggagcgcggatcgcaggagcaaggagctggtcgagtgtagtgaacaaacaatcaacgcggcacatttggaagttgtgagagctgtgaatggcaccggtcttgtcatactaatgagcaggagcaccggccacattactcttcatgccactctgagcagtcggttgctacttgagattgatttccatgttgaaggaaagggagaccagattgagttcctgtatatgcaagaagaaggggcattgtcgtggttgttgctgaaggtgttggtcaggagctgattaccgggactgatgacaagaacgaagagcaagatgagtatgtcaacatgttgttccttaacgttggccttcttctataaagttcacatgcaactctcctccatggttagaaaaaactaatttaaacgttttgtttctttgatggttactcatttctcttaccattgttgtatcaaaacaattttattttcgctgatggccgcttgggctcattttcgaagagaatgagatgtggaataaactactctaaaatggttggttccctcc

SEQ ID NO: 66279 - protein, 80 aa, Triticum aestivum
  peptide (1)..(80): Ceres Seq. ID no. 12779910
  misc_feature (12)..(80): Homolog of NCBI NO: 13447102 NR Description: delta-12 fatty acid desaturase FAD2 [Calendula
  misc_feature (18)..(80): Homolog of NCBI NO: 6118359 NR Description: delta-12 oleate desaturase [Vernonia galamensis]
  misc_feature (18)..(80): Homolog of NCBI NO: 6118361 NR Description: delta-12 oleate desaturase [Vernonia galamensis]
  misc_feature (21)..(80): Homolog of NCBI NO: 7433289 NR Description: Delta12 fatty acid desaturase (EC 1.14.99.-)
  misc_feature (12)..(80): Homolog of NCBI NO: 25989476 NR Description: fatty acid desaturase 2 [Olea europaea subsp.
  misc_feature (1)..(80): Homolog of NCBI NO: 28564441 NR Description: delta 12-acyl-lipid-desaturase [Punica granatum]
  misc_feature (1)..(80): Homolog of NCBI NO: 28371827 NR Description: delta-12 oleate desaturase [Punica granatum]
  misc_feature (12)..(80): Homolog of NCBI NO: 3417601 NR Description: delta-12 fatty acid desaturase [Borago
  misc_feature (3)..(80): Homolog of NCBI NO: 34903462 NR Description: putative omega-6 fatty acid desaturase
  misc_feature (21)..(80): Homolog of NCBI NO: 34903470 NR Description: putative omega-6 fatty acid desaturase
MTEEREKQELLGRASASEIFQHAPTDKPAFTLAQIKEAIPPHYFQCSLIKSFSYVVYDLVISASLLYAGLVWIPALSSMQ

SEQ ID NO: 66280 - protein, 74 aa, Triticum aestivum
  peptide (1)..(74): Ceres Seq. ID no. 12779911
MRRSMQGTPWMVGALAPPFPMPRLPRSGDPLPLRHPGWRHWREGVVSYLQGHCSDVLLHVSREFLVWRSWLQIA

SEQ ID NO: 66281 - protein, 70 aa, Triticum aestivum
  peptide (1)..(70): Ceres Seq. ID no. 12779912
MQGTPWMVGALAPPFPMPRLPRSGDPLPLRHPGWRHWREGVVSYLQGHCSDVLLHVSREFLVWRSWLQIA

SEQ ID NO: 66282 - DNA, 2913 bp, Triticum aestivum
  misc_feature (1)..(2913): Ceres Seq. ID no. 14302891
aaaactctcctcctcctcctccgtctcccagaccaaacgccgcccctctcctccacctcctcccccctcatccatggcgatggcgacctctcacttgcccgactaaacaaacaagcaagctcacgcaagcgcgcacccagacccactgagagcccggacaaaggggtcaagaagacaaggaagaggcgccggtagccactagccactcgtccggcatcccgaggtcgaccatggagaagttcctgttcgaggagctggccggggacgccgtgcgggagctgctgcgcgcggtgcagggcaccttcctgtgccgctccaccgccgagcgcctgcgccggaacgtcgagccgctgctgcccctcgtgcagcagaacggccgccacgcgctccggagcaacgccgagctgggcgagctcgccgtgcagctcagggaggcgctcgacctcgcgcgccgcgccgccgccgccccgcgctggaacgtgtaccgcaccgcgcagctggcccgcaggatggaggccgccgacaagggcatcgagcgctggctggcgcgccacgcccccgcgcacgtgctcgacggcgtgcgccgcctccgcgacgaggccgaggcccgcatcggccgcctcgagcgccgcgtcgaggaggtcgccgcgctgcaggcagcccccacgatcccgcccgccatgtcccttcccgtcgcactgccgccgccgccctccaagggcatggcgatggcggtagaggtggcgccgccgaccaaggccatggggatgccgatggaggtggcgccaccgaccaagggcatggggattccgatggatttcgagttcccgtgcgaggaggagagcaaggacgccggcttggtgggaagcggcgtcaaggtgggcaaggagagagtgaaggagatggtgatgagcagcgggggcggctgggaggtcgtcggcatctgcggcatgggcggcagcggcaagaccacgctcgccatggagatctataaggatcaaaagatccaaggctacttcaacaacagggtcttctttgagacggtctcacagtccgcaaatctggagaccatcaagatgaagctgtgggagcagatcagcagcaatattgtgcttggtgcatataaccagataccggaatggcagctcaagttagggccgagggaccgaggaccagtccttgttatacttgatgatgtgtggtctctctcacagctcgaggagctggtcttcaagttccctggctgcaaaacccttgtcgtatcaaggttgaagttccccacgttagtctcccggacttacgaaatgaaattactcggcgaagaggaggctctctctgtcttctgcagtgctgccttcggtcaggagtctgttcctcagactgctgacaagaaactggttaagcaggttgctgccgagtgcagagggcttcctctagctctcaaggttatcggcgcatccttgcgtgatcagcctcctatgatatggttgagcgcgaagaaccgcttgtcacgaggagagtctatatcggactcacatgagaccaaactcctcgagagaatggcagcaagtgtcgagtgcttgtcgggaaaggttagggaatgtttccttgacctgggttgcttcccagaggataagaagatccctcttgatgtgttgatcaatatttggatggagatacatgatcttgacaagccagatgctttcgccatcctcatggagctatcgaacaagaacctgcttaccctagttaatgatgcacagaataaagctggagatttatacagtaactatcatgactactcagtgacgcaacatgatgtgttgcgtgatctggcacttcacatgagcggtcgtgattctctgaacaaaaggaggcggttagtgatgccaagaagagaagaatcgcttccgagagattggcagaggaataaggaccttccctttgaagctcagattgtttctattcatacaggtgagatgaaagaatctgactggttccagatgagcttccccaaggcagaagttcttatcctcaacttcgcctcaagtgtatactacctcccgtcgttcattgcaacaatgcagaacctgaaggccctggtgctgatcaactatggtactaccagtgcaacccttgacaatttatctgccttcaccacactgagtgacctgaggagtctttggctggaaaagattacgctcccgccactgccgaaaagcacgatcccactgaagaacctgcgcaagatatccctcgtcctttgtgagctgaacaacagtctaagaggatcaacaatggatctctccatgacgtttccgcgcttatccaacctcaccatcgaccattgcgtagatctgaaggagctgccacctagtgtatgtgaaatcagctctctggaaagcatctccttgtcaaactgccatgacctcacagagctgccatatgagctgggcaagctgcactgcctgagcatcttgcgggtgtacgcctgcccggcactgtggaagcttccaccgtcggtatgcagcctgaagaggctgaaatacctggacatatcgcagtgcattaaccttacagaccttccagaagagcttggccacctgacaaacctagagaagatcgacatgcgggaatgctcgcggttgaggagcctccctaggtcctcctcgtcgttgaagtccctcgggcacgtcgtgtgcgacgaggaaacggcgatgctgtggagggaagccgagcaggtcatcccggacctccgtgtgcaggtagcagaagagtgttacaacctggactggcttgtagactgatgttctggatgctctctgcctccaggctcaccatgtacaaatgatgtgtatatgtttccctgcttaaatgcaggatgggtagtcaatacactgttcagttttgacg

SEQ ID NO: 66283 - protein, 858 aa, Triticum aestivum
  peptide (1)..(858): Ceres Seq. ID no. 14302892
  misc_feature (317)..(481): Pfam Name: NB-ARC domain Pfam Description: NB-ARC domain
  misc_feature (317)..(858): Homolog of NCBI NO: 25403197 NR Description: probable disease resistance protein
  misc_feature (215)..(282): Homolog of NCBI NO: 30692890 NR Description: disease resistance protein (CC-NBS-LRR class),
  misc_feature (317)..(858): Homolog of NCBI NO: 30692890 NR Description: disease resistance protein (CC-NBS-LRR class),
  misc_feature (8)..(138): Homolog of NCBI NO: 15238281 NR Description: disease resistance protein (CC-NBS-LRR class),
  misc_feature (198)..(858): Homolog of NCBI NO: 15238281 NR Description: disease resistance protein (CC-NBS-LRR class),
  misc_feature (4)..(184): Homolog of NCBI NO: 7485661 NR Description: hypothetical protein F17M5.60 - Arabidopsis
  misc_feature (580)..(856): Homolog of NCBI NO: 7485661 NR Description: hypothetical protein F17M5.60 - Arabidopsis
  misc_feature (203)..(583): Homolog of NCBI NO: 7485661 NR Description: hypothetical protein F17M5.60 - Arabidopsis
  misc_feature (4)..(184): Homolog of NCBI NO: 30689664 NR Description: disease resistance protein (CC-NBS-LRR class),
  misc_feature (203)..(856): Homolog of NCBI NO: 30689664 NR Description: disease resistance protein (CC-NBS-LRR class),
MEKFLFEELAGDAVRELLRAVQGTFLCRSTAERLRRNVEPLLPLVQQNGRHALRSNAELGELAVQLREALDLARRAAAAPRWNVYRTAQLARRMEAADKGIERWLARHAPAHVLDGVRRLRDEAEARIGRLERRVEEVAALQAAPTIPPAMSLPVALPPPPSKGMAMAVEVAPPTKAMGMPMEVAPPTKGMGIPMDFEFPCEEESKDAGLVGSGVKVGKERVKEMVMSSGGGWEVVGICGMGGSGKTTLAMEIYKDQKIQGYFNNRVFFETVSQSANLETIKMKLWEQISSNIVLGAYNQIPEWQLKLGPRDRGPVLVILDDVWSLSQLEELVFKFPGCKTLVVSRLKFPTLVSRTYEMKLLGEEEALSVFCSAAFGQESVPQTADKKLVKQVAAECRGLPLALKVIGASLRDQPPMIWLSAKNRLSRGESISDSHETKLLERMAASVECLSGKVRECFLDLGCFPEDKKIPLDVLINIWMEIHDLDKPDAFAILMELSNKNLLTLVNDAQNKAGDLYSNYHDYSVTQHDVLRDLALHMSGRDSLNKRRRLVMPRREESLPRDWQRNKDLPFEAQIVSIHTGEMKESDWFQMSFPKAEVLILNFASSVYYLPSFIATMQNLKALVLINYGTTSATLDNLSAFTTLSDLRSLWLEKITLPPLPKSTIPLKNLRKISLVLCELNNSLRGSTMDLSMTFPRLSNLTIDHCVDLKELPPSVCEISSLESISLSNCHDLTELPYELGKLHCLSILRVYACPALWKLPPSVCSLKRLKYLDISQCINLTDLPEELGHLTNLEKIDMRECSRLRSLPRSSSSLKSLGHVVCDEETAMLWREAEQVIPDLRVQVAEECYNLDWLVD

SEQ ID NO: 66284 - protein, 765 aa, Triticum aestivum
  peptide (1)..(765): Ceres Seq. ID no. 14302893
  misc_feature (224)..(388): Pfam Name: NB-ARC domain Pfam Description: NB-ARC domain
  misc_feature (224)..(765): Homolog of NCBI NO: 25403197 NR Description: probable disease resistance protein
  misc_feature (122)..(189): Homolog of NCBI NO: 30692890 NR Description: disease resistance protein (CC-NBS-LRR class),
  misc_feature (224)..(765): Homolog of NCBI NO: 30692890 NR Description: disease resistance protein (CC-NBS-LRR class),
  misc_feature (1)..(45): Homolog of NCBI NO: 15238281 NR Description: disease resistance protein (CC-NBS-LRR class),
  misc_feature (105)..(765): Homolog of NCBI NO: 15238281 NR Description: disease resistance protein (CC-NBS-LRR class),
  misc_feature (1)..(91): Homolog of NCBI NO: 7485661 NR Description: hypothetical protein F17M5.60 - Arabidopsis
  misc_feature (487)..(763): Homolog of NCBI NO: 7485661 NR Description: hypothetical protein F17M5.60 - Arabidopsis
  misc_feature (110)..(490): Homolog of NCBI NO: 7485661 NR Description: hypothetical protein F17M5.60 - Arabidopsis
  misc_feature (1)..(91): Homolog of NCBI NO: 30689664 NR Description: disease resistance protein (CC-NBS-LRR class),
  misc_feature (110)..(763): Homolog of NCBI NO: 30689664 NR Description: disease resistance protein (CC-NBS-LRR class),
MEAADKGIERWLARHAPAHVLDGVRRLRDEAEARIGRLERRVEEVAALQAAPTIPPAMSLPVALPPPPSKGMAMAVEVAPPTKAMGMPMEVAPPTKGMGIPMDFEFPCEEESKDAGLVGSGVKVGKERVKEMVMSSGGGWEVVGICGMGGSGKTTLAMEIYKDQKIQGYFNNRVFFETVSQSANLETIKMKLWEQISSNIVLGAYNQIPEWQLKLGPRDRGPVLVILDDVWSLSQLEELVFKFPGCKTLVVSRLKFPTLVSRTYEMKLLGEEEALSVFCSAAFGQESVPQTADKKLVKQVAAECRGLPLALKVIGASLRDQPPMIWLSAKNRLSRGESISDSHETKLLERMAASVECLSGKVRECFLDLGCFPEDKKIPLDVLINIWMEIHDLDKPDAFAILMELSNKNLLTLVNDAQNKAGDLYSNYHDYSVTQHDVLRDLALHMSGRDSLNKRRRLVMPRREESLPRDWQRNKDLPFEAQIVSIHTGEMKESDWFQMSFPKAEVLILNFASSVYYLPSFIATMQNLKALVLINYGTTSATLDNLSAFTTLSDLRSLWLEKITLPPLPKSTIPLKNLRKISLVLCELNNSLRGSTMDLSMTFPRLSNLTIDHCVDLKELPPSVCEISSLESISLSNCHDLTELPYELGKLHCLSILRVYACPALWKLPPSVCSLKRLKYLDISQCINLTDLPEELGHLTNLEKIDMRECSRLRSLPRSSSSLKSLGHVVCDEETAMLWREAEQVIPDLRVQVAEECYNLDWLVD

SEQ ID NO: 66285 - protein, 708 aa, Triticum aestivum
  peptide (1)..(708): Ceres Seq. ID no. 14302894
  misc_feature (167)..(331): Pfam Name: NB-ARC domain Pfam Description: NB-ARC domain
  misc_feature (65)..(132): Homolog of NCBI NO: 25403197 NR Description: probable disease resistance protein
  misc_feature (167)..(708): Homolog of NCBI NO: 25403197 NR Description: probable disease resistance protein
  misc_feature (65)..(132): Homolog of NCBI NO: 30692890 NR Description: disease resistance protein (CC-NBS-LRR class),
  misc_feature (167)..(708): Homolog of NCBI NO: 30692890 NR Description: disease resistance protein (CC-NBS-LRR class),
  misc_feature (48)..(708): Homolog of NCBI NO: 15238281 NR Description: disease resistance protein (CC-NBS-LRR class),
  misc_feature (1)..(34): Homolog of NCBI NO: 7485661 NR Description: hypothetical protein F17M5.60 - Arabidopsis
  misc_feature (430)..(706): Homolog of NCBI NO: 7485661 NR Description: hypothetical protein F17M5.60 - Arabidopsis
  misc_feature (53)..(433): Homolog of NCBI NO: 7485661 NR Description: hypothetical protein F17M5.60 - Arabidopsis
  misc_feature (1)..(34): Homolog of NCBI NO: 30689664 NR Description: disease resistance protein (CC-NBS-LRR class),
  misc_feature (53)..(706): Homolog of NCBI NO: 30689664 NR Description: disease resistance protein (CC-NBS-LRR class),
MSLPVALPPPPSKGMAMAVEVAPPTKAMGMPMEVAPPTKGMGIPMDFEFPCEEESKDAGLVGSGVKVGKERVKEMVMSSGGGWEVVGICGMGGSGKTTLAMEIYKDQKIQGYFNNRVFFETVSQSANLETIKMKLWEQISSNIVLGAYNQIPEWQLKLGPRDRGPVLVILDDVWSLSQLEELVFKFPGCKTLVVSRLKFPTLVSRTYEMKLLGEEEALSVFCSAAFGQESVPQTADKKLVKQVAAECRGLPLALKVIGASLRDQPPMIWLSAKNRLSRGESISDSHETKLLERMAASVECLSGKVRECFLDLGCFPEDKKIPLDVLINIWMEIHDLDKPDAFAILMELSNKNLLTLVNDAQNKAGDLYSNYHDYSVTQHDVLRDLALHMSGRDSLNKRRRLVMPRREESLPRDWQRNKDLPFEAQIVSIHTGEMKESDWFQMSFPKAEVLILNFASSVYYLPSFIATMQNLKALVLINYGTTSATLDNLSAFTTLSDLRSLWLEKITLPPLPKSTIPLKNLRKISLVLCELNNSLRGSTMDLSMTFPRLSNLTIDHCVDLKELPPSVCEISSLESISLSNCHDLTELPYELGKLHCLSILRVYACPALWKLPPSVCSLKRLKYLDISQCINLTDLPEELGHLTNLEKIDMRECSRLRSLPRSSSSLKSLGHVVCDEETAMLWREAEQVIPDLRVQVAEECYNLDWLVD

SEQ ID NO: 66286 - DNA, 2283 bp, Triticum aestivum
  misc_feature (1)..(2283): Ceres Seq. ID no. 13658707
catcctaatcgaaaacmmycmtcccgttaaaacttyatyrwrttsmkcwtgctggggctgctgctgctgctgcttcttcttcttctctctccccaccgcctcccccttcctcatcctcctctctcagtccgaagccgattacttagcagcttgccttcgtcttcctctcctgcggttcctggagctacgtcttctcggcccctgccctttggttcgccgctccgctctcccccttctgccgcaaagggggacactcatggcgagtctagtaagtacgtttatcaccgcttgggttaaggaattcctgtggttttttggccgagaaggtgctcttcacggcgcttccttcccagattggttcagtttggttgttgcacggcgccgtggtgagctagggcgccccactgctattgatttccgccgcttggtgtcctccccaaattcgagatcctcctgttgagatcttgcgatccgacgcgcggtttcttgcttcttgcgaattggatttcctgattgatctggaaatctttttgaagcttcgtgttggattcatggagttgcagtgcaaactagtactgactggttcgtgttcttgtgctgctctgttttgttgcaggtagttctggcatcgctgcttaccgtaattgggctcgcgcagggggaggcgcaatgtgcgcggtacagcgggcggccgcggccacatagcgtgaccatcactgagtttggggccgtcggcgacggcctgaccgtcaatacggtgcccttccagaacgccatcttctacctgcggtcctttgccgacaagggcggcgcacagctgtacgtgcccaaggggcggtggctcaccggcagcttcaacctcaccagccacctcacccttttcctggagaaggacgctgtcatcatcggcaccgaggatgtgacacaatggccaattgtggaacctttgccatcatatggccaaggaattgatcttccgggtgcaaggcatcgcagcttaataaatgggcacaatgttaccgatgtcataattacagggaacaatggaatcgtagacggccagggtttgatatggtggaactggtttcgctcgaataaattgaattatagccggcctcatcttgtggagtttgagtattcggaagaaattgtgatttcgaacttgacattcttagattccccagcatggggtatacatcctgtgtattgcagcaatgtaacaatcagtaatgtcacaatcgagactgaattggatgctccactcaccaatggaattgtcccagattcatgctcgaatctgtgcattgaggacagcataattagtgtcggtcatgatgccatctcattaaaaagtgggtgggacaactatggcattacatttggaaggccaacctcagacattcacattagtagagtggatctgcaagcctcactgggagctgctcttgcatttggcagtgagatgtctggtgggatctcggatgttcatgttgatcacctttatattcatggttcatccaaaggtatctccttcaggacagcaccaggccgtggtggttatataagggatgcgatagtatcaaatgtccagatggaagatgtccatgttgcaatcgagttcaccggcgattggtcaagccatcctgatgaacattttgatttgtctgcactcccggagatcagtggaatcaccttaaaagacatggttggaataaacatttcgtttgcaggagttttgtcgggaatcgatggcgatcctttcaccaatatctgcctctccaatatcaatttcaccatagctgattcagcgcattctgcctcttggtcttgctccaacgtttctggatactccgagtcggtatttcccgaggcttgttctgacctccacagtcaatcatcaaattcctccatctgctcatccacccttaggtaccatgccctcgcgacagcgtaaatgcatatagcacccaatattcatcctttcatgtttctgtccatgtacaatctggagacatcaagctgtagcttcatcaccatctttccccccaaaaaattctcttccgttataggtgcatcaaagaatcatcgggcttcgtacagtcagctttgaggctcataatacaaaaatttggctggcgtccttgatgagtccagagaggtgtttccttgtacagttacatttgttcattcaatctgtaagaaattttgtccggtaggttgtctgagtccaaagagttggtttatattgttgtttattttattgccatatataaaataaacatt

SEQ ID NO: 66287 - protein, 163 aa, Triticum aestivum
  peptide (1)..(163): Ceres Seq. ID no. 15219913
  misc_feature (1)..(138): Pfam Name: Glycosyl hydrolases family 28 Pfam Description: Glycosyl hydrolases family 28
  misc_feature (1)..(141): Homolog of NCBI NO: 21593399 NR Description: polygalacturonase-like protein [Arabidopsis
  misc_feature (1)..(163): Homolog of NCBI NO: 34393209 NR Description: putative polygalacturonase
  misc_feature (1)..(141): Homolog of NCBI NO: 11263971 NR Description: hypothetical protein T17J13.70 - Arabidopsis
  misc_feature (1)..(141): Homolog of NCBI NO: 30679999 NR Description: polygalacturonase, putative [Arabidopsis
  misc_feature (1)..(141): Homolog of NCBI NO: 18412253 NR Description: polygalacturonase, putative [Arabidopsis
  misc_feature (1)..(146): Homolog of NCBI NO: 22327662 NR Description: expressed protein [Arabidopsis thaliana]
  misc_feature (1)..(163): Homolog of NCBI NO: 21553827 NR Description: polygalacturonase, putative [Arabidopsis thaliana]
  misc_feature (1)..(163): Homolog of NCBI NO: 15228881 NR Description: polygalacturonase, putative [Arabidopsis
  misc_feature (1)..(163): Homolog of NCBI NO: 7939578 NR Description: polygalacturonase-like protein [Arabidopsis
  misc_feature (1)..(161): Homolog of NCBI NO: 40714685 NR Description: putative polygalacturonase
MSGGISDVHVDHLYIHGSSKGISFRTAPGRGGYIRDAIVSNVQMEDVHVAIEFTGDWSSHPDEHFDLSALPEISGITLKDMVGINISFAGVLSGIDGDPFTNICLSNINFTIADSAHSASWSCSNVSGYSESVFPEACSDLHSQSSNSSICSSTLRYHALATA

SEQ ID NO: 66288 - protein, 152 aa, Triticum aestivum
  peptide (1)..(152): Ceres Seq. ID no. 15219914
  misc_feature (6)..(6): Xaa is any aa, unknown or other
  misc_feature (7)..(7): Xaa is any aa, unknown or other
  misc_feature (12)..(12): Xaa is any aa, unknown or other
  misc_feature (13)..(13): Xaa is any aa, unknown or other
  misc_feature (14)..(14): Xaa is any aa, unknown or other
  misc_feature (15)..(15): Xaa is any aa, unknown or other
  misc_feature (16)..(16): Xaa is any aa, unknown or other
ILIENXXPVKTXXXXXCWGCCCCCFFFFSLPTASPFLILLSQSEADYLAACLRLPLLRFLELRLLGPCPLVRRSALPLLPQRGTLMASLVSTFITAWVKEFLWFFGREGALHGASFPDWFSLVVARRRGELGRPTAIDFRRLVSSPNSRSSC

SEQ ID NO: 66289 - protein, 120 aa, Triticum aestivum
  peptide (1)..(120): Ceres Seq. ID no. 15219915
  misc_feature (1)..(95): Pfam Name: Glycosyl hydrolases family 28 Pfam Description: Glycosyl hydrolases family 28
  misc_feature (1)..(98): Homolog of NCBI NO: 21593399 NR Description: polygalacturonase-like protein [Arabidopsis
  misc_feature (1)..(120): Homolog of NCBI NO: 34393209 NR Description: putative polygalacturonase
  misc_feature (1)..(98): Homolog of NCBI NO: 11263971 NR Description: hypothetical protein T17J13.70 - Arabidopsis
  misc_feature (1)..(98): Homolog of NCBI NO: 30679999 NR Description: polygalacturonase, putative [Arabidopsis
  misc_feature (1)..(98): Homolog of NCBI NO: 18412253 NR Description: polygalacturonase, putative [Arabidopsis
  misc_feature (1)..(103): Homolog of NCBI NO: 22327662 NR Description: expressed protein [Arabidopsis thaliana]
  misc_feature (1)..(120): Homolog of NCBI NO: 21553827 NR Description: polygalacturonase, putative [Arabidopsis thaliana]
  misc_feature (1)..(120): Homolog of NCBI NO: 15228881 NR Description: polygalacturonase, putative [Arabidopsis
  misc_feature (1)..(120): Homolog of NCBI NO: 7939578 NR Description: polygalacturonase-like protein [Arabidopsis
  misc_feature (1)..(118): Homolog of NCBI NO: 40714685 NR Description: putative polygalacturonase
MEDVHVAIEFTGDWSSHPDEHFDLSALPEISGITLKDMVGINISFAGVLSGIDGDPFTNICLSNINFTIADSAHSASWSCSNVSGYSESVFPEACSDLHSQSSNSSICSSTLRYHALATA

SEQ ID NO: 66290 - DNA, 2306 bp, Triticum aestivum
  misc_feature (1)..(2306): Ceres Seq. ID no. 13590691
actccaaacccaaaccaactcaacgcgcacacgcgcccccgagacgccaccagaccgccaccatccgcagctcaggcccgaccgacgcggctcggctcagcagtcggcgtcgtctcctctcccccgctcccccgctcccccctccaccgcctcgatcccgcccgcccgcggccgcgcgatcggatccggccagatcccgcgccggcggccatggagaacctgatctcgctcgtcaacaagctgcagcgcgcctgcacggcgctcggcgaccacggcgaggagagcgccctccccaccctctgggactcgctgccgtccatcgccgtcgtcggcggccagagttcgggcaaatcttcggtgctggagagcgttgttggaaaggatttcctgcccaggggctcaggcattgtcacccgtcgcccgctggttctgcaactccataggattgatggagacagggagtatgcagagttcatgcatgtccccaggaagagattcaccgattttgccatggtgaggaaggagatagctgacgaaactgacagacaaactggccatggaaagggaatatcatctgttcccatccatctaagcatattttctccaaacgttgtgaatttgactcttattgatcttcctgggcttactaaagttgctgttgagggtcagccggagagtatcgttcaggaaattgaaaacatggttcgagcattcattgaaaagcccaactgcatcattctggctgtttctccagccaatcaggatcttgcaacttctgatgctatcaagatttcacgggaagttgacccaaaaggtgaacggacctttggtgtgctcacgaaaattgatttaatggacaagggtactgatgctgttgatatactggaaggaagagcttacaggctccaatttccatggattggtgttgtcaatcgatcccagcaagatatcaacaagagtgtggacatgattgctgctaggcgtagagagcgtgactatttcgcaaacacaccagaatacaagcatctcgctcataggatgggatcagaacatttagcaaagagtctatcaaagcatttggagtctgttattaaatcaagaatcccgggtctccagtctcttataacgaagacagttgcagagctggaaactgaacttactcgtcttggaaagcccattgctaatgatgctggaggaaagctgtacacgattatggaaatatgccgcatgtttgatggcatctacaaagagcatctggatggagtgcgccctggtggtgagaaaatttaccatgtctttgacaatcagtttcctgtggcaattaaacggttgcagtttgataagcaactgtcaatggaaaatgtgaggaagctcataacggaagctgatggataccagcctcacttgatagctccagagcaaggatatcggcgcctcatagaatcttgtcttgttagtatcagaggtcctgccgaggcagctgttgacacggtccatggaatcctaaaggaactagtccacaaggctataaatgaaactcatgagctcaagcagttccccactcttcgtgtggaagttggcaatgcagcttttgagtcgttggaaagaatgagggacgaaagcaagaagaacacattaaagctagttgatatggaaacaagctacttaactgtagattttttcaggaagcttcctcaggatgttgagaagggtggaaatccaagccactctatttttgatagatataatgattcttatctaagacgaattgggacaactgttctggcatatgttaacatggtatcttcaacattgaggaactccatcccaaaatctattgtgtactgccaagtccgtgaggcaaagcgctcattgctcgaccacttctttactgagctgggagcaagagagattaggcaactttcgaagctccttgacgaggaccccgcggtcatggagcggaggacaaacctcgccaagaggctggagctataccggagcgcccaagcagagatcgacgcagttgcatggtcaaaataattttttgtcgacttatcgttccgtagtgtgtgttcacctttactccttgtttggtgacatgtctccccttattctgagggtcatatatagctgattctttcttcccgttctaggtcatattatattcttattagatgacagcagctgtgaggtgtgtcatgtgtttgtgcttttgctccttgtgcttgaggatctctctctaggggggacacctttctgctgtaccttgtctgtatcacgtacgagttcatgttattatgatttcc

SEQ ID NO: 66291 - protein, 679 aa, Triticum aestivum
  peptide (1)..(679): Ceres Seq. ID no. 15220998
  misc_feature (291)..(577): Pfam Name: Dynamin central region Pfam Description: Dynamin central region
  misc_feature (71)..(175): Homolog of NCBI NO: 11357274 NR Description: dynamin-like protein - Arabidopsis thaliana
  misc_feature (172)..(679): Homolog of NCBI NO: 11357274 NR Description: dynamin-like protein - Arabidopsis thaliana
  misc_feature (71)..(221): Homolog of NCBI NO: 34911188 NR Description: putative dynamin-like protein
  misc_feature (189)..(679): Homolog of NCBI NO: 34911188 NR Description: putative dynamin-like protein
  misc_feature (71)..(679): Homolog of NCBI NO: 30695480 NR Description: dynamin-related protein [Arabidopsis thaliana]
  misc_feature (71)..(679): Homolog of NCBI NO: 20453081 NR Description: AT5g42080/MJC20_19 [Arabidopsis thaliana]
  misc_feature (71)..(679): Homolog of NCBI NO: 30693985 NR Description: dynamin-related protein (pir||S59558)
  misc_feature (71)..(679): Homolog of NCBI NO: 5931765 NR Description: phragmoplastin [Nicotiana tabacum]
  misc_feature (71)..(679): Homolog of NCBI NO: 2129825 NR Description: phragmoplastin 12 - soybean
  misc_feature (71)..(679): Homolog of NCBI NO: 2129826 NR Description: phragmoplastin 5 - soybean
TPNPNQLNAHTRPRDATRPPPSAAQARPTRLGSAVGVVSSPPLPRSPLHRLDPARPRPRDRIRPDPAPAAMENLISLVNKLQRACTALGDHGEESALPTLWDSLPSIAVVGGQSSGKSSVLESVVGKDFLPRGSGIVTRRPLVLQLHRIDGDREYAEFMHVPRKRFTDFAMVRKEIADETDRQTGHGKGISSVPIHLSIFSPNVVNLTLIDLPGLTKVAVEGQPESIVQEIENMVRAFIEKPNCIILAVSPANQDLATSDAIKISREVDPKGERTFGVLTKIDLMDKGTDAVDILEGRAYRLQFPWIGVVNRSQQDINKSVDMIAARRRERDYFANTPEYKHLAHRMGSEHLAKSLSKHLESVIKSRIPGLQSLITKTVAELETELTRLGKPIANDAGGKLYTIMEICRMFDGIYKEHLDGVRPGGEKIYHVFDNQFPVAIKRLQFDKQLSMENVRKLITEADGYQPHLIAPEQGYRRLIESCLVSIRGPAEAAVDTVHGILKELVHKAINETHELKQFPTLRVEVGNAAFESLERMRDESKKNTLKLVDMETSYLTVDFFRKLPQDVEKGGNPSHSIFDRYNDSYLRRIGTTVLAYVNMVSSTLRNSIPKSIVYCQVREAKRSLLDHFFTELGAREIRQLSKLLDEDPAVMERRTNLAKRLELYRSAQAEIDAVAWSK

SEQ ID NO: 66292 - protein, 609 aa, Triticum aestivum
  peptide (1)..(609): Ceres Seq. ID no. 15220999
  misc_feature (221)..(507): Pfam Name: Dynamin central region Pfam Description: Dynamin central region
  misc_feature (1)..(105): Homolog of NCBI NO: 11357274 NR Description: dynamin-like protein - Arabidopsis thaliana
  misc_feature (102)..(609): Homolog of NCBI NO: 11357274 NR Description: dynamin-like protein - Arabidopsis thaliana
  misc_feature (1)..(151): Homolog of NCBI NO: 34911188 NR Description: putative dynamin-like protein
  misc_feature (119)..(609): Homolog of NCBI NO: 34911188 NR Description: putative dynamin-like protein
  misc_feature (1)..(609): Homolog of NCBI NO: 30695480 NR Description: dynamin-related protein [Arabidopsis thaliana]
  misc_feature (1)..(609): Homolog of NCBI NO: 20453081 NR Description: AT5g42080/MJC20_19 [Arabidopsis thaliana]
  misc_feature (1)..(609): Homolog of NCBI NO: 30693985 NR Description: dynamin-related protein (pir||S59558)
  misc_feature (1)..(609): Homolog of NCBI NO: 5931765 NR Description: phragmoplastin [Nicotiana tabacum]
  misc_feature (1)..(609): Homolog of NCBI NO: 2129825 NR Description: phragmoplastin 12 - soybean
  misc_feature (1)..(609): Homolog of NCBI NO: 2129826 NR Description: phragmoplastin 5 - soybean
MENLISLVNKLQRACTALGDHGEESALPTLWDSLPSIAVVGGQSSGKSSVLESVVGKDFLPRGSGIVTRRPLVLQLHRIDGDREYAEFMHVPRKRFTDFAMVRKEIADETDRQTGHGKGISSVPIHLSIFSPNVVNLTLIDLPGLTKVAVEGQPESIVQEIENMVRAFIEKPNCIILAVSPANQDLATSDAIKISREVDPKGERTFGVLTKIDLMDKGTDAVDILEGRAYRLQFPWIGVVNRSQQDINKSVDMIAARRRERDYFANTPEYKHLAHRMGSEHLAKSLSKHLESVIKSRIPGLQSLITKTVAELETELTRLGKPIANDAGGKLYTIMEICRMFDGIYKEHLDGVRPGGEKIYHVFDNQFPVAIKRLQFDKQLSMENVRKLITEADGYQPHLIAPEQGYRRLIESCLVSIRGPAEAAVDTVHGILKELVHKAINETHELKQFPTLRVEVGNAAFESLERMRDESKKNTLKLVDMETSYLTVDFFRKLPQDVEKGGNPSHSIFDRYNDSYLRRIGTTVLAYVNMVSSTLRNSIPKSIVYCQVREAKRSLLDHFFTELGAREIRQLSKLLDEDPAVMERRTNLAKRLELYRSAQAEIDAVAWSK

SEQ ID NO: 66293 - protein, 521 aa, Triticum aestivum
  peptide (1)..(521): Ceres Seq. ID no. 15221000
  misc_feature (133)..(419): Pfam Name: Dynamin central region Pfam Description: Dynamin central region
  misc_feature (1)..(17): Homolog of NCBI NO: 11357274 NR Description: dynamin-like protein - Arabidopsis thaliana
  misc_feature (14)..(521): Homolog of NCBI NO: 11357274 NR Description: dynamin-like protein - Arabidopsis thaliana
  misc_feature (1)..(63): Homolog of NCBI NO: 34911188 NR Description: putative dynamin-like protein
  misc_feature (31)..(521): Homolog of NCBI NO: 34911188 NR Description: putative dynamin-like protein
  misc_feature (1)..(521): Homolog of NCBI NO: 30695480 NR Description: dynamin-related protein [Arabidopsis thaliana]
  misc_feature (1)..(521): Homolog of NCBI NO: 20453081 NR Description: AT5g42080/MJC20_19 [Arabidopsis thaliana]
  misc_feature (1)..(521): Homolog of NCBI NO: 30693985 NR Description: dynamin-related protein (pir||S59558)
  misc_feature (1)..(521): Homolog of NCBI NO: 5931765 NR Description: phragmoplastin [Nicotiana tabacum]
  misc_feature (1)..(521): Homolog of NCBI NO: 2129825 NR Description: phragmoplastin 12 - soybean
  misc_feature (1)..(521): Homolog of NCBI NO: 2129826 NR Description: phragmoplastin 5 - soybean
MHVPRKRFTDFAMVRKEIADETDRQTGHGKGISSVPIHLSIFSPNVVNLTLIDLPGLTKVAVEGQPESIVQEIENMVRAFIEKPNCIILAVSPANQDLATSDAIKISREVDPKGERTFGVLTKIDLMDKGTDAVDILEGRAYRLQFPWIGVVNRSQQDINKSVDMIAARRRERDYFANTPEYKHLAHRMGSEHLAKSLSKHLESVIKSRIPGLQSLITKTVAELETELTRLGKPIANDAGGKLYTIMEICRMFDGIYKEHLDGVRPGGEKIYHVFDNQFPVAIKRLQFDKQLSMENVRKLITEADGYQPHLIAPEQGYRRLIESCLVSIRGPAEAAVDTVHGILKELVHKAINETHELKQFPTLRVEVGNAAFESLERMRDESKKNTLKLVDMETSYLTVDFFRKLPQDVEKGGNPSHSIFDRYNDSYLRRIGTTVLAYVNMVSSTLRNSIPKSIVYCQVREAKRSLLDHFFTELGAREIRQLSKLLDEDPAVMERRTNLAKRLELYRSAQAEIDAVAWSK

SEQ ID NO: 66294 - DNA, 1564 bp, Triticum aestivum
  misc_feature (1)..(1564): Ceres Seq. ID no. 13658911
gtcagcaaaccttctccccacccccacccccccgccccgccgcgggagcgctccgcggccgccatggcgtctcctccgggcccggggtctgccaaccgcgcgctctcctcctcatcgagggggccgctctcgcccttccccggcggcgcgggcccgttcctccggcatcaacatcctcccggcggcgactccgacggcggcgcctcgttcgacgaagatgacgacgacgatgacgaggaggaggaggatggggaggatcaggacgccgagctggcggcccgcagctcgcagcagcgacgcgccgcctctccaggtgatcactgacgctgttgcttgctggttcacgcagcaagaatcgggcggcctgtggtgaatggggagaatggagggagtcaaatccaggaagggcagcaatggcagctgtacagctgtggaaccgagcagcatgaccgcgcttcgtctagaggggacgaagaacctggttctgttcccagggagatgagggtggaggatggatatggggttattgggagaagagagggaggccctgcatctagctactgggacctgctcagagcgcacctttcggacccgttgacaggtattctcatggacgacgcaatgattctttcatgtggccattcttatggaagtagtgggatgcagcatatctacagaatgaaagcttgtggtaaatgtggtcagccaatcaccgagaactccattcgaccaaacctggctcttggccttgcagtccaggcatttagacgagaggaagagtcggcaaaaacgttgaaaagaaaaagagaccgcctggaacaggtatacacttttttccgggtctatgttactgaatgcccgaacatggacagttgaacatgttacacgatgttcttaaatctgttctctctgtaaaatgaggacaaatgtggcaacgatgacccgggtccagctgaggtttcaagaggcaaaggtgtccagtatcctttcgctgtcttcgaccgggtgataatcaagggaaacaagaggaccccggagcggttcgtggggcgcgtcgcggtggtgacggctcagtgcttgaatggatggtacgtggtgaagaccctggacaacgcggagagcgtgaagctgcagtaccgttcgctggcgaagttcgtcgacggcggcggcggcgagcctcctgccgtggcctccaacagttcccagaacacaagctggttgtgacttggaaggtacaaaagcagatcatgctgagcacaagcacagaatcagatctccaggcccccatcttttgctgtttccaggaggaggcaaacagtagagtgaggaacattatccttttttggtagccaatcacagtgtcaatctttatggtgctcctctttcctttcctttttctttttgtggcagcaactaggtaccatgtggtgtcagtcagtgtccttgtgatgtgaggctttgtagaatgctaccattccagtacacccttatccaggctgctgtgataaatcaggaagcaatcatggtgccaccaaagggcaaccaccaacacaaaagtttggtg

SEQ ID NO: 66295 - protein, 125 aa, Triticum aestivum
  peptide (1)..(125): Ceres Seq. ID no. 13658912
  misc_feature (25)..(109): Homolog of NCBI NO: 20453175 NR Description: At3g19895 [Arabidopsis thaliana]
  misc_feature (33)..(109): Homolog of NCBI NO: 11994201 NR Description: gb|AAF35943.1~gene_id:MPN9.14~similar to unknown
  misc_feature (25)..(109): Homolog of NCBI NO: 30685540 NR Description: expressed protein [Arabidopsis thaliana]
  misc_feature (20)..(121): Homolog of NCBI NO: 30688358 NR Description: expressed protein [Arabidopsis thaliana]
  misc_feature (20)..(121): Homolog of NCBI NO: 27413505 NR Description: hypothetical protein [Arabidopsis thaliana]
  misc_feature (20)..(121): Homolog of NCBI NO: 30688352 NR Description: expressed protein [Arabidopsis thaliana]
  misc_feature (1)..(108): Homolog of NCBI NO: 28876015 NR Description: hypothetical protein [Oryza sativa (japonica
MRVEDGYGVIGRREGGPASSYWDLLRAHLSDPLTGILMDDAMILSCGHSYGSSGMQHIYRMKACGKCGQPITENSIRPNLALGLAVQAFRREEESAKTLKRKRDRLEQVYTFFRVYVTECPNMDS

SEQ ID NO: 66296 - protein, 123 aa, Triticum aestivum
  peptide (1)..(123): Ceres Seq. ID no. 13658913
SANLLPTPTPPPRRGSAPRPPWRLLRARGLPTARSPPHRGGRSRPSPAARARSSGINILPAATPTAAPRSTKMTTTMTRRRRMGRIRTPSWRPAARSSDAPPLQVITDAVACWFTQQESGGLW

SEQ ID NO: 66297 - protein, 107 aa, Triticum aestivum
  peptide (1)..(107): Ceres Seq. ID no. 13658914
  misc_feature (22)..(107): Homolog of NCBI NO: 28876015 NR Description: hypothetical protein [Oryza sativa (japonica
VSKPSPHPHPPAPPRERSAAAMASPPGPGSANRALSSSSRGPLSPFPGGAGPFLRHQHPPGGDSDGGASFDEDDDDDDEEEEDGEDQDAELAARSSQQRRAASPGDH

SEQ ID NO: 66298 - DNA, 1849 bp, Triticum aestivum
  misc_feature (1)..(1849): Ceres Seq. ID no. 13502874
caaaacataacctcggtaattttgatccggagaaatgaagttgttaaaatacatatgtctgataacttcttcataaatagcattgtatttttatgcaccacagacctaggtggccgacggggtggtctggccgtccggcacacgcctaaacgggtctggcctcacacaaacgcaaaccgcaaagttttatttataagcaggcccttctgagcttgcacgtggacctcacctggtggcactgctactgctgcctcctgcacttggggacaaggcgcagcggagccagcggcggcgtgatcagtcccggcgcctcgttcatgtctagacgtgcctcggcggggatttccccagtcgaagtggcgcacaaggctgcagagcgcgatctccagcaccggcatcgcgaagctgatgccggggcagagccgccggccggcgccgaacgggaggagctggtagtcgttcccccgcaggtccacgccctgcgcgctgccgccgcccaggaatcgctccggccagaactcctccgccgttgctccccacgccgccgggtccctcccgatcgcccacgcgttgacgaagagcgcagtctcagctgggatctcgtagccctgcacgaccgccgcggtcgtcgactggtgcgggatgaggagcggtgccgccgggtggagccggagcacctccttcagcaccgccctgaggtactccatcctgctcaggtcgtcttcctcgatggtcggtttgccttcggtgactcgatctatctcgtcctgcagcttggctattgcccgcgggttcccgacgagctccgccatggcccattccaacgtgaccgatgctgtgtctgtcccgccggctatcatgtccttgatgaggcttttgatgcgatcgttggtgagctcgagtccggcggcgccttcttccctaagccgcagcaggacgtcgaggaagctctcctcccctgcgccgttgtctggcttcttctcaaggtgctctgcgattatctctgataggaacttgtcccactgttcgagctcggcgtcgagcctcttctcgagacccgtcgcccacctaaccaccttcgccgccgcgtcggggagcacgtcacccgcctggagccccgacatgatcgctgcggagttacccaaaagcttttttagcttctcggccgtggcacctgcggcgccggtggtcgcgcgggtgaccaccgcgttgctgtaggcggacaggagctccctcagctccacaatctcacccgcctccgcggcgcggcgcaccccggcgacgagggcggccgcctcggcggcccgcacgggggcgaacgagtcggcacggcgcggggagaggaggtggacgacggccatcttcttgctgcggcgccaggcgtcgccgtagggtgcgaaggagacgttggtggagccgtacgtcagcttgtcggccggcgcgctgggcacgcgggaggcgaaggcgaggtcgtggttcttgtacaggcccgccgccgcggccgccgtggaaaccaccagcgtccgcctgcgcccgagctgcaacagcaggaggccgccatcggtgccgtaccgagcgtgcagctcgcgcaaggagcggtgcgggtggcggccaaggaggtggaggtggccgagcagcggacgcgacggcggcgagggcgggagcttgccacttctgctgcctcgagccttccaaacgacgtagcagaaggtcaagagcaccgcgacgaggacggcgtacggagacatcctccttccgccggaaatgtgttgtccgattcaacggaaaaatgtgttgcctggaactggaaacatatcgtgcggcgttgtgtgcgggtatgcggcgttgt

SEQ ID NO: 66299 - protein, 229 aa, Triticum aestivum
  peptide (1)..(229): Ceres Seq. ID no. 13502875
MSRRASAGISPVEVAHKAAERDLQHRHREADAGAEPPAGAEREELVVVPPQVHALRAAAAQESLRPELLRRCSPRRRVPPDRPRVDEERSLSWDLVALHDRRGRRLVRDEERCRRVEPEHLLQHRPEVLHPAQVVFLDGRFAFGDSIYLVLQLGYCPRVPDELRHGPFQRDRCCVCPAGYHVLDEAFDAIVGELESGGAFFPKPQQDVEEALLPCAVVWLLLKVLCDYL

SEQ ID NO: 66300 - protein, 191 aa, Triticum aestivum
  peptide (1)..(191): Ceres Seq. ID no. 13502876
  misc_feature (1)..(191): Homolog of NCBI NO: 15901602 NR Description: cell wall surface anchor family protein
  misc_feature (1)..(191): Homolog of NCBI NO: 15901602 NR Description: cell wall surface anchor family protein
  misc_feature (1)..(191): Homolog of NCBI NO: 15901602 NR Description: cell wall surface anchor family protein
  misc_feature (1)..(191): Homolog of NCBI NO: 15901602 NR Description: cell wall surface anchor family protein
  misc_feature (1)..(191): Homolog of NCBI NO: 13592175 NR Description: ppg3 [Leishmania major]
  misc_feature (1)..(191): Homolog of NCBI NO: 15901602 NR Description: cell wall surface anchor family protein
  misc_feature (1)..(191): Homolog of NCBI NO: 15901602 NR Description: cell wall surface anchor family protein
  misc_feature (1)..(191): Homolog of NCBI NO: 15901602 NR Description: cell wall surface anchor family protein
  misc_feature (1)..(191): Homolog of NCBI NO: 15901602 NR Description: cell wall surface anchor family protein
  misc_feature (1)..(191): Homolog of NCBI NO: 13592175 NR Description: ppg3 [Leishmania major]
MRSGAAGWSRSTSFSTALRYSILLRSSSSMVGLPSVTRSISSCSLAIARGFPTSSAMAHSNVTDAVSVPPAIMSLMRLLMRSLVSSSPAAPSSLSRSRTSRKLSSPAPLSGFFSRCSAIISDRNLSHCSSSASSLFSRPVAHLTTFAAASGSTSPAWSPDMIAAELPKSFFSFSAVAPAAPVVARVTTALL

SEQ ID NO: 66301 - protein, 162 aa, Triticum aestivum
  peptide (1)..(162): Ceres Seq. ID no. 13502877
  misc_feature (1)..(162): Homolog of NCBI NO: 15901602 NR Description: cell wall surface anchor family protein
  misc_feature (1)..(162): Homolog of NCBI NO: 15901602 NR Description: cell wall surface anchor family protein
  misc_feature (1)..(162): Homolog of NCBI NO: 15901602 NR Description: cell wall surface anchor family protein
  misc_feature (1)..(162): Homolog of NCBI NO: 15901602 NR Description: cell wall surface anchor family protein
  misc_feature (1)..(162): Homolog of NCBI NO: 13592175 NR Description: ppg3 [Leishmania major]
  misc_feature (1)..(162): Homolog of NCBI NO: 15901602 NR Description: cell wall surface anchor family protein
  misc_feature (1)..(162): Homolog of NCBI NO: 15901602 NR Description: cell wall surface anchor family protein
  misc_feature (1)..(162): Homolog of NCBI NO: 15901602 NR Description: cell wall surface anchor family protein
  misc_feature (1)..(162): Homolog of NCBI NO: 15901602 NR Description: cell wall surface anchor family protein
  misc_feature (1)..(162): Homolog of NCBI NO: 13592175 NR Description: ppg3 [Leishmania major]
MVGLPSVTRSISSCSLAIARGFPTSSAMAHSNVTDAVSVPPAIMSLMRLLMRSLVSSSPAAPSSLSRSRTSRKLSSPAPLSGFFSRCSAIISDRNLSHCSSSASSLFSRPVAHLTTFAAASGSTSPAWSPDMIAAELPKSFFSFSAVAPAAPVVARVTTALL

SEQ ID NO: 66302 - DNA, 1662 bp, Triticum aestivum
  misc_feature (1)..(1662): Ceres Seq. ID no. 13658411
ttttagagttcaggattgaaacataaacttttgaaggctggaccatatacaaactcactgaaaaagagacccctcgcgtcgctcccgcgagcgaccgaggggataaccctagccgccggcgcgcgtccctcctcccccctcccccccctcgccgccgcctgtccgcgccgccgggcaaagcccggtgggtgctggcggcggcggggccctttctctccccgctcgtggaggctggcgcgggcgggctctcccgggcgacggcgcggcgcggatccggggcgcggcggcgcatggctgcgctcggcgtcggtgtgcggcacggcaggcctggcgcggagggctggacgcgggtgggtgacgcgcttgtgcccgagacggcggtggcttcggcgcggtcagatctggctcaagacggcgcgggctgcgggcggcgcgggctgcaggtggccacctctctgtcgtggtcgcggcaggtggtggtgacttcgcggcagttggtggtggtggtgcgggccggaggttggggacgacggccgcggcggctctttcggatccgacctcccggctgcgtgggccgagaaggcttgggctgtgggcagcggccctgaccgaggccccctcggctggtcggggtggcggcgcactggcggtggctgcgggggttcgttcccggcggctgctgtggtggtggcaggttgattgcggcggcggccagattttcctggcgtcggcccgtctgtaggctgcctgtatcggccctcgacccctttcctcggcgtccgttcgcttctctcccggagggctggccttctcccggctgcggtccatcatccgtcttgcacccggtgccataggaccgagctggtctcgcgcccggcagcaggaccggctcgtctcgcgcccggcagcaggactgcgctcgtctcgcgcccggcagcaggaccggcccgtctcgtgcccggcggcaggactgtgctcgtctcgcgcccgatgtagcaggacggctcgatggaggcttgttgtggccagcctattgggtctcggcgttgggaccggccaggggtgtgaaaggcggatcctttccgcccgtctctacggtgggggtagcggtggggctcgggggacttggtgtcagggtcttggattccggggcggcggccttggtggtggtggcgcggtgctcatgggcagagctcgtgccttggtgctgcccggctaccacggccgtgtgggcggcgtggtagccggggtgtggcgttcggtggcggtgaaggttggccggggtgaaaacctactctatcttcggacggactggcgacggcgaagatcgctcccttcttgaaggcgtcgtcgcggctatcactgcccgtcgtggtgctccaggggaaactctgatcctcggatcgggcggtggcgactctccagtgccgtatccttcctgaaggcaccgccttggagcccacgattcgtcatatgcggccttacttcttcggatgaagccctcggcggctcttgtagtgctagggtgtgtgttgctgcgctcagcgcctatgtatcatgccttgggtgcgtgtgtgtgtgtttgtggtgggtgtgtgcggttgtaccgggcgttgtggatctttgctttatatataaagcggggcgaaagcctttttcggt

SEQ ID NO: 66303 - protein, 105 aa, Triticum aestivum
  peptide (1)..(105): Ceres Seq. ID no. 15220635
MAALGVGVRHGRPGAEGWTRVGDALVPETAVASARSDLAQDGAGCGRRGLQVATSLSWSRQVVVTSRQLVVVVRAGGWGRRPRRLFRIRPPGCVGREGLGCGQRP

SEQ ID NO: 66304 - protein, 56 aa, Triticum aestivum
  peptide (1)..(56): Ceres Seq. ID no. 15220636
MKPSAALVVLGCVLLRSAPMYHALGACVCVCGGCVRLYRALWIFALYIKRGESLFR

SEQ ID NO: 66305 - protein, 52 aa, Triticum aestivum
  peptide (1)..(52): Ceres Seq. ID no. 15220637
  misc_feature (1)..(34): Homolog of NCBI NO: 30679122 NR Description: expressed protein [Arabidopsis thaliana]
  misc_feature (1)..(22): Homolog of NCBI NO: 34898126 NR Description: putative glycine-rich cell wall protein precursor
  misc_feature (1)..(34): Homolog of NCBI NO: 9625624 NR Description: nuclear antigen EBNA1 [Human herpesvirus 4]
MGRARALVLPGYHGRVGGVVAGVWRSVAVKVGRGENLLYLRTDWRRRRSLPS

SEQ ID NO: 66306 - DNA, 2214 bp, Triticum aestivum
  misc_feature (1)..(2214): Ceres Seq. ID no. 13658720
acagacccgagtctccacccatcccggccactctcgtacggacccgaccgtctacgccggcgtcgccgccgccggagctccagtccgccgcccgctaactcagcgcaaactccagtatcattacaaacccgagatagcaggcgccaaccaccacctcgcatcccgtgccccctccccctcgcggaatccccccgccccccgtcgcctgtgctagggttgcagccgtattcctccggcttttgtttcccgggacacagggaagatgtcgtcgacgcagaagaagaagagcaactataaggagaagatggcgcggcggaaggaggagaacaaaaaagaagaaccagagacaccaaggtaccgagatcgtgcaaaggagcgtcgtgaagatcaaaaccctgactatgaacctacagagcttggttcgtttcatgccgtggcacctcctggagcagatttgaggctagaagatgcccaaaagatttcaattgagaaaagcaaataccttggaggcgatctggagcatactcatttggtcaaagggttggattttgctctacttaacaaagtacggagtgaaattgacaagaagcctgatgcagaggatgggaaggatgccaaggcgagggaaacaaaagaagaccgggcggtctcattccgcactgcaattgcaaagtctgtctaccagtggactgtaaagcaacaacaaagcatgataaaggcgaatgacatgtttcttcctggccggatggcatttatttacaatatggaggatggacttaacagtgatattccaacaactcttcacaggagcaaagctgattgccctgtcccagaggaaatggtcactgtcagcgtagatggctctgtacttgacaggattgccaaaatcatgtcataccttagacttggatcatcagggaaggtattgaagaagaagaaaaaggaaagggatacaaaagggaagagtaatttggcaggcggtgtctacaatgaggtagtaagacctgcccaaagtgatggttctgttcagaaacaccagtcagaaaaggatatgccaccaccacccccacccccacgaaagagtaacttcagtgaaaaggagaaacattctgtccctgttgctagagcagatgacgatgacatattcattggagatggagttgactatactgttcctaacaaggaaatgagccagagccccatctccgaagatatggatgaatccccacgtatccatcagaatcagtccaatttgaatgaacctgtgtatggtcctattcaaccatccgaacctgctcaagcttggcaacagccaatggatggttatgatgctatgcaagcccaaatggcagctgctggataccaaggcgagtggtcaggctatcagtatgcggaacagcagctggcttatccagaacagtacatgcaacagggtactgtgggatacgatgtgttagttgacccaaatatatctcaggatccaaggttgatgactcaagcagacaaggataagggtctaggttctgtcttcaagcgtgatgatgacaggcttaagcagctgagggaaaaagatgcgcgggagaaagacccaaattttatttcagatagttactctgagtgttatcctggttaccagggttataatcaagagattgcagggagtgacgatgaagatgatttgtcaaagatggatatgggtggacgggcgaagggccgtcttcaccgctgggactttgagacggaagaagagtgggcgaaatacaacgatcagaaggaagccatgccaaaggcggcattccagtttggtgtgaagatgcaggatggcaggaagaccaggaagcagaacaaggatcagaagctcagcaacgacctcaacaagatcaacaagatcctggcgaggaagaagggcgataaagatggaggcgaagggcattatgatgacgatctacccagcgggaagaaacagcgagcttgatctaactggtcatccattttttttccgtctgtcttgttggaactgtgaaacggccatgcttttgtgagctgaaaccattaggtccgtagcctgtagtttcatttttgatggacattagtcttgcatggtattcgttgtagaatatgtaacccagatggtyccmcctactcaggtcaggcaaaagtaccacacatgacatgagawgyyaarccmtgtwaaattgtgggrgrcgrttytgk

SEQ ID NO: 66307 - protein, 570 aa, Triticum aestivum
  peptide (1)..(570): Ceres Seq. ID no. 15220656
  misc_feature (416)..(555): Homolog of NCBI NO: 6919955 NR Description: Red protein (RER protein)
  misc_feature (1)..(227): Homolog of NCBI NO: 26352880 NR Description: unnamed protein product [Mus musculus]
  misc_feature (1)..(227): Homolog of NCBI NO: 6919955 NR Description: Red protein (RER protein)
  misc_feature (416)..(555): Homolog of NCBI NO: 34878785 NR Description: similar to Ik protein [Rattus norvegicus]
  misc_feature (1)..(227): Homolog of NCBI NO: 34878785 NR Description: similar to Ik protein [Rattus norvegicus]
  misc_feature (446)..(553): Homolog of NCBI NO: 29179595 NR Description: Similar to IK cytokine, down-regulator of HLA II
  misc_feature (1)..(259): Homolog of NCBI NO: 29179595 NR Description: Similar to IK cytokine, down-regulator of HLA II
  misc_feature (416)..(555): Homolog of NCBI NO: 5901878 NR Description: chondrosarcoma-associated protein 2 [Homo sapiens]
  misc_feature (1)..(234): Homolog of NCBI NO: 5901878 NR Description: chondrosarcoma-associated protein 2 [Homo sapiens]
  misc_feature (8)..(555): Homolog of NCBI NO: 15225312 NR Description: expressed protein [Arabidopsis thaliana]
MSSTQKKKSNYKEKMARRKEENKKEEPETPRYRDRAKERREDQNPDYEPTELGSFHAVAPPGADLRLEDAQKISIEKSKYLGGDLEHTHLVKGLDFALLNKVRSEIDKKPDAEDGKDAKARETKEDRAVSFRTAIAKSVYQWTVKQQQSMIKANDMFLPGRMAFIYNMEDGLNSDIPTTLHRSKADCPVPEEMVTVSVDGSVLDRIAKIMSYLRLGSSGKVLKKKKKERDTKGKSNLAGGVYNEVVRPAQSDGSVQKHQSEKDMPPPPPPPRKSNFSEKEKHSVPVARADDDDIFIGDGVDYTVPNKEMSQSPISEDMDESPRIHQNQSNLNEPVYGPIQPSEPAQAWQQPMDGYDAMQAQMAAAGYQGEWSGYQYAEQQLAYPEQYMQQGTVGYDVLVDPNISQDPRLMTQADKDKGLGSVFKRDDDRLKQLREKDAREKDPNFISDSYSECYPGYQGYNQEIAGSDDEDDLSKMDMGGRAKGRLHRWDFETEEEWAKYNDQKEAMPKAAFQFGVKMQDGRKTRKQNKDQKLSNDLNKINKILARKKGDKDGGEGHYDDDLPSGKKQRA

SEQ ID NO: 66308 - protein, 556 aa, Triticum aestivum
  peptide (1)..(556): Ceres Seq. ID no. 15220657
  misc_feature (402)..(541): Homolog of NCBI NO: 6919955 NR Description: Red protein (RER protein)
  misc_feature (1)..(213): Homolog of NCBI NO: 26352880 NR Description: unnamed protein product [Mus musculus]
  misc_feature (1)..(213): Homolog of NCBI NO: 6919955 NR Description: Red protein (RER protein)
  misc_feature (402)..(541): Homolog of NCBI NO: 34878785 NR Description: similar to Ik protein [Rattus norvegicus]
  misc_feature (1)..(213): Homolog of NCBI NO: 34878785 NR Description: similar to Ik protein [Rattus norvegicus]
  misc_feature (432)..(539): Homolog of NCBI NO: 29179595 NR Description: Similar to IK cytokine, down-regulator of HLA II
  misc_feature (1)..(245): Homolog of NCBI NO: 29179595 NR Description: Similar to IK cytokine, down-regulator of HLA II
  misc_feature (402)..(541): Homolog of NCBI NO: 5901878 NR Description: chondrosarcoma-associated protein 2 [Homo sapiens]
  misc_feature (1)..(220): Homolog of NCBI NO: 5901878 NR Description: chondrosarcoma-associated protein 2 [Homo sapiens]
  misc_feature (1)..(541): Homolog of NCBI NO: 15225312 NR Description: expressed protein [Arabidopsis thaliana]
MARRKEENKKEEPETPRYRDRAKERREDQNPDYEPTELGSFHAVAPPGADLRLEDAQKISIEKSKYLGGDLEHTHLVKGLDFALLNKVRSEIDKKPDAEDGKDAKARETKEDRAVSFRTAIAKSVYQWTVKQQQSMIKANDMFLPGRMAFIYNMEDGLNSDIPTTLHRSKADCPVPEEMVTVSVDGSVLDRIAKIMSYLRLGSSGKVLKKKKKERDTKGKSNLAGGVYNEVVRPAQSDGSVQKHQSEKDMPPPPPPPRKSNFSEKEKHSVPVARADDDDIFIGDGVDYTVPNKEMSQSPISEDMDESPRIHQNQSNLNEPVYGPIQPSEPAQAWQQPMDGYDAMQAQMAAAGYQGEWSGYQYAEQQLAYPEQYMQQGTVGYDVLVDPNISQDPRLMTQADKDKGLGSVFKRDDDRLKQLREKDAREKDPNFISDSYSECYPGYQGYNQEIAGSDDEDDLSKMDMGGRAKGRLHRWDFETEEEWAKYNDQKEAMPKAAFQFGVKMQDGRKTRKQNKDQKLSNDLNKINKILARKKGDKDGGEGHYDDDLPSGKKQRA

SEQ ID NO: 66309 - protein, 421 aa, Triticum aestivum
  peptide (1)..(421): Ceres Seq. ID no. 15220658
  misc_feature (267)..(406): Homolog of NCBI NO: 6919955 NR Description: Red protein (RER protein)
  misc_feature (1)..(78): Homolog of NCBI NO: 26352880 NR Description: unnamed protein product [Mus musculus]
  misc_feature (1)..(78): Homolog of NCBI NO: 6919955 NR Description: Red protein (RER protein)
  misc_feature (267)..(406): Homolog of NCBI NO: 34878785 NR Description: similar to Ik protein [Rattus norvegicus]
  misc_feature (1)..(78): Homolog of NCBI NO: 34878785 NR Description: similar to Ik protein [Rattus norvegicus]
  misc_feature (297)..(404): Homolog of NCBI NO: 29179595 NR Description: Similar to IK cytokine, down-regulator of HLA II
  misc_feature (1)..(110): Homolog of NCBI NO: 29179595 NR Description: Similar to IK cytokine, down-regulator of HLA II
  misc_feature (267)..(406): Homolog of NCBI NO: 5901878 NR Description: chondrosarcoma-associated protein 2 [Homo sapiens]
  misc_feature (1)..(85): Homolog of NCBI NO: 5901878 NR Description: chondrosarcoma-associated protein 2 [Homo sapiens]
  misc_feature (1)..(406): Homolog of NCBI NO: 15225312 NR Description: expressed protein [Arabidopsis thaliana]
MIKANDMFLPGRMAFIYNMEDGLNSDIPTTLHRSKADCPVPEEMVTVSVDGSVLDRIAKIMSYLRLGSSGKVLKKKKKERDTKGKSNLAGGVYNEVVRPAQSDGSVQKHQSEKDMPPPPPPPRKSNFSEKEKHSVPVARADDDDIFIGDGVDYTVPNKEMSQSPISEDMDESPRIHQNQSNLNEPVYGPIQPSEPAQAWQQPMDGYDAMQAQMAAAGYQGEWSGYQYAEQQLAYPEQYMQQGTVGYDVLVDPNISQDPRLMTQADKDKGLGSVFKRDDDRLKQLREKDAREKDPNFISDSYSECYPGYQGYNQEIAGSDDEDDLSKMDMGGRAKGRLHRWDFETEEEWAKYNDQKEAMPKAAFQFGVKMQDGRKTRKQNKDQKLSNDLNKINKILARKKGDKDGGEGHYDDDLPSGKKQRA

SEQ ID NO: 66310 - DNA, 1374 bp, Triticum aestivum
  misc_feature (1)..(1374): Ceres Seq. ID no. 13662634
actcaattacggacccctcaaatcaaaacccaaacacaaaaccctgtcgcgctctgaccgaccgtcataccgcctaccatggcctccctctcgccgtcaccgccccgccgcacacccaccgccggcgggaggcagtcccccttcttccgcgacctcgcccctgccatcccttcccaccggacctccgggtccctcgacccctcatccacgccgcccccgccgccgccccttttcaccctcgacgaccgcctatacgcacaggatttctcccctgatcgatccgcctccaacctcctccccgtcgctccatccccatccccacccacacgcgcttcctccggcaatcgccctccctcgtgggaccgttcccgcgccgttccccccggtccgtgctcgctgagtgactggctcgtggagccggcccgtaaagaggtcctcgcgctgcccccgccatcgccgcctcctactcgtgcggcgaacgcggaggtgcgatcgccggtgattccgttgcctgcgccgtctaggacggctccatcagcgaccgtcacgggggccgacggggaggagtgggtcaccgtgttcggattcaccgcgagggagaccaaccttgttctgcgagagtttgggaagtgtggagtgatactgagacactgctctggcccaagagatggtaattggcttcacatattgtatcagcaccaatatgatgctcgaagggcccttgaaaagaatggaatccagctgtttagtggtgttgcaattggggttaaaattactgatccagtgcagcggcaaatggatgagaagatgagtgagagcaattataagggcttcatggtctccttgccttcgaaatcatctatacagaatgcaggggcatcaagcaatttaggagatctcccacgtccctatgacccaaaagctggcagaaatgttaacagagacatggggtgttcaacaggaagtgttgccatgccagcaaaatcagtattggcgaaaactatggacttgatttttggcatttgatatgcagtgctggagattctatgatatttttctacccttgctcgtcgcttctgtggattctctttttgtcaatgcatgtgctgatctgcgagttccttatttctagttctagtgtctgaagatggtattgtttttcactgcagttgaagtagttcttttccccagcatctgagcatatctattcctgggttctgttgtgtagtatttgcaatgtgaaacgtttgcgttggcaatgtaatatactacagtacctttctaaagtggcgagaggtgtaaaagggttttgatgattatacatggtgttatactcagaccagaaatgatggccagtcatttttcattgcttcg

SEQ ID NO: 66311 - protein, 315 aa, Triticum aestivum
  peptide (1)..(315): Ceres Seq. ID no. 15220711
  misc_feature (160)..(243): Pfam Name: MPPN (rrm-like) domain Pfam Description: MPPN (rrm-like) domain
  misc_feature (1)..(152): Homolog of NCBI NO: 20138131 NR Description: Vegetative cell wall protein gp1 precursor
  misc_feature (1)..(130): Homolog of NCBI NO: 12018149 NR Description: gamete-specific hydroxyproline-rich glycoprotein
  misc_feature (126)..(314): Homolog of NCBI NO: 18859897 NR Description: CG6540-PA [Drosophila melanogaster]
  misc_feature (162)..(276): Homolog of NCBI NO: 34856476 NR Description: similar to CG6540-PA [Rattus norvegicus]
  misc_feature (125)..(276): Homolog of NCBI NO: 19223941 NR Description: mitotic phosphoprotein 44 [Mus musculus]
  misc_feature (2)..(314): Homolog of NCBI NO: 4584796 NR Description: mitotic phosphoprotein 44 [Xenopus laevis]
  misc_feature (2)..(314): Homolog of NCBI NO: 15987768 NR Description: mitotic phosphoprotein 44 [Xenopus laevis]
  misc_feature (47)..(314): Homolog of NCBI NO: 17979410 NR Description: unknown protein [Arabidopsis thaliana]
  misc_feature (47)..(315): Homolog of NCBI NO: 18401087 NR Description: expressed protein [Arabidopsis thaliana]
  misc_feature (75)..(315): Homolog of NCBI NO: 34903646 NR Description: B1015E06.6 [Oryza sativa (japonica
MASLSPSPPRRTPTAGGRQSPFFRDLAPAIPSHRTSGSLDPSSTPPPPPPLFTLDDRLYAQDFSPDRSASNLLPVAPSPSPPTRASSGNRPPSWDRSRAVPPGPCSLSDWLVEPARKEVLALPPPSPPPTRAANAEVRSPVIPLPAPSRTAPSATVTGADGEEWVTVFGFTARETNLVLREFGKCGVILRHCSGPRDGNWLHILYQHQYDARRALEKNGIQLFSGVAIGVKITDPVQRQMDEKMSESNYKGFMVSLPSKSSIQNAGASSNLGDLPRPYDPKAGRNVNRDMGCSTGSVAMPAKSVLAKTMDLIFGI

SEQ ID NO: 66312 - DNA, 1720 bp, Triticum aestivum
  misc_feature (1)..(1720): Ceres Seq. ID no. 13663426
atcgaaaaattactttcgaaaatgctggcgctcacttccttatccccgcgcccggcgcgcccttccccgtctccggccacgcctcctcaccgccggccgccgccgcctcgcggccgtatccgccccacatacgccgtagccacggccgcgtccgacggcggcggcgcggccgacgactaccactccaccatccgctccctaaactcgcacggccgccgccacgtcccccgcaaatccctcggccagaactacatgctgaacgcgagggtgaacgaggagctggtggcggcggcgggggtggaggagggggacgtcgtgctcgagataggccccgggacgggctctctcaccgccgcgctgctcgccgccggcgccaccatcgtcgccgtcgagaaggataagcatatggctacccttgtgagagataggtttggatccacagagcaattgaaggtcattgaagaagatattacaaaatttcacgttcactcccattttctccctatcctggaggagaaatctcatggcaagaaaaaatacgccaaggttgtgtcaaacttaccattcaatgtcagcactgaagttgtcaaacaaattcttccaatgggagatgttttctctgtcatggtgctcatgcttcaggatgaagcggcactacgccttgcaaatgcttcaatacaaacaccagagtaccgacctatcaatgtgtttgtgaatttctactctgaacctgaatacaagttcaaagtagagagggccaactttttccctcaaccgacggttgatggtggcgttataaggtttaaaataaaggatgctggggagtatccgcttgttagttctaacaaaagtttcttttcaatggtgaactccgcgttcaatgggaagcgcaagatgcttcggaaatcacttcaacacctatattcttctgctgacattgaggctgctctgaccaatatcggtcttccgcctacggctagaccgtctgaactggggatggatgatttcgtgaggttgcacaatcacctgggaaaagtatgaccacccctgcgtttcaaaatgcgtatggaatcatcttattggtttgctcgctggactaagcatgccgctgaagtgatttggttcacagctagagcgcactgcagcttgcagattatgcttgctgacagtgaccgcctagtattctccagcagtcccacagccttcaccgcaacataatcggtggcacagcttcagcccacggcgctcttgcatggagatgatcatagtgattgtgatccctattcaaaaccaatgataatatgcaggacatgatttggtcacacaggaatcgcagtttttttccttatcgcagatagcatccctgcaagagtgaagatacgcaggcgttgcatgtgtataatttactggaattatctatcctcttgtactaatcttcgcaagttggaggcagaaatgtagagatcaaatgtctgtcagaacaatctgaagatcaggcaaagatgctagctgctcatagtaaattgccaagagtatttttatgtgttgacatagatggtagatagaggtacggccgttgctttttgagcttaagttttggctataaactacaacgaaacgtgcagatgctcgatgtttgattgtgcagcattctaatacctttttgcctggcagcgtgtcgctgtgatgcaacatacagttactgccagttattttcctg

SEQ ID NO: 66313 - protein, 346 aa, Triticum aestivum
  peptide (1)..(346): Ceres Seq. ID no. 15220718
  misc_feature (73)..(345): Homolog of NCBI NO: 23061997 NR Description: hypothetical protein [Pseudomonas fluorescens
  misc_feature (67)..(345): Homolog of NCBI NO: 29375520 NR Description: dimethyladenosine transferase [Enterococcus
  misc_feature (73)..(346): Homolog of NCBI NO: 15595789 NR Description: rRNA (adenine-N6,N6)-dimethyltransferase
  misc_feature (62)..(345): Homolog of NCBI NO: 15605077 NR Description: Dimethyladenosine Transferase [Chlamydia
  misc_feature (62)..(339): Homolog of NCBI NO: 15835248 NR Description: dimethyladenosine transferase [Chlamydia
  misc_feature (76)..(343): Homolog of NCBI NO: 29840068 NR Description: dimethyladenosine transferase [Chlamydophila
  misc_feature (76)..(343): Homolog of NCBI NO: 33242431 NR Description: dimethyladenosine transferase [Chlamydophila
  misc_feature (76)..(343): Homolog of NCBI NO: 15618967 NR Description: Dimethyladenosine Transferase [Chlamydophila
  misc_feature (51)..(242): Homolog of NCBI NO: 25518538 NR Description: hypothetical protein F22M8.1 - Arabidopsis
  misc_feature (51)..(345): Homolog of NCBI NO: 15220982 NR Description: dimethyladenosine transferase -related
IEKLLSKMLALTSLSPRPARPSPSPATPPHRRPPPPRGRIRPTYAVATAASDGGGAADDYHSTIRSLNSHGRRHVPRKSLGQNYMLNARVNEELVAAAGVEEGDVVLEIGPGTGSLTAALLAAGATIVAVEKDKHMATLVRDRFGSTEQLKVIEEDITKFHVHSHFLPILEEKSHGKKKYAKVVSNLPFNVSTEVVKQILPMGDVFSVMVLMLQDEAALRLANASIQTPEYRPINVFVNFYSEPEYKFKVERANFFPQPTVDGGVIRFKIKDAGEYPLVSSNKSFFSMVNSAFNGKRKMLRKSLQHLYSSADIEAALTNIGLPPTARPSELGMDDFVRLHNHLGKV

SEQ ID NO: 66314 - protein, 339 aa, Triticum aestivum
  peptide (1)..(339): Ceres Seq. ID no. 15220719
  misc_feature (66)..(338): Homolog of NCBI NO: 23061997 NR Description: hypothetical protein [Pseudomonas fluorescens
  misc_feature (60)..(338): Homolog of NCBI NO: 29375520 NR Description: dimethyladenosine transferase [Enterococcus
  misc_feature (66)..(339): Homolog of NCBI NO: 15595789 NR Description: rRNA (adenine-N6,N6)-dimethyltransferase
  misc_feature (55)..(338): Homolog of NCBI NO: 15605077 NR Description: Dimethyladenosine Transferase [Chlamydia
  misc_feature (55)..(332): Homolog of NCBI NO: 15835248 NR Description: dimethyladenosine transferase [Chlamydia
  misc_feature (69)..(336): Homolog of NCBI NO: 29840068 NR Description: dimethyladenosine transferase [Chlamydophila
  misc_feature (69)..(336): Homolog of NCBI NO: 33242431 NR Description: dimethyladenosine transferase [Chlamydophila
  misc_feature (69)..(336): Homolog of NCBI NO: 15618967 NR Description: Dimethyladenosine Transferase [Chlamydophila
  misc_feature (44)..(235): Homolog of NCBI NO: 25518538 NR Description: hypothetical protein F22M8.1 - Arabidopsis
  misc_feature (44)..(338): Homolog of NCBI NO: 15220982 NR Description: dimethyladenosine transferase -related
MLALTSLSPRPARPSPSPATPPHRRPPPPRGRIRPTYAVATAASDGGGAADDYHSTIRSLNSHGRRHVPRKSLGQNYMLNARVNEELVAAAGVEEGDVVLEIGPGTGSLTAALLAAGATIVAVEKDKHMATLVRDRFGSTEQLKVIEEDITKFHVHSHFLPILEEKSHGKKKYAKVVSNLPFNVSTEVVKQILPMGDVFSVMVLMLQDEAALRLANASIQTPEYRPINVFVNFYSEPEYKFKVERANFFPQPTVDGGVIRFKIKDAGEYPLVSSNKSFFSMVNSAFNGKRKMLRKSLQHLYSSADIEAALTNIGLPPTARPSELGMDDFVRLHNHLGKV

SEQ ID NO: 66315 - protein, 262 aa, Triticum aestivum
  peptide (1)..(262): Ceres Seq. ID no. 15220720
  misc_feature (1)..(261): Homolog of NCBI NO: 23061997 NR Description: hypothetical protein [Pseudomonas fluorescens
  misc_feature (1)..(261): Homolog of NCBI NO: 29375520 NR Description: dimethyladenosine transferase [Enterococcus
  misc_feature (1)..(262): Homolog of NCBI NO: 15595789 NR Description: rRNA (adenine-N6,N6)-dimethyltransferase
  misc_feature (1)..(261): Homolog of NCBI NO: 15605077 NR Description: Dimethyladenosine Transferase [Chlamydia
  misc_feature (1)..(255): Homolog of NCBI NO: 15835248 NR Description: dimethyladenosine transferase [Chlamydia
  misc_feature (1)..(259): Homolog of NCBI NO: 29840068 NR Description: dimethyladenosine transferase [Chlamydophila
  misc_feature (1)..(259): Homolog of NCBI NO: 33242431 NR Description: dimethyladenosine transferase [Chlamydophila
  misc_feature (1)..(259): Homolog of NCBI NO: 15618967 NR Description: Dimethyladenosine Transferase [Chlamydophila
  misc_feature (1)..(158): Homolog of NCBI NO: 25518538 NR Description: hypothetical protein F22M8.1 - Arabidopsis
  misc_feature (1)..(261): Homolog of NCBI NO: 15220982 NR Description: dimethyladenosine transferase -related
MLNARVNEELVAAAGVEEGDVVLEIGPGTGSLTAALLAAGATIVAVEKDKHMATLVRDRFGSTEQLKVIEEDITKFHVHSHFLPILEEKSHGKKKYAKVVSNLPFNVSTEVVKQILPMGDVFSVMVLMLQDEAALRLANASIQTPEYRPINVFVNFYSEPEYKFKVERANFFPQPTVDGGVIRFKIKDAGEYPLVSSNKSFFSMVNSAFNGKRKMLRKSLQHLYSSADIEAALTNIGLPPTARPSELGMDDFVRLHNHLGKV

SEQ ID NO: 66316 - DNA, 1387 bp, Triticum aestivum
  misc_feature (1)..(1387): Ceres Seq. ID no. 13658922
ctaatcgaaaactttcttcccgtacgtccgcaggatcggtcaagatggctaacaccgacgctcttagctttttcaaggatttcatggccggtggcatctctgccgctgtgtccaaaaccgccgtcgctcccatcgagcgtgtgaagctgctcctgcaggttcaggcagcatccacccagattgccgccgacaagcagtacaaaggcattgttgactgctttgtccgtatccccaaggagcagggagctctcagcttctggcgtggtaaccttgccaacgtcatcagatacttccccacccaggctcttaacttcgccttcaaagatatctacaagcagattttccttggaggtgtcgacaagaacacccagttctggcgttactttgctggtaacctggcctctggtggtgctgctggtgcctcttccctctgcattgtctaccctcttgacttcgcccgtactcgtcttgctgctgatattggcaagggaccagctgaccgtcagttcagtggtcttggtgactgcctgaagaagaccttcaagtctgatggcctcgttggcatgtaccgtggattcggtgtgtcagtccagggtatcattatctaccgtgctgcctacttcggcttcttcgacactgccaagggcatgctccccaaccctaagaccactcccttcctggtctcatgggctattgctcagactgtcaccactgttgctggtattgcctcttatcccttcgacaccgtccgtcggcgcatgatgatgcaggctggccgtaagaaggctgatatcatgtacactggcaccctcgactgctgggccaagatcgccaagaatgagggtactggtgccttcttcaagggtgccttctccaacgttctcagaggcactggtggtgctcttgtgctggtgttctacgatgagatcaagaagctcctctaaattaattaggaatagattttaggtagaagtgcaggcatccagagttgcgagatctgactcaacattccacattcctgagatcaattcggtagaggatctgcagcttctataaactggtgtagtgcatttcatgtgcaaatgcagaccatgtcagtgttctgatcaagttgaccccatgtgtacaaagtcagatttgcatcttggcttacacttcaatagcagaatttcaattttaaaatctcgaaccatgacttttaggtttgttttactcagtattcattgctcgatcgggaagagctagagaggccgaaagtgaagtaaaatggaagaattaccaaagacattccatccttcatggctgtaccagtgtttcatcaagatggaatggtgattgcaagagattttactgtaactgtccaacaataaataaaagttgatattac

SEQ ID NO: 66317 - protein, 313 aa, Triticum aestivum
  peptide (1)..(313): Ceres Seq. ID no. 15219938
  misc_feature (19)..(313): Homolog of NCBI NO: 2833329 NR Description: ADP,ATP CARRIER PROTEIN (ADP/ATP TRANSLOCASE)
  misc_feature (18)..(313): Homolog of NCBI NO: 31207265 NR Description: ENSANGP00000024030 [Anopheles gambiae]
  misc_feature (19)..(313): Homolog of NCBI NO: 15559050 NR Description: ADP-ATP translocator [Ethmostigmus rubripes]
  misc_feature (19)..(313): Homolog of NCBI NO: 6942136 NR Description: ADP/ATP translocase [Lucilia cuprina]
  misc_feature (19)..(313): Homolog of NCBI NO: 18079273 NR Description: stress-sensitive B CG16944-PA [Drosophila
  misc_feature (4)..(313): Homolog of NCBI NO: 24641090 NR Description: stress-sensitive B CG16944-PC [Drosophila
  misc_feature (19)..(313): Homolog of NCBI NO: 28269709 NR Description: ADP/ATP translocase [Anopheles gambiae]
  misc_feature (4)..(313): Homolog of NCBI NO: 31200033 NR Description: ENSANGP00000020278 [Anopheles gambiae]
  misc_feature (15)..(313): Homolog of NCBI NO: 28261391 NR Description: ADP/ATP translocase [Bombyx mori]
  misc_feature (15)..(313): Homolog of NCBI NO: 28207648 NR Description: ADP/ATP translocase [Manduca sexta]
NRKLSSRTSAGSVKMANTDALSFFKDFMAGGISAAVSKTAVAPIERVKLLLQVQAASTQIAADKQYKGIVDCFVRIPKEQGALSFWRGNLANVIRYFPTQALNFAFKDIYKQIFLGGVDKNTQFWRYFAGNLASGGAAGASSLCIVYPLDFARTRLAADIGKGPADRQFSGLGDCLKKTFKSDGLVGMYRGFGVSVQGIIIYRAAYFGFFDTAKGMLPNPKTTPFLVSWAIAQTVTTVAGIASYPFDTVRRRMMMQAGRKKADIMYTGTLDCWAKIAKNEGTGAFFKGAFSNVLRGTGGALVLVFYDEIKKLL

SEQ ID NO: 66318 - protein, 299 aa, Triticum aestivum
  peptide (1)..(299): Ceres Seq. ID no. 15219939
  misc_feature (5)..(299): Homolog of NCBI NO: 2833329 NR Description: ADP,ATP CARRIER PROTEIN (ADP/ATP TRANSLOCASE)
  misc_feature (4)..(299): Homolog of NCBI NO: 31207265 NR Description: ENSANGP00000024030 [Anopheles gambiae]
  misc_feature (5)..(299): Homolog of NCBI NO: 15559050 NR Description: ADP-ATP translocator [Ethmostigmus rubripes]
  misc_feature (5)..(299): Homolog of NCBI NO: 6942136 NR Description: ADP/ATP translocase [Lucilia cuprina]
  misc_feature (5)..(299): Homolog of NCBI NO: 18079273 NR Description: stress-sensitive B CG16944-PA [Drosophila
  misc_feature (1)..(299): Homolog of NCBI NO: 24641090 NR Description: stress-sensitive B CG16944-PC [Drosophila
  misc_feature (5)..(299): Homolog of NCBI NO: 28269709 NR Description: ADP/ATP translocase [Anopheles gambiae]
  misc_feature (1)..(299): Homolog of NCBI NO: 31200033 NR Description: ENSANGP00000020278 [Anopheles gambiae]
  misc_feature (1)..(299): Homolog of NCBI NO: 28261391 NR Description: ADP/ATP translocase [Bombyx mori]
  misc_feature (1)..(299): Homolog of NCBI NO: 28207648 NR Description: ADP/ATP translocase [Manduca sexta]
MANTDALSFFKDFMAGGISAAVSKTAVAPIERVKLLLQVQAASTQIAADKQYKGIVDCFVRIPKEQGALSFWRGNLANVIRYFPTQALNFAFKDIYKQIFLGGVDKNTQFWRYFAGNLASGGAAGASSLCIVYPLDFARTRLAADIGKGPADRQFSGLGDCLKKTFKSDGLVGMYRGFGVSVQGIIIYRAAYFGFFDTAKGMLPNPKTTPFLVSWAIAQTVTTVAGIASYPFDTVRRRMMMQAGRKKADIMYTGTLDCWAKIAKNEGTGAFFKGAFSNVLRGTGGALVLVFYDEIKKLL

SEQ ID NO: 66319 - protein, 286 aa, Triticum aestivum
  peptide (1)..(286): Ceres Seq. ID no. 15219940
  misc_feature (1)..(286): Homolog of NCBI NO: 2833329 NR Description: ADP,ATP CARRIER PROTEIN (ADP/ATP TRANSLOCASE)
  misc_feature (1)..(286): Homolog of NCBI NO: 31207265 NR Description: ENSANGP00000024030 [Anopheles gambiae]
  misc_feature (1)..(286): Homolog of NCBI NO: 15559050 NR Description: ADP-ATP translocator [Ethmostigmus rubripes]
  misc_feature (1)..(286): Homolog of NCBI NO: 6942136 NR Description: ADP/ATP translocase [Lucilia cuprina]
  misc_feature (1)..(286): Homolog of NCBI NO: 18079273 NR Description: stress-sensitive B CG16944-PA [Drosophila
  misc_feature (1)..(286): Homolog of NCBI NO: 24641090 NR Description: stress-sensitive B CG16944-PC [Drosophila
  misc_feature (1)..(286): Homolog of NCBI NO: 28269709 NR Description: ADP/ATP translocase [Anopheles gambiae]
  misc_feature (1)..(286): Homolog of NCBI NO: 31200033 NR Description: ENSANGP00000020278 [Anopheles gambiae]
  misc_feature (1)..(286): Homolog of NCBI NO: 28261391 NR Description: ADP/ATP translocase [Bombyx mori]
  misc_feature (1)..(286): Homolog of NCBI NO: 28207648 NR Description: ADP/ATP translocase [Manduca sexta]
MAGGISAAVSKTAVAPIERVKLLLQVQAASTQIAADKQYKGIVDCFVRIPKEQGALSFWRGNLANVIRYFPTQALNFAFKDIYKQIFLGGVDKNTQFWRYFAGNLASGGAAGASSLCIVYPLDFARTRLAADIGKGPADRQFSGLGDCLKKTFKSDGLVGMYRGFGVSVQGIIIYRAAYFGFFDTAKGMLPNPKTTPFLVSWAIAQTVTTVAGIASYPFDTVRRRMMMQAGRKKADIMYTGTLDCWAKIAKNEGTGAFFKGAFSNVLRGTGGALVLVFYDEIKKLL

SEQ ID NO: 66320 - DNA, 1931 bp, Triticum aestivum
  misc_feature (1)..(1931): Ceres Seq. ID no. 13662745
ctttccttcgcttcttcctctcccgactcttcccgactccttcggttcctcaccggtcacccccacccctcaggtctgaaaccctctcgcgccgccgccgtcgccgtccccgtcctccctctcgtcgcgcctccgccggcctttcagtttagggtgggatcatgtcttctgcaatggagtcatcgtaccttcctgctactactgagtcaattgaaaaggctcaggaggctaaggatgcttcagagtcaatttcaatcctttaccgtgtgatccaagacccgtcttcatctgcagatgcactgagaataaaagagcttgcgattaccaaccttacaaactacctcactaaagagaaccgtgctgaggatctgcgtaatctcttgacccagctgaggccatttttctcactgattcccaaggccaagactgcaaaaattgtccgtggaatcattgatgccgtcgccaagattcctggaacatctgatcttcagatctcgctctgcaaggagatggtggaatggacgcgtgcagagaaacgtacgttcctcaggcagcgtgtggaggcaaggttagcggcccttcttttggagaatcaagagtacactgaagccctgaccctccttactggacttatcaaggaagtcaggagacttgatgacaagttgcttcttgtggacattgaccttttggaaagcaaactccacttctctctgagaaacctgcctaaggccaaagcttcactgaccgctgcaagaacagcggcgaatgccatttatgttccaccagctcagcagggcactattgatctgcagagtggaatccttcatgcggaagagaaggactacaaaactgcttacagctacttctttgaagcattcgaggctttcaacgcactggacgacccaagagctatcttcagcttgaagtacatgctcttgtgcaagataatggtcaaccatgctgacgatgttgctggaataatctcatctaaggccagcctgaagtatgtgggtcctgatgttgatgctatgaaagccgtagcggatgcctactctaagagatctctcaagtactttgaaaccgcccttcgtgattacaaagcccagcttgaggaggaccctattgtccacaggcatctttcatctctgtatgatacccttctggagcagaacctctgcaggttgattgagccctactcgagggtggagattgagcatgttgctcagatgattgaattgccagttgaccatgtggagaagaagctgtcacaaatgatccttgacaagaaatttgctggtactctagatcaaggtgctggttgcctcattatctttgaggagatgaaaacagaggccatcttccctgccacactcgaaactatttcaaacgttgggaaggttgtggacagtctttacatgaggtctgcgaagatcatggcttgaacactagtacccacatgatagtttatctgttggctatggtttcatcttttaaaagttatattagtgtctttcaagacatttaatcctgtcagtttgacactttaatctgcaatgttgggttttttagttaaaaaaatctaccttgctatgattggcgtgtaccttgaaaactagatggttcaagatgaaccatgttatgctgccgcgacattcttttgtgataattttccattagctttttttttggcctgtgtattgctgaatatacaatgctggaaaaaaaaaaaaaaaaaaaaaaaaaaaaaaaaaaaaaaaaaaaaaaaaaaaaaaaaaaaaaaaaaaamccmwaaaaaaaaaaaaaargtttttycwwyccccccaacccccgggggggggccccnggaacccanattcccccaaaarggrrgccaaataacccscccccytggccctgccttttwaaaaccttcgggawtggaaaaaccctgg

SEQ ID NO: 66321 - protein, 426 aa, Triticum aestivum
  peptide (1)..(426): Ceres Seq. ID no. 15220181
  misc_feature (288)..(392): Pfam Name: PCI domain Pfam Description: PCI domain
  misc_feature (17)..(424): Homolog of NCBI NO: 31242521 NR Description: ENSANGP00000015227 [Anopheles gambiae]
  misc_feature (12)..(424): Homolog of NCBI NO: 28872725 NR Description: proteasome 26S non-ATPase subunit 11
  misc_feature (12)..(424): Homolog of NCBI NO: 2150046 NR Description: 26S proteasome subunit 9 [Homo sapiens]
  misc_feature (12)..(424): Homolog of NCBI NO: 26342168 NR Description: unnamed protein product [Mus musculus]
  misc_feature (1)..(424): Homolog of NCBI NO: 34872897 NR Description: similar to 26S proteasome non-ATPase regulatory
  misc_feature (18)..(424): Homolog of NCBI NO: 17137740 NR Description: Proteasome p44.5 subunit CG10149-PB [Drosophila
  misc_feature (117)..(426): Homolog of NCBI NO: 38093742 NR Description: putative proteosome subunit
  misc_feature (12)..(419): Homolog of NCBI NO: 25332510 NR Description: 19S proteosome subunit 9 [imported] - Arabidopsis
  misc_feature (12)..(426): Homolog of NCBI NO: 15218845 NR Description: 26S proteasome regulatory subunit (RPN6),
  misc_feature (3)..(426): Homolog of NCBI NO: 38344536 NR Description: OSJNBa0027P08.4 [Oryza sativa (japonica
MSSAMESSYLPATTESIEKAQEAKDASESISILYRVIQDPSSSADALRIKELAITNLTNYLTKENRAEDLRNLLTQLRPFFSLIPKAKTAKIVRGIIDAVAKIPGTSDLQISLCKEMVEWTRAEKRTFLRQRVEARLAALLLENQEYTEALTLLTGLIKEVRRLDDKLLLVDIDLLESKLHFSLRNLPKAKASLTAARTAANAIYVPPAQQGTIDLQSGILHAEEKDYKTAYSYFFEAFEAFNALDDPRAIFSLKYMLLCKIMVNHADDVAGIISSKASLKYVGPDVDAMKAVADAYSKRSLKYFETALRDYKAQLEEDPIVHRHLSSLYDTLLEQNLCRLIEPYSRVEIEHVAQMIELPVDHVEKKLSQMILDKKFAGTLDQGAGCLIIFEEMKTEAIFPATLETISNVGKVVDSLYMRSAKIMA

SEQ ID NO: 66322 - protein, 422 aa, Triticum aestivum
  peptide (1)..(422): Ceres Seq. ID no. 15220182
  misc_feature (284)..(388): Pfam Name: PCI domain Pfam Description: PCI domain
  misc_feature (13)..(420): Homolog of NCBI NO: 31242521 NR Description: ENSANGP00000015227 [Anopheles gambiae]
  misc_feature (8)..(420): Homolog of NCBI NO: 28872725 NR Description: proteasome 26S non-ATPase subunit 11
  misc_feature (8)..(420): Homolog of NCBI NO: 2150046 NR Description: 26S proteasome subunit 9 [Homo sapiens]
  misc_feature (8)..(420): Homolog of NCBI NO: 26342168 NR Description: unnamed protein product [Mus musculus]
  misc_feature (1)..(420): Homolog of NCBI NO: 34872897 NR Description: similar to 26S proteasome non-ATPase regulatory
  misc_feature (14)..(420): Homolog of NCBI NO: 17137740 NR Description: Proteasome p44.5 subunit CG10149-PB [Drosophila
  misc_feature (113)..(422): Homolog of NCBI NO: 38093742 NR Description: putative proteosome subunit
  misc_feature (8)..(415): Homolog of NCBI NO: 25332510 NR Description: 19S proteosome subunit 9 [imported] - Arabidopsis
  misc_feature (8)..(422): Homolog of NCBI NO: 15218845 NR Description: 26S proteasome regulatory subunit (RPN6),
  misc_feature (1)..(422): Homolog of NCBI NO: 38344536 NR Description: OSJNBa0027P08.4 [Oryza sativa (japonica
MESSYLPATTESIEKAQEAKDASESISILYRVIQDPSSSADALRIKELAITNLTNYLTKENRAEDLRNLLTQLRPFFSLIPKAKTAKIVRGIIDAVAKIPGTSDLQISLCKEMVEWTRAEKRTFLRQRVEARLAALLLENQEYTEALTLLTGLIKEVRRLDDKLLLVDIDLLESKLHFSLRNLPKAKASLTAARTAANAIYVPPAQQGTIDLQSGILHAEEKDYKTAYSYFFEAFEAFNALDDPRAIFSLKYMLLCKIMVNHADDVAGIISSKASLKYVGPDVDAMKAVADAYSKRSLKYFETALRDYKAQLEEDPIVHRHLSSLYDTLLEQNLCRLIEPYSRVEIEHVAQMIELPVDHVEKKLSQMILDKKFAGTLDQGAGCLIIFEEMKTEAIFPATLETISNVGKVVDSLYMRSAKIMA

SEQ ID NO: 66323 - protein, 310 aa, Triticum aestivum
  peptide (1)..(310): Ceres Seq. ID no. 15220183
  misc_feature (172)..(276): Pfam Name: PCI domain Pfam Description: PCI domain
  misc_feature (1)..(308): Homolog of NCBI NO: 31242521 NR Description: ENSANGP00000015227 [Anopheles gambiae]
  misc_feature (1)..(308): Homolog of NCBI NO: 28872725 NR Description: proteasome 26S non-ATPase subunit 11
  misc_feature (1)..(308): Homolog of NCBI NO: 2150046 NR Description: 26S proteasome subunit 9 [Homo sapiens]
  misc_feature (1)..(308): Homolog of NCBI NO: 26342168 NR Description: unnamed protein product [Mus musculus]
  misc_feature (1)..(308): Homolog of NCBI NO: 34872897 NR Description: similar to 26S proteasome non-ATPase regulatory
  misc_feature (1)..(308): Homolog of NCBI NO: 17137740 NR Description: Proteasome p44.5 subunit CG10149-PB [Drosophila
  misc_feature (1)..(310): Homolog of NCBI NO: 38093742 NR Description: putative proteosome subunit
  misc_feature (1)..(303): Homolog of NCBI NO: 25332510 NR Description: 19S proteosome subunit 9 [imported] - Arabidopsis
  misc_feature (1)..(310): Homolog of NCBI NO: 15218845 NR Description: 26S proteasome regulatory subunit (RPN6),
  misc_feature (1)..(310): Homolog of NCBI NO: 38344536 NR Description: OSJNBa0027P08.4 [Oryza sativa (japonica
MVEWTRAEKRTFLRQRVEARLAALLLENQEYTEALTLLTGLIKEVRRLDDKLLLVDIDLLESKLHFSLRNLPKAKASLTAARTAANAIYVPPAQQGTIDLQSGILHAEEKDYKTAYSYFFEAFEAFNALDDPRAIFSLKYMLLCKIMVNHADDVAGIISSKASLKYVGPDVDAMKAVADAYSKRSLKYFETALRDYKAQLEEDPIVHRHLSSLYDTLLEQNLCRLIEPYSRVEIEHVAQMIELPVDHVEKKLSQMILDKKFAGTLDQGAGCLIIFEEMKTEAIFPATLETISNVGKVVDSLYMRSAKIMA

SEQ ID NO: 66324 - DNA, 1055 bp, Triticum aestivum
  misc_feature (1)..(1055): Ceres Seq. ID no. 13662746
ccrtttaamcwagaacatcctaatcgaaaaacgaggcggagttgaaattccacacggcctctctcttcgccttcgcctgccccctctcgtgctcgcgagccgcgtcaaaaccctagccaccttctgcccaccacatgcaccgcggcagcgaccgctccggcgacccctccggccccgcgggcggcgctcgcagcggcgcggacggcagattcgcgcgcggaccctcgcgctggtccggcggcggcgggggtagccccccgccccaccgctcctcccgcggcgggagcagcgacggcggcggaggcggaggcggaggcgggaggttccatccgtaccgtgcgccgtctgaatacgttgttggcggtggtggaactggagggtacagaggcggcggcggcggcggcggcgacttcggtgagacggccggtggagcgaggagccgctacggaggcggtggcgggggaggccgtggagactactcagatcatgataacaaaagtggttatgttaaactttttgttggatcagttccaagaacagcaaatgaagatgatgttcgacctttattcgaggatcatggagatgttcttgaagttgctttgatcagggataggaaaactggtgaacaacaaggtgagccataagtatatttttcttatattatcaatataccagtatcgctttcttttcaggttctgagagtattaggagcaacaaggttgcatcttctttcagttagatttggcggttgttgaattttgtttcctgcgcttccgttctgtttcttcgtctgggttaatagaaggcaagaaaggaagcagctaactcttggctggttactgtaatctaactaggctccaccctgctggtacataaggtagcagatttgaacaaacaactttgttcaggtcatagcaatcttgtgcttgttgccgtgttcaatgtagtatgaccagaaataactaagggtgctgtgttactgttgcatctatttgttttgaatgcgatgcaaaaggccagaggacctcctaatgaattaagattaacttttcatt

SEQ ID NO: 66325 - protein, 169 aa, Triticum aestivum
  peptide (1)..(169): Ceres Seq. ID no. 15220184
  misc_feature (1)..(112): Pfam Name: Herpesvirus large structural phosphoprotein UL32 Pfam Description: Herpesvirus large structural phosphoprotein UL32
  misc_feature (1)..(116): Homolog of NCBI NO: 15227583 NR Description: glycine-rich protein [Arabidopsis thaliana]
  misc_feature (1)..(124): Homolog of NCBI NO: 121644 NR Description: Glycine-rich cell wall structural protein
  misc_feature (3)..(124): Homolog of NCBI NO: 22093662 NR Description: putative zwille protein [Oryza sativa (japonica
  misc_feature (4)..(112): Homolog of NCBI NO: 121631 NR Description: Glycine-rich protein 2
  misc_feature (4)..(113): Homolog of NCBI NO: 17555156 NR Description: Predicted CDS, putative protein, nematode
  misc_feature (8)..(124): Homolog of NCBI NO: 9758509 NR Description: gene_id:MZA15.15~unknown protein [Arabidopsis
  misc_feature (109)..(167): Homolog of NCBI NO: 34555646 NR Description: flowering time control protein isoform rFCA-3
  misc_feature (109)..(167): Homolog of NCBI NO: 34555650 NR Description: flowering time control protein isoform rFCA-4
  misc_feature (1)..(167): Homolog of NCBI NO: 34555648 NR Description: flowering time control protein isoform rFCA-2
  misc_feature (1)..(167): Homolog of NCBI NO: 33390912 NR Description: gamma flowering time control protein
MHRGSDRSGDPSGPAGGARSGADGRFARGPSRWSGGGGGSPPPHRSSRGGSSDGGGGGGGGGRFHPYRAPSEYVVGGGGTGGYRGGGGGGGDFGETAGGARSRYGGGGGGGRGDYSDHDNKSGYVKLFVGSVPRTANEDDVRPLFEDHGDVLEVALIRDRKTGEQQGEP

SEQ ID NO: 66326 - DNA, 1470 bp, Triticum aestivum
  misc_feature (1)..(1470): Ceres Seq. ID no. 13658153
aaaactacttccccatttatcttttcctttcctatctatctggttcctgcagattcaagatctcgagttttgctctgctccaagcaaagccatggcctccgaacagatggtgcatatgagtcaaggacaaggggaaactagctatgctcgcaactccagtttccagaaggctgagcagaacaggatgaaatccctcatagaagcggtcatcgccgacttatgcggcagcagcagtaccttgttgcatggaaaggtagtaatcgcggacttgggatgctcctccggcccaaatgcgctagcactggtatcaactgccatcaatgccatccacagccaatgccttcacttacagcagccaccacctgaagtatgcgtgctactcaacgacctgcctgacaatgacttcaacacggtggtgaagagcttggtcacgctccttcaaagcaaggatcctgttgtcctgaccggtgtcataccggggtcgttttacgagcggctctttactagtgactccttgcatcttgtatgcgcgtccaacagcttgcaatggctctcaaaggctcctgaggatctaacgagaaatcgcatcccagcgttcgatactgatgaacatgttaggcatgaaaggctcccaatcgtccgtgaggcttatgcacatcagttcagggaagatttcacacttttcctgcagctgagagccaaagaattggtctcgggaggccgaatggttatttccctagtagggacgcgttctaatgtaattgcttccaaattctttcttttcccaggaattgtagctcaaattctaagtgtcatggtcactgagggtgtgatcgacaaagaaaagtttgattctttctatgtgcccgtgcatggaccttccggcgaagaggtgagagaaatcattgaagaagagggctccttttccaccagggagatgcgggtgcacgaccctacgaccgaaatgaacactgctctgagcaccccaaggaagttcgtcaataatctgagagccttattcgagccgataatagtccagcattttggagacattatggatgaatttgtgaggactgcggagctgcactggagcctggatccggatgggagcttgcaagaggagcgggccagaacctctcgagctacgctggttgtatccctcgcaaaggtgtcatgatgaagtaaaggtgcctgaagattacatgcaccgaatttcataaaattgtactattgcttactttgaagcaacaatgtgtgcccatttaattgtgtgaactactgtagtagtggtgttccgtgaatgtactcatggatgcaccaaatgaacttccatctcgcatataaataagcaaaatgccgttgcgtgtgcaatgtggtgtgatgtatggtgtgcacaaattcagccagacatttgtgtcatgtatctgttttagtaagatctgcaatgagagtgaagcagccagaaattcc

SEQ ID NO: 66327 - protein, 391 aa, Triticum aestivum
  peptide (1)..(391): Ceres Seq. ID no. 13658154
  misc_feature (85)..(389): Pfam Name: SAM dependent carboxyl methyltransferase Pfam Description: SAM dependent carboxyl methyltransferase
  misc_feature (39)..(350): Homolog of NCBI NO: 15237695 NR Description: S-adenosyl-L-methionine:carboxyl
  misc_feature (24)..(361): Homolog of NCBI NO: 34911508 NR Description: putative S-adenosyl-L-methionine:salicylic acid
  misc_feature (35)..(188): Homolog of NCBI NO: 6651395 NR Description: floral nectary-specific protein [Brassica rapa
  misc_feature (158)..(361): Homolog of NCBI NO: 6651395 NR Description: floral nectary-specific protein [Brassica rapa
  misc_feature (35)..(361): Homolog of NCBI NO: 13235641 NR Description: S-adenosyl-L-methionine:salicylic acid carboxyl
  misc_feature (27)..(361): Homolog of NCBI NO: 34911486 NR Description: putative S-adenosyl-L-methionine:salicylic acid
  misc_feature (35)..(188): Homolog of NCBI NO: 15223601 NR Description: S-adenosyl-L-methionine:jasmonic acid carboxyl
  misc_feature (158)..(354): Homolog of NCBI NO: 15223601 NR Description: S-adenosyl-L-methionine:jasmonic acid carboxyl
  misc_feature (35)..(188): Homolog of NCBI NO: 13676829 NR Description: S-adenosyl-L-methionine:jasmonic acid carboxyl
  misc_feature (158)..(354): Homolog of NCBI NO: 13676829 NR Description: S-adenosyl-L-methionine:jasmonic acid carboxyl
KLLPHLSFPFLSIWFLQIQDLEFCSAPSKAMASEQMVHMSQGQGETSYARNSSFQKAEQNRMKSLIEAVIADLCGSSSTLLHGKVVIADLGCSSGPNALALVSTAINAIHSQCLHLQQPPPEVCVLLNDLPDNDFNTVVKSLVTLLQSKDPVVLTGVIPGSFYERLFTSDSLHLVCASNSLQWLSKAPEDLTRNRIPAFDTDEHVRHERLPIVREAYAHQFREDFTLFLQLRAKELVSGGRMVISLVGTRSNVIASKFFLFPGIVAQILSVMVTEGVIDKEKFDSFYVPVHGPSGEEVREIIEEEGSFSTREMRVHDPTTEMNTALSTPRKFVNNLRALFEPIIVQHFGDIMDEFVRTAELHWSLDPDGSLQEERARTSRATLVVSLAKVS

SEQ ID NO: 66328 - protein, 361 aa, Triticum aestivum
  peptide (1)..(361): Ceres Seq. ID no. 13658155
  misc_feature (55)..(359): Pfam Name: SAM dependent carboxyl methyltransferase Pfam Description: SAM dependent carboxyl methyltransferase
  misc_feature (9)..(320): Homolog of NCBI NO: 15237695 NR Description: S-adenosyl-L-methionine:carboxyl
  misc_feature (1)..(331): Homolog of NCBI NO: 34911508 NR Description: putative S-adenosyl-L-methionine:salicylic acid
  misc_feature (5)..(158): Homolog of NCBI NO: 6651395 NR Description: floral nectary-specific protein [Brassica rapa
  misc_feature (128)..(331): Homolog of NCBI NO: 6651395 NR Description: floral nectary-specific protein [Brassica rapa
  misc_feature (5)..(331): Homolog of NCBI NO: 13235641 NR Description: S-adenosyl-L-methionine:salicylic acid carboxyl
  misc_feature (1)..(331): Homolog of NCBI NO: 34911486 NR Description: putative S-adenosyl-L-methionine:salicylic acid
  misc_feature (5)..(158): Homolog of NCBI NO: 15223601 NR Description: S-adenosyl-L-methionine:jasmonic acid carboxyl
  misc_feature (128)..(324): Homolog of NCBI NO: 15223601 NR Description: S-adenosyl-L-methionine:jasmonic acid carboxyl
  misc_feature (5)..(158): Homolog of NCBI NO: 13676829 NR Description: S-adenosyl-L-methionine:jasmonic acid carboxyl
  misc_feature (128)..(324): Homolog of NCBI NO: 13676829 NR Description: S-adenosyl-L-methionine:jasmonic acid carboxyl
MASEQMVHMSQGQGETSYARNSSFQKAEQNRMKSLIEAVIADLCGSSSTLLHGKVVIADLGCSSGPNALALVSTAINAIHSQCLHLQQPPPEVCVLLNDLPDNDFNTVVKSLVTLLQSKDPVVLTGVIPGSFYERLFTSDSLHLVCASNSLQWLSKAPEDLTRNRIPAFDTDEHVRHERLPIVREAYAHQFREDFTLFLQLRAKELVSGGRMVISLVGTRSNVIASKFFLFPGIVAQILSVMVTEGVIDKEKFDSFYVPVHGPSGEEVREIIEEEGSFSTREMRVHDPTTEMNTALSTPRKFVNNLRALFEPIIVQHFGDIMDEFVRTAELHWSLDPDGSLQEERARTSRATLVVSLAKVS

SEQ ID NO: 66329 - protein, 356 aa, Triticum aestivum
  peptide (1)..(356): Ceres Seq. ID no. 13658156
  misc_feature (50)..(354): Pfam Name: SAM dependent carboxyl methyltransferase Pfam Description: SAM dependent carboxyl methyltransferase
  misc_feature (4)..(315): Homolog of NCBI NO: 15237695 NR Description: S-adenosyl-L-methionine:carboxyl
  misc_feature (1)..(326): Homolog of NCBI NO: 34911508 NR Description: putative S-adenosyl-L-methionine:salicylic acid
  misc_feature (1)..(153): Homolog of NCBI NO: 6651395 NR Description: floral nectary-specific protein [Brassica rapa
  misc_feature (123)..(326): Homolog of NCBI NO: 6651395 NR Description: floral nectary-specific protein [Brassica rapa
  misc_feature (1)..(326): Homolog of NCBI NO: 13235641 NR Description: S-adenosyl-L-methionine:salicylic acid carboxyl
  misc_feature (1)..(326): Homolog of NCBI NO: 34911486 NR Description: putative S-adenosyl-L-methionine:salicylic acid
  misc_feature (1)..(153): Homolog of NCBI NO: 15223601 NR Description: S-adenosyl-L-methionine:jasmonic acid carboxyl
  misc_feature (123)..(319): Homolog of NCBI NO: 15223601 NR Description: S-adenosyl-L-methionine:jasmonic acid carboxyl
  misc_feature (1)..(153): Homolog of NCBI NO: 13676829 NR Description: S-adenosyl-L-methionine:jasmonic acid carboxyl
  misc_feature (123)..(319): Homolog of NCBI NO: 13676829 NR Description: S-adenosyl-L-methionine:jasmonic acid carboxyl
MVHMSQGQGETSYARNSSFQKAEQNRMKSLIEAVIADLCGSSSTLLHGKVVIADLGCSSGPNALALVSTAINAIHSQCLHLQQPPPEVCVLLNDLPDNDFNTVVKSLVTLLQSKDPVVLTGVIPGSFYERLFTSDSLHLVCASNSLQWLSKAPEDLTRNRIPAFDTDEHVRHERLPIVREAYAHQFREDFTLFLQLRAKELVSGGRMVISLVGTRSNVIASKFFLFPGIVAQILSVMVTEGVIDKEKFDSFYVPVHGPSGEEVREIIEEEGSFSTREMRVHDPTTEMNTALSTPRKFVNNLRALFEPIIVQHFGDIMDEFVRTAELHWSLDPDGSLQEERARTSRATLVVSLAKVS

SEQ ID NO: 66330 - DNA, 2009 bp, Triticum aestivum
  misc_feature (1)..(2009): Ceres Seq. ID no. 14303109
agcaattattctcctccgctacctccgcggtggccagcacaccacaccacaccacgcttcccttgccttgctcccccacctccacacccatctcattcccccctctccccatccccaatggcgccgacctccgagccctagatagatcccccgcgcgcagccgcatggcggagcacgccgcccgccacctccgccgccgcggccccgtcgccggctggtgctgctccttcgccggcgtcccgcccagccccgaccaccgcctccacccccaccgcaccctctcccacgccgccgcgccgccaaccgcaggatctgtgtgcaccggcggcgagggcccgcggaagcaaccacagctgccgcccaaatccccctcctccttccacggctctccctcctccaagctggcgggcctcatcgactacccgcgccggatcctctccccgggccgcgtctcccccatcgaccccgacgcccacccccctcctcctccgacccccaaccccaccgaccagccgcagcacccggagcagcagcagccgccgccgatggccccgttcgtcgcggtgcgggaggaggaggaggaggggcagggggacgggctggatctgaggctctgcctccgcgggagggacggcgccaccggctgcgtcatggacctcgactccgccgtgctctgcgggagcagcgccttcttcgccgccatggcgcccgagcccaacgcctctggtgccggggcccggaggatcgaggtcgacggggtcgacaacgtcgccgccttcagggacgccgtcgagctcatgttccatgccgacgctccgcggtggctcgccagggccggcgtctcgcgagccatcgccgtcctcgaggtggcttcctcgattatgtttgacaaaggaatcagatcatgtttggagtacattgaagcagttccatggaatgagaatgaggaagagaagctaaagcacctctttgctagatgcactttcgatgaagcgttatcaaaagatgtattggcaagattgcaaacacaaccgtctagcagctcggaagacctgactggtcagctcatccaatctgtcaccagcagcacaaacaacagtgcaagaaaagatatgcagtctttgatcaatggtcttctaagcaagagctcagtatatcaaaaggatttgtctggattaaacaaaaggagcctataccagatttgctgctcgtgtctaaacctactggtggaactttttaaggaagactcggagccaaaatgcggcacagaccaggcactgaaagttaggcacaataataaacccatgattgaaagagtgagcaagcaaagtgagaacctcagctggctatttgagatcctggtcaacaatgatatggcagagaatttcgtcgtgctgtgggccggacaagacgatctcatcaggatgcacgagcaagcatcgccaatgttcaggtacgagctaagccggatatcagcgggcgtgttcatcgctctcgggcaagggaaagtgcagtgcccgagcgatctgaggagccaactgttccggggatggttcacgccgatgttaaccgatttcggttggctccaaaggtgctccaaggggctggatgcgagagcgctggaggatagcctggggcaagcccttctcaccctcccgctccgggagcagcagagcctgttcgaggaatggttccagtgcttcgcgtctagtggcgcggaatgcccgaaccttagccgagccttccaggtatggtggcgaaggtcattcgctagatagatttgtcggtagagcccctgcagcagcagaagcctatgagatattgcttggtccgcgtgagttatatcggtatttgtagtgtgtgtatgaatgtaagataagatgaattcctgttagcctgtagagttgaatttttgtttatgatcttggctcggttcttcccagtgtatgcactacttgacaaaaccacaattcccagagtcagcaatagaattgttgtagaattgcttc

SEQ ID NO: 66331 - protein, 591 aa, Triticum aestivum
  peptide (1)..(591): Ceres Seq. ID no. 14303110
  misc_feature (201)..(591): Homolog of NCBI NO: 15222554 NR Description: expressed protein [Arabidopsis thaliana]
  misc_feature (116)..(589): Homolog of NCBI NO: 32488518 NR Description: OSJNBa0011J08.25 [Oryza sativa (japonica
  misc_feature (141)..(591): Homolog of NCBI NO: 15238599 NR Description: expressed protein [Arabidopsis thaliana]
  misc_feature (62)..(591): Homolog of NCBI NO: 39104567 NR Description: putative f13j11 PRLI-interacting factor G
  misc_feature (62)..(591): Homolog of NCBI NO: 25338924 NR Description: hypothetical protein At2g13690 [imported] -
  misc_feature (62)..(591): Homolog of NCBI NO: 18397316 NR Description: f13j11 PRLI-interacting factor G -related
  misc_feature (62)..(591): Homolog of NCBI NO: 21553858 NR Description: unknown [Arabidopsis thaliana]
  misc_feature (71)..(591): Homolog of NCBI NO: 34900946 NR Description: putative PRLI-interacting factor G
  misc_feature (55)..(273): Homolog of NCBI NO: 38347118 NR Description: OSJNBa0009K15.15 [Oryza sativa (japonica
  misc_feature (287)..(591): Homolog of NCBI NO: 38347118 NR Description: OSJNBa0009K15.15 [Oryza sativa (japonica
QLFSSATSAVASTPHHTTLPLPCSPTSTPISFPPLPIPNGADLRALDRSPARSRMAEHAARHLRRRGPVAGWCCSFAGVPPSPDHRLHPHRTLSHAAAPPTAGSVCTGGEGPRKQPQLPPKSPSSFHGSPSSKLAGLIDYPRRILSPGRVSPIDPDAHPPPPPTPNPTDQPQHPEQQQPPPMAPFVAVREEEEEGQGDGLDLRLCLRGRDGATGCVMDLDSAVLCGSSAFFAAMAPEPNASGAGARRIEVDGVDNVAAFRDAVELMFHADAPRWLARAGVSRAIAVLEVASSIMFDKGIRSCLEYIEAVPWNENEEEKLKHLFARCTFDEALSKDVLARLQTQPSSSSEDLTGQLIQSVTSSTNNSARKDMQSLINGLLSKSSVYQKDLSGLNKRSLYQICCSCLNLLVELFKEDSEPKCGTDQALKVRHNNKPMIERVSKQSENLSWLFEILVNNDMAENFVVLWAGQDDLIRMHEQASPMFRYELSRISAGVFIALGQGKVQCPSDLRSQLFRGWFTPMLTDFGWLQRCSKGLDARALEDSLGQALLTLPLREQQSLFEEWFQCFASSGAECPNLSRAFQVWWRRSFAR

SEQ ID NO: 66332 - protein, 537 aa, Triticum aestivum
  peptide (1)..(537): Ceres Seq. ID no. 14303111
  misc_feature (147)..(537): Homolog of NCBI NO: 15222554 NR Description: expressed protein [Arabidopsis thaliana]
  misc_feature (62)..(535): Homolog of NCBI NO: 32488518 NR Description: OSJNBa0011J08.25 [Oryza sativa (japonica
  misc_feature (87)..(537): Homolog of NCBI NO: 15238599 NR Description: expressed protein [Arabidopsis thaliana]
  misc_feature (8)..(537): Homolog of NCBI NO: 39104567 NR Description: putative f13j11 PRLI-interacting factor G
  misc_feature (8)..(537): Homolog of NCBI NO: 25338924 NR Description: hypothetical protein At2g13690 [imported] -
  misc_feature (8)..(537): Homolog of NCBI NO: 18397316 NR Description: f13j11 PRLI-interacting factor G -related
  misc_feature (8)..(537): Homolog of NCBI NO: 21553858 NR Description: unknown [Arabidopsis thaliana]
  misc_feature (17)..(537): Homolog of NCBI NO: 34900946 NR Description: putative PRLI-interacting factor G
  misc_feature (1)..(219): Homolog of NCBI NO: 38347118 NR Description: OSJNBa0009K15.15 [Oryza sativa (japonica
  misc_feature (233)..(537): Homolog of NCBI NO: 38347118 NR Description: OSJNBa0009K15.15 [Oryza sativa (japonica
MAEHAARHLRRRGPVAGWCCSFAGVPPSPDHRLHPHRTLSHAAAPPTAGSVCTGGEGPRKQPQLPPKSPSSFHGSPSSKLAGLIDYPRRILSPGRVSPIDPDAHPPPPPTPNPTDQPQHPEQQQPPPMAPFVAVREEEEEGQGDGLDLRLCLRGRDGATGCVMDLDSAVLCGSSAFFAAMAPEPNASGAGARRIEVDGVDNVAAFRDAVELMFHADAPRWLARAGVSRAIAVLEVASSIMFDKGIRSCLEYIEAVPWNENEEEKLKHLFARCTFDEALSKDVLARLQTQPSSSSEDLTGQLIQSVTSSTNNSARKDMQSLINGLLSKSSVYQKDLSGLNKRSLYQICCSCLNLLVELFKEDSEPKCGTDQALKVRHNNKPMIERVSKQSENLSWLFEILVNNDMAENFVVLWAGQDDLIRMHEQASPMFRYELSRISAGVFIALGQGKVQCPSDLRSQLFRGWFTPMLTDFGWLQRCSKGLDARALEDSLGQALLTLPLREQQSLFEEWFQCFASSGAECPNLSRAFQVWWRRSFAR

SEQ ID NO: 66333 - protein, 410 aa, Triticum aestivum
  peptide (1)..(410): Ceres Seq. ID no. 14303112
  misc_feature (20)..(410): Homolog of NCBI NO: 15222554 NR Description: expressed protein [Arabidopsis thaliana]
  misc_feature (1)..(408): Homolog of NCBI NO: 32488518 NR Description: OSJNBa0011J08.25 [Oryza sativa (japonica
  misc_feature (1)..(410): Homolog of NCBI NO: 15238599 NR Description: expressed protein [Arabidopsis thaliana]
  misc_feature (1)..(410): Homolog of NCBI NO: 39104567 NR Description: putative f13j11 PRLI-interacting factor G
  misc_feature (1)..(410): Homolog of NCBI NO: 25338924 NR Description: hypothetical protein At2g13690 [imported] -
  misc_feature (1)..(410): Homolog of NCBI NO: 18397316 NR Description: f13j11 PRLI-interacting factor G -related
  misc_feature (1)..(410): Homolog of NCBI NO: 21553858 NR Description: unknown [Arabidopsis thaliana]
  misc_feature (1)..(410): Homolog of NCBI NO: 34900946 NR Description: putative PRLI-interacting factor G
  misc_feature (1)..(92): Homolog of NCBI NO: 38347118 NR Description: OSJNBa0009K15.15 [Oryza sativa (japonica
  misc_feature (106)..(410): Homolog of NCBI NO: 38347118 NR Description: OSJNBa0009K15.15 [Oryza sativa (japonica
MAPFVAVREEEEEGQGDGLDLRLCLRGRDGATGCVMDLDSAVLCGSSAFFAAMAPEPNASGAGARRIEVDGVDNVAAFRDAVELMFHADAPRWLARAGVSRAIAVLEVASSIMFDKGIRSCLEYIEAVPWNENEEEKLKHLFARCTFDEALSKDVLARLQTQPSSSSEDLTGQLIQSVTSSTNNSARKDMQSLINGLLSKSSVYQKDLSGLNKRSLYQICCSCLNLLVELFKEDSEPKCGTDQALKVRHNNKPMIERVSKQSENLSWLFEILVNNDMAENFVVLWAGQDDLIRMHEQASPMFRYELSRISAGVFIALGQGKVQCPSDLRSQLFRGWFTPMLTDFGWLQRCSKGLDARALEDSLGQALLTLPLREQQSLFEEWFQCFASSGAECPNLSRAFQVWWRRSFAR

SEQ ID NO: 66334 - DNA, 1745 bp, Triticum aestivum
  misc_feature (1)..(1745): Ceres Seq. ID no. 13663413
aatcgaaagtagcacaccaccgcccagcgcagctcccgagacaccgcatttctcgtctcctctcgctctccgtccaagcaagaagtcaggacgaacacgtcacattcgaccatggacatgcccacggcggcgtgctcaccgtcctcgtcggcgccgcctccgccgtcgtcgtccggcgtcgatgtggccgttgacgcgcggacagaagaggtccggcggcgcctgctcctcgatgccgccatcgacggcaacctcgacctccttgccaggatggcgctggggttgctgccgccggcgcctagcgccacgggcgcggacgccaccgccggcgtctggtcgacgtgcggcagggcgctgcacctggccgcgaccaacggcaggaccgacgtctgccgctacctggtccaggacctcggcatccccgtcgacgccctctccgatgagcgcgagacgccgctgctcctggcggccaccttcggccacaccgccacggcggcctggctcctggagcgcggcgccagcccgcgcgccccggacgtcgacggcgagaccccgctccactgggccgcttacaacggggatcgcgacctggcgatgctgctcctgtgcaagggcgccgacgtgggcgcggcgaacccccggggcacagcgctccacgtcgccgccatgcgggggtgcccggaagtcatccgtgtcctgctgcgccacggcgccgatcccaacaagttcgccagccgtgtcttcacgcccttggtctcatcgcttcttggtggctccgtggaatgcatgaagctgctcattgaggctggggctaatgttcatgccggtggattcagtggagcgacccctctgttgttagcgtgcagccgccgtcgcaacatcggattcgtcaagtgcttgttgaaggctggagcagatccgaaccttcctgacgaacttggtaggttgccgatagaaattgctgcggtccaaggtggaaaaagacttgttcaacttctgtttcctgtgacccgatgccctccaaacatggttggctggagtgttgctggcatcatgagttatgtgaattctgctgcttacaaggagcgggtgagaaaggactcttgtaagaggaaagctgaactaaaactagaagggaacaaggcctacgaaaccaaggactacgacacggctatacttatgtacaacatggcattgaagtttgatgacccaaaggacatagacgcctccatatatgcaaacaagagcctctgttggctgcgccttggtgtgggcgacgaggcgctttcggacgcccaggcctgcatcaggttatggcctgactgggggaaaggctactaccgccaaggcgaggccttccgcttcctgcaggactacgccagcgcttacaccgcgtttgtcaaggcatcggagcttgatccgcagaaccccaagatcgccaacgccctccgggatctcttggagcgcacgaagggcgcctcggtttcacggtgcttggagggaggggtgcaaggacgaagtcaggttctgtctgggccgtgtgatcaagcagtccaagggcagggctcttttgtgcaggcagtaggtagaggtcagccactatccagtggccagtaggaaaatggtgaagcggtgtgaaaactgtggcgggagtcggaggatgtatagttgtttttcggagaaagtctaaaaaaaaccttgaacttggagtcgaaagctaaatcaaaccccgaacttctaatccg

SEQ ID NO: 66335 - protein, 501 aa, Triticum aestivum
  peptide (1)..(501): Ceres Seq. ID no. 13663414
  misc_feature (145)..(176): Pfam Name: Ankyrin repeat Pfam Description: Ankyrin repeat
  misc_feature (29)..(445): Homolog of NCBI NO: 34896852 NR Description: putative ankyrin [Oryza sativa]
  misc_feature (33)..(447): Homolog of NCBI NO: 27542768 NR Description: ankyrin-like protein-like protein [Sorghum
  misc_feature (26)..(451): Homolog of NCBI NO: 15229331 NR Description: ankyrin-related protein [Arabidopsis thaliana]
  misc_feature (327)..(451): Homolog of NCBI NO: 34329680 NR Description: unknown [Nicotiana benthamiana]
  misc_feature (26)..(320): Homolog of NCBI NO: 34329680 NR Description: unknown [Nicotiana benthamiana]
  misc_feature (41)..(450): Homolog of NCBI NO: 27542766 NR Description: ankyrin-like protein-like protein [Sorghum
  misc_feature (327)..(451): Homolog of NCBI NO: 24745936 NR Description: ankyrin-like protein [Solanum tuberosum]
  misc_feature (26)..(341): Homolog of NCBI NO: 24745936 NR Description: ankyrin-like protein [Solanum tuberosum]
  misc_feature (358)..(420): Homolog of NCBI NO: 15528712 NR Description: putative ankyrin-like protein
  misc_feature (106)..(364): Homolog of NCBI NO: 15528712 NR Description: putative ankyrin-like protein
MDMPTAACSPSSSAPPPPSSSGVDVAVDARTEEVRRRLLLDAAIDGNLDLLARMALGLLPPAPSATGADATAGVWSTCGRALHLAATNGRTDVCRYLVQDLGIPVDALSDERETPLLLAATFGHTATAAWLLERGASPRAPDVDGETPLHWAAYNGDRDLAMLLLCKGADVGAANPRGTALHVAAMRGCPEVIRVLLRHGADPNKFASRVFTPLVSSLLGGSVECMKLLIEAGANVHAGGFSGATPLLLACSRRRNIGFVKCLLKAGADPNLPDELGRLPIEIAAVQGGKRLVQLLFPVTRCPPNMVGWSVAGIMSYVNSAAYKERVRKDSCKRKAELKLEGNKAYETKDYDTAILMYNMALKFDDPKDIDASIYANKSLCWLRLGVGDEALSDAQACIRLWPDWGKGYYRQGEAFRFLQDYASAYTAFVKASELDPQNPKIANALRDLLERTKGASVSRCLEGGVQGRSQVLSGPCDQAVQGQGSFVQAVGRGQPLSSGQ

SEQ ID NO: 66336 - protein, 499 aa, Triticum aestivum
  peptide (1)..(499): Ceres Seq. ID no. 13663415
  misc_feature (143)..(174): Pfam Name: Ankyrin repeat Pfam Description: Ankyrin repeat
  misc_feature (27)..(443): Homolog of NCBI NO: 34896852 NR Description: putative ankyrin [Oryza sativa]
  misc_feature (31)..(445): Homolog of NCBI NO: 27542768 NR Description: ankyrin-like protein-like protein [Sorghum
  misc_feature (24)..(449): Homolog of NCBI NO: 15229331 NR Description: ankyrin-related protein [Arabidopsis thaliana]
  misc_feature (325)..(449): Homolog of NCBI NO: 34329680 NR Description: unknown [Nicotiana benthamiana]
  misc_feature (24)..(318): Homolog of NCBI NO: 34329680 NR Description: unknown [Nicotiana benthamiana]
  misc_feature (39)..(448): Homolog of NCBI NO: 27542766 NR Description: ankyrin-like protein-like protein [Sorghum
  misc_feature (325)..(449): Homolog of NCBI NO: 24745936 NR Description: ankyrin-like protein [Solanum tuberosum]
  misc_feature (24)..(339): Homolog of NCBI NO: 24745936 NR Description: ankyrin-like protein [Solanum tuberosum]
  misc_feature (356)..(418): Homolog of NCBI NO: 15528712 NR Description: putative ankyrin-like protein
  misc_feature (104)..(362): Homolog of NCBI NO: 15528712 NR Description: putative ankyrin-like protein
MPTAACSPSSSAPPPPSSSGVDVAVDARTEEVRRRLLLDAAIDGNLDLLARMALGLLPPAPSATGADATAGVWSTCGRALHLAATNGRTDVCRYLVQDLGIPVDALSDERETPLLLAATFGHTATAAWLLERGASPRAPDVDGETPLHWAAYNGDRDLAMLLLCKGADVGAANPRGTALHVAAMRGCPEVIRVLLRHGADPNKFASRVFTPLVSSLLGGSVECMKLLIEAGANVHAGGFSGATPLLLACSRRRNIGFVKCLLKAGADPNLPDELGRLPIEIAAVQGGKRLVQLLFPVTRCPPNMVGWSVAGIMSYVNSAAYKERVRKDSCKRKAELKLEGNKAYETKDYDTAILMYNMALKFDDPKDIDASIYANKSLCWLRLGVGDEALSDAQACIRLWPDWGKGYYRQGEAFRFLQDYASAYTAFVKASELDPQNPKIANALRDLLERTKGASVSRCLEGGVQGRSQVLSGPCDQAVQGQGSFVQAVGRGQPLSSGQ

SEQ ID NO: 66337 - protein, 448 aa, Triticum aestivum
  peptide (1)..(448): Ceres Seq. ID no. 13663416
  misc_feature (92)..(123): Pfam Name: Ankyrin repeat Pfam Description: Ankyrin repeat
  misc_feature (1)..(392): Homolog of NCBI NO: 34896852 NR Description: putative ankyrin [Oryza sativa]
  misc_feature (1)..(394): Homolog of NCBI NO: 27542768 NR Description: ankyrin-like protein-like protein [Sorghum
  misc_feature (1)..(398): Homolog of NCBI NO: 15229331 NR Description: ankyrin-related protein [Arabidopsis thaliana]
  misc_feature (274)..(398): Homolog of NCBI NO: 34329680 NR Description: unknown [Nicotiana benthamiana]
  misc_feature (1)..(267): Homolog of NCBI NO: 34329680 NR Description: unknown [Nicotiana benthamiana]
  misc_feature (1)..(397): Homolog of NCBI NO: 27542766 NR Description: ankyrin-like protein-like protein [Sorghum
  misc_feature (274)..(398): Homolog of NCBI NO: 24745936 NR Description: ankyrin-like protein [Solanum tuberosum]
  misc_feature (1)..(288): Homolog of NCBI NO: 24745936 NR Description: ankyrin-like protein [Solanum tuberosum]
  misc_feature (305)..(367): Homolog of NCBI NO: 15528712 NR Description: putative ankyrin-like protein
  misc_feature (53)..(311): Homolog of NCBI NO: 15528712 NR Description: putative ankyrin-like protein
MALGLLPPAPSATGADATAGVWSTCGRALHLAATNGRTDVCRYLVQDLGIPVDALSDERETPLLLAATFGHTATAAWLLERGASPRAPDVDGETPLHWAAYNGDRDLAMLLLCKGADVGAANPRGTALHVAAMRGCPEVIRVLLRHGADPNKFASRVFTPLVSSLLGGSVECMKLLIEAGANVHAGGFSGATPLLLACSRRRNIGFVKCLLKAGADPNLPDELGRLPIEIAAVQGGKRLVQLLFPVTRCPPNMVGWSVAGIMSYVNSAAYKERVRKDSCKRKAELKLEGNKAYETKDYDTAILMYNMALKFDDPKDIDASIYANKSLCWLRLGVGDEALSDAQACIRLWPDWGKGYYRQGEAFRFLQDYASAYTAFVKASELDPQNPKIANALRDLLERTKGASVSRCLEGGVQGRSQVLSGPCDQAVQGQGSFVQAVGRGQPLSSGQ

SEQ ID NO: 66338 - DNA, 942 bp, Triticum aestivum
  misc_feature (1)..(942): Ceres Seq. ID no. 15179828
acctacccccgttcccccaaaacccaggtacccaggctttccctctgcgagccccccgagccctaagctccagcgagcccctatggcggcgcaggagatcaaggacgccgtgcaggcttacacgggcctctcacccgcggccgccttcaccgtgctggctctcatgctcgccacctacctcatcgtctccaccctcttcgtcgccccagacgccgccgcttccgcaccggcggctcatccccagccgcctcagcagcagaagcaggtgacggaggcggaggcggaggcggaggagccgttcgtgccgctgtttccggaccctgtgcaggtgggcgagatcacgctcgagcagctcagggcgtatgacggcaaggatccagccaagtccatcctcatcgccatccgcggtcaggtctacgacgtctcgcgcgggaggctgttttatggacctcaaggaccatactccttgtttgccgggagggatgcatctcgggccctggcattgatgtcatttgaccttaatgacctgactggagacttggaaggcctgagcccagacgaactggaggttttacaagactgggaagagaagtttaaagagaggtaccctgtggtgggccatcttccttgtgagaaaggcaacagctgatgctcagcctgatcacgaggaagagaaggcctaactctgtgtctgggttcttgtctcgttgcctgtaagttcttgtgtcttttactactggactgcgagcggtagagagatctaatgcgctgacaggtgatgttgtttgtatgtgtgctgcatgagtgtgtgtgactaatgcacctgctttactactactactttggttggtgtgtgtcagtgtgtgggaggaattttgagtgacagagaaaccttggcgctgaaaggccgtgctttagattcgtgccataatccaattcacc

SEQ ID NO: 66339 - protein, 215 aa, Triticum aestivum
  peptide (1)..(215): Ceres Seq. ID no. 15179829
  misc_feature (112)..(206): Pfam Name: Cytochrome b5-like Heme/Steroid binding domain Pfam Description: Cytochrome b5-like Heme/Steroid binding domain
  misc_feature (112)..(213): Homolog of NCBI NO: 18859969 NR Description: CG9066-PA [Drosophila melanogaster]
  misc_feature (101)..(211): Homolog of NCBI NO: 40741827 NR Description: hypothetical protein AN4939.2 [Aspergillus
  misc_feature (112)..(208): Homolog of NCBI NO: 15224648 NR Description: cytochrome b5 domain-containing protein
  misc_feature (112)..(208): Homolog of NCBI NO: 40889041 NR Description: Chain A, Solution Structure Of A Putative
  misc_feature (95)..(213): Homolog of NCBI NO: 15229044 NR Description: cytochrome b5 domain-containing protein
  misc_feature (95)..(213): Homolog of NCBI NO: 4960154 NR Description: putative progesterone-binding protein homolog
  misc_feature (74)..(206): Homolog of NCBI NO: 37535794 NR Description: putative steroid membrane binding protein
  misc_feature (53)..(206): Homolog of NCBI NO: 37535798 NR Description: putative steroid membrane binding protein
  misc_feature (31)..(206): Homolog of NCBI NO: 15242943 NR Description: cytochrome b5 domain-containing protein
  misc_feature (31)..(206): Homolog of NCBI NO: 4960156 NR Description: putative progesterone-binding protein homolog
PTPVPPKPRYPGFPSASPPSPKLQRAPMAAQEIKDAVQAYTGLSPAAAFTVLALMLATYLIVSTLFVAPDAAASAPAAHPQPPQQQKQVTEAEAEAEEPFVPLFPDPVQVGEITLEQLRAYDGKDPAKSILIAIRGQVYDVSRGRLFYGPQGPYSLFAGRDASRALALMSFDLNDLTGDLEGLSPDELEVLQDWEEKFKERYPVVGHLPCEKGNS

SEQ ID NO: 66340 - protein, 188 aa, Triticum aestivum
  peptide (1)..(188): Ceres Seq. ID no. 15179830
  misc_feature (85)..(179): Pfam Name: Cytochrome b5-like Heme/Steroid binding domain Pfam Description: Cytochrome b5-like Heme/Steroid binding domain
  misc_feature (85)..(186): Homolog of NCBI NO: 18859969 NR Description: CG9066-PA [Drosophila melanogaster]
  misc_feature (74)..(184): Homolog of NCBI NO: 40741827 NR Description: hypothetical protein AN4939.2 [Aspergillus
  misc_feature (85)..(181): Homolog of NCBI NO: 15224648 NR Description: cytochrome b5 domain-containing protein
  misc_feature (85)..(181): Homolog of NCBI NO: 40889041 NR Description: Chain A, Solution Structure Of A Putative
  misc_feature (68)..(186): Homolog of NCBI NO: 15229044 NR Description: cytochrome b5 domain-containing protein
  misc_feature (68)..(186): Homolog of NCBI NO: 4960154 NR Description: putative progesterone-binding protein homolog
  misc_feature (47)..(179): Homolog of NCBI NO: 37535794 NR Description: putative steroid membrane binding protein
  misc_feature (26)..(179): Homolog of NCBI NO: 37535798 NR Description: putative steroid membrane binding protein
  misc_feature (4)..(179): Homolog of NCBI NO: 15242943 NR Description: cytochrome b5 domain-containing protein
  misc_feature (4)..(179): Homolog of NCBI NO: 4960156 NR Description: putative progesterone-binding protein homolog
MAAQEIKDAVQAYTGLSPAAAFTVLALMLATYLIVSTLFVAPDAAASAPAAHPQPPQQQKQVTEAEAEAEEPFVPLFPDPVQVGEITLEQLRAYDGKDPAKSILIAIRGQVYDVSRGRLFYGPQGPYSLFAGRDASRALALMSFDLNDLTGDLEGLSPDELEVLQDWEEKFKERYPVVGHLPCEKGNS

SEQ ID NO: 66341 - protein, 161 aa, Triticum aestivum
  peptide (1)..(161): Ceres Seq. ID no. 15179831
  misc_feature (58)..(152): Pfam Name: Cytochrome b5-like Heme/Steroid binding domain Pfam Description: Cytochrome b5-like Heme/Steroid binding domain
  misc_feature (58)..(159): Homolog of NCBI NO: 18859969 NR Description: CG9066-PA [Drosophila melanogaster]
  misc_feature (47)..(157): Homolog of NCBI NO: 40741827 NR Description: hypothetical protein AN4939.2 [Aspergillus
  misc_feature (58)..(154): Homolog of NCBI NO: 15224648 NR Description: cytochrome b5 domain-containing protein
  misc_feature (58)..(154): Homolog of NCBI NO: 40889041 NR Description: Chain A, Solution Structure Of A Putative
  misc_feature (41)..(159): Homolog of NCBI NO: 15229044 NR Description: cytochrome b5 domain-containing protein
  misc_feature (41)..(159): Homolog of NCBI NO: 4960154 NR Description: putative progesterone-binding protein homolog
  misc_feature (20)..(152): Homolog of NCBI NO: 37535794 NR Description: putative steroid membrane binding protein
  misc_feature (1)..(152): Homolog of NCBI NO: 37535798 NR Description: putative steroid membrane binding protein
  misc_feature (1)..(152): Homolog of NCBI NO: 15242943 NR Description: cytochrome b5 domain-containing protein
  misc_feature (1)..(152): Homolog of NCBI NO: 4960156 NR Description: putative progesterone-binding protein homolog
MLATYLIVSTLFVAPDAAASAPAAHPQPPQQQKQVTEAEAEAEEPFVPLFPDPVQVGEITLEQLRAYDGKDPAKSILIAIRGQVYDVSRGRLFYGPQGPYSLFAGRDASRALALMSFDLNDLTGDLEGLSPDELEVLQDWEEKFKERYPVVGHLPCEKGNS

SEQ ID NO: 66342 - DNA, 764 bp, Triticum aestivum
  misc_feature (1)..(764): Ceres Seq. ID no. 15227264
gttcgttccgaccgttcatttgcatcccctttccttccgctggcgcgagggacgggataatggcggcagcgtgctccctctcccccctccctctcgcgccgcctgtggcacccaggccagcgctcttctcgaggtgcgtcgctgctccgcgccgtggtaggaatgccgggggaggcaccgggcgcttgcgcctcgccaggaggctgcgcccgcctgccgccgccatcgaagaggtggagcagaccgaggccatgatgagggtggctgcggacgacgatagcatcaccgccaccgtggtgtcggtgctgctcacggtctcgttcgtcggcctctccctcctcaccatcggggtgatctatctggcggtgcaggacttcttgcagaagagggagagcgagaagtttgagagggaggaagctgagagacagaaagaggaggcgaggcagaagagggccaaagcgaggggaaagaaaagaaatcgacgatgactgcttcttcagtaacctcagtgtgagaactcatggctggttcttctgtaacctggatcattctccggggtatgatttttgtgctggtttcgtgtcattctgacgttctggggcccctttctcatcgtagttcagttcagatgagttccatttcctgtcagttattcaggctgtgaatcgtgagtaaaagtgttatgtactgcaaaatacatggtaaattatatctcaaaaccgacgccgaccgaataaacctgatgcatgcggtcttcggtcctg

SEQ ID NO: 66343 - protein, 161 aa, Triticum aestivum
  peptide (1)..(161): Ceres Seq. ID no. 15227265
  misc_feature (96)..(158): Homolog of NCBI NO: 15227050 NR Description: expressed protein [Arabidopsis thaliana]
  misc_feature (102)..(158): Homolog of NCBI NO: 34902104 NR Description: hypothetical protein [Oryza sativa (japonica
  misc_feature (20)..(117): Homolog of NCBI NO: 34902104 NR Description: hypothetical protein [Oryza sativa (japonica
SFRPFICIPFPSAGARDGIMAAACSLSPLPLAPPVAPRPALFSRCVAAPRRGRNAGGGTGRLRLARRLRPPAAAIEEVEQTEAMMRVAADDDSITATVVSVLLTVSFVGLSLLTIGVIYLAVQDFLQKRESEKFEREEAERQKEEARQKRAKARGKKRNRR

SEQ ID NO: 66344 - protein, 142 aa, Triticum aestivum
  peptide (1)..(142): Ceres Seq. ID no. 15227266
  misc_feature (77)..(139): Homolog of NCBI NO: 15227050 NR Description: expressed protein [Arabidopsis thaliana]
  misc_feature (83)..(139): Homolog of NCBI NO: 34902104 NR Description: hypothetical protein [Oryza sativa (japonica
  misc_feature (1)..(98): Homolog of NCBI NO: 34902104 NR Description: hypothetical protein [Oryza sativa (japonica
MAAACSLSPLPLAPPVAPRPALFSRCVAAPRRGRNAGGGTGRLRLARRLRPPAAAIEEVEQTEAMMRVAADDDSITATVVSVLLTVSFVGLSLLTIGVIYLAVQDFLQKRESEKFEREEAERQKEEARQKRAKARGKKRNRR

SEQ ID NO: 66345 - DNA, 1366 bp, Triticum aestivum
  misc_feature (1)..(1366): Ceres Seq. ID no. 15170103
accctctcccggcccattacattacacgaaagcaaagcatacctgagcagagctgcggcagagcttcgagctgaggccttgtggagtagtcaaacattgagagaacgaaaatggcacggagcccagctcaaatcgctatccggttgatcgctctgctccttctgcttccagtggcgtggtcggcgacgttcacgatgaccaacaactgcggctacacggtgtggccggggctgctgtcgggcgcaggcacggcgccgctgtcgacgacggggttcgcgctggcgcagggcgcgtcggcgactgtgaccgcgccggcgagctggtccgggcgcatgtgggcgcgcacgctctgcgccgaggacgctgccggcaagttcacctgcgccacgggcgactgcggctcgggcgcgctccagtgcaacggcggtggcgctgcgccgccggcctcgcttgtggagttcacgctcgacggctccggtggcatggacttcttcgacgtcagcctggtcgacggctacaacctgccgatgctggtcgtaccgcagggcgctgccactgccgccgccgccagctccacgagcgggcccaagtgcatggccaccggctgcctcgtcgacctgaacgccgcgtgcccggccgcgctgaaggtcacgtcgacgggtgccgccagcagcgcggtcggcgggagcgccatggcgtgccgcagcgcgtgcgaggcgttcggctccccggagtactgctgcagcggcgcgtacgggagccccaacacgtgccggccgtcggcgtactcgcagtacttcaagagcgcgtgcccccgcgcctacagctacgcgtacgacgactccacctccaccttcacctgcgccgccggcaccaactacgccatcaccttctgcccaagcaccaccagtgggaagtacaccgacgagaacccgcaggctgccggcgtgccgcccacgaacggcacgatggtgtaccgcggcggcgagcagttctcaacgggcggcggcgcctccattgccgcccatgcgtcgcagctcctcctcgcggtggccgtcgccgtcgctctgctcctactgtaagcgctggccatgcgtgcaatggcggcaacagcgtacgtactcccgcctctcgaggtgtccttatccggccggcctcttttggcgtgacggaggcagagataatactcgagcggagcacaggagaagggcgggcgggcaagatcaaagtttgacagtgccgctactgatgactgataaaacaaggatatcttacagtagtgtcgtagacttaggttaatgtttactctctacgcttctttgatttgttgagcggaaatgatgatgtgttcattgttcgtcgtgat

SEQ ID NO: 66346 - protein, 323 aa, Triticum aestivum
  peptide (1)..(323): Ceres Seq. ID no. 15170104
  misc_feature (31)..(263): Pfam Name: Thaumatin family Pfam Description: Thaumatin family
  misc_feature (1)..(306): Homolog of NCBI NO: 34905146 NR Description: putative pathogenesis-related protein
  misc_feature (1)..(263): Homolog of NCBI NO: 15238593 NR Description: thaumatin-like protein, putative [Arabidopsis
  misc_feature (9)..(286): Homolog of NCBI NO: 37531036 NR Description: putative thaumatin-like protein
  misc_feature (24)..(264): Homolog of NCBI NO: 4105697 NR Description: thaumatin-like protein [Arabidopsis thaliana]
  misc_feature (6)..(264): Homolog of NCBI NO: 15233437 NR Description: thaumatin family [Arabidopsis thaliana]
  misc_feature (24)..(297): Homolog of NCBI NO: 15222875 NR Description: thaumatin family [Arabidopsis thaliana]
  misc_feature (12)..(323): Homolog of NCBI NO: 6273383 NR Description: SCUTL1 [Vitis vinifera]
  misc_feature (24)..(319): Homolog of NCBI NO: 30686652 NR Description: thaumatin family [Arabidopsis thaliana]
  misc_feature (24)..(319): Homolog of NCBI NO: 25296204 NR Description: hypothetical protein T20H2.19 [imported] -
  misc_feature (2)..(323): Homolog of NCBI NO: 37531042 NR Description: putative thaumatin-like protein
MARSPAQIAIRLIALLLLLPVAWSATFTMTNNCGYTVWPGLLSGAGTAPLSTTGFALAQGASATVTAPASWSGRMWARTLCAEDAAGKFTCATGDCGSGALQCNGGGAAPPASLVEFTLDGSGGMDFFDVSLVDGYNLPMLVVPQGAATAAAASSTSGPKCMATGCLVDLNAACPAALKVTSTGAASSAVGGSAMACRSACEAFGSPEYCCSGAYGSPNTCRPSAYSQYFKSACPRAYSYAYDDSTSTFTCAAGTNYAITFCPSTTSGKYTDENPQAAGVPPTNGTMVYRGGEQFSTGGGASIAAHASQLLLAVAVAVALLLL

SEQ ID NO: 66347 - protein, 295 aa, Triticum aestivum
  peptide (1)..(295): Ceres Seq. ID no. 15170105
  misc_feature (3)..(235): Pfam Name: Thaumatin family Pfam Description: Thaumatin family
  misc_feature (1)..(278): Homolog of NCBI NO: 34905146 NR Description: putative pathogenesis-related protein
  misc_feature (1)..(235): Homolog of NCBI NO: 15238593 NR Description: thaumatin-like protein, putative [Arabidopsis
  misc_feature (1)..(258): Homolog of NCBI NO: 37531036 NR Description: putative thaumatin-like protein
  misc_feature (1)..(236): Homolog of NCBI NO: 4105697 NR Description: thaumatin-like protein [Arabidopsis thaliana]
  misc_feature (1)..(236): Homolog of NCBI NO: 15233437 NR Description: thaumatin family [Arabidopsis thaliana]
  misc_feature (1)..(269): Homolog of NCBI NO: 15222875 NR Description: thaumatin family [Arabidopsis thaliana]
  misc_feature (1)..(295): Homolog of NCBI NO: 6273383 NR Description: SCUTL1 [Vitis vinifera]
  misc_feature (1)..(291): Homolog of NCBI NO: 30686652 NR Description: thaumatin family [Arabidopsis thaliana]
  misc_feature (1)..(291): Homolog of NCBI NO: 25296204 NR Description: hypothetical protein T20H2.19 [imported] -
  misc_feature (1)..(295): Homolog of NCBI NO: 37531042 NR Description: putative thaumatin-like protein
MTNNCGYTVWPGLLSGAGTAPLSTTGFALAQGASATVTAPASWSGRMWARTLCAEDAAGKFTCATGDCGSGALQCNGGGAAPPASLVEFTLDGSGGMDFFDVSLVDGYNLPMLVVPQGAATAAAASSTSGPKCMATGCLVDLNAACPAALKVTSTGAASSAVGGSAMACRSACEAFGSPEYCCSGAYGSPNTCRPSAYSQYFKSACPRAYSYAYDDSTSTFTCAAGTNYAITFCPSTTSGKYTDENPQAAGVPPTNGTMVYRGGEQFSTGGGASIAAHASQLLLAVAVAVALLLL

SEQ ID NO: 66348 - protein, 249 aa, Triticum aestivum
  peptide (1)..(249): Ceres Seq. ID no. 15170106
  misc_feature (1)..(189): Pfam Name: Thaumatin family Pfam Description: Thaumatin family
  misc_feature (1)..(232): Homolog of NCBI NO: 34905146 NR Description: putative pathogenesis-related protein
  misc_feature (1)..(189): Homolog of NCBI NO: 15238593 NR Description: thaumatin-like protein, putative [Arabidopsis
  misc_feature (1)..(212): Homolog of NCBI NO: 37531036 NR Description: putative thaumatin-like protein
  misc_feature (1)..(190): Homolog of NCBI NO: 4105697 NR Description: thaumatin-like protein [Arabidopsis thaliana]
  misc_feature (1)..(190): Homolog of NCBI NO: 15233437 NR Description: thaumatin family [Arabidopsis thaliana]
  misc_feature (1)..(223): Homolog of NCBI NO: 15222875 NR Description: thaumatin family [Arabidopsis thaliana]
  misc_feature (1)..(249): Homolog of NCBI NO: 6273383 NR Description: SCUTL1 [Vitis vinifera]
  misc_feature (1)..(245): Homolog of NCBI NO: 30686652 NR Description: thaumatin family [Arabidopsis thaliana]
  misc_feature (1)..(245): Homolog of NCBI NO: 25296204 NR Description: hypothetical protein T20H2.19 [imported] -
  misc_feature (1)..(249): Homolog of NCBI NO: 37531042 NR Description: putative thaumatin-like protein
MWARTLCAEDAAGKFTCATGDCGSGALQCNGGGAAPPASLVEFTLDGSGGMDFFDVSLVDGYNLPMLVVPQGAATAAAASSTSGPKCMATGCLVDLNAACPAALKVTSTGAASSAVGGSAMACRSACEAFGSPEYCCSGAYGSPNTCRPSAYSQYFKSACPRAYSYAYDDSTSTFTCAAGTNYAITFCPSTTSGKYTDENPQAAGVPPTNGTMVYRGGEQFSTGGGASIAAHASQLLLAVAVAVALLLL

SEQ ID NO: 66349 - DNA, 1725 bp, Triticum aestivum
  misc_feature (1)..(1725): Ceres Seq. ID no. 13657939
attactacgactgcctttcccttcttccaagcaaaccgctcttcgcgtctcaggttcctccgcacaccgctccgccacagtcgacggatcggaaccgcagacccgcccccgccaccaaaccctagcccgccgccccgccgcccgcgatgtcggccgcggccgtcgcgccgagccctgcggcgccgctcccgtcggcgcccccgccgtcctaccccgcggcgccccccgccccctccgccgaggacgacgacgacctctacggccgcctcaagtccctccagcgccacatggagttcgtcgagatccaggaggagtacgtcaaggacgagcagaagaacctgaagcgcgagctgctgcgcgcgcaggaggaggtcaagcggatccagtccgtgccgctcgtcatcggccagttcatggagatggtcgacggcaacaacggcatcgtcggctccaccaccggcagcaactactacgtgcgcatcctcagcaccatcaaccgcgagctgctcaagccctccgcctccgtcgccctgcaccgccactccaacgccctcgtcgacgtgctgccccccgaggccgactccagcatctcgctcctcgcctcgtcggagaagcccaacgtcctgtactcggacattggaggatgtgatatccaaaaacaagaaattcgggaggcagttgagctaccattgacacaccatgaattgtacaagcagattggtattgatccaccaagaggggtgctgctctatggtcctccaggcactggcaagaccatgcttgctaaagctgtggcgcatcacactactgctgcttttatcagagtggttggttcagagtttgtgcagaagtacttgggtgagggcccaaggatggttcgagatgtattccgcttagctaaagagaatgccccggctataatattcattgatgaggttgatgctatagccactgctcgattcgatgctcagaccggggctgaccgagaagttcagcgtattctgatggagctactgaatcagatggatggatttgatcaaacagtgaatgtgaaggttataatggcaaccaatcgggcagatactctagatcctgctctgttgcgtccaggaagactggacaggaaaatcgagttccccctgccggaccggaggcagaagaggcttgttttccaagtttgtactgctaagatgaacttgagtgacgaggttgatttggaagattatgtctccagacctgataaaatcagtgctgctgatatcactgctatttgccaggaagctggcatgcatgctgtccgcaaaaatcggtatgttatcctccccaaggacttcgagaagggttaccgaaccaacgtcaagaagcctgagtcagactttgacttctacaaataaggcagcaaacttttaaagaggatgctttatttcctacaggcgacatgattaacactctagatgaatttgtggatagtcgcctgatagtaatatcgttgtatccccgtgctcgtgtagtttgcacgttcagtctcaccagtgttgttaagctacttgtctgtacaattccttcctaaagtttcgcttgaccattttgcgcttttggaggctgtgatttgtcttccaaaggagaatcgagtacccccttttcgttcttaaagtttaaagtgcattaatctttttgattgaatttcgaaaaaaaaaaaaaaaaaagcttatcgataccgtcgac

SEQ ID NO: 66350 - protein, 415 aa, Triticum aestivum
  peptide (1)..(415): Ceres Seq. ID no. 13657940
  misc_feature (198)..(385): Pfam Name: ATPase family associated with various cellular Pfam Description: ATPase family associated with various cellular
  misc_feature (1)..(415): Homolog of NCBI NO: 17554784 NR Description: Proteasome Regulatory Particle, ATPase-like RPT-3
  misc_feature (29)..(415): Homolog of NCBI NO: 26341428 NR Description: unnamed protein product [Mus musculus]
  misc_feature (29)..(415): Homolog of NCBI NO: 30585275 NR Description: Homo sapiens proteasome (prosome, macropain) 26S
  misc_feature (29)..(415): Homolog of NCBI NO: 25742677 NR Description: proteasome 26S ATPase subunit 4 [Rattus
  misc_feature (29)..(415): Homolog of NCBI NO: 5729991 NR Description: proteasome 26S ATPase subunit 4 isoform 1
  misc_feature (33)..(415): Homolog of NCBI NO: 18860063 NR Description: CG16916-PA [Drosophila melanogaster]
  misc_feature (23)..(415): Homolog of NCBI NO: 1172638 NR Description: 26S PROTEASE REGULATORY SUBUNIT 6B (ATPASE MS73)
  misc_feature (48)..(415): Homolog of NCBI NO: 17298145 NR Description: 26S proteasome regulatory particle triple-A
  misc_feature (23)..(415): Homolog of NCBI NO: 15237159 NR Description: 26S proteasome AAA-ATPase subunit RPT3
  misc_feature (2)..(415): Homolog of NCBI NO: 1709798 NR Description: 26S PROTEASE REGULATORY SUBUNIT 6B HOMOLOG
MSAAAVAPSPAAPLPSAPPPSYPAAPPAPSAEDDDDLYGRLKSLQRHMEFVEIQEEYVKDEQKNLKRELLRAQEEVKRIQSVPLVIGQFMEMVDGNNGIVGSTTGSNYYVRILSTINRELLKPSASVALHRHSNALVDVLPPEADSSISLLASSEKPNVLYSDIGGCDIQKQEIREAVELPLTHHELYKQIGIDPPRGVLLYGPPGTGKTMLAKAVAHHTTAAFIRVVGSEFVQKYLGEGPRMVRDVFRLAKENAPAIIFIDEVDAIATARFDAQTGADREVQRILMELLNQMDGFDQTVNVKVIMATNRADTLDPALLRPGRLDRKIEFPLPDRRQKRLVFQVCTAKMNLSDEVDLEDYVSRPDKISAADITAICQEAGMHAVRKNRYVILPKDFEKGYRTNVKKPESDFDFYK

SEQ ID NO: 66351 - protein, 368 aa, Triticum aestivum
  peptide (1)..(368): Ceres Seq. ID no. 13657941
  misc_feature (151)..(338): Pfam Name: ATPase family associated with various cellular Pfam Description: ATPase family associated with various cellular
  misc_feature (1)..(368): Homolog of NCBI NO: 17554784 NR Description: Proteasome Regulatory Particle, ATPase-like RPT-3
  misc_feature (1)..(368): Homolog of NCBI NO: 26341428 NR Description: unnamed protein product [Mus musculus]
  misc_feature (1)..(368): Homolog of NCBI NO: 25742677 NR Description: proteasome 26S ATPase subunit 4 [Rattus
  misc_feature (1)..(368): Homolog of NCBI NO: 30585275 NR Description: Homo sapiens proteasome (prosome, macropain) 26S
  misc_feature (1)..(368): Homolog of NCBI NO: 5729991 NR Description: proteasome 26S ATPase subunit 4 isoform 1
  misc_feature (1)..(368): Homolog of NCBI NO: 18860063 NR Description: CG16916-PA [Drosophila melanogaster]
  misc_feature (1)..(368): Homolog of NCBI NO: 1172638 NR Description: 26S PROTEASE REGULATORY SUBUNIT 6B (ATPASE MS73)
  misc_feature (1)..(368): Homolog of NCBI NO: 17298145 NR Description: 26S proteasome regulatory particle triple-A
  misc_feature (1)..(368): Homolog of NCBI NO: 15237159 NR Description: 26S proteasome AAA-ATPase subunit RPT3
  misc_feature (1)..(368): Homolog of NCBI NO: 1709798 NR Description: 26S PROTEASE REGULATORY SUBUNIT 6B HOMOLOG
MEFVEIQEEYVKDEQKNLKRELLRAQEEVKRIQSVPLVIGQFMEMVDGNNGIVGSTTGSNYYVRILSTINRELLKPSASVALHRHSNALVDVLPPEADSSISLLASSEKPNVLYSDIGGCDIQKQEIREAVELPLTHHELYKQIGIDPPRGVLLYGPPGTGKTMLAKAVAHHTTAAFIRVVGSEFVQKYLGEGPRMVRDVFRLAKENAPAIIFIDEVDAIATARFDAQTGADREVQRILMELLNQMDGFDQTVNVKVIMATNRADTLDPALLRPGRLDRKIEFPLPDRRQKRLVFQVCTAKMNLSDEVDLEDYVSRPDKISAADITAICQEAGMHAVRKNRYVILPKDFEKGYRTNVKKPESDFDFYK

SEQ ID NO: 66352 - protein, 326 aa, Triticum aestivum
  peptide (1)..(326): Ceres Seq. ID no. 13657942
  misc_feature (109)..(296): Pfam Name: ATPase family associated with various cellular Pfam Description: ATPase family associated with various cellular
  misc_feature (1)..(326): Homolog of NCBI NO: 17554784 NR Description: Proteasome Regulatory Particle, ATPase-like RPT-3
  misc_feature (1)..(326): Homolog of NCBI NO: 26341428 NR Description: unnamed protein product [Mus musculus]
  misc_feature (1)..(326): Homolog of NCBI NO: 30585275 NR Description: Homo sapiens proteasome (prosome, macropain) 26S
  misc_feature (1)..(326): Homolog of NCBI NO: 25742677 NR Description: proteasome 26S ATPase subunit 4 [Rattus
  misc_feature (1)..(326): Homolog of NCBI NO: 5729991 NR Description: proteasome 26S ATPase subunit 4 isoform 1
  misc_feature (1)..(326): Homolog of NCBI NO: 18860063 NR Description: CG16916-PA [Drosophila melanogaster]
  misc_feature (1)..(326): Homolog of NCBI NO: 1172638 NR Description: 26S PROTEASE REGULATORY SUBUNIT 6B (ATPASE MS73)
  misc_feature (1)..(326): Homolog of NCBI NO: 17298145 NR Description: 26S proteasome regulatory particle triple-A
  misc_feature (1)..(326): Homolog of NCBI NO: 15237159 NR Description: 26S proteasome AAA-ATPase subunit RPT3
  misc_feature (1)..(326): Homolog of NCBI NO: 1709798 NR Description: 26S PROTEASE REGULATORY SUBUNIT 6B HOMOLOG
MEMVDGNNGIVGSTTGSNYYVRILSTINRELLKPSASVALHRHSNALVDVLPPEADSSISLLASSEKPNVLYSDIGGCDIQKQEIREAVELPLTHHELYKQIGIDPPRGVLLYGPPGTGKTMLAKAVAHHTTAAFIRVVGSEFVQKYLGEGPRMVRDVFRLAKENAPAIIFIDEVDAIATARFDAQTGADREVQRILMELLNQMDGFDQTVNVKVIMATNRADTLDPALLRPGRLDRKIEFPLPDRRQKRLVFQVCTAKMNLSDEVDLEDYVSRPDKISAADITAICQEAGMHAVRKNRYVILPKDFEKGYRTNVKKPESDFDFYK

SEQ ID NO: 66353 - DNA, 2048 bp, Triticum aestivum
  misc_feature (1)..(2048): Ceres Seq. ID no. 15169490
atactaaacctaatcccatatagcctagcctaatcgagcacaccgccgccgccgccgcgccggttcagcgctgccctcacatcgccggcagcccagccctcacgctgcggccgtggcgccgtcctctacgccctccgtcgccgccgtcctctacgcccctctgccgccgccgaagctctccacggcaacaaccctctccaccgtcgacggcaccctgtagtcttgcacgcctccgacttctgcacccgaaaattattatccaacacatacgatagagacaggctgagattgttaaatggcaaagagaaagatgggttcagaagaggacatacgtggaaaaacggtgaaaagaaagggaccgaggcttcagctgactagcctgccaacggaaattctctgttgtatcttgtcgcaactgccgataaaagaagctgtgcggactagcatactgtaggaacagtggagatgtctttggcgttgccactcgaatctagcattcagtcttatatcaatgttgccagcagttcctcgtaatcgtatcattggagcgctaaaacttgatgataataaactgaggaagcaagagtttattcagagagttgatgcagtcctagagaaacacagtggtgcaggggttgacaggattcagtttcgtgctccatttgataataagcatagagaccagatagaaagatgggtgaactttgctactgcctcgaaggcgaagcagattattttcgatttctcgaccgccagcgacataagtcggccatgtaacttcgatttgcatcttcttgatgatagtaaaagtttaagcttgcggtctataaaactctgctctgtttctctaaaggtgcccgtgggattcaagggttttcagaaccttaaatcgacttacctagcagacacaaatattactgatgatggtcttcaacatttgatgtccaactgcagtgttctagagttccttggaattgcaggttgtgcaatgcttacaacgttgcaaatatctcatccttcaaacacacttaagcatttgcatgtatatgactgctgtttgcttcaagggatggagttaaactttggtctggtaagacttgagtacagaggtctgccgattgtgttatcgcctcctggaaccttgcttctaacaaatatgtgcataaagttggagggtatttgtacttctcttgaatacatcttcaccaaacttcgtgataatgtgcctcgtctcgaggttctgaatctaaaatgccaggagtataagatgactacattgccaggaaagctgcatgagtttgtttatttgaagcacctgatattggagttaacttttgagagctgtcagagagggaagactgatatccttcaatttgcctgccttctggttgctgctccttccttagaaaagcttgaatttcatatgtggctgcgctggggtcgggaacggtatagagccgaggacgggagtctccggagccttccttcccagccacactcccatctcaggtcggtcgatatcacggggttttacggcgagaaggaccggctggagcttgtgctccacatcctcagagattccgttgcgctggagtcgatgaaggtagatccaagccctgtggttgctgctgatgttaaccgacttgggggactggggagcatgcatgttcctcattttgtggatggctatgaagtcgcccttgagttcctctgcagcagagaccgtcgcaatgttgtccatggcgcgagccccgatatcatcgagagggcccgacgtgggtcttcccccctgagtccacgcaacagtagtgcaaaggcatcctggcaacgtgtgaagagggtgaagcgattgtcgcggccttcctccagccgaggagcttcctgaagctgctctatataccggcaagtacctggaaacagacgagaagcaaaagaatccagctctgccgacgtaatagagccgtcgtgttgtgggttccctgaggttgctatattttctggctttgttgtgttaaaaaaacttcaatgatttcagcaacttttgtgtc

SEQ ID NO: 66354 - protein, 457 aa, Triticum aestivum
  peptide (1)..(457): Ceres Seq. ID no. 15169491
  misc_feature (1)..(368): Homolog of NCBI NO: 5803254 NR Description: ESTs C97429(C60159),D22427(C11106), correspond to a region of the predicted gene.~hypothetical
  misc_feature (1)..(372): Homolog of NCBI NO: 18481703 NR Description: hypothetical protein [Sorghum bicolor]
  misc_feature (1)..(409): Homolog of NCBI NO: 34899896 NR Description: OJ1714_H10.31 [Oryza sativa (japonica
  misc_feature (1)..(409): Homolog of NCBI NO: 38344931 NR Description: OSJNBa0018M05.22 [Oryza sativa (japonica
  misc_feature (292)..(409): Homolog of NCBI NO: 33146738 NR Description: unknown protein [Oryza sativa (japonica
  misc_feature (1)..(242): Homolog of NCBI NO: 33146738 NR Description: unknown protein [Oryza sativa (japonica
  misc_feature (293)..(409): Homolog of NCBI NO: 34899882 NR Description: OJ1714_H10.24 [Oryza sativa (japonica
  misc_feature (1)..(242): Homolog of NCBI NO: 34899882 NR Description: OJ1714_H10.24 [Oryza sativa (japonica
  misc_feature (1)..(409): Homolog of NCBI NO: 34394889 NR Description: unknown protein [Oryza sativa (japonica
  misc_feature (1)..(410): Homolog of NCBI NO: 34899940 NR Description: P0428D12.10 [Oryza sativa (japonica
MLPAVPRNRIIGALKLDDNKLRKQEFIQRVDAVLEKHSGAGVDRIQFRAPFDNKHRDQIERWVNFATASKAKQIIFDFSTASDISRPCNFDLHLLDDSKSLSLRSIKLCSVSLKVPVGFKGFQNLKSTYLADTNITDDGLQHLMSNCSVLEFLGIAGCAMLTTLQISHPSNTLKHLHVYDCCLLQGMELNFGLVRLEYRGLPIVLSPPGTLLLTNMCIKLEGICTSLEYIFTKLRDNVPRLEVLNLKCQEYKMTTLPGKLHEFVYLKHLILELTFESCQRGKTDILQFACLLVAAPSLEKLEFHMWLRWGRERYRAEDGSLRSLPSQPHSHLRSVDITGFYGEKDRLELVLHILRDSVALESMKVDPSPVVAADVNRLGGLGSMHVPHFVDGYEVALEFLCSRDRRNVVHGASPDIIERARRGSSPLSPRNSSAKASWQRVKRVKRLSRPSSSRGAS

SEQ ID NO: 66355 - protein, 314 aa, Triticum aestivum
  peptide (1)..(314): Ceres Seq. ID no. 15169492
  misc_feature (1)..(225): Homolog of NCBI NO: 5803254 NR Description: ESTs C97429(C60159),D22427(C11106), correspond to a region of the predicted gene.~hypothetical
  misc_feature (1)..(229): Homolog of NCBI NO: 18481703 NR Description: hypothetical protein [Sorghum bicolor]
  misc_feature (1)..(266): Homolog of NCBI NO: 34899896 NR Description: OJ1714_H10.31 [Oryza sativa (japonica
  misc_feature (1)..(266): Homolog of NCBI NO: 38344931 NR Description: OSJNBa0018M05.22 [Oryza sativa (japonica
  misc_feature (149)..(266): Homolog of NCBI NO: 33146738 NR Description: unknown protein [Oryza sativa (japonica
  misc_feature (1)..(99): Homolog of NCBI NO: 33146738 NR Description: unknown protein [Oryza sativa (japonica
  misc_feature (150)..(266): Homolog of NCBI NO: 34899882 NR Description: OJ1714_H10.24 [Oryza sativa (japonica
  misc_feature (1)..(99): Homolog of NCBI NO: 34899882 NR Description: OJ1714_H10.24 [Oryza sativa (japonica
  misc_feature (1)..(266): Homolog of NCBI NO: 34394889 NR Description: unknown protein [Oryza sativa (japonica
  misc_feature (1)..(267): Homolog of NCBI NO: 34899940 NR Description: P0428D12.10 [Oryza sativa (japonica
MSNCSVLEFLGIAGCAMLTTLQISHPSNTLKHLHVYDCCLLQGMELNFGLVRLEYRGLPIVLSPPGTLLLTNMCIKLEGICTSLEYIFTKLRDNVPRLEVLNLKCQEYKMTTLPGKLHEFVYLKHLILELTFESCQRGKTDILQFACLLVAAPSLEKLEFHMWLRWGRERYRAEDGSLRSLPSQPHSHLRSVDITGFYGEKDRLELVLHILRDSVALESMKVDPSPVVAADVNRLGGLGSMHVPHFVDGYEVALEFLCSRDRRNVVHGASPDIIERARRGSSPLSPRNSSAKASWQRVKRVKRLSRPSSSRGAS

SEQ ID NO: 66356 - protein, 298 aa, Triticum aestivum
  peptide (1)..(298): Ceres Seq. ID no. 15169493
  misc_feature (1)..(209): Homolog of NCBI NO: 5803254 NR Description: ESTs C97429(C60159),D22427(C11106), correspond to a region of the predicted gene.~hypothetical
  misc_feature (1)..(213): Homolog of NCBI NO: 18481703 NR Description: hypothetical protein [Sorghum bicolor]
  misc_feature (1)..(250): Homolog of NCBI NO: 34899896 NR Description: OJ1714_H10.31 [Oryza sativa (japonica
  misc_feature (1)..(250): Homolog of NCBI NO: 38344931 NR Description: OSJNBa0018M05.22 [Oryza sativa (japonica
  misc_feature (133)..(250): Homolog of NCBI NO: 33146738 NR Description: unknown protein [Oryza sativa (japonica
  misc_feature (1)..(83): Homolog of NCBI NO: 33146738 NR Description: unknown protein [Oryza sativa (japonica
  misc_feature (134)..(250): Homolog of NCBI NO: 34899882 NR Description: OJ1714_H10.24 [Oryza sativa (japonica
  misc_feature (1)..(83): Homolog of NCBI NO: 34899882 NR Description: OJ1714_H10.24 [Oryza sativa (japonica
  misc_feature (1)..(250): Homolog of NCBI NO: 34394889 NR Description: unknown protein [Oryza sativa (japonica
  misc_feature (1)..(251): Homolog of NCBI NO: 34899940 NR Description: P0428D12.10 [Oryza sativa (japonica
MLTTLQISHPSNTLKHLHVYDCCLLQGMELNFGLVRLEYRGLPIVLSPPGTLLLTNMCIKLEGICTSLEYIFTKLRDNVPRLEVLNLKCQEYKMTTLPGKLHEFVYLKHLILELTFESCQRGKTDILQFACLLVAAPSLEKLEFHMWLRWGRERYRAEDGSLRSLPSQPHSHLRSVDITGFYGEKDRLELVLHILRDSVALESMKVDPSPVVAADVNRLGGLGSMHVPHFVDGYEVALEFLCSRDRRNVVHGASPDIIERARRGSSPLSPRNSSAKASWQRVKRVKRLSRPSSSRGAS

SEQ ID NO: 66357 - DNA, 1357 bp, Triticum aestivum
  misc_feature (1)..(1357): Ceres Seq. ID no. 13657872
accaatcatttcctcctcactctcgcttctccttttctgccttccaaccgaagccccatcccttgattccatccatcgttcgggatcctcctcctctcgcgcgcttctaggacccgtccgccctgggcaagttcgaggagatcgtggccgcgtccaaggggaagcagatcgtcatgttcctggactacgacggcacgctgtcccccatcgtcgatgaccccgacgccgccttcatgagcgagacgatgcggatggccgtgcgcagcgtggccaagcacttcccgacggcgatcgtcagcggtcggtgccgcgacaaggtgtttgatttcgtgaagctggcggagctctactacgccggcagccacggcatggacatcaagggcccggccaagtcctcaaagtccaaggccaaaggagttctcttccaaccagcaagcgagttcctgcccatgatagaagaggtgcatcagcggctgatagaggagacgaagcacgtagccggggccaaggtggagaacaacaagttctgcgtgtccgtccacttcagatgcgtcgacgaaaagagctggggcgcgctggcggagacggtgaagggcgtgatgcgggagtacccgaagctgcgcatgtcgcaggggcggatggtgttcgaggtgcggcccaccatcaagtgggacaagggcaaggccctcgagttcctgctcgagtcgctgggcttcgccgactgccccaacgtgctccccgtctacatcggcgacgaccgcaccgacgaggacgccttcaaggtgctgcgccggcggggccagggcgtcgggatcctcgtctccaagcaccccaaggacaccagcgcctccttctcgctgcaggagccggccgaggtcatggagttcctgctccgcctcgtcgagtggaagcagctctccaaggcgcgcctcaggctgcggcggcaggccgacgcctgatcggacgacgaggatcggccggccggcgggaatggccgaactaattatttcactgctacgtgtagcttagctagttaatgaaaatcccctgcttgctcatccgaacaaagccaaaggctacgtacgtggatgggaagaaggaacgtactacggcgaacctgcggagcattgttgcgccacatgttgtgttctaattaaccgtccttctttttctggggatgtataccgtacctaccgattatgcatgcatgtaaattacctttgtccacgtacaaggggaggaaccatggaataaacaaagagaaatctgagtaaataacaaaaaaaaaaaaaaaaaagcttatcgataccgtygaccaacacaataaagttggaacgggagggggggcccggtaccc

SEQ ID NO: 66358 - protein, 261 aa, Triticum aestivum
  peptide (1)..(261): Ceres Seq. ID no. 15219883
  misc_feature (2)..(232): Pfam Name: Trehalose-phosphatase Pfam Description: Trehalose-phosphatase
  misc_feature (1)..(247): Homolog of NCBI NO: 25354595 NR Description: trehalose-phosphatase (EC 3.1.3.12) B
  misc_feature (1)..(247): Homolog of NCBI NO: 15218205 NR Description: trehalose-6-phosphate phosphatase (TPPB)
  misc_feature (1)..(252): Homolog of NCBI NO: 11282598 NR Description: trehalose-6-phosphate phosphatase-like protein -
  misc_feature (1)..(243): Homolog of NCBI NO: 15238360 NR Description: trehalose-6-phosphate phosphatase, putative
  misc_feature (1)..(247): Homolog of NCBI NO: 15227161 NR Description: trehalose-6-phosphate phosphatase, putative
  misc_feature (1)..(249): Homolog of NCBI NO: 25354597 NR Description: probable trehalose-phosphatase [imported] -
  misc_feature (1)..(248): Homolog of NCBI NO: 30683008 NR Description: trehalose-6-phosphate phosphatase, putative
  misc_feature (1)..(248): Homolog of NCBI NO: 30692524 NR Description: trehalose-6-phosphate phosphatase, putative
  misc_feature (1)..(249): Homolog of NCBI NO: 21554408 NR Description: trehalose-phosphatase, putative [Arabidopsis
  misc_feature (1)..(249): Homolog of NCBI NO: 18399940 NR Description: trehalose-6-phosphate phosphatase, putative
MFLDYDGTLSPIVDDPDAAFMSETMRMAVRSVAKHFPTAIVSGRCRDKVFDFVKLAELYYAGSHGMDIKGPAKSSKSKAKGVLFQPASEFLPMIEEVHQRLIEETKHVAGAKVENNKFCVSVHFRCVDEKSWGALAETVKGVMREYPKLRMSQGRMVFEVRPTIKWDKGKALEFLLESLGFADCPNVLPVYIGDDRTDEDAFKVLRRRGQGVGILVSKHPKDTSASFSLQEPAEVMEFLLRLVEWKQLSKARLRLRRQADA

SEQ ID NO: 66359 - protein, 241 aa, Triticum aestivum
  peptide (1)..(241): Ceres Seq. ID no. 15219884
  misc_feature (1)..(212): Pfam Name: Trehalose-phosphatase Pfam Description: Trehalose-phosphatase
  misc_feature (1)..(227): Homolog of NCBI NO: 25354595 NR Description: trehalose-phosphatase (EC 3.1.3.12) B
  misc_feature (1)..(227): Homolog of NCBI NO: 15218205 NR Description: trehalose-6-phosphate phosphatase (TPPB)
  misc_feature (1)..(232): Homolog of NCBI NO: 11282598 NR Description: trehalose-6-phosphate phosphatase-like protein -
  misc_feature (1)..(223): Homolog of NCBI NO: 15238360 NR Description: trehalose-6-phosphate phosphatase, putative
  misc_feature (1)..(227): Homolog of NCBI NO: 15227161 NR Description: trehalose-6-phosphate phosphatase, putative
  misc_feature (1)..(229): Homolog of NCBI NO: 25354597 NR Description: probable trehalose-phosphatase [imported] -
  misc_feature (1)..(228): Homolog of NCBI NO: 30683008 NR Description: trehalose-6-phosphate phosphatase, putative
  misc_feature (1)..(228): Homolog of NCBI NO: 30692524 NR Description: trehalose-6-phosphate phosphatase, putative
  misc_feature (1)..(229): Homolog of NCBI NO: 21554408 NR Description: trehalose-phosphatase, putative [Arabidopsis
  misc_feature (1)..(229): Homolog of NCBI NO: 18399940 NR Description: trehalose-6-phosphate phosphatase, putative
MSETMRMAVRSVAKHFPTAIVSGRCRDKVFDFVKLAELYYAGSHGMDIKGPAKSSKSKAKGVLFQPASEFLPMIEEVHQRLIEETKHVAGAKVENNKFCVSVHFRCVDEKSWGALAETVKGVMREYPKLRMSQGRMVFEVRPTIKWDKGKALEFLLESLGFADCPNVLPVYIGDDRTDEDAFKVLRRRGQGVGILVSKHPKDTSASFSLQEPAEVMEFLLRLVEWKQLSKARLRLRRQADA

SEQ ID NO: 66360 - protein, 237 aa, Triticum aestivum
  peptide (1)..(237): Ceres Seq. ID no. 15219885
  misc_feature (1)..(208): Pfam Name: Trehalose-phosphatase Pfam Description: Trehalose-phosphatase
  misc_feature (1)..(223): Homolog of NCBI NO: 25354595 NR Description: trehalose-phosphatase (EC 3.1.3.12) B
  misc_feature (1)..(223): Homolog of NCBI NO: 15218205 NR Description: trehalose-6-phosphate phosphatase (TPPB)
  misc_feature (1)..(228): Homolog of NCBI NO: 11282598 NR Description: trehalose-6-phosphate phosphatase-like protein -
  misc_feature (1)..(219): Homolog of NCBI NO: 15238360 NR Description: trehalose-6-phosphate phosphatase, putative
  misc_feature (1)..(223): Homolog of NCBI NO: 15227161 NR Description: trehalose-6-phosphate phosphatase, putative
  misc_feature (1)..(225): Homolog of NCBI NO: 25354597 NR Description: probable trehalose-phosphatase [imported] -
  misc_feature (1)..(224): Homolog of NCBI NO: 30683008 NR Description: trehalose-6-phosphate phosphatase, putative
  misc_feature (1)..(224): Homolog of NCBI NO: 30692524 NR Description: trehalose-6-phosphate phosphatase, putative
  misc_feature (1)..(225): Homolog of NCBI NO: 21554408 NR Description: trehalose-phosphatase, putative [Arabidopsis
  misc_feature (1)..(225): Homolog of NCBI NO: 18399940 NR Description: trehalose-6-phosphate phosphatase, putative
MRMAVRSVAKHFPTAIVSGRCRDKVFDFVKLAELYYAGSHGMDIKGPAKSSKSKAKGVLFQPASEFLPMIEEVHQRLIEETKHVAGAKVENNKFCVSVHFRCVDEKSWGALAETVKGVMREYPKLRMSQGRMVFEVRPTIKWDKGKALEFLLESLGFADCPNVLPVYIGDDRTDEDAFKVLRRRGQGVGILVSKHPKDTSASFSLQEPAEVMEFLLRLVEWKQLSKARLRLRRQADA

SEQ ID NO: 66361 - DNA, 1951 bp, Triticum aestivum
  misc_feature (1)..(1951): Ceres Seq. ID no. 13657873
aactccaaaagagcagataagcccctcttcgtcccgcggtgcttcggctccgaaggcagccaccccgcaccgccggcggagccaccaacgccaccatcccaccgcaccgcccccatggcctccgccgcctccctcgccgtctcccaccacctcctccccgccgcgcccgcccgctcgcagccccgtccgcccgcccgcctcgtccgcctcccccgcacccgcctccgggtcgccgccatctcctcgtccccctcgcccccctcgcggcgcgaccgcgccgcggccggcctcgagcggtgcctggccgcgactccggcgccggccttcgccccgccggagatgaagggcgggagccagcgcgggtcgttcggggccgccacgctccagaaggccaagctcgacctctcccaaaagaggctcaaaggcgtccagcccgagctggcatctggtggtggtggtggagacaatgggaaacgaattggctatggtggtggtaatagtggagatgatgatggtgatgatgatgattacttcgaagactctgacgatggagatgaagaaagtggatttttcagaaggcgtataattatacaagagctttttaagagggagtttgttgatgccgttcttcaagagtggtacaaaacaatgagtaatttgccagctggtttgcgtcaagctcatgagatgggtttggtcagctcttctcagatggtcaaatatttgtcaatgtttggaaggcccacaaaggctagatatttctctcgagcctttccggacttcttctcaagagaccttgttggaagaatgcttgcagatccatctttcctgcataagatgacctttgagttgctagctaccgttagtacatctgtttgttgggagatgaaaaatcgcaaggagaggttccaagaagaatgggatttggtgtttctcaatgtagttactgccacagtttgcaatttagctgttttcagttcacttgcgccatgccgctcatatatgatccagaaacttcccaataacatatttgagaagagctatcctttcatgagacagtttggtcttctaagaagaacccagtccctcttcagcaaggctgctgagctttgcctaggtgggctaattgttggctccattcaaggtggtctatcgaatatcctttctgctggaagagaaagacggttgtcgatgactgttccttctatcagcaacaatgctcttagttatggagcttattatgggctttatgcaaatctgcggtatcaaattttatgtggtcttgatagatcaatggcaaaccattttgatgtccttggtgttacaatctttttcggcacagcgatgaggttgctgaatattcaaattggggagctatcgagacgtgcctggcttggtgagggagcagatctgcttaactcggataatttgttgagaacatacaatggcccagcagcagagcttggcatcaatcaacaggcagagtggttcatgtccaagaatgcaattgtatctggcttagaacttctaggcatcaagtatggtgcacctaaagatgcctctccaaagcttcggcgaaaaagaattgtccgaaagaagtagggtggatgagggaaagcctaactatacaaacgctgagctcgatggttttgatacccatgctggaacagttttgcctcagttccgccatgccttgtgttgcctatcgaagtaggatggatgaggggaaaattgtaacttgtgttctagttgcaatttggggccaagatcaaaggctttcaattttttactcggaggcgattcggccggttcgctgaaggtccttaccattcttctgtattgttttgagcaaaagtagacctccaaagttctaactgtaatttctagattatagatagtatgttattcactatatattttcttcattctttttgaaatggtgttttacttc

SEQ ID NO: 66362 - protein, 533 aa, Triticum aestivum
  peptide (1)..(533): Ceres Seq. ID no. 13657874
  misc_feature (269)..(460): Homolog of NCBI NO: 34909204 NR Description: P0425G02.25 [Oryza sativa (japonica
  misc_feature (135)..(397): Homolog of NCBI NO: 15242979 NR Description: expressed protein [Arabidopsis thaliana]
  misc_feature (141)..(397): Homolog of NCBI NO: 34395170 NR Description: chloroplast lumen common protein family-like
  misc_feature (141)..(430): Homolog of NCBI NO: 34900644 NR Description: hypothetical protein~similar to Arabidopsis
  misc_feature (195)..(533): Homolog of NCBI NO: 9759209 NR Description: gb|AAD25674.1~gene_id:MXC17.8~similar to unknown
  misc_feature (44)..(533): Homolog of NCBI NO: 22327037 NR Description: expressed protein [Arabidopsis thaliana]
NSKRADKPLFVPRCFGSEGSHPAPPAEPPTPPSHRTAPMASAASLAVSHHLLPAAPARSQPRPPARLVRLPRTRLRVAAISSSPSPPSRRDRAAAGLERCLAATPAPAFAPPEMKGGSQRGSFGAATLQKAKLDLSQKRLKGVQPELASGGGGGDNGKRIGYGGGNSGDDDGDDDDYFEDSDDGDEESGFFRRRIIIQELFKREFVDAVLQEWYKTMSNLPAGLRQAHEMGLVSSSQMVKYLSMFGRPTKARYFSRAFPDFFSRDLVGRMLADPSFLHKMTFELLATVSTSVCWEMKNRKERFQEEWDLVFLNVVTATVCNLAVFSSLAPCRSYMIQKLPNNIFEKSYPFMRQFGLLRRTQSLFSKAAELCLGGLIVGSIQGGLSNILSAGRERRLSMTVPSISNNALSYGAYYGLYANLRYQILCGLDRSMANHFDVLGVTIFFGTAMRLLNIQIGELSRRAWLGEGADLLNSDNLLRTYNGPAAELGINQQAEWFMSKNAIVSGLELLGIKYGAPKDASPKLRRKRIVRKK

SEQ ID NO: 66363 - protein, 495 aa, Triticum aestivum
  peptide (1)..(495): Ceres Seq. ID no. 13657875
  misc_feature (231)..(422): Homolog of NCBI NO: 34909204 NR Description: P0425G02.25 [Oryza sativa (japonica
  misc_feature (97)..(359): Homolog of NCBI NO: 15242979 NR Description: expressed protein [Arabidopsis thaliana]
  misc_feature (103)..(359): Homolog of NCBI NO: 34395170 NR Description: chloroplast lumen common protein family-like
  misc_feature (103)..(392): Homolog of NCBI NO: 34900644 NR Description: hypothetical protein~similar to Arabidopsis
  misc_feature (157)..(495): Homolog of NCBI NO: 9759209 NR Description: gb|AAD25674.1~gene_id:MXC17.8~similar to unknown
  misc_feature (6)..(495): Homolog of NCBI NO: 22327037 NR Description: expressed protein [Arabidopsis thaliana]
MASAASLAVSHHLLPAAPARSQPRPPARLVRLPRTRLRVAAISSSPSPPSRRDRAAAGLERCLAATPAPAFAPPEMKGGSQRGSFGAATLQKAKLDLSQKRLKGVQPELASGGGGGDNGKRIGYGGGNSGDDDGDDDDYFEDSDDGDEESGFFRRRIIIQELFKREFVDAVLQEWYKTMSNLPAGLRQAHEMGLVSSSQMVKYLSMFGRPTKARYFSRAFPDFFSRDLVGRMLADPSFLHKMTFELLATVSTSVCWEMKNRKERFQEEWDLVFLNVVTATVCNLAVFSSLAPCRSYMIQKLPNNIFEKSYPFMRQFGLLRRTQSLFSKAAELCLGGLIVGSIQGGLSNILSAGRERRLSMTVPSISNNALSYGAYYGLYANLRYQILCGLDRSMANHFDVLGVTIFFGTAMRLLNIQIGELSRRAWLGEGADLLNSDNLLRTYNGPAAELGINQQAEWFMSKNAIVSGLELLGIKYGAPKDASPKLRRKRIVRKK

SEQ ID NO: 66364 - protein, 420 aa, Triticum aestivum
  peptide (1)..(420): Ceres Seq. ID no. 13657876
  misc_feature (156)..(347): Homolog of NCBI NO: 34909204 NR Description: P0425G02.25 [Oryza sativa (japonica
  misc_feature (22)..(284): Homolog of NCBI NO: 15242979 NR Description: expressed protein [Arabidopsis thaliana]
  misc_feature (28)..(284): Homolog of NCBI NO: 34395170 NR Description: chloroplast lumen common protein family-like
  misc_feature (28)..(317): Homolog of NCBI NO: 34900644 NR Description: hypothetical protein~similar to Arabidopsis
  misc_feature (82)..(420): Homolog of NCBI NO: 9759209 NR Description: gb|AAD25674.1~gene_id:MXC17.8~similar to unknown
  misc_feature (1)..(420): Homolog of NCBI NO: 22327037 NR Description: expressed protein [Arabidopsis thaliana]
MKGGSQRGSFGAATLQKAKLDLSQKRLKGVQPELASGGGGGDNGKRIGYGGGNSGDDDGDDDDYFEDSDDGDEESGFFRRRIIIQELFKREFVDAVLQEWYKTMSNLPAGLRQAHEMGLVSSSQMVKYLSMFGRPTKARYFSRAFPDFFSRDLVGRMLADPSFLHKMTFELLATVSTSVCWEMKNRKERFQEEWDLVFLNVVTATVCNLAVFSSLAPCRSYMIQKLPNNIFEKSYPFMRQFGLLRRTQSLFSKAAELCLGGLIVGSIQGGLSNILSAGRERRLSMTVPSISNNALSYGAYYGLYANLRYQILCGLDRSMANHFDVLGVTIFFGTAMRLLNIQIGELSRRAWLGEGADLLNSDNLLRTYNGPAAELGINQQAEWFMSKNAIVSGLELLGIKYGAPKDASPKLRRKRIVRKK

SEQ ID NO: 66365 - DNA, 1618 bp, Triticum aestivum
  misc_feature (1)..(1618): Ceres Seq. ID no. 14303177
cccaccaccccgcgcatttattcccctcccgtcctccccccgcgccatgccgtcgcgcccctcctctcctcccacgcccgcctccccgcccgtccgacaccgcccgtcccacgctggcgccgccccccgccgccgtcgccgtcgccgcaacgatgccggagcctgacgacgagggggcggggcagcagcagccaaaggcggggcccgcgctcgagggcctcgtggtggggagctactgccacgacgtgctcctccagggcggccgcgtcgtgggcgagacgctcggcggggcggcggccttcgtctccaccgtgctcgacgccgcctcgcccccggaggcctccttctccgtcgtgtccaaggtcgggcccgacttcgcctacgcctccgcgccggcgcccgcgcggcaccccccgctgctctgccccgcgcggcccaccacctccttccacgcccggttctccgacgccgccgcgtccgcgcacgcgcccgacaggcagctcaggcgcgtccacgcctgcgatccgatctaccccgatgacctccccgaccgccgcttcgcctacggcctcgccgtcggcgtcgccggggaggtgctgccggagacgctcgagcggatgattcggctctgccgcgcggtgctcgtggacgcgcaggcgctgatccgggccttcggcgccgagggcgacggcagcggcgctgccgtccgccacgtggcgctggagggcacgccgtacgcgcggcttctgcagcgggtggcgttcctcaaggcgtcgtcggaggaggcgccgtacgtgggggtggagacggcgagacggcgctgctgcgtgatcgtgacggaggggagggacgggtgccggctttattgggacggcggggaggcacgcgtggcgccgttccccgccgtccaggtggatcctacaggtgccggagacagctatctcgccggtttcgcggccggtctgctttgggggctctcagctacggacgccgcgctgcttggtaacttcttcggcgcagctgctgtctcccaagtcggcgttcccaccttccatcccaagatgttgcaggctgtcaaacggatactcgaggacaaggcgataccatggtctagtccatgtataaacggcaccaccttcaccttccagagatcgattatgcacgatgagctacacgcgtccctggaagaagcggcgaggctgatgcgcgagcagtcaccaccagcaactgagaatggtgatggtattctctcggcacaagagccgacttcaccgccaagtggatgctgacctgaagttcactgcgaaataatgggaaactgccctcccagattttacattgagatctgtacagccaacagacgaaatagattgctcggccagagcttacactcatgaactgtgttgaatagggttctactcagacagtttctcatttgtcaggcaaagcaaaagagcgagttagcatatggagcaccattctgtaatactgagattgagcttgtttcggctgggctgtacataccgccccttcaagttccccctataattttgtagttcatgagatccaacaaaagtactcgtattatggaggcaaatttacacatggttttaaagtt

SEQ ID NO: 66366 - protein, 428 aa, Triticum aestivum
  peptide (1)..(428): Ceres Seq. ID no. 14303178
  misc_feature (73)..(355): Pfam Name: pfkB family carbohydrate kinase Pfam Description: pfkB family carbohydrate kinase
  misc_feature (8)..(68): Homolog of NCBI NO: 6523547 NR Description: hydroxyproline-rich glycoprotein DZ-HRGP
  misc_feature (8)..(68): Homolog of NCBI NO: 6523547 NR Description: hydroxyproline-rich glycoprotein DZ-HRGP
  misc_feature (8)..(68): Homolog of NCBI NO: 6523547 NR Description: hydroxyproline-rich glycoprotein DZ-HRGP
  misc_feature (8)..(68): Homolog of NCBI NO: 6523547 NR Description: hydroxyproline-rich glycoprotein DZ-HRGP
  misc_feature (8)..(69): Homolog of NCBI NO: 6523547 NR Description: hydroxyproline-rich glycoprotein DZ-HRGP
  misc_feature (8)..(68): Homolog of NCBI NO: 6523547 NR Description: hydroxyproline-rich glycoprotein DZ-HRGP
  misc_feature (52)..(356): Homolog of NCBI NO: 8843793 NR Description: gene_id:MZN1.17~pir||T01971~similar to unknown
  misc_feature (52)..(359): Homolog of NCBI NO: 15237741 NR Description: pfkB type carbohydrate kinase protein family
  misc_feature (6)..(356): Homolog of NCBI NO: 31126792 NR Description: unknown protein [Oryza sativa (japonica
  misc_feature (30)..(426): Homolog of NCBI NO: 29788872 NR Description: unknown protein [Oryza sativa (japonica
HHPAHLFPSRPPPAPCRRAPPLLPRPPPRPSDTARPTLAPPPAAVAVAATMPEPDDEGAGQQQPKAGPALEGLVVGSYCHDVLLQGGRVVGETLGGAAAFVSTVLDAASPPEASFSVVSKVGPDFAYASAPAPARHPPLLCPARPTTSFHARFSDAAASAHAPDRQLRRVHACDPIYPDDLPDRRFAYGLAVGVAGEVLPETLERMIRLCRAVLVDAQALIRAFGAEGDGSGAAVRHVALEGTPYARLLQRVAFLKASSEEAPYVGVETARRRCCVIVTEGRDGCRLYWDGGEARVAPFPAVQVDPTGAGDSYLAGFAAGLLWGLSATDAALLGNFFGAAAVSQVGVPTFHPKMLQAVKRILEDKAIPWSSPCINGTTFTFQRSIMHDELHASLEEAARLMREQSPPATENGDGILSAQEPTSPPSGC

SEQ ID NO: 66367 - protein, 378 aa, Triticum aestivum
  peptide (1)..(378): Ceres Seq. ID no. 14303179
  misc_feature (23)..(305): Pfam Name: pfkB family carbohydrate kinase Pfam Description: pfkB family carbohydrate kinase
  misc_feature (1)..(18): Homolog of NCBI NO: 6523547 NR Description: hydroxyproline-rich glycoprotein DZ-HRGP
  misc_feature (1)..(18): Homolog of NCBI NO: 6523547 NR Description: hydroxyproline-rich glycoprotein DZ-HRGP
  misc_feature (1)..(18): Homolog of NCBI NO: 6523547 NR Description: hydroxyproline-rich glycoprotein DZ-HRGP
  misc_feature (1)..(18): Homolog of NCBI NO: 6523547 NR Description: hydroxyproline-rich glycoprotein DZ-HRGP
  misc_feature (1)..(19): Homolog of NCBI NO: 6523547 NR Description: hydroxyproline-rich glycoprotein DZ-HRGP
  misc_feature (1)..(18): Homolog of NCBI NO: 6523547 NR Description: hydroxyproline-rich glycoprotein DZ-HRGP
  misc_feature (2)..(306): Homolog of NCBI NO: 8843793 NR Description: gene_id:MZN1.17~pir||T01971~similar to unknown
  misc_feature (2)..(309): Homolog of NCBI NO: 15237741 NR Description: pfkB type carbohydrate kinase protein family
  misc_feature (1)..(306): Homolog of NCBI NO: 31126792 NR Description: unknown protein [Oryza sativa (japonica
  misc_feature (1)..(376): Homolog of NCBI NO: 29788872 NR Description: unknown protein [Oryza sativa (japonica
MPEPDDEGAGQQQPKAGPALEGLVVGSYCHDVLLQGGRVVGETLGGAAAFVSTVLDAASPPEASFSVVSKVGPDFAYASAPAPARHPPLLCPARPTTSFHARFSDAAASAHAPDRQLRRVHACDPIYPDDLPDRRFAYGLAVGVAGEVLPETLERMIRLCRAVLVDAQALIRAFGAEGDGSGAAVRHVALEGTPYARLLQRVAFLKASSEEAPYVGVETARRRCCVIVTEGRDGCRLYWDGGEARVAPFPAVQVDPTGAGDSYLAGFAAGLLWGLSATDAALLGNFFGAAAVSQVGVPTFHPKMLQAVKRILEDKAIPWSSPCINGTTFTFQRSIMHDELHASLEEAARLMREQSPPATENGDGILSAQEPTSPPSGC

SEQ ID NO: 66368 - protein, 223 aa, Triticum aestivum
  peptide (1)..(223): Ceres Seq. ID no. 14303180
  misc_feature (1)..(150): Pfam Name: pfkB family carbohydrate kinase Pfam Description: pfkB family carbohydrate kinase
  misc_feature (1)..(151): Homolog of NCBI NO: 8843793 NR Description: gene_id:MZN1.17~pir||T01971~similar to unknown
  misc_feature (1)..(154): Homolog of NCBI NO: 15237741 NR Description: pfkB type carbohydrate kinase protein family
  misc_feature (1)..(151): Homolog of NCBI NO: 31126792 NR Description: unknown protein [Oryza sativa (japonica
  misc_feature (1)..(221): Homolog of NCBI NO: 29788872 NR Description: unknown protein [Oryza sativa (japonica
MIRLCRAVLVDAQALIRAFGAEGDGSGAAVRHVALEGTPYARLLQRVAFLKASSEEAPYVGVETARRRCCVIVTEGRDGCRLYWDGGEARVAPFPAVQVDPTGAGDSYLAGFAAGLLWGLSATDAALLGNFFGAAAVSQVGVPTFHPKMLQAVKRILEDKAIPWSSPCINGTTFTFQRSIMHDELHASLEEAARLMREQSPPATENGDGILSAQEPTSPPSGC

SEQ ID NO: 66369 - DNA, 1713 bp, Triticum aestivum
  misc_feature (1)..(1713): Ceres Seq. ID no. 14303091
cccagagaatctttcccccccttccttcctcactccctttctctttcctgacctcaccctacctcatccccctttctttatccccctccctctctccctctgctgacaggggagtgagtgagtgagtgaggcgagcgagtgatggcacggggaggagctcgcgccgtcgcgccggcggctctgctgctcctgcttctcctcgcggcaggcggcggtgtgcattgcctgaggtcaagggcggagagcggcgccacggtcctggagctgcggcaccacgccagcctcggctcaggcggcaggagcggcagcgcggaggaggcccgcggcgtcctggcctccgacgccgccagggtctcgtcgctgcagcggcgcatcggcagctacggcctgatcaggtcgtcggacgcggcgtccaagctggcgcaggtgcccgtcacctctggcgccaggctgcggacgctcaactacgtggccaccgtgggcatcggcggcggcgaggccacggtgatcgtggacacggccagcgagctcacctgggtgcagtgcaagccctgcgacgcctgccacgaccagcaggagccgctcttcgacccgtcggcgtcgccgtcctacgccgccgtgccgtgcaactcctcctcctgcgacgcgctgcgggtggccaccgggatgtccggcggccaggcgtgcgaccagccggcggcctgcagctacgcgctcagctaccgcgacgggtcctactcccgcggcgtgctggcgcacgacaggctgagcctggccggcgaggacatcgagggcttcgtgttcggctgcggcaccagcaaccagggcccgttcgggggcacgtcggggctgatggggctcggccggagcccgctctcgctgatatcccagaccacggagcagttcggcggcgtgttctcctactgcctgccgccgaaggagtccggctcgtcgggctccctcgtcctcggcgacgacgcctcggcgtaccgcaactccacgccgatcgtgtacaccgcgatggtcaccgacccgctgcaggggcccttctacatggtcaacctgaccgggatcagcgtgggcggcgaggaggtgcagtccccgggcttctcggccggcggcggcggcggcgggagggccatcgtggactcgggcacgatcatcacgagcctggtgccgtcggtgtacgcggcggtgcggggcgagttcgtgaggcagctggcggagtacccgcgggcgccggccttctccatcctggacacctgcttcgacctgacggggctgagggaggtgcaggtgccgagcctgaggctggcgttcgacggcggcgcggaggtggaggtggactccaagggcgtgctgtacgtggtcgccggcgacgcctcccaggtgtgcctggccctggccgccctcgggtccgaggacgacaccccgatcatcggcaactaccagcagaagaacctgcgggtggtcttcgacaccgccgcgtcccagatcgggttcgcgcaggagacctgtgattacatttgatttgaccgtggatcatcgggagctgcgtgtgcgtgtgtgcgcgtgtgaatatcctatagttggggatttgttttggaatcacctctggtgattggcttttttatttttatttttttgagttgtggtgatcggcaattggcaatacggtatttagttattggcaaatgtacaagcgtttgtagc

SEQ ID NO: 66370 - protein, 462 aa, Triticum aestivum
  peptide (1)..(462): Ceres Seq. ID no. 14303092
  misc_feature (58)..(453): Pfam Name: Eukaryotic aspartyl protease Pfam Description: Eukaryotic aspartyl protease
  misc_feature (1)..(459): Homolog of NCBI NO: 34895664 NR Description: nucleoid DNA-binding protein cnd41-like protein
  misc_feature (299)..(459): Homolog of NCBI NO: 38344196 NR Description: OSJNBa0064G10.12 [Oryza sativa (japonica
  misc_feature (21)..(274): Homolog of NCBI NO: 38344196 NR Description: OSJNBa0064G10.12 [Oryza sativa (japonica
  misc_feature (14)..(459): Homolog of NCBI NO: 11358588 NR Description: nucleoid DNA-binding protein cnd41-like protein -
  misc_feature (19)..(459): Homolog of NCBI NO: 22326716 NR Description: nucleoid DNA-binding protein cnd41 - like protein
  misc_feature (63)..(459): Homolog of NCBI NO: 24430421 NR Description: 41 kD chloroplast nucleoid DNA binding protein
  misc_feature (63)..(459): Homolog of NCBI NO: 7489168 NR Description: nucleoid DNA-binding protein cnd41, chloroplast -
  misc_feature (37)..(459): Homolog of NCBI NO: 21595063 NR Description: putative aspartyl protease [Arabidopsis thaliana]
  misc_feature (37)..(459): Homolog of NCBI NO: 25406599 NR Description: probable aspartyl proteinase, 105611-106921
  misc_feature (37)..(459): Homolog of NCBI NO: 18412482 NR Description: aspartyl protease -related [Arabidopsis thaliana]
MARGGARAVAPAALLLLLLLAAGGGVHCLRSRAESGATVLELRHHASLGSGGRSGSAEEARGVLASDAARVSSLQRRIGSYGLIRSSDAASKLAQVPVTSGARLRTLNYVATVGIGGGEATVIVDTASELTWVQCKPCDACHDQQEPLFDPSASPSYAAVPCNSSSCDALRVATGMSGGQACDQPAACSYALSYRDGSYSRGVLAHDRLSLAGEDIEGFVFGCGTSNQGPFGGTSGLMGLGRSPLSLISQTTEQFGGVFSYCLPPKESGSSGSLVLGDDASAYRNSTPIVYTAMVTDPLQGPFYMVNLTGISVGGEEVQSPGFSAGGGGGGRAIVDSGTIITSLVPSVYAAVRGEFVRQLAEYPRAPAFSILDTCFDLTGLREVQVPSLRLAFDGGAEVEVDSKGVLYVVAGDASQVCLALAALGSEDDTPIIGNYQQKNLRVVFDTAASQIGFAQETCDYI

SEQ ID NO: 66371 - protein, 287 aa, Triticum aestivum
  peptide (1)..(287): Ceres Seq. ID no. 14303093
  misc_feature (1)..(278): Pfam Name: Eukaryotic aspartyl protease Pfam Description: Eukaryotic aspartyl protease
  misc_feature (1)..(284): Homolog of NCBI NO: 34895664 NR Description: nucleoid DNA-binding protein cnd41-like protein
  misc_feature (124)..(284): Homolog of NCBI NO: 38344196 NR Description: OSJNBa0064G10.12 [Oryza sativa (japonica
  misc_feature (1)..(99): Homolog of NCBI NO: 38344196 NR Description: OSJNBa0064G10.12 [Oryza sativa (japonica
  misc_feature (1)..(284): Homolog of NCBI NO: 11358588 NR Description: nucleoid DNA-binding protein cnd41-like protein -
  misc_feature (1)..(284): Homolog of NCBI NO: 22326716 NR Description: nucleoid DNA-binding protein cnd41 - like protein
  misc_feature (1)..(284): Homolog of NCBI NO: 24430421 NR Description: 41 kD chloroplast nucleoid DNA binding protein
  misc_feature (1)..(284): Homolog of NCBI NO: 7489168 NR Description: nucleoid DNA-binding protein cnd41, chloroplast -
  misc_feature (1)..(284): Homolog of NCBI NO: 21595063 NR Description: putative aspartyl protease [Arabidopsis thaliana]
  misc_feature (1)..(284): Homolog of NCBI NO: 25406599 NR Description: probable aspartyl proteinase, 105611-106921
  misc_feature (1)..(284): Homolog of NCBI NO: 18412482 NR Description: aspartyl protease -related [Arabidopsis thaliana]
MSGGQACDQPAACSYALSYRDGSYSRGVLAHDRLSLAGEDIEGFVFGCGTSNQGPFGGTSGLMGLGRSPLSLISQTTEQFGGVFSYCLPPKESGSSGSLVLGDDASAYRNSTPIVYTAMVTDPLQGPFYMVNLTGISVGGEEVQSPGFSAGGGGGGRAIVDSGTIITSLVPSVYAAVRGEFVRQLAEYPRAPAFSILDTCFDLTGLREVQVPSLRLAFDGGAEVEVDSKGVLYVVAGDASQVCLALAALGSEDDTPIIGNYQQKNLRVVFDTAASQIGFAQETCDYI

SEQ ID NO: 66372 - DNA, 1373 bp, Triticum aestivum
  misc_feature (1)..(1373): Ceres Seq. ID no. 13659033
ctagaacatcctaatcgaaaaatagacccaccccatgcgtgctagagatgttccagtcccctccgttttgctcatcctcttggcgctctccgtcgtcgtcacgcaggcgcccttcttccgggctcggcgcctgattagcgatgacggcggtggccgcgctacggcttgcaccaaggacgccgcctcctgtgactgcgattactctgatgggaaatgggtgaggagccgctccactgatgctatgccatacggggaggactgcccgttcctcgaccccggcttccgctgcgtgcaaaatgggcggaatgactcgtcctttcgacactggcgttggcaacctcgccgcggcagctgccacctccctaagttcaatgcgacggatatgctggagaggagccggaacggccggatcgtgttcgtcggtgactccattggccgcaaccagtgggagtccatgttgtgcatgctcgccgccgccgtgcctgccggttcgaggatatacgagcagttcggtaagcccctgagccggcacaaaggctatctatccatggtctttgcggactacaacctctccgtggagtactaccgtgcacccatgcttgtcatggttgatcgcctccctccggcgagcgatggtgccatcaagagggccatccggcttgacgcactaccgcggcatgccgcccgctgggctggcgctgacgtgctcatcctcaacacgggccactggtggaacctacacaagaccatcaaatctggaaactatttcacggtgggcgatcggttcaacatgacaacggacattaaggaagcattccgacggtctctccagacggtgaaagattgggcactaaccaatccacgactctccaagagcagctacatcttctttaggagctattctccatcgcactacgacaacgggacatgggacacaggtggctcttgcgcggaccaatgggatccgctaacgatgattaccagtgaaagtgaccagcatgagcacttgtggatcaacacaatgatctcaagtgcggcacagagcatgaggagacggcatggaatgaacaaagatgcggttttcttgaacataacgtacatgacgggcatgaggggggacgggcacccgtcgaggcaccgggagcccgagacgccatcggatgccccagaggattgcagccactggtgcctgccgggtgtgccggacacgtggaaccagatgatgtacgggcacctcgtgtccatgggattcgacatgaggtcaattaagagataggtagatgcatgatatatgtgtggttgtgtgtgcatgtataatgtgtggaaggcaagattggaccagtgctagtcataattaatttaactttatcgtg

SEQ ID NO: 66373 - protein, 413 aa, Triticum aestivum
  peptide (1)..(413): Ceres Seq. ID no. 13659034
  misc_feature (54)..(402): Homolog of NCBI NO: 15242021 NR Description: expressed protein [Arabidopsis thaliana]
  misc_feature (53)..(402): Homolog of NCBI NO: 9759298 NR Description: emb|CAB82953.1~gene_id:MPH15.5~strong similarity
  misc_feature (54)..(402): Homolog of NCBI NO: 15229945 NR Description: expressed protein [Arabidopsis thaliana]
  misc_feature (53)..(402): Homolog of NCBI NO: 15228743 NR Description: expressed protein [Arabidopsis thaliana]
  misc_feature (49)..(402): Homolog of NCBI NO: 23617116 NR Description: leaf senescence related protein-like
  misc_feature (54)..(398): Homolog of NCBI NO: 15239660 NR Description: hypothetical protein [Arabidopsis thaliana]
  misc_feature (54)..(398): Homolog of NCBI NO: 6862912 NR Description: unknown protein [Arabidopsis thaliana]
  misc_feature (40)..(406): Homolog of NCBI NO: 18415139 NR Description: expressed protein [Arabidopsis thaliana]
  misc_feature (12)..(406): Homolog of NCBI NO: 9759321 NR Description: gb|AAF00670.1~gene_id:MBL20.11~strong similarity
  misc_feature (10)..(406): Homolog of NCBI NO: 15229797 NR Description: expressed protein [Arabidopsis thaliana]
MRARDVPVPSVLLILLALSVVVTQAPFFRARRLISDDGGGRATACTKDAASCDCDYSDGKWVRSRSTDAMPYGEDCPFLDPGFRCVQNGRNDSSFRHWRWQPRRGSCHLPKFNATDMLERSRNGRIVFVGDSIGRNQWESMLCMLAAAVPAGSRIYEQFGKPLSRHKGYLSMVFADYNLSVEYYRAPMLVMVDRLPPASDGAIKRAIRLDALPRHAARWAGADVLILNTGHWWNLHKTIKSGNYFTVGDRFNMTTDIKEAFRRSLQTVKDWALTNPRLSKSSYIFFRSYSPSHYDNGTWDTGGSCADQWDPLTMITSESDQHEHLWINTMISSAAQSMRRRHGMNKDAVFLNITYMTGMRGDGHPSRHREPETPSDAPEDCSHWCLPGVPDTWNQMMYGHLVSMGFDMRSIKR

SEQ ID NO: 66374 - protein, 344 aa, Triticum aestivum
  peptide (1)..(344): Ceres Seq. ID no. 13659035
  misc_feature (1)..(333): Homolog of NCBI NO: 15242021 NR Description: expressed protein [Arabidopsis thaliana]
  misc_feature (1)..(333): Homolog of NCBI NO: 9759298 NR Description: emb|CAB82953.1~gene_id:MPH15.5~strong similarity
  misc_feature (1)..(333): Homolog of NCBI NO: 15229945 NR Description: expressed protein [Arabidopsis thaliana]
  misc_feature (1)..(333): Homolog of NCBI NO: 15228743 NR Description: expressed protein [Arabidopsis thaliana]
  misc_feature (1)..(333): Homolog of NCBI NO: 23617116 NR Description: leaf senescence related protein-like
  misc_feature (1)..(329): Homolog of NCBI NO: 15239660 NR Description: hypothetical protein [Arabidopsis thaliana]
  misc_feature (1)..(329): Homolog of NCBI NO: 6862912 NR Description: unknown protein [Arabidopsis thaliana]
  misc_feature (1)..(337): Homolog of NCBI NO: 18415139 NR Description: expressed protein [Arabidopsis thaliana]
  misc_feature (1)..(337): Homolog of NCBI NO: 9759321 NR Description: gb|AAF00670.1~gene_id:MBL20.11~strong similarity
  misc_feature (1)..(337): Homolog of NCBI NO: 15229797 NR Description: expressed protein [Arabidopsis thaliana]
MPYGEDCPFLDPGFRCVQNGRNDSSFRHWRWQPRRGSCHLPKFNATDMLERSRNGRIVFVGDSIGRNQWESMLCMLAAAVPAGSRIYEQFGKPLSRHKGYLSMVFADYNLSVEYYRAPMLVMVDRLPPASDGAIKRAIRLDALPRHAARWAGADVLILNTGHWWNLHKTIKSGNYFTVGDRFNMTTDIKEAFRRSLQTVKDWALTNPRLSKSSYIFFRSYSPSHYDNGTWDTGGSCADQWDPLTMITSESDQHEHLWINTMISSAAQSMRRRHGMNKDAVFLNITYMTGMRGDGHPSRHREPETPSDAPEDCSHWCLPGVPDTWNQMMYGHLVSMGFDMRSIKR

SEQ ID NO: 66375 - protein, 297 aa, Triticum aestivum
  peptide (1)..(297): Ceres Seq. ID no. 13659036
  misc_feature (1)..(286): Homolog of NCBI NO: 15242021 NR Description: expressed protein [Arabidopsis thaliana]
  misc_feature (1)..(286): Homolog of NCBI NO: 9759298 NR Description: emb|CAB82953.1~gene_id:MPH15.5~strong similarity
  misc_feature (1)..(286): Homolog of NCBI NO: 15229945 NR Description: expressed protein [Arabidopsis thaliana]
  misc_feature (1)..(286): Homolog of NCBI NO: 15228743 NR Description: expressed protein [Arabidopsis thaliana]
  misc_feature (1)..(286): Homolog of NCBI NO: 23617116 NR Description: leaf senescence related protein-like
  misc_feature (1)..(282): Homolog of NCBI NO: 15239660 NR Description: hypothetical protein [Arabidopsis thaliana]
  misc_feature (1)..(282): Homolog of NCBI NO: 6862912 NR Description: unknown protein [Arabidopsis thaliana]
  misc_feature (1)..(290): Homolog of NCBI NO: 18415139 NR Description: expressed protein [Arabidopsis thaliana]
  misc_feature (1)..(290): Homolog of NCBI NO: 9759321 NR Description: gb|AAF00670.1~gene_id:MBL20.11~strong similarity
  misc_feature (1)..(290): Homolog of NCBI NO: 15229797 NR Description: expressed protein [Arabidopsis thaliana]
MLERSRNGRIVFVGDSIGRNQWESMLCMLAAAVPAGSRIYEQFGKPLSRHKGYLSMVFADYNLSVEYYRAPMLVMVDRLPPASDGAIKRAIRLDALPRHAARWAGADVLILNTGHWWNLHKTIKSGNYFTVGDRFNMTTDIKEAFRRSLQTVKDWALTNPRLSKSSYIFFRSYSPSHYDNGTWDTGGSCADQWDPLTMITSESDQHEHLWINTMISSAAQSMRRRHGMNKDAVFLNITYMTGMRGDGHPSRHREPETPSDAPEDCSHWCLPGVPDTWNQMMYGHLVSMGFDMRSIKR

SEQ ID NO: 66376 - DNA, 1683 bp, Triticum aestivum
  misc_feature (1)..(1683): Ceres Seq. ID no. 13657964
ttctgccgctcctgaatctccgccgcccgcgtgctccccggcacccaggaaacggccatgccgacgaccctagagggcggccccgccgccgcgccaccgctgccccgcgcgcgcgtggagctggagctggagctcccgctcggcgcggcgccgttcgacctggaagcggccgtgtgcagccacgggctgttcatgatggcgcccaaccgctgggacccggcctcccgcgcgctcctccgcccgctccgcctcgcctccgaccgctccaggtccctgctcgcccgcgtctcccgccaccccgcgcgcccctcccgctccctcctcgtctccctcttcggcgccgacgccctctccccgctcgaccaggactgcatcctcgagcaagtgcggcggatgctgcggctgtcggaggaggacggcagggtggtggcggagttccaggcgatgcacgccgccgcgagggaggcggggttcggccgcatcttccgctcgcccacgctgttcgaggacatggtcaagtgcatcctcctctgcaattgccaatggacaagaacattggcaatggctactgcgctgtgcgagcttcagttggagttgagacattcatctggtactgaagttcttgagttaaggacacctccaatcagggagcttaaaaggaagcgcggcaagaatcggaatgtccgtgtcaagctagaaacaaagtttaccgagttggagtgcttggaggatccaagagtagaaaccgcggaggatgcaagagtggcaactggtactagcgatgtcataacacatttggaaacggatgaaaaatcggctagcttgccccaagttgcgcctgaaacaggcagtgcatgtcagtcatttgattcttcagagctcagcttggaaggttgcattggagatttccctactccggaagaattggcgtatctggatgaagacttcttagcgaaatgctgtaaccttggatatcgagcggagcggattgtgttgcttgcacgcagcattgtggaaggaaaggtatgcctacaaaatcttgaagaaatgcagaaaatgtctttaccagctacagaagagctatctactatcccgtctacctatgaaagactgaataacgagttaaccactatctccggattcggccctttcactcgtgccaatgtgctcatgtgcatgggatttttccacatgatcccagctgataccgagacaattaggcatttaaagcagtgtcataaaattgcaagcaccatcaaatctgttcatatggaattggataaaatctacggcgagtatgctccatttcagttcttagcatactggttcgagctatggggcttctatgacaagcaatttgggaagatcgctgagatggatccgtccacatataggctatttactgcaagcgctttaaagaagcaacatcggttagttaggaaatagagcctttctttcgtttgtgaaaggggccctgccaaaatcaacttacaacatagaggaattttgagattgttgtagttgctgcctgttctagtaagcagaaagtccgtagcctattttccccttcatgaatgcatctcatactttaggggaacagagtcctgcaagtttttagtttgtagcattccagactgaactaatgtgttatcaggtacttcaattaatttagtggtcaacttt

SEQ ID NO: 66377 - protein, 462 aa, Triticum aestivum
  peptide (1)..(462): Ceres Seq. ID no. 13657965
  misc_feature (1)..(169): Homolog of NCBI NO: 34899050 NR Description: hypothetical protein~predicted by GeneMark.hmm
  misc_feature (157)..(457): Homolog of NCBI NO: 34899050 NR Description: hypothetical protein~predicted by GeneMark.hmm
MPTTLEGGPAAAPPLPRARVELELELPLGAAPFDLEAAVCSHGLFMMAPNRWDPASRALLRPLRLASDRSRSLLARVSRHPARPSRSLLVSLFGADALSPLDQDCILEQVRRMLRLSEEDGRVVAEFQAMHAAAREAGFGRIFRSPTLFEDMVKCILLCNCQWTRTLAMATALCELQLELRHSSGTEVLELRTPPIRELKRKRGKNRNVRVKLETKFTELECLEDPRVETAEDARVATGTSDVITHLETDEKSASLPQVAPETGSACQSFDSSELSLEGCIGDFPTPEELAYLDEDFLAKCCNLGYRAERIVLLARSIVEGKVCLQNLEEMQKMSLPATEELSTIPSTYERLNNELTTISGFGPFTRANVLMCMGFFHMIPADTETIRHLKQCHKIASTIKSVHMELDKIYGEYAPFQFLAYWFELWGFYDKQFGKIAEMDPSTYRLFTASALKKQHRLVRK

SEQ ID NO: 66378 - protein, 417 aa, Triticum aestivum
  peptide (1)..(417): Ceres Seq. ID no. 13657966
  misc_feature (1)..(124): Homolog of NCBI NO: 34899050 NR Description: hypothetical protein~predicted by GeneMark.hmm
  misc_feature (112)..(412): Homolog of NCBI NO: 34899050 NR Description: hypothetical protein~predicted by GeneMark.hmm
MMAPNRWDPASRALLRPLRLASDRSRSLLARVSRHPARPSRSLLVSLFGADALSPLDQDCILEQVRRMLRLSEEDGRVVAEFQAMHAAAREAGFGRIFRSPTLFEDMVKCILLCNCQWTRTLAMATALCELQLELRHSSGTEVLELRTPPIRELKRKRGKNRNVRVKLETKFTELECLEDPRVETAEDARVATGTSDVITHLETDEKSASLPQVAPETGSACQSFDSSELSLEGCIGDFPTPEELAYLDEDFLAKCCNLGYRAERIVLLARSIVEGKVCLQNLEEMQKMSLPATEELSTIPSTYERLNNELTTISGFGPFTRANVLMCMGFFHMIPADTETIRHLKQCHKIASTIKSVHMELDKIYGEYAPFQFLAYWFELWGFYDKQFGKIAEMDPSTYRLFTASALKKQHRLVRK

SEQ ID NO: 66379 - protein, 416 aa, Triticum aestivum
  peptide (1)..(416): Ceres Seq. ID no. 13657967
  misc_feature (1)..(123): Homolog of NCBI NO: 34899050 NR Description: hypothetical protein~predicted by GeneMark.hmm
  misc_feature (111)..(411): Homolog of NCBI NO: 34899050 NR Description: hypothetical protein~predicted by GeneMark.hmm
MAPNRWDPASRALLRPLRLASDRSRSLLARVSRHPARPSRSLLVSLFGADALSPLDQDCILEQVRRMLRLSEEDGRVVAEFQAMHAAAREAGFGRIFRSPTLFEDMVKCILLCNCQWTRTLAMATALCELQLELRHSSGTEVLELRTPPIRELKRKRGKNRNVRVKLETKFTELECLEDPRVETAEDARVATGTSDVITHLETDEKSASLPQVAPETGSACQSFDSSELSLEGCIGDFPTPEELAYLDEDFLAKCCNLGYRAERIVLLARSIVEGKVCLQNLEEMQKMSLPATEELSTIPSTYERLNNELTTISGFGPFTRANVLMCMGFFHMIPADTETIRHLKQCHKIASTIKSVHMELDKIYGEYAPFQFLAYWFELWGFYDKQFGKIAEMDPSTYRLFTASALKKQHRLVRK

SEQ ID NO: 66380 - DNA, 1692 bp, Triticum aestivum
  misc_feature (1)..(1692): Ceres Seq. ID no. 14307912
tagctagctagtgttatccgttagccgatgccgttggctggctttcgatcgatcacacgagacatgtggaaaccacgggcggccatgtattcagttcgtcgttagcgcgcgcgtagcagatagaagatggacgccttggcggggctctcggcccttgccgcggtggcgctgctgctgctgtacagcgtgcaccggtggaggagccctcggtgcaacggccggctcccgccggggtctatgggcctcccgctcgtcggcgagacgttccagttcttctccccggacgcctccttggacatccctcgcttcatccgacacaggctcacgaggtacggcccgatcttcaagacgagcgtggtggggcacccgatggtggtgtcggcggaccaggagctgaaccacatggtgttccagcaggagggggagctgttccagagctggtacccggactcgttcgtggagatcctcggccgcgataacgtcggggagcagaagggcaccatgttcaagtacctcaagaacatagttctcaggtacttcggcccggagagccttaaggagtccatccttggcgacgtcgagcgcgccgtctgcagctcgctctgcacctggtccaccctgccggccgtcgagctcaaagaagccgtctccaccatggtgtttgaactttccgcgagcaagctgctgggcctggagccgtcgaggtccaaggttctacggaagagcttcttcgacttcgtcagagggctcatctccttcccgctctacttgccaggaacagcctactacgcatgcatgcagggacggatgagtgtaatggaggtgctgcagcaggtgctggaggagaggacgagatcggctgaggcggccggaggacgggaagcacggtgccacggcgacttcctggactacgtcgtgcaggagatcaccaaggagaagcctgtcctgacggagggaatggcgctggacctcctgtttgtgctcctcttcgccagcttccacacgacgtcgctggccatcaccctggccgtcaagctcctcaccgagcaccctcgcgtcctggaggagctcacggtggagcatgaaacgattctgaacgagcgtgaggcaggcggcgagtctgatggcgacagagttacatggaaagagtacaaatccatgacattcacatcccaggtgataaacgagacggtccgactggccaacattgcgcctggcatcttcagaaagacactgaaagatgtacagttcagaggatacacaattccagctggatggggagtgatggtctgccctctcgcggtgcaccttaatccagatatttaccctgaccccctcaccttcaatccttcaaggttcaaggataaactagaggcaaaccgtgggttaagacacttcatggctttcggaggaggtctccggtcctgtgttggggcagacttcagcaagctacaaatggccattttccttcactttcttgtcaccaaatataggtggatacaactaggtggaggcaagatagtccggtgtccagggctggaatttcctgatggttacctcattcagatcagacagagagattaatcagcacctgctttcaagtcatgctagcagtaggaaaagcttatatctcacgtgtacaattgttctagcatgttgtttgatgaaataacacttgtgcagaagtattac

SEQ ID NO: 66381 - protein, 485 aa, Triticum aestivum
  peptide (1)..(485): Ceres Seq. ID no. 14307913
  misc_feature (211)..(481): Pfam Name: Cytochrome P450 Pfam Description: Cytochrome P450
  misc_feature (26)..(147): Homolog of NCBI NO: 28564842 NR Description: putative cytochrome P450 [Oryza sativa (japonica
  misc_feature (141)..(460): Homolog of NCBI NO: 28564842 NR Description: putative cytochrome P450 [Oryza sativa (japonica
  misc_feature (77)..(481): Homolog of NCBI NO: 27764671 NR Description: putative hydroxylase [Oryza sativa (japonica
  misc_feature (8)..(412): Homolog of NCBI NO: 38567917 NR Description: OSJNBa0088I22.13 [Oryza sativa (japonica
  misc_feature (1)..(484): Homolog of NCBI NO: 18483228 NR Description: putative cytochrome P450-like protein [Sorghum
  misc_feature (13)..(485): Homolog of NCBI NO: 9502380 NR Description: T12C24.27 [Arabidopsis thaliana]
  misc_feature (13)..(485): Homolog of NCBI NO: 30682922 NR Description: cytochrome P450, putative [Arabidopsis thaliana]
  misc_feature (8)..(481): Homolog of NCBI NO: 20520627 NR Description: putative cytochrome P450 [Oryza sativa (japonica
  misc_feature (8)..(481): Homolog of NCBI NO: 38567920 NR Description: OSJNBa0088I22.16 [Oryza sativa (japonica
  misc_feature (1)..(484): Homolog of NCBI NO: 38567916 NR Description: OSJNBa0088I22.12 [Oryza sativa (japonica
MDALAGLSALAAVALLLLYSVHRWRSPRCNGRLPPGSMGLPLVGETFQFFSPDASLDIPRFIRHRLTRYGPIFKTSVVGHPMVVSADQELNHMVFQQEGELFQSWYPDSFVEILGRDNVGEQKGTMFKYLKNIVLRYFGPESLKESILGDVERAVCSSLCTWSTLPAVELKEAVSTMVFELSASKLLGLEPSRSKVLRKSFFDFVRGLISFPLYLPGTAYYACMQGRMSVMEVLQQVLEERTRSAEAAGGREARCHGDFLDYVVQEITKEKPVLTEGMALDLLFVLLFASFHTTSLAITLAVKLLTEHPRVLEELTVEHETILNEREAGGESDGDRVTWKEYKSMTFTSQVINETVRLANIAPGIFRKTLKDVQFRGYTIPAGWGVMVCPLAVHLNPDIYPDPLTFNPSRFKDKLEANRGLRHFMAFGGGLRSCVGADFSKLQMAIFLHFLVTKYRWIQLGGGKIVRCPGLEFPDGYLIQIRQRD

SEQ ID NO: 66382 - protein, 448 aa, Triticum aestivum
  peptide (1)..(448): Ceres Seq. ID no. 14307914
  misc_feature (174)..(444): Pfam Name: Cytochrome P450 Pfam Description: Cytochrome P450
  misc_feature (1)..(110): Homolog of NCBI NO: 28564842 NR Description: putative cytochrome P450 [Oryza sativa (japonica
  misc_feature (104)..(423): Homolog of NCBI NO: 28564842 NR Description: putative cytochrome P450 [Oryza sativa (japonica
  misc_feature (40)..(444): Homolog of NCBI NO: 27764671 NR Description: putative hydroxylase [Oryza sativa (japonica
  misc_feature (1)..(375): Homolog of NCBI NO: 38567917 NR Description: OSJNBa0088I22.13 [Oryza sativa (japonica
  misc_feature (1)..(447): Homolog of NCBI NO: 18483228 NR Description: putative cytochrome P450-like protein [Sorghum
  misc_feature (1)..(448): Homolog of NCBI NO: 9502380 NR Description: T12C24.27 [Arabidopsis thaliana]
  misc_feature (1)..(448): Homolog of NCBI NO: 30682922 NR Description: cytochrome P450, putative [Arabidopsis thaliana]
  misc_feature (1)..(444): Homolog of NCBI NO: 20520627 NR Description: putative cytochrome P450 [Oryza sativa (japonica
  misc_feature (1)..(444): Homolog of NCBI NO: 38567920 NR Description: OSJNBa0088I22.16 [Oryza sativa (japonica
  misc_feature (1)..(447): Homolog of NCBI NO: 38567916 NR Description: OSJNBa0088I22.12 [Oryza sativa (japonica
MGLPLVGETFQFFSPDASLDIPRFIRHRLTRYGPIFKTSVVGHPMVVSADQELNHMVFQQEGELFQSWYPDSFVEILGRDNVGEQKGTMFKYLKNIVLRYFGPESLKESILGDVERAVCSSLCTWSTLPAVELKEAVSTMVFELSASKLLGLEPSRSKVLRKSFFDFVRGLISFPLYLPGTAYYACMQGRMSVMEVLQQVLEERTRSAEAAGGREARCHGDFLDYVVQEITKEKPVLTEGMALDLLFVLLFASFHTTSLAITLAVKLLTEHPRVLEELTVEHETILNEREAGGESDGDRVTWKEYKSMTFTSQVINETVRLANIAPGIFRKTLKDVQFRGYTIPAGWGVMVCPLAVHLNPDIYPDPLTFNPSRFKDKLEANRGLRHFMAFGGGLRSCVGADFSKLQMAIFLHFLVTKYRWIQLGGGKIVRCPGLEFPDGYLIQIRQRD

SEQ ID NO: 66383 - protein, 404 aa, Triticum aestivum
  peptide (1)..(404): Ceres Seq. ID no. 14307915
  misc_feature (130)..(400): Pfam Name: Cytochrome P450 Pfam Description: Cytochrome P450
  misc_feature (1)..(66): Homolog of NCBI NO: 28564842 NR Description: putative cytochrome P450 [Oryza sativa (japonica
  misc_feature (60)..(379): Homolog of NCBI NO: 28564842 NR Description: putative cytochrome P450 [Oryza sativa (japonica
  misc_feature (1)..(400): Homolog of NCBI NO: 27764671 NR Description: putative hydroxylase [Oryza sativa (japonica
  misc_feature (1)..(331): Homolog of NCBI NO: 38567917 NR Description: OSJNBa0088I22.13 [Oryza sativa (japonica
  misc_feature (1)..(403): Homolog of NCBI NO: 18483228 NR Description: putative cytochrome P450-like protein [Sorghum
  misc_feature (1)..(404): Homolog of NCBI NO: 9502380 NR Description: T12C24.27 [Arabidopsis thaliana]
  misc_feature (1)..(404): Homolog of NCBI NO: 30682922 NR Description: cytochrome P450, putative [Arabidopsis thaliana]
  misc_feature (1)..(400): Homolog of NCBI NO: 20520627 NR Description: putative cytochrome P450 [Oryza sativa (japonica
  misc_feature (1)..(400): Homolog of NCBI NO: 38567920 NR Description: OSJNBa0088I22.16 [Oryza sativa (japonica
  misc_feature (1)..(403): Homolog of NCBI NO: 38567916 NR Description: OSJNBa0088I22.12 [Oryza sativa (japonica
MVVSADQELNHMVFQQEGELFQSWYPDSFVEILGRDNVGEQKGTMFKYLKNIVLRYFGPESLKESILGDVERAVCSSLCTWSTLPAVELKEAVSTMVFELSASKLLGLEPSRSKVLRKSFFDFVRGLISFPLYLPGTAYYACMQGRMSVMEVLQQVLEERTRSAEAAGGREARCHGDFLDYVVQEITKEKPVLTEGMALDLLFVLLFASFHTTSLAITLAVKLLTEHPRVLEELTVEHETILNEREAGGESDGDRVTWKEYKSMTFTSQVINETVRLANIAPGIFRKTLKDVQFRGYTIPAGWGVMVCPLAVHLNPDIYPDPLTFNPSRFKDKLEANRGLRHFMAFGGGLRSCVGADFSKLQMAIFLHFLVTKYRWIQLGGGKIVRCPGLEFPDGYLIQIRQRD

SEQ ID NO: 66384 - DNA, 1728 bp, Triticum aestivum
  misc_feature (1)..(1728): Ceres Seq. ID no. 14302883
attcttttcttcccactcccccctgcccttccgccaaagcgtcagccgccgccttgccatacctcgtcgtcaccgccggcgccgcgacctcaatcccgcgccctccgccaccttcttggggacgcgcgtcgacgccgccgccgccgccgttccccttcttccccggcctccgggacatcctgctgctgcctccacctcgtcccagtctttggccactgggcctccttccttcgttcgagttggacatggcatcatctgctaccatcagttcagttggcgctcaggccgctctggtttcaaagccaaggaatcatggtatcagtggcttaaaggcatcctcatcaattagcttcgaattgggatcctcattcctgggcaagaccgggtctcttcgggcatctgtaaccacaagggttgcgccaaaggcgaagtccgcggctcggatactaccggaggcatcttacaaagtggcggtacttggtgctgctgggggcatcggccaaccattgggcttgttgatcaagatgtcccctctggtctcagaactgcgcctgtacgatattgcgaatgtcaagggagtcgccgctgatctcagccactgcaacacaccctctcaggttatggacttcactggccctgcagaattggccagctgcttgaaaggtgtggatgttgttgtcatccccgccggggtcccaagaaagccagggatgactcgtgacgaccttttcaacatcaatgcgggcatcgtcaagtcacttatcgaggctgttgcagacaattgccctggggcctttatccatattatcagcaacccagtcaactccacagtgccgattgctgctgagattctgaaaaagaagggtgtctacaatcccaagaagctttttggggtttccaccctagatgttgtccgggctaacacatttgtagctcagaagaagggcctcaagctcattgatgttgatgtcccagttgttggtggtcatgctggaattacaatcctgcctttgttgtcaaagacgagaccatctgtcaccttcacggacgaggaaactgaacagctgacgaagaggatacagaacgctgggacagaggtggtggaggcgaaagcgggtgctggatctgctaccctgtccatggcttatgctgctgccagatttgtcgagtcttcgctccgcgcactggctggtgatccagatgtttacgagtgcacgtatgttcagtctgagttaactgagctgccattctttgcgtccagagttaagcttgggaagaatggtgttgagtccatcatttcttctgacctggagggaataaccgagtatgaggccagtgcacttgaggcattgaagcctgagctgaaggccagcattgagaagggcattgagtttgcgcacaaacaacagggagctgctgcctctgtttgagtgaggagaatgataattccatatgaagaggacaaaggcaaactgattgtccttttctagttttgcagcctagagtgtggacatgtagcactatgccctggagcagctatatttctgaattgttggtcagtttattatgattccagtttacatgagggcgtgaagccccaaacgtgcaccctgttctgggtccttgttttgtttgacacataaattttggtcctgttccacctgctgttcttgtagcttcctaagttgacgaactgtggaataataataaagcccatctttgatcgtt

SEQ ID NO: 66385 - protein, 475 aa, Triticum aestivum
  peptide (1)..(475): Ceres Seq. ID no. 14302884
  misc_feature (299)..(464): Pfam Name: lactate/malate dehydrogenase, alpha/beta Pfam Description: lactate/malate dehydrogenase, alpha/beta
  misc_feature (107)..(474): Homolog of NCBI NO: 25283601 NR Description: malate dehydrogenase (EC 1.1.1.37), chloroplast
  misc_feature (107)..(474): Homolog of NCBI NO: 15232820 NR Description: malate dehydrogenase
  misc_feature (83)..(468): Homolog of NCBI NO: 7488830 NR Description: probable malate dehydrogenase (EC 1.1.1.37) -
  misc_feature (107)..(468): Homolog of NCBI NO: 7431178 NR Description: malate dehydrogenase (EC 1.1.1.37) precursor -
  misc_feature (80)..(472): Homolog of NCBI NO: 5123836 NR Description: NAD-malate dehydrogenase [Nicotiana tabacum]
  misc_feature (79)..(474): Homolog of NCBI NO: 34907952 NR Description: putative NAD-malate dehydrogenase
SFLPTPPCPSAKASAAALPYLVVTAGAATSIPRPPPPSWGRASTPPPPPFPFFPGLRDILLLPPPRPSLWPLGLLPSFELDMASSATISSVGAQAALVSKPRNHGISGLKASSSISFELGSSFLGKTGSLRASVTTRVAPKAKSAARILPEASYKVAVLGAAGGIGQPLGLLIKMSPLVSELRLYDIANVKGVAADLSHCNTPSQVMDFTGPAELASCLKGVDVVVIPAGVPRKPGMTRDDLFNINAGIVKSLIEAVADNCPGAFIHIISNPVNSTVPIAAEILKKKGVYNPKKLFGVSTLDVVRANTFVAQKKGLKLIDVDVPVVGGHAGITILPLLSKTRPSVTFTDEETEQLTKRIQNAGTEVVEAKAGAGSATLSMAYAAARFVESSLRALAGDPDVYECTYVQSELTELPFFASRVKLGKNGVESIISSDLEGITEYEASALEALKPELKASIEKGIEFAHKQQGAAASV

SEQ ID NO: 66386 - protein, 394 aa, Triticum aestivum
  peptide (1)..(394): Ceres Seq. ID no. 14302885
  misc_feature (218)..(383): Pfam Name: lactate/malate dehydrogenase, alpha/beta Pfam Description: lactate/malate dehydrogenase, alpha/beta
  misc_feature (26)..(393): Homolog of NCBI NO: 25283601 NR Description: malate dehydrogenase (EC 1.1.1.37), chloroplast
  misc_feature (26)..(393): Homolog of NCBI NO: 15232820 NR Description: malate dehydrogenase
  misc_feature (2)..(387): Homolog of NCBI NO: 7488830 NR Description: probable malate dehydrogenase (EC 1.1.1.37) -
  misc_feature (26)..(387): Homolog of NCBI NO: 7431178 NR Description: malate dehydrogenase (EC 1.1.1.37) precursor -
  misc_feature (1)..(391): Homolog of NCBI NO: 5123836 NR Description: NAD-malate dehydrogenase [Nicotiana tabacum]
  misc_feature (1)..(393): Homolog of NCBI NO: 34907952 NR Description: putative NAD-malate dehydrogenase
MASSATISSVGAQAALVSKPRNHGISGLKASSSISFELGSSFLGKTGSLRASVTTRVAPKAKSAARILPEASYKVAVLGAAGGIGQPLGLLIKMSPLVSELRLYDIANVKGVAADLSHCNTPSQVMDFTGPAELASCLKGVDVVVIPAGVPRKPGMTRDDLFNINAGIVKSLIEAVADNCPGAFIHIISNPVNSTVPIAAEILKKKGVYNPKKLFGVSTLDVVRANTFVAQKKGLKLIDVDVPVVGGHAGITILPLLSKTRPSVTFTDEETEQLTKRIQNAGTEVVEAKAGAGSATLSMAYAAARFVESSLRALAGDPDVYECTYVQSELTELPFFASRVKLGKNGVESIISSDLEGITEYEASALEALKPELKASIEKGIEFAHKQQGAAASV

SEQ ID NO: 66387 - protein, 301 aa, Triticum aestivum
  peptide (1)..(301): Ceres Seq. ID no. 14302886
  misc_feature (125)..(290): Pfam Name: lactate/malate dehydrogenase, alpha/beta Pfam Description: lactate/malate dehydrogenase, alpha/beta
  misc_feature (1)..(300): Homolog of NCBI NO: 25283601 NR Description: malate dehydrogenase (EC 1.1.1.37), chloroplast
  misc_feature (1)..(300): Homolog of NCBI NO: 15232820 NR Description: malate dehydrogenase
  misc_feature (1)..(294): Homolog of NCBI NO: 7488830 NR Description: probable malate dehydrogenase (EC 1.1.1.37) -
  misc_feature (1)..(294): Homolog of NCBI NO: 7431178 NR Description: malate dehydrogenase (EC 1.1.1.37) precursor -
  misc_feature (1)..(298): Homolog of NCBI NO: 5123836 NR Description: NAD-malate dehydrogenase [Nicotiana tabacum]
  misc_feature (1)..(300): Homolog of NCBI NO: 34907952 NR Description: putative NAD-malate dehydrogenase
MSPLVSELRLYDIANVKGVAADLSHCNTPSQVMDFTGPAELASCLKGVDVVVIPAGVPRKPGMTRDDLFNINAGIVKSLIEAVADNCPGAFIHIISNPVNSTVPIAAEILKKKGVYNPKKLFGVSTLDVVRANTFVAQKKGLKLIDVDVPVVGGHAGITILPLLSKTRPSVTFTDEETEQLTKRIQNAGTEVVEAKAGAGSATLSMAYAAARFVESSLRALAGDPDVYECTYVQSELTELPFFASRVKLGKNGVESIISSDLEGITEYEASALEALKPELKASIEKGIEFAHKQQGAAASV

SEQ ID NO: 66388 - DNA, 1523 bp, Triticum aestivum
  misc_feature (1)..(1523): Ceres Seq. ID no. 14303094
acctctctcgacacaccaccgcaacccaacccaccccaccccaccccaccccaccccttcccgtctcaaaaccctaatcccaacgccgccgcggcgccgccgatcaagccgacgacaggcagcccccctatccggccgctccgtacgcacgcccctgcccgtcgcgcgcagatcggcggccgtccaccgcgaccgtgggccgccgcggggctagatttagattccgatttcggggcccctagccgccgggatttcctcgcgtccccgggcaaggtaggagagactatggtgggcggaggcaggaggggaggcgcggcggacgaggccaagctcaacaccggcaacgtgttcgcggcgctcgagaccctcaagaagaagaagaagggcgacaaggccaaggggggctcctccaagggagggaagcagggggacgagcccacgccgcagcagcagaaggagctcttctgggcgcccgccccgctcaacaccaagtcgtgggccgacgtcgaggacgacgacgacgacgactacttcgccaccaccgcgccccccgcgcccatctgggggaacgaccacgccgccgccaaaacggccaaggaggaggaggaggacgaggtcgatgctgtccacgccgccctgccggaggaaattgaaagtgaggatgaggagcatgatgatgaggctgaggatggtgctgaggatgaacctgagcatgaagtggaagctgctgatcctgatgtgaagaaagttgcagcagcacctaaagagacagaaaggcagctgtccaaaaaggagttgaaaaagaaggagctggctgaacttgatgctgtgttagctgagttgggaatttctgaaaacacaagcgatgctgcgcaagatggaaacaacaatgctgagaagaaaggtgcgagccaagctggtgatggagagagaaaggaagacgcacctgcccctttagagagcaagaatgccaagaagaagaagaacaagaaggacaagagcgcaaaggaggcaaaggaagctgaagtgtcggaggaggctgccagtgcagaacccgaggaagacacggctgtggatgtcaaggagcgcctaaagaagatggcgtcgatgaagaagaagaagtcgggcaaggagacggacacagctgcaaagatcgccgcggcagaggcggcagccaggaccgccaggctcgcggcggcaaagaagaaggagaagagccattacaaccagcaacccgtgcggtaaaaacgcgacgggccgcccaagttttgagatgctcctgagtttcgataatgaatgatccccttgttcgttttggacccgtcgcaataaactttttccccatccagtcctccccagagttgtgtatttatggtgaccatggagcgcctttctgatattcggtttcggaattctggaaggccttcgtggtcaccagaacggtcgttgtaattgtgttttgaattgtgttgatccggttgaacttatgatagacaacaacatggccaacagggcctcttggg

SEQ ID NO: 66389 - protein, 414 aa, Triticum aestivum
  peptide (1)..(414): Ceres Seq. ID no. 14303095
  misc_feature (74)..(414): Pfam Name: Caldesmon Pfam Description: Caldesmon
  misc_feature (97)..(135): Homolog of NCBI NO: 1362179 NR Description: calcium-dependent protein kinase substrate -
  misc_feature (108)..(404): Homolog of NCBI NO: 39593039 NR Description: Hypothetical protein CBG09238 [Caenorhabditis
  misc_feature (215)..(414): Homolog of NCBI NO: 7522210 NR Description: hypothetical protein pAFD103 - apple tree
  misc_feature (96)..(414): Homolog of NCBI NO: 15233865 NR Description: expressed protein [Arabidopsis thaliana]
  misc_feature (96)..(414): Homolog of NCBI NO: 33620414 NR Description: M355 [Lilium longiflorum]
  misc_feature (96)..(414): Homolog of NCBI NO: 17529066 NR Description: unknown protein [Arabidopsis thaliana]
  misc_feature (96)..(414): Homolog of NCBI NO: 21537167 NR Description: unknown [Arabidopsis thaliana]
  misc_feature (96)..(414): Homolog of NCBI NO: 18400901 NR Description: expressed protein [Arabidopsis thaliana]
  misc_feature (96)..(215): Homolog of NCBI NO: 34906156 NR Description: P0509B06.15 [Oryza sativa (japonica
  misc_feature (216)..(414): Homolog of NCBI NO: 34906156 NR Description: P0509B06.15 [Oryza sativa (japonica
TSLDTPPQPNPPHPTPPHPFPSQNPNPNAAAAPPIKPTTGSPPIRPLRTHAPARRAQIGGRPPRPWAAAGLDLDSDFGAPSRRDFLASPGKVGETMVGGGRRGGAADEAKLNTGNVFAALETLKKKKKGDKAKGGSSKGGKQGDEPTPQQQKELFWAPAPLNTKSWADVEDDDDDDYFATTAPPAPIWGNDHAAAKTAKEEEEDEVDAVHAALPEEIESEDEEHDDEAEDGAEDEPEHEVEAADPDVKKVAAAPKETERQLSKKELKKKELAELDAVLAELGISENTSDAAQDGNNNAEKKGASQAGDGERKEDAPAPLESKNAKKKKNKKDKSAKEAKEAEVSEEAASAEPEEDTAVDVKERLKKMASMKKKKSGKETDTAAKIAAAEAAARTARLAAAKKKEKSHYNQQPVR

SEQ ID NO: 66390 - protein, 319 aa, Triticum aestivum
  peptide (1)..(319): Ceres Seq. ID no. 14303096
  misc_feature (1)..(319): Pfam Name: Caldesmon Pfam Description: Caldesmon
  misc_feature (2)..(40): Homolog of NCBI NO: 1362179 NR Description: calcium-dependent protein kinase substrate -
  misc_feature (13)..(309): Homolog of NCBI NO: 39593039 NR Description: Hypothetical protein CBG09238 [Caenorhabditis
  misc_feature (120)..(319): Homolog of NCBI NO: 7522210 NR Description: hypothetical protein pAFD103 - apple tree
  misc_feature (1)..(319): Homolog of NCBI NO: 15233865 NR Description: expressed protein [Arabidopsis thaliana]
  misc_feature (1)..(319): Homolog of NCBI NO: 33620414 NR Description: M355 [Lilium longiflorum]
  misc_feature (1)..(319): Homolog of NCBI NO: 17529066 NR Description: unknown protein [Arabidopsis thaliana]
  misc_feature (1)..(319): Homolog of NCBI NO: 21537167 NR Description: unknown [Arabidopsis thaliana]
  misc_feature (1)..(319): Homolog of NCBI NO: 18400901 NR Description: expressed protein [Arabidopsis thaliana]
  misc_feature (1)..(120): Homolog of NCBI NO: 34906156 NR Description: P0509B06.15 [Oryza sativa (japonica
  misc_feature (121)..(319): Homolog of NCBI NO: 34906156 NR Description: P0509B06.15 [Oryza sativa (japonica
MVGGGRRGGAADEAKLNTGNVFAALETLKKKKKGDKAKGGSSKGGKQGDEPTPQQQKELFWAPAPLNTKSWADVEDDDDDDYFATTAPPAPIWGNDHAAAKTAKEEEEDEVDAVHAALPEEIESEDEEHDDEAEDGAEDEPEHEVEAADPDVKKVAAAPKETERQLSKKELKKKELAELDAVLAELGISENTSDAAQDGNNNAEKKGASQAGDGERKEDAPAPLESKNAKKKKNKKDKSAKEAKEAEVSEEAASAEPEEDTAVDVKERLKKMASMKKKKSGKETDTAAKIAAAEAAARTARLAAAKKKEKSHYNQQPVR

SEQ ID NO: 66391 - DNA, 814 bp, Triticum aestivum
  misc_feature (1)..(814): Ceres Seq. ID no. 12627109
attttttttccccctcttaccgacacgaacccggcggccaaatttagggttttgctcccgcaatctccccccgaagccgccgccttcttcccgcgccggcagcgatccaactccgcgtctccatccgccgatccggactttttttcaatctccggatctcgctcaagatgcttcccctctcgctcctcaagaccgcccaggggcatcccatgctcgtggagctcaagaacggcgagacctacaatggtcacttggtgaactgcgacacgtggatgaacatccacctccgggaggttatttgcacctcgaaggatggtgataagttttggaggatgccggagtgctatattcgtgggaacacaatcaagtatcttcgggttcctgatgaggtgattgacaaggttcaagaggaaacttctaagagtagatcagataggaagccaccaggtgttggccgcggaagaggaagaggagacatcggcactaagcccgggggcagaggaatcgggcgtggccaagatgatggcaaaggtggtggccgtggaaggggtgggattggaagtaaaggtggcaacaaaggcggacgtggtcgtgggtaagacggatcttgagatgcgagaatgccgctttttaaggcctgtagttgtggtgttgcatagattgcttaggacatgaaaaactttggagctggaattgctgggttttgtggtatggtatggcaaaccgtttgtgtggtctgaagttaccgaggaggagttggctgtcacctgtttgtgttgttcgaaacagttcacttaatattttgggtatgggc

SEQ ID NO: 66392 - protein, 143 aa, Triticum aestivum
  peptide (1)..(143): Ceres Seq. ID no. 12627110
  misc_feature (5)..(71): Pfam Name: LSM domain Pfam Description: LSM domain
  misc_feature (1)..(140): Homolog of NCBI NO: 7657317 NR Description: U6 snRNA-associated SM-like protein 4 [Mus
  misc_feature (1)..(140): Homolog of NCBI NO: 27668769 NR Description: similar to U6 snRNA-associated Sm-like protein
  misc_feature (1)..(143): Homolog of NCBI NO: 37589787 NR Description: Unknown (protein for MGC:73057) [Danio rerio]
  misc_feature (1)..(143): Homolog of NCBI NO: 20260282 NR Description: unknown protein [Arabidopsis thaliana]
  misc_feature (1)..(143): Homolog of NCBI NO: 21593495 NR Description: glycine rich protein-like [Arabidopsis thaliana]
  misc_feature (1)..(143): Homolog of NCBI NO: 15241028 NR Description: glycine rich protein - like
  misc_feature (1)..(143): Homolog of NCBI NO: 12230329 NR Description: Probable U6 snRNA-associated Sm-like protein LSm4
  misc_feature (1)..(143): Homolog of NCBI NO: 12230258 NR Description: Probable U6 snRNA-associated Sm-like protein LSm4
  misc_feature (1)..(137): Homolog of NCBI NO: 34902916 NR Description: unnamed protein product [Oryza sativa (japonica
  misc_feature (1)..(143): Homolog of NCBI NO: 12230291 NR Description: Probable U6 snRNA-associated Sm-like protein LSm4
MLPLSLLKTAQGHPMLVELKNGETYNGHLVNCDTWMNIHLREVICTSKDGDKFWRMPECYIRGNTIKYLRVPDEVIDKVQEETSKSRSDRKPPGVGRGRGRGDIGTKPGGRGIGRGQDDGKGGGRGRGGIGSKGGNKGGRGRG

SEQ ID NO: 66393 - protein, 129 aa, Triticum aestivum
  peptide (1)..(129): Ceres Seq. ID no. 12627111
  misc_feature (1)..(57): Pfam Name: LSM domain Pfam Description: LSM domain
  misc_feature (1)..(126): Homolog of NCBI NO: 7657317 NR Description: U6 snRNA-associated SM-like protein 4 [Mus
  misc_feature (1)..(126): Homolog of NCBI NO: 27668769 NR Description: similar to U6 snRNA-associated Sm-like protein
  misc_feature (1)..(129): Homolog of NCBI NO: 37589787 NR Description: Unknown (protein for MGC:73057) [Danio rerio]
  misc_feature (1)..(129): Homolog of NCBI NO: 20260282 NR Description: unknown protein [Arabidopsis thaliana]
  misc_feature (1)..(129): Homolog of NCBI NO: 21593495 NR Description: glycine rich protein-like [Arabidopsis thaliana]
  misc_feature (1)..(129): Homolog of NCBI NO: 15241028 NR Description: glycine rich protein - like
  misc_feature (1)..(129): Homolog of NCBI NO: 12230329 NR Description: Probable U6 snRNA-associated Sm-like protein LSm4
  misc_feature (1)..(129): Homolog of NCBI NO: 12230258 NR Description: Probable U6 snRNA-associated Sm-like protein LSm4
  misc_feature (1)..(123): Homolog of NCBI NO: 34902916 NR Description: unnamed protein product [Oryza sativa (japonica
  misc_feature (1)..(129): Homolog of NCBI NO: 12230291 NR Description: Probable U6 snRNA-associated Sm-like protein LSm4
MLVELKNGETYNGHLVNCDTWMNIHLREVICTSKDGDKFWRMPECYIRGNTIKYLRVPDEVIDKVQEETSKSRSDRKPPGVGRGRGRGDIGTKPGGRGIGRGQDDGKGGGRGRGGIGSKGGNKGGRGRG

SEQ ID NO: 66394 - protein, 108 aa, Triticum aestivum
  peptide (1)..(108): Ceres Seq. ID no. 12627112
  misc_feature (1)..(105): Homolog of NCBI NO: 7657317 NR Description: U6 snRNA-associated SM-like protein 4 [Mus
  misc_feature (1)..(105): Homolog of NCBI NO: 27668769 NR Description: similar to U6 snRNA-associated Sm-like protein
  misc_feature (1)..(108): Homolog of NCBI NO: 37589787 NR Description: Unknown (protein for MGC:73057) [Danio rerio]
  misc_feature (1)..(108): Homolog of NCBI NO: 20260282 NR Description: unknown protein [Arabidopsis thaliana]
  misc_feature (1)..(108): Homolog of NCBI NO: 21593495 NR Description: glycine rich protein-like [Arabidopsis thaliana]
  misc_feature (1)..(108): Homolog of NCBI NO: 15241028 NR Description: glycine rich protein - like
  misc_feature (1)..(108): Homolog of NCBI NO: 12230329 NR Description: Probable U6 snRNA-associated Sm-like protein LSm4
  misc_feature (1)..(108): Homolog of NCBI NO: 12230258 NR Description: Probable U6 snRNA-associated Sm-like protein LSm4
  misc_feature (1)..(102): Homolog of NCBI NO: 34902916 NR Description: unnamed protein product [Oryza sativa (japonica
  misc_feature (1)..(108): Homolog of NCBI NO: 12230291 NR Description: Probable U6 snRNA-associated Sm-like protein LSm4
MNIHLREVICTSKDGDKFWRMPECYIRGNTIKYLRVPDEVIDKVQEETSKSRSDRKPPGVGRGRGRGDIGTKPGGRGIGRGQDDGKGGGRGRGGIGSKGGNKGGRGRG

SEQ ID NO: 66395 - DNA, 1889 bp, Triticum aestivum
  misc_feature (1)..(1889): Ceres Seq. ID no. 14307916
actagtatataacaattcactcccatccaccaaccacaccaagaatcgcgagcgagcttgggatccggcttgaagttgccatggaggcggccgccgagctggcgcagcgcctgcgggccgcggccaacgaccggctggcggggcaggagccgctcctcctcgtcgccgcgccgctgctcgcgctcctcgccgcgcgcgccgtccacgccgccgccgccgacgtcgccgaccgcggcctccgcaccgtcctcatcaccctcgccatggccgccgtcaagttggtgccgggggtcagcggatacatcgccgccgagaagagcaaggttgttgagcagttgcagtcaggcagcgcgtccagcaagaagaacctgcgaaccgagctgcccgccgtcggggatcccgacggagtcatagacgagctccaggcgctcaaagacaaggatgtgagatggcagggcaaatgctccggcaccgtttatatcgctgggagcgagtctgaaggccatttttcacttataaacaaggcctactctatgttttcacacacaaatccactgcatcaggatgtattcaagagtgtggcacagttagaggctgaagtagtagcaatgacagctgctttgcttggcagcaaagaaaaggcgtctggtggacaaatttgtggcaatatgacgtcaggcgggactgaaagcatattgttggccgtcaaaacatcacgcgattatatgcaatcaaagaagggaatcacaaagcccgaaattataattgctgaatcagctcattctgcctatgacaaagctgctcaatatttcaatattaaagtgcggcgtgtacctgtgaataaagaatttcttgcagatgtaaaaggattcaaacggtgcataaatggaaacaccataatgatggttggatctgcaccaggatttccccatggtttaattgatcccatcgaggaacttggggagttggcttcacaatatggtatttgcttgcatgttgatctatgccttggtggcttcgtattgcctttcgcccgtaagcttgggtatcctattcctccttttgatttttctgtcaaaggtgttacgtcgatctcaacagatgttcataagtatgggctagccccaaaaggcaccagtactgtcctatacaggaatcatgaaattagaaagcaccaatttgttgctgtgacggaatggactggtgggctctatatttcccctactatggctggaagcaggccaggtggactagtcgcaggagcttgggctgcgatgatgtctcttggattgaatggttatttggaaagtactggtaaaatcatggaagtctcaaggaagatacaaaaaggaattgatgatatctcaggtttatttgtgattgggaagccagacatgaccgtcgtggcctttgggtcggacgcagtcgacatatttgaggtgaatgacataatgtcatcaaaaggatggcacctcaatgctcttcagagacccaacagtctgcacatctgcgtgacgcttcaacacacggctatctatgaggaattcctcaaggacctcgaggattctgtgaacacagtgaaagcgaatccagggcctatcagcggggggatggctccgatctacggcgcggctgggaagatgccggacagaggcacggtcaaggagttgcttgtggagttcatggacagctcttgctaaccattgactataccccattggttggtcatctctctgtaacatgcatatgtacaagccgcagtgacagtgttgtgtgatcttctatatttggtttggctcaaaactgaaggcacacaacacaatgcctccaatatagacatgtatctatgtatcagttacattggtcgcaataaagttacattttcagcc

SEQ ID NO: 66396 - protein, 539 aa, Triticum aestivum
  peptide (1)..(539): Ceres Seq. ID no. 14307917
  misc_feature (141)..(370): Pfam Name: Pyridoxal-dependent decarboxylase conserved domain Pfam Description: Pyridoxal-dependent decarboxylase conserved
  misc_feature (65)..(536): Homolog of NCBI NO: 31543694 NR Description: sphingosine phosphate lyase 1 [Mus musculus]
  misc_feature (66)..(537): Homolog of NCBI NO: 21355963 NR Description: CG8946-PA [Drosophila melanogaster]
  misc_feature (101)..(537): Homolog of NCBI NO: 31982936 NR Description: sphingosine-1-phosphate lyase 1;
  misc_feature (101)..(537): Homolog of NCBI NO: 6330874 NR Description: KIAA1252 protein [Homo sapiens]
  misc_feature (101)..(537): Homolog of NCBI NO: 10129683 NR Description: sphingosine-1-phosphate lyase [Homo sapiens]
  misc_feature (65)..(539): Homolog of NCBI NO: 27465561 NR Description: sphingosine-1-phosphate lyase 1 [Rattus
  misc_feature (15)..(536): Homolog of NCBI NO: 30908928 NR Description: sphingosine-1-phosphate lyase [Dictyostelium
  misc_feature (12)..(537): Homolog of NCBI NO: 15217780 NR Description: sphingosine-1-phosphate lyase -related
  misc_feature (367)..(539): Homolog of NCBI NO: 34893998 NR Description: putative sphingosine-1-phosphate lyase
  misc_feature (6)..(370): Homolog of NCBI NO: 34893998 NR Description: putative sphingosine-1-phosphate lyase
MEAAAELAQRLRAAANDRLAGQEPLLLVAAPLLALLAARAVHAAAADVADRGLRTVLITLAMAAVKLVPGVSGYIAAEKSKVVEQLQSGSASSKKNLRTELPAVGDPDGVIDELQALKDKDVRWQGKCSGTVYIAGSESEGHFSLINKAYSMFSHTNPLHQDVFKSVAQLEAEVVAMTAALLGSKEKASGGQICGNMTSGGTESILLAVKTSRDYMQSKKGITKPEIIIAESAHSAYDKAAQYFNIKVRRVPVNKEFLADVKGFKRCINGNTIMMVGSAPGFPHGLIDPIEELGELASQYGICLHVDLCLGGFVLPFARKLGYPIPPFDFSVKGVTSISTDVHKYGLAPKGTSTVLYRNHEIRKHQFVAVTEWTGGLYISPTMAGSRPGGLVAGAWAAMMSLGLNGYLESTGKIMEVSRKIQKGIDDISGLFVIGKPDMTVVAFGSDAVDIFEVNDIMSSKGWHLNALQRPNSLHICVTLQHTAIYEEFLKDLEDSVNTVKANPGPISGGMAPIYGAAGKMPDRGTVKELLVEFMDSSC

SEQ ID NO: 66397 - protein, 478 aa, Triticum aestivum
  peptide (1)..(478): Ceres Seq. ID no. 14307918
  misc_feature (80)..(309): Pfam Name: Pyridoxal-dependent decarboxylase conserved domain Pfam Description: Pyridoxal-dependent decarboxylase conserved
  misc_feature (4)..(475): Homolog of NCBI NO: 31543694 NR Description: sphingosine phosphate lyase 1 [Mus musculus]
  misc_feature (5)..(476): Homolog of NCBI NO: 21355963 NR Description: CG8946-PA [Drosophila melanogaster]
  misc_feature (40)..(476): Homolog of NCBI NO: 31982936 NR Description: sphingosine-1-phosphate lyase 1;
  misc_feature (40)..(476): Homolog of NCBI NO: 6330874 NR Description: KIAA1252 protein [Homo sapiens]
  misc_feature (40)..(476): Homolog of NCBI NO: 10129683 NR Description: sphingosine-1-phosphate lyase [Homo sapiens]
  misc_feature (4)..(478): Homolog of NCBI NO: 27465561 NR Description: sphingosine-1-phosphate lyase 1 [Rattus
  misc_feature (1)..(475): Homolog of NCBI NO: 30908928 NR Description: sphingosine-1-phosphate lyase [Dictyostelium
  misc_feature (1)..(476): Homolog of NCBI NO: 15217780 NR Description: sphingosine-1-phosphate lyase -related
  misc_feature (306)..(478): Homolog of NCBI NO: 34893998 NR Description: putative sphingosine-1-phosphate lyase
  misc_feature (1)..(309): Homolog of NCBI NO: 34893998 NR Description: putative sphingosine-1-phosphate lyase
MAAVKLVPGVSGYIAAEKSKVVEQLQSGSASSKKNLRTELPAVGDPDGVIDELQALKDKDVRWQGKCSGTVYIAGSESEGHFSLINKAYSMFSHTNPLHQDVFKSVAQLEAEVVAMTAALLGSKEKASGGQICGNMTSGGTESILLAVKTSRDYMQSKKGITKPEIIIAESAHSAYDKAAQYFNIKVRRVPVNKEFLADVKGFKRCINGNTIMMVGSAPGFPHGLIDPIEELGELASQYGICLHVDLCLGGFVLPFARKLGYPIPPFDFSVKGVTSISTDVHKYGLAPKGTSTVLYRNHEIRKHQFVAVTEWTGGLYISPTMAGSRPGGLVAGAWAAMMSLGLNGYLESTGKIMEVSRKIQKGIDDISGLFVIGKPDMTVVAFGSDAVDIFEVNDIMSSKGWHLNALQRPNSLHICVTLQHTAIYEEFLKDLEDSVNTVKANPGPISGGMAPIYGAAGKMPDRGTVKELLVEFMDSSC

SEQ ID NO: 66398 - protein, 388 aa, Triticum aestivum
  peptide (1)..(388): Ceres Seq. ID no. 14307919
  misc_feature (1)..(219): Pfam Name: Pyridoxal-dependent decarboxylase conserved domain Pfam Description: Pyridoxal-dependent decarboxylase conserved
  misc_feature (1)..(385): Homolog of NCBI NO: 31543694 NR Description: sphingosine phosphate lyase 1 [Mus musculus]
  misc_feature (1)..(386): Homolog of NCBI NO: 21355963 NR Description: CG8946-PA [Drosophila melanogaster]
  misc_feature (1)..(386): Homolog of NCBI NO: 31982936 NR Description: sphingosine-1-phosphate lyase 1;
  misc_feature (1)..(386): Homolog of NCBI NO: 6330874 NR Description: KIAA1252 protein [Homo sapiens]
  misc_feature (1)..(386): Homolog of NCBI NO: 10129683 NR Description: sphingosine-1-phosphate lyase [Homo sapiens]
  misc_feature (1)..(388): Homolog of NCBI NO: 27465561 NR Description: sphingosine-1-phosphate lyase 1 [Rattus
  misc_feature (1)..(385): Homolog of NCBI NO: 30908928 NR Description: sphingosine-1-phosphate lyase [Dictyostelium
  misc_feature (1)..(386): Homolog of NCBI NO: 15217780 NR Description: sphingosine-1-phosphate lyase -related
  misc_feature (216)..(388): Homolog of NCBI NO: 34893998 NR Description: putative sphingosine-1-phosphate lyase
  misc_feature (1)..(219): Homolog of NCBI NO: 34893998 NR Description: putative sphingosine-1-phosphate lyase
MFSHTNPLHQDVFKSVAQLEAEVVAMTAALLGSKEKASGGQICGNMTSGGTESILLAVKTSRDYMQSKKGITKPEIIIAESAHSAYDKAAQYFNIKVRRVPVNKEFLADVKGFKRCINGNTIMMVGSAPGFPHGLIDPIEELGELASQYGICLHVDLCLGGFVLPFARKLGYPIPPFDFSVKGVTSISTDVHKYGLAPKGTSTVLYRNHEIRKHQFVAVTEWTGGLYISPTMAGSRPGGLVAGAWAAMMSLGLNGYLESTGKIMEVSRKIQKGIDDISGLFVIGKPDMTVVAFGSDAVDIFEVNDIMSSKGWHLNALQRPNSLHICVTLQHTAIYEEFLKDLEDSVNTVKANPGPISGGMAPIYGAAGKMPDRGTVKELLVEFMDSSC

SEQ ID NO: 66399 - DNA, 1077 bp, Triticum aestivum
  misc_feature (1)..(1077): Ceres Seq. ID no. 13657647
gaaaagaccccacagccgggaggaggagcccatcccgtcccaccccaccgccgcggccaaaaaccaatcacgcctcccggcggcggcccgcgcggcgccggccatggcggacgccgtcaagcagccgctcctccaccaccagcagccctacgcgtacccgtcgcacgccgcgtcggcctcctcccccgcgctcccctccgtgccccactccgggaccgccacccccacccccggggccgggggcgccgcctccgcctccttcgccgggggccgccgcttcccgggcggccttgacgtgcccaacctcaagaagcgcggcggcggcacgcgcagctggatccgcgtcgaggccgccacggcctccgtgcagacgctggaggtcgacaaggccaccatgatgcgccgctgcgagctccccgcccgcgacctccgcctcctcgacccgctcttcgtctacccctccaccgtcctcggccgcgagcgcgccatcgtcgtcaacctcgagcagatccgctgcgtcatcaccgccgacgaggtgctcctcctcaactccctcgacagctacgtcttccagtacgccgccgagctgcagcgccgcctcctccagcgcgccgagggcgacgagctccccttcgagttccgcgccctcgagctcgccctcgaggccgcctgctccttcctcgacgcccaggcagcagaattggaaattgaagcatatcccttactggatgagctaacatcaaaaattagtactctaaatctgaaacgtgttcggcggctaaaaagtagactagttgctctgaccagaagagtccagaaggtcagggatgaaatagaacagctaatggatgatgatggagatatggctgagatgtatcttaccgagaaaaagatgaggatggaatcatcatctgtgtttggtgatcaatcattggcgaccttcaacgcggcagccgctgggacttcagtttcagctcctgtgtctccagtgtcttcacccacagaatcacggaaattggagaaaacctacagcttgtgtagatgtttaaacacaataaagttggaactggagggggg

SEQ ID NO: 66400 - protein, 358 aa, Triticum aestivum
  peptide (1)..(358): Ceres Seq. ID no. 13657648
  misc_feature (109)..(334): Homolog of NCBI NO: 30682808 NR Description: expressed protein [Arabidopsis thaliana]
  misc_feature (109)..(334): Homolog of NCBI NO: 9758997 NR Description: gene_id:MTH16.11~unknown protein [Arabidopsis
  misc_feature (135)..(347): Homolog of NCBI NO: 21553824 NR Description: unknown [Arabidopsis thaliana]
  misc_feature (170)..(357): Homolog of NCBI NO: 18394312 NR Description: expressed protein [Arabidopsis thaliana]
  misc_feature (135)..(347): Homolog of NCBI NO: 18412911 NR Description: expressed protein [Arabidopsis thaliana]
  misc_feature (198)..(304): Homolog of NCBI NO: 30685422 NR Description: expressed protein [Arabidopsis thaliana]
  misc_feature (65)..(201): Homolog of NCBI NO: 30685422 NR Description: expressed protein [Arabidopsis thaliana]
  misc_feature (102)..(344): Homolog of NCBI NO: 25360882 NR Description: MRS2-5 [Arabidopsis thaliana]
  misc_feature (102)..(344): Homolog of NCBI NO: 15227679 NR Description: MRS2-5 protein [Arabidopsis thaliana]
  misc_feature (53)..(347): Homolog of NCBI NO: 38345033 NR Description: OSJNBa0029H02.17 [Oryza sativa (japonica
KRPHSREEEPIPSHPTAAAKNQSRLPAAARAAPAMADAVKQPLLHHQQPYAYPSHAASASSPALPSVPHSGTATPTPGAGGAASASFAGGRRFPGGLDVPNLKKRGGGTRSWIRVEAATASVQTLEVDKATMMRRCELPARDLRLLDPLFVYPSTVLGRERAIVVNLEQIRCVITADEVLLLNSLDSYVFQYAAELQRRLLQRAEGDELPFEFRALELALEAACSFLDAQAAELEIEAYPLLDELTSKISTLNLKRVRRLKSRLVALTRRVQKVRDEIEQLMDDDGDMAEMYLTEKKMRMESSSVFGDQSLATFNAAAAGTSVSAPVSPVSSPTESRKLEKTYSLCRCLNTIKLELEG

SEQ ID NO: 66401 - protein, 324 aa, Triticum aestivum
  peptide (1)..(324): Ceres Seq. ID no. 13657649
  misc_feature (75)..(300): Homolog of NCBI NO: 30682814 NR Description: expressed protein [Arabidopsis thaliana]
  misc_feature (75)..(300): Homolog of NCBI NO: 9758997 NR Description: gene_id:MTH16.11~unknown protein [Arabidopsis
  misc_feature (101)..(313): Homolog of NCBI NO: 21553824 NR Description: unknown [Arabidopsis thaliana]
  misc_feature (136)..(323): Homolog of NCBI NO: 18394312 NR Description: expressed protein [Arabidopsis thaliana]
  misc_feature (101)..(313): Homolog of NCBI NO: 18412911 NR Description: expressed protein [Arabidopsis thaliana]
  misc_feature (164)..(270): Homolog of NCBI NO: 30685422 NR Description: expressed protein [Arabidopsis thaliana]
  misc_feature (31)..(167): Homolog of NCBI NO: 30685422 NR Description: expressed protein [Arabidopsis thaliana]
  misc_feature (68)..(310): Homolog of NCBI NO: 25360882 NR Description: MRS2-5 [Arabidopsis thaliana]
  misc_feature (68)..(310): Homolog of NCBI NO: 15227679 NR Description: MRS2-5 protein [Arabidopsis thaliana]
  misc_feature (19)..(313): Homolog of NCBI NO: 38345033 NR Description: OSJNBa0029H02.17 [Oryza sativa (japonica
MADAVKQPLLHHQQPYAYPSHAASASSPALPSVPHSGTATPTPGAGGAASASFAGGRRFPGGLDVPNLKKRGGGTRSWIRVEAATASVQTLEVDKATMMRRCELPARDLRLLDPLFVYPSTVLGRERAIVVNLEQIRCVITADEVLLLNSLDSYVFQYAAELQRRLLQRAEGDELPFEFRALELALEAACSFLDAQAAELEIEAYPLLDELTSKISTLNLKRVRRLKSRLVALTRRVQKVRDEIEQLMDDDGDMAEMYLTEKKMRMESSSVFGDQSLATFNAAAAGTSVSAPVSPVSSPTESRKLEKTYSLCRCLNTIKLELEG

SEQ ID NO: 66402 - protein, 227 aa, Triticum aestivum
  peptide (1)..(227): Ceres Seq. ID no. 13657650
  misc_feature (1)..(203): Homolog of NCBI NO: 30682808 NR Description: expressed protein [Arabidopsis thaliana]
  misc_feature (1)..(203): Homolog of NCBI NO: 9758997 NR Description: gene_id:MTH16.11~unknown protein [Arabidopsis
  misc_feature (4)..(216): Homolog of NCBI NO: 21553824 NR Description: unknown [Arabidopsis thaliana]
  misc_feature (39)..(226): Homolog of NCBI NO: 18394312 NR Description: expressed protein [Arabidopsis thaliana]
  misc_feature (4)..(216): Homolog of NCBI NO: 18412911 NR Description: expressed protein [Arabidopsis thaliana]
  misc_feature (67)..(173): Homolog of NCBI NO: 30685422 NR Description: expressed protein [Arabidopsis thaliana]
  misc_feature (1)..(70): Homolog of NCBI NO: 30685422 NR Description: expressed protein [Arabidopsis thaliana]
  misc_feature (1)..(213): Homolog of NCBI NO: 25360882 NR Description: MRS2-5 [Arabidopsis thaliana]
  misc_feature (1)..(213): Homolog of NCBI NO: 15227679 NR Description: MRS2-5 protein [Arabidopsis thaliana]
  misc_feature (1)..(216): Homolog of NCBI NO: 38345033 NR Description: OSJNBa0029H02.17 [Oryza sativa (japonica
MMRRCELPARDLRLLDPLFVYPSTVLGRERAIVVNLEQIRCVITADEVLLLNSLDSYVFQYAAELQRRLLQRAEGDELPFEFRALELALEAACSFLDAQAAELEIEAYPLLDELTSKISTLNLKRVRRLKSRLVALTRRVQKVRDEIEQLMDDDGDMAEMYLTEKKMRMESSSVFGDQSLATFNAAAAGTSVSAPVSPVSSPTESRKLEKTYSLCRCLNTIKLELEG

SEQ ID NO: 66403 - DNA, 1291 bp, Triticum aestivum
  misc_feature (1)..(1291): Ceres Seq. ID no. 13658400
aaaacaaagaactactctccccacagctcccatccctggttccaccggccccgacctcgacctcgaccacactcttctgcttccccaggtcttccaatccaccagcctctccgccgcgaaaccctagcccccctgagccaccccccgtcgaggccgctggcggatggcgaaggcgtgaccggcgcggacagcaccccgttcccgccctcagccccgcatctgatgttcctctcccgcatcgtcctgcgcgacctggactccatcgactcccccgcctccatggcgacctccaagaaggtggtgacgcgcgacgagtgggagcgcaagctccgcgacgtcaagatccgcaaggaggacatgaaccgcctcgtcatgaacttcctcgtcaccgagggcttcgtcgacgccgccgacaagttccgcgtcgagtccggcacccaaccggacatcgacctggccaccatcacggatcggatggaggtgaaaaaggcggttcagtcagggaatgtccaggaggcaatcgagaagatcaacgatcttaaccccacgattctggatacaaatcccgaattatacttccatctccagcagcaaaaattaatagagttgattcgtgcggggaagataaatgaagctttggagtttgctcaagaagaacttgcaccaagaggcgaagaaaatcaaacctttctggaggaaatagagaaaactgtagcactgttggtttttgaagatgtaaaaaattgcccatatggtgaactgttggacgtttctcaacgcttaaagacggcaagtgaagttaacgctgccattctcacaagccaaagtcacgagaaagatccaaagctccccagtctgttgaagatgttgatttggactcaaaaccagctgaacgaaaaggcggcatatcctcgaatcaacaacttatccaccgccgcactggaagatccagcaatatgagctgctgtccaaagtgttggagtgttgactatggagcttaggcaccagcagcagccatgtctgcatgtacactatctgtcgtaggtctgttgttcgtttcatcaatgttctagcttaatgcaaaaaaaaaaaaccagatagataatcctgctctctcctgtcgtataggttgttcttgtcatttttttttgaaaacagagataaatgttgcatttgattgttgtttacaaactatgtgttgttgaattattggcgataatgtgttgcacaccattcatgtgttctgctggaatgatgcaaagcaaggcatcaagttcagcttgcctactgt

SEQ ID NO: 66404 - protein, 319 aa, Triticum aestivum
  peptide (1)..(319): Ceres Seq. ID no. 15220632
  misc_feature (96)..(297): Homolog of NCBI NO: 7487558 NR Description: hypothetical protein T30A10.60 - Arabidopsis
  misc_feature (99)..(315): Homolog of NCBI NO: 24643081 NR Description: CG6617-PA [Drosophila melanogaster]
  misc_feature (98)..(314): Homolog of NCBI NO: 26451919 NR Description: unknown protein [Arabidopsis thaliana]
  misc_feature (94)..(317): Homolog of NCBI NO: 37748055 NR Description: Unknown (protein for MGC:73100) [Danio rerio]
  misc_feature (93)..(317): Homolog of NCBI NO: 21594655 NR Description: chromosome 20 open reading frame 11 [Homo sapiens]
  misc_feature (94)..(314): Homolog of NCBI NO: 30681030 NR Description: expressed protein [Arabidopsis thaliana]
  misc_feature (93)..(317): Homolog of NCBI NO: 8923557 NR Description: chromosome 20 open reading frame 11
  misc_feature (93)..(317): Homolog of NCBI NO: 20863687 NR Description: RIKEN cDNA 2310003C23 [Mus musculus]
  misc_feature (75)..(312): Homolog of NCBI NO: 25404311 NR Description: hypothetical protein F11P17.12 [imported] -
  misc_feature (75)..(318): Homolog of NCBI NO: 15219873 NR Description: expressed protein [Arabidopsis thaliana]
KTKNYSPHSSHPWFHRPRPRPRPHSSASPGLPIHQPLRRETLAPLSHPPSRPLADGEGVTGADSTPFPPSAPHLMFLSRIVLRDLDSIDSPASMATSKKVVTRDEWERKLRDVKIRKEDMNRLVMNFLVTEGFVDAADKFRVESGTQPDIDLATITDRMEVKKAVQSGNVQEAIEKINDLNPTILDTNPELYFHLQQQKLIELIRAGKINEALEFAQEELAPRGEENQTFLEEIEKTVALLVFEDVKNCPYGELLDVSQRLKTASEVNAAILTSQSHEKDPKLPSLLKMLIWTQNQLNEKAAYPRINNLSTAALEDPAI

SEQ ID NO: 66405 - protein, 245 aa, Triticum aestivum
  peptide (1)..(245): Ceres Seq. ID no. 15220633
  misc_feature (22)..(223): Homolog of NCBI NO: 7487558 NR Description: hypothetical protein T30A10.60 - Arabidopsis
  misc_feature (25)..(241): Homolog of NCBI NO: 24643081 NR Description: CG6617-PA [Drosophila melanogaster]
  misc_feature (24)..(240): Homolog of NCBI NO: 26451919 NR Description: unknown protein [Arabidopsis thaliana]
  misc_feature (20)..(243): Homolog of NCBI NO: 37748055 NR Description: Unknown (protein for MGC:73100) [Danio rerio]
  misc_feature (19)..(243): Homolog of NCBI NO: 21594655 NR Description: chromosome 20 open reading frame 11 [Homo sapiens]
  misc_feature (20)..(240): Homolog of NCBI NO: 30681030 NR Description: expressed protein [Arabidopsis thaliana]
  misc_feature (19)..(243): Homolog of NCBI NO: 8923557 NR Description: chromosome 20 open reading frame 11
  misc_feature (19)..(243): Homolog of NCBI NO: 20863687 NR Description: RIKEN cDNA 2310003C23 [Mus musculus]
  misc_feature (1)..(238): Homolog of NCBI NO: 25404311 NR Description: hypothetical protein F11P17.12 [imported] -
  misc_feature (1)..(244): Homolog of NCBI NO: 15219873 NR Description: expressed protein [Arabidopsis thaliana]
MFLSRIVLRDLDSIDSPASMATSKKVVTRDEWERKLRDVKIRKEDMNRLVMNFLVTEGFVDAADKFRVESGTQPDIDLATITDRMEVKKAVQSGNVQEAIEKINDLNPTILDTNPELYFHLQQQKLIELIRAGKINEALEFAQEELAPRGEENQTFLEEIEKTVALLVFEDVKNCPYGELLDVSQRLKTASEVNAAILTSQSHEKDPKLPSLLKMLIWTQNQLNEKAAYPRINNLSTAALEDPAI

SEQ ID NO: 66406 - protein, 226 aa, Triticum aestivum
  peptide (1)..(226): Ceres Seq. ID no. 15220634
  misc_feature (3)..(204): Homolog of NCBI NO: 7487558 NR Description: hypothetical protein T30A10.60 - Arabidopsis
  misc_feature (6)..(222): Homolog of NCBI NO: 24643081 NR Description: CG6617-PA [Drosophila melanogaster]
  misc_feature (5)..(221): Homolog of NCBI NO: 26451919 NR Description: unknown protein [Arabidopsis thaliana]
  misc_feature (1)..(224): Homolog of NCBI NO: 37748055 NR Description: Unknown (protein for MGC:73100) [Danio rerio]
  misc_feature (1)..(224): Homolog of NCBI NO: 21594655 NR Description: chromosome 20 open reading frame 11 [Homo sapiens]
  misc_feature (1)..(221): Homolog of NCBI NO: 30681030 NR Description: expressed protein [Arabidopsis thaliana]
  misc_feature (1)..(224): Homolog of NCBI NO: 8923557 NR Description: chromosome 20 open reading frame 11
  misc_feature (1)..(224): Homolog of NCBI NO: 20863687 NR Description: RIKEN cDNA 2310003C23 [Mus musculus]
  misc_feature (1)..(219): Homolog of NCBI NO: 25404311 NR Description: hypothetical protein F11P17.12 [imported] -
  misc_feature (1)..(225): Homolog of NCBI NO: 15219873 NR Description: expressed protein [Arabidopsis thaliana]
MATSKKVVTRDEWERKLRDVKIRKEDMNRLVMNFLVTEGFVDAADKFRVESGTQPDIDLATITDRMEVKKAVQSGNVQEAIEKINDLNPTILDTNPELYFHLQQQKLIELIRAGKINEALEFAQEELAPRGEENQTFLEEIEKTVALLVFEDVKNCPYGELLDVSQRLKTASEVNAAILTSQSHEKDPKLPSLLKMLIWTQNQLNEKAAYPRINNLSTAALEDPAI

SEQ ID NO: 66407 - DNA, 1802 bp, Triticum aestivum
  misc_feature (1)..(1802): Ceres Seq. ID no. 13657707
atccacacacactccactgcgcacaattccaccatcagcaatgcctcctcccctccgcctcctcgccctcctcctcctcctccacctccccttcgccctctcctcccgccaccaccacaaagccccggcgccgccgccccggaaggtgcctcctccggcggccaactacgcggcgccgctccccgtcctcctcgcctgcaacgccacccgcttccggcccgcctgcgtcgccacgctctccgccgccaacgtcaccgccgcgtcctccccctccgacctcctcggcgccacgctctccgcgctccgcgcccgcctcccgccggccgtctccaccgcgcgctccgtcctcgcctcctccaagaacgtcaacctcacgaccgccgccaccaactgcctcaccgccctctccctctcctcgcaccgcctcgagccgccgccctcgccgtcggcgctcatgcccgcctccgcctcgctcctccacctctacgactgctggtccgcctacaagtacgtcaacttctcccggaccatctacgatgccatggcgtacctcaacgacaccatcaccgtcaacagcaactacatctccatgctcgccgcgctgaagcggtacggcgacgacacgtccgtctgggcgccgccgcagacggagcgcgacgggtactggccttcgcccgcggcgtcgggggccgacgtggacgcgctcggcgtgcccaaggggctccccgcggacgcgacggtgtgcggcgccgggtgcgactacaggacagtgcgggaggcggtggcggccgcgccggacaacgggggcaagaggttcgtggtgtacgtgaaggcaggcgtgtacaaggagacggtgagcgtgccgtgggagaagaccaacctggtgctggtcggcgacggcatggggaagacggtcatcaccggcgacctcaacgcggacacgcccggcgtgtccacgttcaacacggccacyktaggcgtgctcgcggacggcttcatggcgcgcgacctgacgatcgcgaacacggcggggccggacgcgcaccaggcggtggcgttccggtccacgggcgaccgcacggtgctggacacggtggagctgctggggcaccaggacacgctgtacgtgcacgccatgcgccagttctacacccgctgccgcgtggccggcacggtggacttcgtcttcggcaactcggccgccgtgctccacgacagcgacctcgtcgtgctgccccggcagctgcggccggagaagggcgagacggacgcgctgacggcgcagggccgcaccgacccggcgcagcccacggggatcgtgctccggggctgccgcgtcaacggcagcgacgagtacatggccttctaccggcagaagcccggcgtgcaccacgtgttcctcggccggccatggaaggagtactcccgcacggtgttcgtcgggtgcacgatggctgagatcgtgcggcccgaggggtggatgccatggagcggcgacttcgcgctcaagacgctctactacggggagtatgatagcgccggccctggcgccggcgggcggggaggcggcagggtggcgtggagcagccaggtgcccaaggagcgcgtcgacgtytacagcgtcgccagcttcatacagggggacgagtggatacccaaagtgaagtagtgggctttttggtcctggtagcatacataatcgagctggcgtgagctcgtgggccggtcggcggtgatcgtgccactcggtcacggatgtactgcagtcgttgcagttatgcaaatgcagtggtgcctaacgc

SEQ ID NO: 66408 - protein, 555 aa, Triticum aestivum
  peptide (1)..(555): Ceres Seq. ID no. 15220615
  misc_feature (244)..(548): Pfam Name: Pectinesterase Pfam Description: Pectinesterase
  misc_feature (217)..(551): Homolog of NCBI NO: 6689892 NR Description: pectin methyl esterase [Solanum tuberosum]
  misc_feature (92)..(551): Homolog of NCBI NO: 15231828 NR Description: pectin methylesterase -related [Arabidopsis
  misc_feature (253)..(553): Homolog of NCBI NO: 15238378 NR Description: pectinesterase, putative [Arabidopsis thaliana]
  misc_feature (87)..(551): Homolog of NCBI NO: 38344075 NR Description: OSJNBa0006B20.19 [Oryza sativa (japonica
  misc_feature (181)..(551): Homolog of NCBI NO: 1552379 NR Description: pectin methylesterase [Silene latifolia subsp.
  misc_feature (155)..(550): Homolog of NCBI NO: 22135882 NR Description: pectin methylesterase-like protein [Arabidopsis
  misc_feature (39)..(550): Homolog of NCBI NO: 22328058 NR Description: pectinesterase family [Arabidopsis thaliana]
  misc_feature (18)..(550): Homolog of NCBI NO: 15242495 NR Description: pectinesterase family [Arabidopsis thaliana]
  misc_feature (18)..(550): Homolog of NCBI NO: 9759007 NR Description: pectin methylesterase-like protein [Arabidopsis
  misc_feature (15)..(554): Homolog of NCBI NO: 34907404 NR Description: putative pectin methylesterase
  misc_feature (324)..(324): Xaa is any aa, unknown or other
  misc_feature (325)..(325): Xaa is any aa, unknown or other
  misc_feature (538)..(538): Xaa is any aa, unknown or other
STHTPLRTIPPSAMPPPLRLLALLLLLHLPFALSSRHHHKAPAPPPRKVPPPAANYAAPLPVLLACNATRFRPACVATLSAANVTAASSPSDLLGATLSALRARLPPAVSTARSVLASSKNVNLTTAATNCLTALSLSSHRLEPPPSPSALMPASASLLHLYDCWSAYKYVNFSRTIYDAMAYLNDTITVNSNYISMLAALKRYGDDTSVWAPPQTERDGYWPSPAASGADVDALGVPKGLPADATVCGAGCDYRTVREAVAAAPDNGGKRFVVYVKAGVYKETVSVPWEKTNLVLVGDGMGKTVITGDLNADTPGVSTFNTAXXGVLADGFMARDLTIANTAGPDAHQAVAFRSTGDRTVLDTVELLGHQDTLYVHAMRQFYTRCRVAGTVDFVFGNSAAVLHDSDLVVLPRQLRPEKGETDALTAQGRTDPAQPTGIVLRGCRVNGSDEYMAFYRQKPGVHHVFLGRPWKEYSRTVFVGCTMAEIVRPEGWMPWSGDFALKTLYYGEYDSAGPGAGGRGGGRVAWSSQVPKERVDXYSVASFIQGDEWIPKVK

SEQ ID NO: 66409 - protein, 542 aa, Triticum aestivum
  peptide (1)..(542): Ceres Seq. ID no. 15220616
  misc_feature (231)..(535): Pfam Name: Pectinesterase Pfam Description: Pectinesterase
  misc_feature (204)..(538): Homolog of NCBI NO: 6689892 NR Description: pectin methyl esterase [Solanum tuberosum]
  misc_feature (79)..(538): Homolog of NCBI NO: 15231828 NR Description: pectin methylesterase -related [Arabidopsis
  misc_feature (240)..(540): Homolog of NCBI NO: 15238378 NR Description: pectinesterase, putative [Arabidopsis thaliana]
  misc_feature (74)..(538): Homolog of NCBI NO: 38344075 NR Description: OSJNBa0006B20.19 [Oryza sativa (japonica
  misc_feature (168)..(538): Homolog of NCBI NO: 1552379 NR Description: pectin methylesterase [Silene latifolia subsp.
  misc_feature (142)..(537): Homolog of NCBI NO: 22135882 NR Description: pectin methylesterase-like protein [Arabidopsis
  misc_feature (26)..(537): Homolog of NCBI NO: 22328058 NR Description: pectinesterase family [Arabidopsis thaliana]
  misc_feature (5)..(537): Homolog of NCBI NO: 15242495 NR Description: pectinesterase family [Arabidopsis thaliana]
  misc_feature (5)..(537): Homolog of NCBI NO: 9759007 NR Description: pectin methylesterase-like protein [Arabidopsis
  misc_feature (2)..(541): Homolog of NCBI NO: 34907404 NR Description: putative pectin methylesterase
  misc_feature (311)..(311): Xaa is any aa, unknown or other
  misc_feature (312)..(312): Xaa is any aa, unknown or other
  misc_feature (525)..(525): Xaa is any aa, unknown or other
MPPPLRLLALLLLLHLPFALSSRHHHKAPAPPPRKVPPPAANYAAPLPVLLACNATRFRPACVATLSAANVTAASSPSDLLGATLSALRARLPPAVSTARSVLASSKNVNLTTAATNCLTALSLSSHRLEPPPSPSALMPASASLLHLYDCWSAYKYVNFSRTIYDAMAYLNDTITVNSNYISMLAALKRYGDDTSVWAPPQTERDGYWPSPAASGADVDALGVPKGLPADATVCGAGCDYRTVREAVAAAPDNGGKRFVVYVKAGVYKETVSVPWEKTNLVLVGDGMGKTVITGDLNADTPGVSTFNTAXXGVLADGFMARDLTIANTAGPDAHQAVAFRSTGDRTVLDTVELLGHQDTLYVHAMRQFYTRCRVAGTVDFVFGNSAAVLHDSDLVVLPRQLRPEKGETDALTAQGRTDPAQPTGIVLRGCRVNGSDEYMAFYRQKPGVHHVFLGRPWKEYSRTVFVGCTMAEIVRPEGWMPWSGDFALKTLYYGEYDSAGPGAGGRGGGRVAWSSQVPKERVDXYSVASFIQGDEWIPKVK

SEQ ID NO: 66410 - protein, 485 aa, Triticum aestivum
  peptide (1)..(485): Ceres Seq. ID no. 15220617
  misc_feature (187)..(429): Pfam Name: Aminotransferase class-III Pfam Description: Aminotransferase class-III
  misc_feature (1)..(50): Homolog of NCBI NO: 34909826 NR Description: P0403C05.21 [Oryza sativa (japonica
  misc_feature (17)..(47): Homolog of NCBI NO: 15238378 NR Description: pectinesterase, putative [Arabidopsis thaliana]
  misc_feature (325)..(325): Xaa is any aa, unknown or other
IHTHSTAHNSTISNASSPPPPRPPPPPPPPLRPLLPPPPQSPGAAAPEGASSGGQLRGAAPRPPRLQRHPLPARLRRHALRRQRHRRVLPLRPPRRHALRAPRPPPAGRLHRALRPRLLQERQPHDRRHQLPHRPLPLLAPPRAAALAVGAHARLRLAPPPLRLLVRLQVRQLLPDHLRCHGVPQRHHHRQQQLHLHARRAEAVRRRHVRLGAAADGARRVLAFARGVGGRRGRARRAQGAPRGRDGVRRRVRLQDSAGGGGGRAGQRGQEVRGVREGRRVQGDGERAVGEDQPGAGRRRHGEDGHHRRPQRGHARRVHVQHGHXRRARGRLHGARPDDREHGGAGRAPGGGVPVHGRPHGAGHGGAAGAPGHAVRARHAPVLHPLPRGRHGGLRLRQLGRRAPRQRPRRAAPAAAAGEGRDGRADGAGPHRPGAAHGDRAPGLPRQRQRRVHGLLPAEARRAPRVPRPAMEGVLPHGVRRVHDG

SEQ ID NO: 66411 - DNA, 2043 bp, Triticum aestivum
  misc_feature (1)..(2043): Ceres Seq. ID no. 13500446
aaaaagctcgcagtgggcccgccccacatccatcttcctccgctccgctggaaaatacacagacgagatgcgagactagctagggtttacactctacactctcctccgaatcgaatcaaagaagcggcggcactctcctctcctccgctgcggaccaggcggccgcggagctgaatttgttcgatggaggacctaccagaggctctgctgacagagattctcaagaggatcaccaggacaagtgatctcaagtcttttacccttgtgtcaaagcagctctgcaagatagagggggatcaaaggggtgctatccatgttggttccggtgtttgcactgctacaaaagcactggcatcattgtgcgcccggttcccaaatctgcggaaagtggaaatcgattactctggctggatacctggacatggaaagcagctggacaacaaaggcctctctgtgttttcatctcactgttcctcgctgattgacctcaccttaagcttctgctcatgcatcgatgactctgggcttgcttgtttagcttattgcaagacattggtgtctctcaggctcaactccgcaccagaaataacgtcagttgggcttttctcggttgcagttggttgcacaaatctatctgctctccaccttactgattgcgagaacatcgacaatgtagagtggctggaataccttggtaggcatggatcgttagaagagcttgtggtgaagaattgcaaaggaatcaatcatcatgacttcctaaagtttgattctggatggatgaagctccagaagtttgagtttgagaggaaaagagaaagatttgattgtcttccaggtgatgtgatctatgactccttgtacgatgctcacagtatggatgcatatgatttctgctgtgagagcttgaaggatttaaggttggcgcatattaaaacttggcccgaagtaggacttcgtattctcctagggaagtgtaaagcattggagaagctttgccttgagtatgttcatgccctaaatgacaatgacatgattgcattgtctcggagctgcagcaaccttaaaagcatcttacttaggctcaacctgcagcgctactctagtgatgtcagctattgtgaaaccaggacgtcatttactgatgccagcctttacgctctagccctcaactgtcgtatgcttcagatggttgacctcagctttacaggatgttcccctgactggccatcagaaataggattcacacagcagggttttctggtgctcattcggtcctgcccgattcgcgttctcgtgctcaacaacgccaacttctttgatgacgaggggatgaaggccctgtcatcctcaccacatctggagacgctcgagcttatattgtgtcatgcggtaactgatgccgggatgcacttcattgcgcacaccccatgcttgagcaatcttacacttcgggtgtgtcatcacattactgatgttggagtggctgaactggggcgtgcacataagttagagtctttggtcattgagtattgtggtgaggtctctccgcaagctgcgcaggttgttgccaagtcagttcactactccaaggactgttcagatgcccttatgaagagaattggtcttggcatctattgatgaagtggtctccaaaattttcagtatgaatttgctgctcaagccattaagttgttcagtgtgcatcattgcacaaggctctgcatcatccgacctagattcacttgtctggactttctattgccttctacctttactatatgatttttctgtatgacagtctaatgatgatctttggatggcatctggtgaatggtgaatggaactttagtactgtagtaagcaccacttgtgtattactatgaaccgtaattctggttgcttaattcctactctctgtagccgtatcgaaaccggcataagtaggccccaagattcccagtttgtgctgtggggggcactatatgacagtttggtgtacttatttgtattatttaagcaaatgtcatgaactcctttttg

SEQ ID NO: 66412 - protein, 485 aa, Triticum aestivum
  peptide (1)..(485): Ceres Seq. ID no. 13500447
  misc_feature (1)..(331): Homolog of NCBI NO: 15237286 NR Description: expressed protein [Arabidopsis thaliana]
  misc_feature (41)..(438): Homolog of NCBI NO: 18414458 NR Description: F-box protein family (FBL4) [Arabidopsis
  misc_feature (29)..(438): Homolog of NCBI NO: 21536497 NR Description: F-box protein family, AtFBL4 [Arabidopsis
  misc_feature (4)..(464): Homolog of NCBI NO: 30679379 NR Description: F-box protein family (FBL3) [Arabidopsis
  misc_feature (1)..(191): Homolog of NCBI NO: 38344677 NR Description: OSJNBb0042I07.12 [Oryza sativa (japonica
  misc_feature (135)..(468): Homolog of NCBI NO: 38344677 NR Description: OSJNBb0042I07.12 [Oryza sativa (japonica
  misc_feature (28)..(307): Homolog of NCBI NO: 38605924 NR Description: OSJNBb0076A22.3 [Oryza sativa (japonica
  misc_feature (55)..(335): Homolog of NCBI NO: 38605933 NR Description: OSJNBb0076A22.12 [Oryza sativa (japonica
  misc_feature (1)..(473): Homolog of NCBI NO: 18412871 NR Description: F-box protein family (FBL14) [Arabidopsis
  misc_feature (1)..(468): Homolog of NCBI NO: 38344679 NR Description: OSJNBb0042I07.14 [Oryza sativa (japonica
MEDLPEALLTEILKRITRTSDLKSFTLVSKQLCKIEGDQRGAIHVGSGVCTATKALASLCARFPNLRKVEIDYSGWIPGHGKQLDNKGLSVFSSHCSSLIDLTLSFCSCIDDSGLACLAYCKTLVSLRLNSAPEITSVGLFSVAVGCTNLSALHLTDCENIDNVEWLEYLGRHGSLEELVVKNCKGINHHDFLKFDSGWMKLQKFEFERKRERFDCLPGDVIYDSLYDAHSMDAYDFCCESLKDLRLAHIKTWPEVGLRILLGKCKALEKLCLEYVHALNDNDMIALSRSCSNLKSILLRLNLQRYSSDVSYCETRTSFTDASLYALALNCRMLQMVDLSFTGCSPDWPSEIGFTQQGFLVLIRSCPIRVLVLNNANFFDDEGMKALSSSPHLETLELILCHAVTDAGMHFIAHTPCLSNLTLRVCHHITDVGVAELGRAHKLESLVIEYCGEVSPQAAQVVAKSVHYSKDCSDALMKRIGLGIY

SEQ ID NO: 66413 - protein, 286 aa, Triticum aestivum
  peptide (1)..(286): Ceres Seq. ID no. 13500448
  misc_feature (1)..(100): Homolog of NCBI NO: 37590914 NR Description: Unknown (protein for MGC:73374) [Danio rerio]
  misc_feature (1)..(132): Homolog of NCBI NO: 15237286 NR Description: expressed protein [Arabidopsis thaliana]
  misc_feature (1)..(239): Homolog of NCBI NO: 18414458 NR Description: F-box protein family (FBL4) [Arabidopsis
  misc_feature (1)..(239): Homolog of NCBI NO: 21536497 NR Description: F-box protein family, AtFBL4 [Arabidopsis
  misc_feature (1)..(265): Homolog of NCBI NO: 30679379 NR Description: F-box protein family (FBL3) [Arabidopsis
  misc_feature (1)..(269): Homolog of NCBI NO: 38344677 NR Description: OSJNBb0042I07.12 [Oryza sativa (japonica
  misc_feature (1)..(108): Homolog of NCBI NO: 38605924 NR Description: OSJNBb0076A22.3 [Oryza sativa (japonica
  misc_feature (1)..(136): Homolog of NCBI NO: 38605933 NR Description: OSJNBb0076A22.12 [Oryza sativa (japonica
  misc_feature (1)..(274): Homolog of NCBI NO: 18412871 NR Description: F-box protein family (FBL14) [Arabidopsis
  misc_feature (1)..(269): Homolog of NCBI NO: 38344679 NR Description: OSJNBb0042I07.14 [Oryza sativa (japonica
MKLQKFEFERKRERFDCLPGDVIYDSLYDAHSMDAYDFCCESLKDLRLAHIKTWPEVGLRILLGKCKALEKLCLEYVHALNDNDMIALSRSCSNLKSILLRLNLQRYSSDVSYCETRTSFTDASLYALALNCRMLQMVDLSFTGCSPDWPSEIGFTQQGFLVLIRSCPIRVLVLNNANFFDDEGMKALSSSPHLETLELILCHAVTDAGMHFIAHTPCLSNLTLRVCHHITDVGVAELGRAHKLESLVIEYCGEVSPQAAQVVAKSVHYSKDCSDALMKRIGLGIY

SEQ ID NO: 66414 - protein, 254 aa, Triticum aestivum
  peptide (1)..(254): Ceres Seq. ID no. 13500449
  misc_feature (1)..(68): Homolog of NCBI NO: 37590914 NR Description: Unknown (protein for MGC:73374) [Danio rerio]
  misc_feature (1)..(100): Homolog of NCBI NO: 15237286 NR Description: expressed protein [Arabidopsis thaliana]
  misc_feature (1)..(207): Homolog of NCBI NO: 18414458 NR Description: F-box protein family (FBL4) [Arabidopsis
  misc_feature (1)..(207): Homolog of NCBI NO: 21536497 NR Description: F-box protein family, AtFBL4 [Arabidopsis
  misc_feature (1)..(233): Homolog of NCBI NO: 30679379 NR Description: F-box protein family (FBL3) [Arabidopsis
  misc_feature (1)..(237): Homolog of NCBI NO: 38344677 NR Description: OSJNBb0042I07.12 [Oryza sativa (japonica
  misc_feature (1)..(76): Homolog of NCBI NO: 38605924 NR Description: OSJNBb0076A22.3 [Oryza sativa (japonica
  misc_feature (1)..(104): Homolog of NCBI NO: 38605933 NR Description: OSJNBb0076A22.12 [Oryza sativa (japonica
  misc_feature (1)..(242): Homolog of NCBI NO: 18412871 NR Description: F-box protein family (FBL14) [Arabidopsis
  misc_feature (1)..(237): Homolog of NCBI NO: 38344679 NR Description: OSJNBb0042I07.14 [Oryza sativa (japonica
MDAYDFCCESLKDLRLAHIKTWPEVGLRILLGKCKALEKLCLEYVHALNDNDMIALSRSCSNLKSILLRLNLQRYSSDVSYCETRTSFTDASLYALALNCRMLQMVDLSFTGCSPDWPSEIGFTQQGFLVLIRSCPIRVLVLNNANFFDDEGMKALSSSPHLETLELILCHAVTDAGMHFIAHTPCLSNLTLRVCHHITDVGVAELGRAHKLESLVIEYCGEVSPQAAQVVAKSVHYSKDCSDALMKRIGLGIY

SEQ ID NO: 66415 - DNA, 1438 bp, Triticum aestivum
  misc_feature (1)..(1438): Ceres Seq. ID no. 12784459
ttcctcccatcggcacgcccatcccgctcctctcataatcctgagagtttcttcttttgttttatttttctttcttggtaggagtaacaatagttttggctctcctcctttctctctccctgtatccaaggagagaaatccagaggcgaagcttcagggtttgtaaattttccggatctaatcaactaaccaaaaaaacccaaaaaagaaaccatgagccacttcgccgccatgaagagccccgtcccggtcgccgccgctgccgccaccgacgcgaagagcccgctcttctgccccaagccgcgccgcccggtcgcgcccctccggtgccaccagagcagccactccgacgcgggcgccggcatggatctgctcgacctcctcctgtcaaagggcgacgagagcaatctttcggcggcgtccccgcagccgccgctgttctgtggctcgcctccgcggcgggcttcgaacccggtggtccacgacagccggttcggcatggactgcccgtccagtcccctgccggtcacgccagcgccggtggtggtccgtcccaccccacgcccggcgggaccgccgatatcgccccgttcctcggctgggtgcgctcgcgtgttccagccagccgtccgcgtcgagggttttgactgcctcgacggtggccgtagcggccgtggccatggcatcgccgccatggtctagatgcacatacaacatcgaataaccaggaaatcttctcccctcagtagtgcaaaagctttggagggagagagatgagagtgaggaggagatgagtgagaggagcttaagtccaaaatttaacccctaaaaactatataatccatcagtcaaatcccataagtataatgagtctaggtaattttaccacaaatctttttgtatgtaaataaatttcaggttcagatgcaggtgcccttcttgtaaatttgggagctctagtttgggggggatggggtagaagaaatctagagggcggggatcagggacagagggcacaagaaacacaaagtttagccctcttgtatgaatcatttttttcatgagtccctttgccttccttctggattagtcattcaattaggttggagggagggaggggttgggaattagttaggtacctgtcctagttcatctgtcatcatgcttatttttggtttatgatggaattgtttttgtccatgcaaccaagaaatccaaagccaccaaggccatggagatgtgtacaaaagagtggctacaagaagagaagagagagcagctaggtttaagtcaagtcaatgagtgagttgtgtgaaaggcatgaatgatgtattcgtggtatcgttttctctgtatatgtaatatatcgtttcattgaagcaatatgtgtaatatctcatgccatgattatcaccagcccttgtgatatcttttattg

SEQ ID NO: 66416 - protein, 162 aa, Triticum aestivum
  peptide (1)..(162): Ceres Seq. ID no. 12784460
  misc_feature (22)..(161): Homolog of NCBI NO: 18409044 NR Description: expressed protein
  misc_feature (16)..(154): Homolog of NCBI NO: 15222278 NR Description: unknown protein; protein id: At1g13390.1
  misc_feature (27)..(151): Homolog of NCBI NO: 18396232 NR Description: Expressed protein
  misc_feature (20)..(161): Homolog of NCBI NO: 30685676 NR Description: expressed protein [Arabidopsis thaliana]
  misc_feature (20)..(161): Homolog of NCBI NO: 11762168 NR Description: AT5g16110 [Arabidopsis thaliana]
MSHFAAMKSPVPVAAAAATDAKSPLFCPKPRRPVAPLRCHQSSHSDAGAGMDLLDLLLSKGDESNLSAASPQPPLFCGSPPRRASNPVVHDSRFGMDCPSSPLPVTPAPVVVRPTPRPAGPPISPRSSAGCARVFQPAVRVEGFDCLDGGRSGRGHGIAAMV

SEQ ID NO: 66417 - protein, 156 aa, Triticum aestivum
  peptide (1)..(156): Ceres Seq. ID no. 12784461
  misc_feature (16)..(155): Homolog of NCBI NO: 18409044 NR Description: expressed protein
  misc_feature (10)..(148): Homolog of NCBI NO: 15222278 NR Description: unknown protein; protein id: At1g13390.1
  misc_feature (21)..(145): Homolog of NCBI NO: 18396232 NR Description: Expressed protein
  misc_feature (14)..(155): Homolog of NCBI NO: 30685676 NR Description: expressed protein [Arabidopsis thaliana]
  misc_feature (14)..(155): Homolog of NCBI NO: 11762168 NR Description: AT5g16110 [Arabidopsis thaliana]
MKSPVPVAAAAATDAKSPLFCPKPRRPVAPLRCHQSSHSDAGAGMDLLDLLLSKGDESNLSAASPQPPLFCGSPPRRASNPVVHDSRFGMDCPSSPLPVTPAPVVVRPTPRPAGPPISPRSSAGCARVFQPAVRVEGFDCLDGGRSGRGHGIAAMV

SEQ ID NO: 66418 - protein, 112 aa, Triticum aestivum
  peptide (1)..(112): Ceres Seq. ID no. 12784462
  misc_feature (1)..(111): Homolog of NCBI NO: 18409044 NR Description: expressed protein
  misc_feature (1)..(104): Homolog of NCBI NO: 15222278 NR Description: unknown protein; protein id: At1g13390.1
  misc_feature (1)..(101): Homolog of NCBI NO: 18396232 NR Description: Expressed protein
  misc_feature (1)..(111): Homolog of NCBI NO: 30685676 NR Description: expressed protein [Arabidopsis thaliana]
  misc_feature (1)..(111): Homolog of NCBI NO: 11762168 NR Description: AT5g16110 [Arabidopsis thaliana]
MDLLDLLLSKGDESNLSAASPQPPLFCGSPPRRASNPVVHDSRFGMDCPSSPLPVTPAPVVVRPTPRPAGPPISPRSSAGCARVFQPAVRVEGFDCLDGGRSGRGHGIAAMV

SEQ ID NO: 66419 - DNA, 1737 bp, Triticum aestivum
  misc_feature (1)..(1737): Ceres Seq. ID no. 13658640
cccggcctcgtcgtcccccctccccccgcgcgtcccggcgtcgccacccgcgcccgccagaggatctccgataatttaacctgtgcgtgttgtcgctgtcgcttaaacatcgacaacctttggcgtagctgacctcattgcgtttggaatcgattcatttgttgtgtctggctygtatatgagctcacaagtatccacatcgcggggtttacatcccccagagaaaattatgacgtacgagtcccctcacacatggccactgtcggtgcctacgagcaaggctgaggcaggtagcagcgatgaccaggaggttaggctgttgtcggtttcttggaatcaggattgtggttgcttcgctgccggcacaagcaatggcttcagaatctttaactgcgaccctttcaaggagactttcaggagggatctgaagagtggtgggtttgggatagttgagatgctgttccgctgcaacatccttgctcttgtaggtggcggctccaatatgcattatccgcccaacaaggtgatgatctgggatgatcaccagagccgttgtattggggagtttaccttccgctctgatgtccgggccgtaaaattggggaaagataacattgtgattgtcctcgagacaaagatatatgtttataactttacagatctgaagatgctccatcagatagagaccctgccaaatcctaaaggactctgctgcctctctcatcattccaatacttcagtgctggcctgtcctgggctgagtcagggacatgttcgggtagagcattttgggctaaaggtgacaaagatgattacggcccatgattcacacatttcttgcatggccttaactatggatggtctcttactggcaacggcaagtatgaagggcactctaatcagaatatttaacacaatggatggcactcgcctgcaagaggtgcgcagaggtcttgataaagccgagatatatagcattgcactgtcaccaaatgtgcaatggttggcagtgtccagcgacaaaggaacggttcatatattcagtctaaaagtcagggttgcgggtgaagattcaagtaatgatcagcgtacccttgaagctccacggatggatcaccagaattcttctacctctatggatcctcttatacaaacaaacactggatccaatgwwcaagctcatcactgtctttcatgaaagggattctgccgaagtacttcagctcagagtggtcatttgctcagttccatttaccggaagtcacacgttacatcgtagctttcggcgctcaaaacactgtaatgatggttggcctggatggcagcttctacaggtgcatctttgaccaagtaaacggcggacagatgacgcagaaggaatactcgcggtttctcaagaccgactaccctcccctgaggacattgaccgcttaaaccgcgtgaccctgccgcaccgccatgacgacatgtacatacatagaaggtcgtgctctgtccattgtatataaccgtcctcctcctcgccggcaaagctctaggccggtcgccggaataaggagctccgggggtgtccggctgcaaccgcagcctgcctgcccattttgctgcagatgtccaaattgcattgtttattcgactttatgaacaagagcatccattgatatgtatgtatgtgtgtataatcaggaaggaatgcaaatatgaccttgtctgcaaccagagctgaaacagttgttg

SEQ ID NO: 66420 - protein, 339 aa, Triticum aestivum
  peptide (1)..(339): Ceres Seq. ID no. 15220653
  misc_feature (27)..(257): Homolog of NCBI NO: 18412493 NR Description: expressed protein [Arabidopsis thaliana]
  misc_feature (1)..(315): Homolog of NCBI NO: 15238452 NR Description: WD-40 repeat protein family [Arabidopsis
  misc_feature (20)..(331): Homolog of NCBI NO: 11288366 NR Description: hypothetical protein T5P19.90 - Arabidopsis
  misc_feature (27)..(320): Homolog of NCBI NO: 11288364 NR Description: hypothetical protein F26K9.200 - Arabidopsis
  misc_feature (47)..(320): Homolog of NCBI NO: 34907164 NR Description: P0423A12.19 [Oryza sativa (japonica
  misc_feature (27)..(320): Homolog of NCBI NO: 14517420 NR Description: AT3g62770/F26K9_200 [Arabidopsis thaliana]
  misc_feature (43)..(331): Homolog of NCBI NO: 7487233 NR Description: hypothetical protein At2g40810 [imported] -
  misc_feature (36)..(331): Homolog of NCBI NO: 30688413 NR Description: WD-40 repeat protein family [Arabidopsis
  misc_feature (20)..(331): Homolog of NCBI NO: 30694449 NR Description: WD-40 repeat protein family [Arabidopsis thaliana]
  misc_feature (14)..(334): Homolog of NCBI NO: 34896164 NR Description: hypothetical protein~similar to Arabidopsis
  misc_feature (332)..(332): Xaa is any aa, unknown or other
MSSQVSTSRGLHPPEKIMTYESPHTWPLSVPTSKAEAGSSDDQEVRLLSVSWNQDCGCFAAGTSNGFRIFNCDPFKETFRRDLKSGGFGIVEMLFRCNILALVGGGSNMHYPPNKVMIWDDHQSRCIGEFTFRSDVRAVKLGKDNIVIVLETKIYVYNFTDLKMLHQIETLPNPKGLCCLSHHSNTSVLACPGLSQGHVRVEHFGLKVTKMITAHDSHISCMALTMDGLLLATASMKGTLIRIFNTMDGTRLQEVRRGLDKAEIYSIALSPNVQWLAVSSDKGTVHIFSLKVRVAGEDSSNDQRTLEAPRMDHQNSSTSMDPLIQTNTGSNXQAHHCLS

SEQ ID NO: 66421 - protein, 322 aa, Triticum aestivum
  peptide (1)..(322): Ceres Seq. ID no. 15220654
  misc_feature (10)..(240): Homolog of NCBI NO: 18412493 NR Description: expressed protein [Arabidopsis thaliana]
  misc_feature (1)..(298): Homolog of NCBI NO: 15238452 NR Description: WD-40 repeat protein family [Arabidopsis
  misc_feature (3)..(314): Homolog of NCBI NO: 11288366 NR Description: hypothetical protein T5P19.90 - Arabidopsis
  misc_feature (10)..(303): Homolog of NCBI NO: 11288364 NR Description: hypothetical protein F26K9.200 - Arabidopsis
  misc_feature (30)..(303): Homolog of NCBI NO: 34907164 NR Description: P0423A12.19 [Oryza sativa (japonica
  misc_feature (10)..(303): Homolog of NCBI NO: 14517420 NR Description: AT3g62770/F26K9_200 [Arabidopsis thaliana]
  misc_feature (26)..(314): Homolog of NCBI NO: 7487233 NR Description: hypothetical protein At2g40810 [imported] -
  misc_feature (19)..(314): Homolog of NCBI NO: 30688413 NR Description: WD-40 repeat protein family [Arabidopsis
  misc_feature (3)..(314): Homolog of NCBI NO: 30694449 NR Description: WD-40 repeat protein family [Arabidopsis thaliana]
  misc_feature (1)..(317): Homolog of NCBI NO: 34896164 NR Description: hypothetical protein~similar to Arabidopsis
  misc_feature (315)..(315): Xaa is any aa, unknown or other
MTYESPHTWPLSVPTSKAEAGSSDDQEVRLLSVSWNQDCGCFAAGTSNGFRIFNCDPFKETFRRDLKSGGFGIVEMLFRCNILALVGGGSNMHYPPNKVMIWDDHQSRCIGEFTFRSDVRAVKLGKDNIVIVLETKIYVYNFTDLKMLHQIETLPNPKGLCCLSHHSNTSVLACPGLSQGHVRVEHFGLKVTKMITAHDSHISCMALTMDGLLLATASMKGTLIRIFNTMDGTRLQEVRRGLDKAEIYSIALSPNVQWLAVSSDKGTVHIFSLKVRVAGEDSSNDQRTLEAPRMDHQNSSTSMDPLIQTNTGSNXQAHHCLS

SEQ ID NO: 66422 - protein, 247 aa, Triticum aestivum
  peptide (1)..(247): Ceres Seq. ID no. 15220655
  misc_feature (1)..(165): Homolog of NCBI NO: 18412493 NR Description: expressed protein [Arabidopsis thaliana]
  misc_feature (1)..(223): Homolog of NCBI NO: 15238452 NR Description: WD-40 repeat protein family [Arabidopsis
  misc_feature (1)..(239): Homolog of NCBI NO: 11288366 NR Description: hypothetical protein T5P19.90 - Arabidopsis
  misc_feature (1)..(228): Homolog of NCBI NO: 11288364 NR Description: hypothetical protein F26K9.200 - Arabidopsis
  misc_feature (1)..(228): Homolog of NCBI NO: 34907164 NR Description: P0423A12.19 [Oryza sativa (japonica
  misc_feature (1)..(228): Homolog of NCBI NO: 14517420 NR Description: AT3g62770/F26K9_200 [Arabidopsis thaliana]
  misc_feature (1)..(239): Homolog of NCBI NO: 7487233 NR Description: hypothetical protein At2g40810 [imported] -
  misc_feature (1)..(239): Homolog of NCBI NO: 30688413 NR Description: WD-40 repeat protein family [Arabidopsis
  misc_feature (1)..(239): Homolog of NCBI NO: 30694449 NR Description: WD-40 repeat protein family [Arabidopsis thaliana]
  misc_feature (1)..(242): Homolog of NCBI NO: 34896164 NR Description: hypothetical protein~similar to Arabidopsis
  misc_feature (240)..(240): Xaa is any aa, unknown or other
MLFRCNILALVGGGSNMHYPPNKVMIWDDHQSRCIGEFTFRSDVRAVKLGKDNIVIVLETKIYVYNFTDLKMLHQIETLPNPKGLCCLSHHSNTSVLACPGLSQGHVRVEHFGLKVTKMITAHDSHISCMALTMDGLLLATASMKGTLIRIFNTMDGTRLQEVRRGLDKAEIYSIALSPNVQWLAVSSDKGTVHIFSLKVRVAGEDSSNDQRTLEAPRMDHQNSSTSMDPLIQTNTGSNXQAHHCLS

SEQ ID NO: 66423 - DNA, 534 bp, Triticum aestivum
  misc_feature (1)..(534): Ceres Seq. ID no. 13658641
aaaaaaatccccaccccggtcaaccccacctcccacccccgatacccactcccacatcccacagcccacagccgccacggccctcgccgccggcgcgcgtcccacaaccaccatctcccatgggcgccaaggtccctaccacaggcgcgcgtgccaccgctgccacatcccacaggagccatggtccctaccgccggcgcgcgcgccaccgccaccacctcctgcaggcgccatggtccatgccgccggcacgcgtgccaccgccaccacctcccacagccgccgcggcccccgccgccggtgtgcgccctgccatctccacctcccagagcctccatggccctgtcgccggggagcgccccgccacaaccactgccgttggacgccgtcgccgtgccccccgcacgccagtggctccgagacctcgtcggacatgaccgtggcatccctgaactgccaagcgccgcccaacacccggcttcttcccctgaccactgtcggcctcctaccccgggcaaacccttctcttccttc

SEQ ID NO: 66424 - protein, 178 aa, Triticum aestivum
  peptide (1)..(178): Ceres Seq. ID no. 13658642
  misc_feature (55)..(169): Pfam Name: Assemblin (Peptidase family S21) Pfam Description: Assemblin (Peptidase family S21)
  misc_feature (94)..(165): Homolog of NCBI NO: 15240851 NR Description: expressed protein [Arabidopsis thaliana]
  misc_feature (92)..(171): Homolog of NCBI NO: 6523547 NR Description: hydroxyproline-rich glycoprotein DZ-HRGP
  misc_feature (92)..(135): Homolog of NCBI NO: 21322711 NR Description: pherophorin-dz1 protein [Volvox carteri f.
  misc_feature (92)..(174): Homolog of NCBI NO: 21322711 NR Description: pherophorin-dz1 protein [Volvox carteri f.
  misc_feature (92)..(171): Homolog of NCBI NO: 6523547 NR Description: hydroxyproline-rich glycoprotein DZ-HRGP
  misc_feature (4)..(174): Homolog of NCBI NO: 6523547 NR Description: hydroxyproline-rich glycoprotein DZ-HRGP
  misc_feature (92)..(165): Homolog of NCBI NO: 34912294 NR Description: putative extensin-like protein
  misc_feature (94)..(177): Homolog of NCBI NO: 5305335 NR Description: proline-rich mucin homolog [Mycobacterium
  misc_feature (93)..(168): Homolog of NCBI NO: 39591755 NR Description: Hypothetical protein CBG18233 [Caenorhabditis
  misc_feature (92)..(174): Homolog of NCBI NO: 14253163 NR Description: VMP4 protein [Volvox carteri f. nagariensis]
KKIPTPVNPTSHPRYPLPHPTAHSRHGPRRRRASHNHHLPWAPRSLPQARVPPLPHPTGAMVPTAGARATATTSCRRHGPCRRHACHRHHLPQPPRPPPPVCALPSPPPRASMALSPGSAPPQPLPLDAVAVPPARQWLRDLVGHDRGIPELPSAAQHPASSPDHCRPPTPGKPFSSF

SEQ ID NO: 66425 - protein, 177 aa, Triticum aestivum
  peptide (1)..(177): Ceres Seq. ID no. 13658643
KKSPPRSTPPPTPDTHSHIPQPTAATALAAGARPTTTISHGRQGPYHRRACHRCHIPQEPWSLPPARAPPPPPPAGAMVHAAGTRATATTSHSRRGPRRRCAPCHLHLPEPPWPCRRGAPRHNHCRWTPSPCPPHASGSETSSDMTVASLNCQAPPNTRLLPLTTVGLLPRANPSLP

SEQ ID NO: 66426 - protein, 144 aa, Triticum aestivum
  peptide (1)..(144): Ceres Seq. ID no. 13658644
  misc_feature (1)..(144): Pfam Name: Extensin-like region Pfam Description: Extensin-like region
  misc_feature (3)..(39): Homolog of NCBI NO: 6523547 NR Description: hydroxyproline-rich glycoprotein DZ-HRGP
  misc_feature (2)..(39): Homolog of NCBI NO: 34912294 NR Description: putative extensin-like protein
  misc_feature (3)..(144): Homolog of NCBI NO: 22962211 NR Description: hypothetical protein [Rhodopseudomonas palustris]
  misc_feature (3)..(45): Homolog of NCBI NO: 5305335 NR Description: proline-rich mucin homolog [Mycobacterium
  misc_feature (14)..(45): Homolog of NCBI NO: 39591755 NR Description: Hypothetical protein CBG18233 [Caenorhabditis
  misc_feature (3)..(144): Homolog of NCBI NO: 15145797 NR Description: basic proline-rich protein [Sus scrofa]
  misc_feature (8)..(39): Homolog of NCBI NO: 14253163 NR Description: VMP4 protein [Volvox carteri f. nagariensis]
  misc_feature (5)..(144): Homolog of NCBI NO: 27375632 NR Description: blr0521 [Bradyrhizobium japonicum]
  misc_feature (3)..(144): Homolog of NCBI NO: 6523547 NR Description: hydroxyproline-rich glycoprotein DZ-HRGP
  misc_feature (3)..(144): Homolog of NCBI NO: 21355745 NR Description: CG15021-PA [Drosophila melanogaster]
KNPHPGQPHLPPPIPTPTSHSPQPPRPSPPARVPQPPSPMGAKVPTTGARATAATSHRSHGPYRRRARHRHHLLQAPWSMPPARVPPPPPPTAAAAPAAGVRPAISTSQSLHGPVAGERPATTTAVGRRRRAPRTPVAPRPRRT

SEQ ID NO: 66427 - protein, 118 aa, Triticum aestivum
  peptide (1)..(118): Ceres Seq. ID no. 13658645
  misc_feature (1)..(109): Pfam Name: Assemblin (Peptidase family S21) Pfam Description: Assemblin (Peptidase family S21)
  misc_feature (34)..(105): Homolog of NCBI NO: 15240851 NR Description: expressed protein [Arabidopsis thaliana]
  misc_feature (32)..(111): Homolog of NCBI NO: 6523547 NR Description: hydroxyproline-rich glycoprotein DZ-HRGP
  misc_feature (32)..(75): Homolog of NCBI NO: 21322711 NR Description: pherophorin-dz1 protein [Volvox carteri f.
  misc_feature (32)..(114): Homolog of NCBI NO: 21322711 NR Description: pherophorin-dz1 protein [Volvox carteri f.
  misc_feature (32)..(111): Homolog of NCBI NO: 6523547 NR Description: hydroxyproline-rich glycoprotein DZ-HRGP
  misc_feature (1)..(114): Homolog of NCBI NO: 6523547 NR Description: hydroxyproline-rich glycoprotein DZ-HRGP
  misc_feature (32)..(105): Homolog of NCBI NO: 34912294 NR Description: putative extensin-like protein
  misc_feature (34)..(117): Homolog of NCBI NO: 5305335 NR Description: proline-rich mucin homolog [Mycobacterium
  misc_feature (33)..(108): Homolog of NCBI NO: 39591755 NR Description: Hypothetical protein CBG18233 [Caenorhabditis
  misc_feature (32)..(114): Homolog of NCBI NO: 14253163 NR Description: VMP4 protein [Volvox carteri f. nagariensis]
MVPTAGARATATTSCRRHGPCRRHACHRHHLPQPPRPPPPVCALPSPPPRASMALSPGSAPPQPLPLDAVAVPPARQWLRDLVGHDRGIPELPSAAQHPASSPDHCRPPTPGKPFSSF

SEQ ID NO: 66428 - DNA, 1706 bp, Triticum aestivum
  misc_feature (1)..(1706): Ceres Seq. ID no. 13658584
ggtggttgctcctagtcgcagacttctttattaatctcaatctggatccgggcacggggagcgattgactgatcgacgagactcgagagcctggagagccgggggtttcgcttctcgttgcgtttggagtcttgccgggtctcggttttcgagcaggcaagaatttccttttaattttgggtgatctgttttcgtgtgctaagattttggatcatcgccccccccagtgttgttcctgctgatttaccgcctggattggattttttttggacgggttacctttaatggggcttctcccttctcgtcgtcgcgaatcagtggactagaacaagaaaccttcccgattggagcggattttctgtggtcgccgcgcttagtttcgaaaggcggcacctttatttgctaccacgctttgctgtggcccaaaagttacccattgtgtctgtttcaagaaatagattgggttttcttttcttttttctgaggtgtttgttttacttggcagatccagggaacaccggttttcctttgattttgccgaaatttttgatctgatcggagcgatcccggagcttcgcaaggagcaaggcatttttctgggggccatggccatggggctcggccgattcacacactggctctggccgggtaacgccgcgcgagttggcaaccacgagctccccggcatcgccttgacgggcgcctccttcccggagttcccctccgggttccgtgaggcggacgctatcgccttctccagtgccgccgccggccgccgcacgcggccgaggagggtcaagaaccagcggcgcagtcgcggggagcccagaatcgacagggagtacgacatggtcatcgtgccgtccgacggcggcgggtgcctttccgggtccgagtccgacgactccgactggtccatcggctggctggagccgcaggcgccggagatgcagacggacggtgaccaggagacctccttcgccgtcctcgtgccctgctaccgccacggccgcgccgagcagcccgcgatgccccagggacgcttccttggcgctggccctctcgccgatggcggcctctctgatattgctgagcttaaccttccaaagacaactaaaatttcttttccaaatggaaaggatgatctcatgaactttgaggccactctacgtcctgatgaaggatactatgtaggtgggacatttactttcaccttccaagtatctccttcctaccctcacgaggctccgaaggtcaagtgcaagactaaggtttaccatcctaatattgacctagaaggaaatgtctgcctgaacattctgcgtgaagactggaagcctgtcttgaacatcaacaccataatatatggtttaaaccttcttttctcacaacccaatgacgaggaccccttgaatcatgaagctgcggccgtcctccgagacaacccacagaagttccagagaaatgttcaaacggcgatgtcgggaggctatgttgataatacccatttcccaaggtgcaagtaaggtctgctatgtggagctctggttccgactcttgcccaattaccctgaatgccgttgcacagtctgaaggatgtggcatgtacccaggaaatgtatcgcatttgtgttagacgtgactgttattatgcttgtttggtggatgtaacggagtcatgcatgttgaagaaacatgctaagcmg

SEQ ID NO: 66429 - protein, 306 aa, Triticum aestivum
  peptide (1)..(306): Ceres Seq. ID no. 15219908
  misc_feature (160)..(305): Homolog of NCBI NO: 4507791 NR Description: ubiquitin-conjugating enzyme E2M (UBC12 homolog,
  misc_feature (160)..(305): Homolog of NCBI NO: 38174699 NR Description: Unknown (protein for MGC:75750) [Silurana
  misc_feature (160)..(296): Homolog of NCBI NO: 32400752 NR Description: RUB1-conjugating enzyme [Triticum aestivum]
  misc_feature (160)..(305): Homolog of NCBI NO: 25407764 NR Description: ubiquitin-protein ligase-like protein
  misc_feature (160)..(305): Homolog of NCBI NO: 26000688 NR Description: RUB1 conjugating enzyme [Olea europaea]
  misc_feature (160)..(305): Homolog of NCBI NO: 18398792 NR Description: RUB1-conjugating enzyme, putative [Arabidopsis
  misc_feature (160)..(305): Homolog of NCBI NO: 6635457 NR Description: RUB1 conjugating enzyme [Arabidopsis thaliana]
  misc_feature (160)..(305): Homolog of NCBI NO: 10946511 NR Description: RUB1 conjugating enzyme [Lycopersicon esculentum]
  misc_feature (160)..(305): Homolog of NCBI NO: 37531910 NR Description: putative ubiquitin-conjugating enzyme
  misc_feature (160)..(305): Homolog of NCBI NO: 40253382 NR Description: putative RUB1 conjugating enzyme
MAMGLGRFTHWLWPGNAARVGNHELPGIALTGASFPEFPSGFREADAIAFSSAAAGRRTRPRRVKNQRRSRGEPRIDREYDMVIVPSDGGGCLSGSESDDSDWSIGWLEPQAPEMQTDGDQETSFAVLVPCYRHGRAEQPAMPQGRFLGAGPLADGGLSDIAELNLPKTTKISFPNGKDDLMNFEATLRPDEGYYVGGTFTFTFQVSPSYPHEAPKVKCKTKVYHPNIDLEGNVCLNILREDWKPVLNINTIIYGLNLLFSQPNDEDPLNHEAAAVLRDNPQKFQRNVQTAMSGGYVDNTHFPRCK

SEQ ID NO: 66430 - protein, 304 aa, Triticum aestivum
  peptide (1)..(304): Ceres Seq. ID no. 15219909
  misc_feature (158)..(303): Homolog of NCBI NO: 4507791 NR Description: ubiquitin-conjugating enzyme E2M (UBC12 homolog,
  misc_feature (158)..(303): Homolog of NCBI NO: 38174699 NR Description: Unknown (protein for MGC:75750) [Silurana
  misc_feature (158)..(294): Homolog of NCBI NO: 32400752 NR Description: RUB1-conjugating enzyme [Triticum aestivum]
  misc_feature (158)..(303): Homolog of NCBI NO: 25407764 NR Description: ubiquitin-protein ligase-like protein
  misc_feature (158)..(303): Homolog of NCBI NO: 26000688 NR Description: RUB1 conjugating enzyme [Olea europaea]
  misc_feature (158)..(303): Homolog of NCBI NO: 18398792 NR Description: RUB1-conjugating enzyme, putative [Arabidopsis
  misc_feature (158)..(303): Homolog of NCBI NO: 6635457 NR Description: RUB1 conjugating enzyme [Arabidopsis thaliana]
  misc_feature (158)..(303): Homolog of NCBI NO: 10946511 NR Description: RUB1 conjugating enzyme [Lycopersicon esculentum]
  misc_feature (158)..(303): Homolog of NCBI NO: 37531910 NR Description: putative ubiquitin-conjugating enzyme
  misc_feature (158)..(303): Homolog of NCBI NO: 40253382 NR Description: putative RUB1 conjugating enzyme
MGLGRFTHWLWPGNAARVGNHELPGIALTGASFPEFPSGFREADAIAFSSAAAGRRTRPRRVKNQRRSRGEPRIDREYDMVIVPSDGGGCLSGSESDDSDWSIGWLEPQAPEMQTDGDQETSFAVLVPCYRHGRAEQPAMPQGRFLGAGPLADGGLSDIAELNLPKTTKISFPNGKDDLMNFEATLRPDEGYYVGGTFTFTFQVSPSYPHEAPKVKCKTKVYHPNIDLEGNVCLNILREDWKPVLNINTIIYGLNLLFSQPNDEDPLNHEAAAVLRDNPQKFQRNVQTAMSGGYVDNTHFPRCK

SEQ ID NO: 66431 - protein, 225 aa, Triticum aestivum
  peptide (1)..(225): Ceres Seq. ID no. 15219910
  misc_feature (79)..(224): Homolog of NCBI NO: 4507791 NR Description: ubiquitin-conjugating enzyme E2M (UBC12 homolog,
  misc_feature (79)..(224): Homolog of NCBI NO: 38174699 NR Description: Unknown (protein for MGC:75750) [Silurana
  misc_feature (79)..(215): Homolog of NCBI NO: 32400752 NR Description: RUB1-conjugating enzyme [Triticum aestivum]
  misc_feature (79)..(224): Homolog of NCBI NO: 25407764 NR Description: ubiquitin-protein ligase-like protein
  misc_feature (79)..(224): Homolog of NCBI NO: 26000688 NR Description: RUB1 conjugating enzyme [Olea europaea]
  misc_feature (79)..(224): Homolog of NCBI NO: 18398792 NR Description: RUB1-conjugating enzyme, putative [Arabidopsis
  misc_feature (79)..(224): Homolog of NCBI NO: 6635457 NR Description: RUB1 conjugating enzyme [Arabidopsis thaliana]
  misc_feature (79)..(224): Homolog of NCBI NO: 10946511 NR Description: RUB1 conjugating enzyme [Lycopersicon esculentum]
  misc_feature (79)..(224): Homolog of NCBI NO: 37531910 NR Description: putative ubiquitin-conjugating enzyme
  misc_feature (79)..(224): Homolog of NCBI NO: 40253382 NR Description: putative RUB1 conjugating enzyme
MVIVPSDGGGCLSGSESDDSDWSIGWLEPQAPEMQTDGDQETSFAVLVPCYRHGRAEQPAMPQGRFLGAGPLADGGLSDIAELNLPKTTKISFPNGKDDLMNFEATLRPDEGYYVGGTFTFTFQVSPSYPHEAPKVKCKTKVYHPNIDLEGNVCLNILREDWKPVLNINTIIYGLNLLFSQPNDEDPLNHEAAAVLRDNPQKFQRNVQTAMSGGYVDNTHFPRCK

SEQ ID NO: 66432 - DNA, 1066 bp, Triticum aestivum
  misc_feature (1)..(1066): Ceres Seq. ID no. 13657842
atcaagaagaggaagcgaggagccaagaaccacacaccctcctaaacgcctccgcctcctccccacgggcgcacccgagctccagccctagcatttccgctcccccctctctcccttgtttctccttctgcaggaaatggaggtggtggatttggtgtcgtccgactccgaggacgaggcgtgcgcgcactcgcctgatcggaagcgtcccgcctgggagcccgcggatccatcccgcggccccgggagtcttcccgagcagacaagcagaatggcctggccgccgcagcagccaagcagaatggcctggccgccgcagcagccaagtcaggcggtgaagaaggacaaggagaaggcaggcgagggggggagcgcgtgggcagcaggacccccttcgctcaggggaggatcgcatgcttctagtgccggtatcttgggagctaggcctgcggggtgggattcatggagtgcagcggcacacaaatctagagatgaaagaagtgaaacgcccgagtgttgttggggaccttggggtgatgagatttgcagatcagtctgtgtgcccaaggaagatggtgctgcgatgcctggacagagctgtatggccattcctgagctactgatggaagacagtagcgcatggctgtcgaggatcaaggggctccatttcccacttcctgatgagagccagttgaaggccaggcaaattcattcagatgagatgcttgctcttaagcttcaagagcagttcaaccaggaacagccaggctcgcaatcttcccagcaggttgatacgactctagcttggacactgcaagagcaagatgctgcgcgtgccagaatcgctgcgagagagggccaatctagttctaggcagagggaccgcttaatggcacacttgtattcgtatggctggcgctcgcaagttcaaggttatccttcatggccacctagtgacacatcagctccaataacaagcagacggtggttgccaagaaacagcagcccaggatcagagcaacaaaatatgatatctctcaattgaccaaagggtgttttggacaag

SEQ ID NO: 66433 - protein, 302 aa, Triticum aestivum
  peptide (1)..(302): Ceres Seq. ID no. 13657843
  misc_feature (98)..(246): Homolog of NCBI NO: 34911058 NR Description: P0007F06.24 [Oryza sativa (japonica
MEVVDLVSSDSEDEACAHSPDRKRPAWEPADPSRGPGSLPEQTSRMAWPPQQPSRMAWPPQQPSQAVKKDKEKAGEGGSAWAAGPPSLRGGSHASSAGILGARPAGWDSWSAAAHKSRDERSETPECCWGPWGDEICRSVCVPKEDGAAMPGQSCMAIPELLMEDSSAWLSRIKGLHFPLPDESQLKARQIHSDEMLALKLQEQFNQEQPGSQSSQQVDTTLAWTLQEQDAARARIAAREGQSSSRQRDRLMAHLYSYGWRSQVQGYPSWPPSDTSAPITSRRWLPRNSSPGSEQQNMISLN

SEQ ID NO: 66434 - protein, 257 aa, Triticum aestivum
  peptide (1)..(257): Ceres Seq. ID no. 13657844
  misc_feature (53)..(201): Homolog of NCBI NO: 34911058 NR Description: P0007F06.24 [Oryza sativa (japonica
MAWPPQQPSRMAWPPQQPSQAVKKDKEKAGEGGSAWAAGPPSLRGGSHASSAGILGARPAGWDSWSAAAHKSRDERSETPECCWGPWGDEICRSVCVPKEDGAAMPGQSCMAIPELLMEDSSAWLSRIKGLHFPLPDESQLKARQIHSDEMLALKLQEQFNQEQPGSQSSQQVDTTLAWTLQEQDAARARIAAREGQSSSRQRDRLMAHLYSYGWRSQVQGYPSWPPSDTSAPITSRRWLPRNSSPGSEQQNMISLN

SEQ ID NO: 66435 - protein, 247 aa, Triticum aestivum
  peptide (1)..(247): Ceres Seq. ID no. 13657845
  misc_feature (43)..(191): Homolog of NCBI NO: 34911058 NR Description: P0007F06.24 [Oryza sativa (japonica
MAWPPQQPSQAVKKDKEKAGEGGSAWAAGPPSLRGGSHASSAGILGARPAGWDSWSAAAHKSRDERSETPECCWGPWGDEICRSVCVPKEDGAAMPGQSCMAIPELLMEDSSAWLSRIKGLHFPLPDESQLKARQIHSDEMLALKLQEQFNQEQPGSQSSQQVDTTLAWTLQEQDAARARIAAREGQSSSRQRDRLMAHLYSYGWRSQVQGYPSWPPSDTSAPITSRRWLPRNSSPGSEQQNMISLN

SEQ ID NO: 66436 - DNA, 1846 bp, Triticum aestivum
  misc_feature (1)..(1846): Ceres Seq. ID no. 14307972
actcaatcattccgagagctgtgctccagaaaaagaaactgcagagggggcgagaagtgcaaaaaaaaaaggagctgcgaagctctgctggcgctcgccgtctccgtcttctccggtctccaccatggcctctttcgccgcccttccgctggccgctctcctggtgctggccgtctcgtgggcatgggagcacctcgtgtggaggccctacgccatagccaggaggcacagggcgcaagggatccatggccccccatacaggttcctcaagggctccaacgaggaggtgaggcggatgaaggcggagacggccgacgtggtgctcgacgtccgcgaccacaactacctccccagggtcgcgccgcacttcctcaagtggagggcacagtatggagagccatttctgttctggtttggtgccaagccccggatctgtgtctttgactacgagttggttaggcagatcctttcaagcaaatccggacactttccgaagaacgacgcgcacccgaacgtgttggaattgctcggcaagggcctggtgttggtgaacggtgtggattgggtgcgccatcgcagggtcatcaaccctgcttttgcaatggataagataaaggcgatgacggaaacgatggtgtcttgtgcccaacgcacgttcagtgtgtttgaagatcaggcatgcaagaacacaaatagagaaatcctagtggaattcgacaaagcagtccaagggttaacagcagatatcatatcccacacagccttcggaagtagctacaaattaggaatggaagccttccatgcccagaaagagctccagtcaatcgccatatccagtttacttaatgtgcagataccaggattcagctatctgcccacaaaaaggaataggaggaagtggatgcttgaaaagaagcttcgaagcacgctcatgcgtgtcataaactcgcggttagcgtcgaaggggagcggatatggaaatgacctacttggtttgatgtttgagggctgcactacgacagtgcaagggggcaagcaggagcagctaagcttgagcatggaggagatcctacacgagtgcaaaacattcttcttcgccggttacgaaacgacatcgcttctgctcacctggacagtgttcttgctcagtgtgtacccagagtggcaggagaggctacgggaggaggtcttgagggaggttggaaagggtaaccccaccggcgacaacctcggcaaactgaaagagatgatgatggtcctccatgaagccctgaggctctacggccctgctcttttcatgcagaggaagaccataactgacatggtggtcggagccataacaatccccaaggaccatgcagttgtcataggcgccccattcatgcaccgggataaaaaggtctggggtgaggatgcggatcagttcaacccgatgagattcgcgaacggggtcgccagagcggcgaaggttccacacgccctgctggcgttctcgatcgggccgagggcgtgcatcggccagaactttgcgatgctcgaagccaaatccgtgatggtgacggttctgcagaagttctcgttcgctctctccccgagctatgtccacgctcctgcggatttcctcactctgcagcctaagtttggcctccccgtcgttatgaagctgctggatatatgaaatggaaccggctggttctgaatgttgcagtacagaacttctgaattttctgcatgtggtgctcatagtgcacgcagtgtatatattcttttccaaattaaggttggaaaagtagtacgattacaagaaaatatattgcatgtggcttgaccacccgtctgtttgcac

SEQ ID NO: 66437 - protein, 558 aa, Triticum aestivum
  peptide (1)..(558): Ceres Seq. ID no. 14307973
  misc_feature (45)..(557): Homolog of NCBI NO: 7484896 NR Description: cytochrome P450 homolog F14M4.21 - Arabidopsis
  misc_feature (45)..(557): Homolog of NCBI NO: 18407219 NR Description: cytochrome P450 family [Arabidopsis thaliana]
  misc_feature (39)..(557): Homolog of NCBI NO: 15226472 NR Description: cytochrome P450 family [Arabidopsis thaliana]
  misc_feature (47)..(557): Homolog of NCBI NO: 14719280 NR Description: cytochrome P450 [Zea mays]
  misc_feature (51)..(558): Homolog of NCBI NO: 22324446 NR Description: putative cytochrome P450 [Oryza sativa (japonica
  misc_feature (48)..(558): Homolog of NCBI NO: 38112707 NR Description: cytochrome P450 [Triticum aestivum]
  misc_feature (99)..(232): Homolog of NCBI NO: 28927679 NR Description: putative cytochrome P450, 5'-partial
  misc_feature (268)..(557): Homolog of NCBI NO: 28927679 NR Description: putative cytochrome P450, 5'-partial
  misc_feature (42)..(558): Homolog of NCBI NO: 34913354 NR Description: putative cytochrome P450 [Oryza sativa (japonica
  misc_feature (46)..(557): Homolog of NCBI NO: 34896952 NR Description: putative cytochrome P450-related protein [Oryza
LNHSESCAPEKETAEGARSAKKKGAAKLCWRSPSPSSPVSTMASFAALPLAALLVLAVSWAWEHLVWRPYAIARRHRAQGIHGPPYRFLKGSNEEVRRMKAETADVVLDVRDHNYLPRVAPHFLKWRAQYGEPFLFWFGAKPRICVFDYELVRQILSSKSGHFPKNDAHPNVLELLGKGLVLVNGVDWVRHRRVINPAFAMDKIKAMTETMVSCAQRTFSVFEDQACKNTNREILVEFDKAVQGLTADIISHTAFGSSYKLGMEAFHAQKELQSIAISSLLNVQIPGFSYLPTKRNRRKWMLEKKLRSTLMRVINSRLASKGSGYGNDLLGLMFEGCTTTVQGGKQEQLSLSMEEILHECKTFFFAGYETTSLLLTWTVFLLSVYPEWQERLREEVLREVGKGNPTGDNLGKLKEMMMVLHEALRLYGPALFMQRKTITDMVVGAITIPKDHAVVIGAPFMHRDKKVWGEDADQFNPMRFANGVARAAKVPHALLAFSIGPRACIGQNFAMLEAKSVMVTVLQKFSFALSPSYVHAPADFLTLQPKFGLPVVMKLLDI

SEQ ID NO: 66438 - protein, 517 aa, Triticum aestivum
  peptide (1)..(517): Ceres Seq. ID no. 14307974
  misc_feature (4)..(516): Homolog of NCBI NO: 7484896 NR Description: cytochrome P450 homolog F14M4.21 - Arabidopsis
  misc_feature (4)..(516): Homolog of NCBI NO: 18407219 NR Description: cytochrome P450 family [Arabidopsis thaliana]
  misc_feature (1)..(516): Homolog of NCBI NO: 15226472 NR Description: cytochrome P450 family [Arabidopsis thaliana]
  misc_feature (6)..(516): Homolog of NCBI NO: 14719280 NR Description: cytochrome P450 [Zea mays]
  misc_feature (10)..(517): Homolog of NCBI NO: 22324446 NR Description: putative cytochrome P450 [Oryza sativa (japonica
  misc_feature (7)..(517): Homolog of NCBI NO: 38112707 NR Description: cytochrome P450 [Triticum aestivum]
  misc_feature (58)..(191): Homolog of NCBI NO: 28927679 NR Description: putative cytochrome P450, 5'-partial
  misc_feature (227)..(516): Homolog of NCBI NO: 28927679 NR Description: putative cytochrome P450, 5'-partial
  misc_feature (1)..(517): Homolog of NCBI NO: 34913354 NR Description: putative cytochrome P450 [Oryza sativa (japonica
  misc_feature (5)..(516): Homolog of NCBI NO: 34896952 NR Description: putative cytochrome P450-related protein [Oryza
MASFAALPLAALLVLAVSWAWEHLVWRPYAIARRHRAQGIHGPPYRFLKGSNEEVRRMKAETADVVLDVRDHNYLPRVAPHFLKWRAQYGEPFLFWFGAKPRICVFDYELVRQILSSKSGHFPKNDAHPNVLELLGKGLVLVNGVDWVRHRRVINPAFAMDKIKAMTETMVSCAQRTFSVFEDQACKNTNREILVEFDKAVQGLTADIISHTAFGSSYKLGMEAFHAQKELQSIAISSLLNVQIPGFSYLPTKRNRRKWMLEKKLRSTLMRVINSRLASKGSGYGNDLLGLMFEGCTTTVQGGKQEQLSLSMEEILHECKTFFFAGYETTSLLLTWTVFLLSVYPEWQERLREEVLREVGKGNPTGDNLGKLKEMMMVLHEALRLYGPALFMQRKTITDMVVGAITIPKDHAVVIGAPFMHRDKKVWGEDADQFNPMRFANGVARAAKVPHALLAFSIGPRACIGQNFAMLEAKSVMVTVLQKFSFALSPSYVHAPADFLTLQPKFGLPVVMKLLDI

SEQ ID NO: 66439 - protein, 460 aa, Triticum aestivum
  peptide (1)..(460): Ceres Seq. ID no. 14307975
  misc_feature (1)..(459): Homolog of NCBI NO: 7484896 NR Description: cytochrome P450 homolog F14M4.21 - Arabidopsis
  misc_feature (1)..(459): Homolog of NCBI NO: 18407219 NR Description: cytochrome P450 family [Arabidopsis thaliana]
  misc_feature (1)..(459): Homolog of NCBI NO: 15226472 NR Description: cytochrome P450 family [Arabidopsis thaliana]
  misc_feature (1)..(459): Homolog of NCBI NO: 14719280 NR Description: cytochrome P450 [Zea mays]
  misc_feature (1)..(460): Homolog of NCBI NO: 22324446 NR Description: putative cytochrome P450 [Oryza sativa (japonica
  misc_feature (1)..(460): Homolog of NCBI NO: 38112707 NR Description: cytochrome P450 [Triticum aestivum]
  misc_feature (1)..(134): Homolog of NCBI NO: 28927679 NR Description: putative cytochrome P450, 5'-partial
  misc_feature (170)..(459): Homolog of NCBI NO: 28927679 NR Description: putative cytochrome P450, 5'-partial
  misc_feature (1)..(460): Homolog of NCBI NO: 34913354 NR Description: putative cytochrome P450 [Oryza sativa (japonica
  misc_feature (1)..(459): Homolog of NCBI NO: 34896952 NR Description: putative cytochrome P450-related protein [Oryza
MKAETADVVLDVRDHNYLPRVAPHFLKWRAQYGEPFLFWFGAKPRICVFDYELVRQILSSKSGHFPKNDAHPNVLELLGKGLVLVNGVDWVRHRRVINPAFAMDKIKAMTETMVSCAQRTFSVFEDQACKNTNREILVEFDKAVQGLTADIISHTAFGSSYKLGMEAFHAQKELQSIAISSLLNVQIPGFSYLPTKRNRRKWMLEKKLRSTLMRVINSRLASKGSGYGNDLLGLMFEGCTTTVQGGKQEQLSLSMEEILHECKTFFFAGYETTSLLLTWTVFLLSVYPEWQERLREEVLREVGKGNPTGDNLGKLKEMMMVLHEALRLYGPALFMQRKTITDMVVGAITIPKDHAVVIGAPFMHRDKKVWGEDADQFNPMRFANGVARAAKVPHALLAFSIGPRACIGQNFAMLEAKSVMVTVLQKFSFALSPSYVHAPADFLTLQPKFGLPVVMKLLDI

SEQ ID NO: 66440 - DNA, 1763 bp, Triticum aestivum
  misc_feature (1)..(1763): Ceres Seq. ID no. 14307904
accaccaccgtcctcatctcctcctcgagcccctcccccctcctccgcatctcgccaccaacctccccccgatccccaacccccatgatccgcaggaggcgcgggcacgccgccgcctagggtttccactccccgccccccccgatggagtcgctgccgcggaagcgcaagggcgcgcgctccctcgccggctccctccacgacgcctccgcggaccgcaagcggacctgccgggagcggaagccgcgccccgacaagaagaaaaagaagccctccaccgccggcgatgacgccgccaccgcctccggccggggcggcgtggtcatgacggcgccgccggccagcggccgggccgccccggacagccccggaagggggctcaagcgcaaggtcggctgcatcgagtccgccacccggataggccgcaagaagcgcctcgaggccgagtacgagctcggcgacgagatcggccagggcaagttcggctccgtccggatctgccgcgccaaggccggcggcgaggagttcgcctgcaaggcgctccccaagaacggcgaggagacggtccaccgcgaggtcgagatcatgcagcacctctccggccaccccggcgtcgtcacgctcaaggccgtcttcgaggacgccgacaagttctacctcgtcatggagctctgcagcggcggccgcttgctcgacgagatggccagggacggcaccttctccgagcagcgagccgcccttgtcatcaaggatctaatgtcggtcgtcaagtactgccatgaaatgggcgtcatccacagggacattaagccggagaatattttgctcaccaagactgggaagatgaaactagcagattttggattggcagcacgagttactaacggtcagaaattgtctggcgttgctgggagcccagcctatgtggcgcctgaggtgttgtcaggaagctattctgagaaagtagacatatggggtgctggggtgctcctccatgtactactgcttggttcacttccatttcaagggggctctctggaagctgtctttgaagctataaagacagttgagcttgatttcaacagcggtccatgggaatcaatgtcagttcttggacgggatcttataagtcgaatgttagatcgagatgtctcttctagaataactgctgatcaagttctttgtcatccatgggtgttgttctacacggaatgtaccctgaaggctgtaacacctaatgtcactaacaagattgtagcacccaaaattacatgggacagaattagatcacattgtgagtcgtcagcttcagattcgtctagccagaggtcggaggaccaggatgaatgtggcatagtcgacgcactgacagcggcaataacacatgttagaatatcggagccgaaaaggacccggctttgcagccccggcattcccatacagcaggagtgctcctcaaacataaagagcaacctgtgtacggcgttctgacatgaccccaatgtatagccccttgtgtgttggtctgatgtcagtgatggctcgccctgctggttgtctctgtgctgaggataataactcgggttttcctgtcagagcaagcaagcgttcgacatggtgatgctgtagattgcggtgatggctgatgaacccgacatggtagctgatgctgtaaattttgtaaatagaatgatccatgtagctaatttatatcttgagagagttgagaataatttcagtctatgatgaacatagtgcgcgcc

SEQ ID NO: 66441 - protein, 448 aa, Triticum aestivum
  peptide (1)..(448): Ceres Seq. ID no. 14307905
  misc_feature (102)..(351): Pfam Name: Protein kinase domain Pfam Description: Protein kinase domain
  misc_feature (43)..(370): Homolog of NCBI NO: 28866604 NR Description: calcium-dependent protein kinase [Spirodela
  misc_feature (64)..(370): Homolog of NCBI NO: 2827773 NR Description: Calcium-dependent protein kinase (CDPK)
  misc_feature (34)..(351): Homolog of NCBI NO: 15227525 NR Description: calcium-dependent protein kinase, putative (CDPK)
  misc_feature (61)..(351): Homolog of NCBI NO: 34898032 NR Description: ESTs AU030197(E50746),AU030196(E50746) correspond a region of the predicted gene.~Similar to calcium-dependent
  misc_feature (61)..(351): Homolog of NCBI NO: 25553562 NR Description: OSJNBa0038F22.11 [Oryza sativa (japonica
  misc_feature (98)..(351): Homolog of NCBI NO: 21064945 NR Description: CDPK-like protein [Solanum tuberosum]
  misc_feature (64)..(370): Homolog of NCBI NO: 7428005 NR Description: calcium-dependent protein kinase (EC 2.7.1.-) 7 -
  misc_feature (98)..(351): Homolog of NCBI NO: 15222023 NR Description: protein kinase family [Arabidopsis thaliana]
  misc_feature (38)..(442): Homolog of NCBI NO: 25402738 NR Description: protein T12C24.22 [imported] - Arabidopsis
  misc_feature (38)..(442): Homolog of NCBI NO: 15222045 NR Description: protein kinase family [Arabidopsis thaliana]
MESLPRKRKGARSLAGSLHDASADRKRTCRERKPRPDKKKKKPSTAGDDAATASGRGGVVMTAPPASGRAAPDSPGRGLKRKVGCIESATRIGRKKRLEAEYELGDEIGQGKFGSVRICRAKAGGEEFACKALPKNGEETVHREVEIMQHLSGHPGVVTLKAVFEDADKFYLVMELCSGGRLLDEMARDGTFSEQRAALVIKDLMSVVKYCHEMGVIHRDIKPENILLTKTGKMKLADFGLAARVTNGQKLSGVAGSPAYVAPEVLSGSYSEKVDIWGAGVLLHVLLLGSLPFQGGSLEAVFEAIKTVELDFNSGPWESMSVLGRDLISRMLDRDVSSRITADQVLCHPWVLFYTECTLKAVTPNVTNKIVAPKITWDRIRSHCESSASDSSSQRSEDQDECGIVDALTAAITHVRISEPKRTRLCSPGIPIQQECSSNIKSNLCTAF

SEQ ID NO: 66442 - protein, 388 aa, Triticum aestivum
  peptide (1)..(388): Ceres Seq. ID no. 14307906
  misc_feature (42)..(291): Pfam Name: Protein kinase domain Pfam Description: Protein kinase domain
  misc_feature (1)..(310): Homolog of NCBI NO: 28866604 NR Description: calcium-dependent protein kinase [Spirodela
  misc_feature (4)..(310): Homolog of NCBI NO: 2827773 NR Description: Calcium-dependent protein kinase (CDPK)
  misc_feature (1)..(291): Homolog of NCBI NO: 15227525 NR Description: calcium-dependent protein kinase, putative (CDPK)
  misc_feature (1)..(291): Homolog of NCBI NO: 34898032 NR Description: ESTs AU030197(E50746),AU030196(E50746) correspond a region of the predicted gene.~Similar to calcium-dependent
  misc_feature (1)..(291): Homolog of NCBI NO: 25553562 NR Description: OSJNBa0038F22.11 [Oryza sativa (japonica
  misc_feature (38)..(291): Homolog of NCBI NO: 21064945 NR Description: CDPK-like protein [Solanum tuberosum]
  misc_feature (4)..(310): Homolog of NCBI NO: 7428005 NR Description: calcium-dependent protein kinase (EC 2.7.1.-) 7 -
  misc_feature (38)..(291): Homolog of NCBI NO: 15222023 NR Description: protein kinase family [Arabidopsis thaliana]
  misc_feature (1)..(382): Homolog of NCBI NO: 25402738 NR Description: protein T12C24.22 [imported] - Arabidopsis
  misc_feature (1)..(382): Homolog of NCBI NO: 15222045 NR Description: protein kinase family [Arabidopsis thaliana]
MTAPPASGRAAPDSPGRGLKRKVGCIESATRIGRKKRLEAEYELGDEIGQGKFGSVRICRAKAGGEEFACKALPKNGEETVHREVEIMQHLSGHPGVVTLKAVFEDADKFYLVMELCSGGRLLDEMARDGTFSEQRAALVIKDLMSVVKYCHEMGVIHRDIKPENILLTKTGKMKLADFGLAARVTNGQKLSGVAGSPAYVAPEVLSGSYSEKVDIWGAGVLLHVLLLGSLPFQGGSLEAVFEAIKTVELDFNSGPWESMSVLGRDLISRMLDRDVSSRITADQVLCHPWVLFYTECTLKAVTPNVTNKIVAPKITWDRIRSHCESSASDSSSQRSEDQDECGIVDALTAAITHVRISEPKRTRLCSPGIPIQQECSSNIKSNLCTAF

SEQ ID NO: 66443 - protein, 301 aa, Triticum aestivum
  peptide (1)..(301): Ceres Seq. ID no. 14307907
  misc_feature (1)..(204): Pfam Name: Protein kinase domain Pfam Description: Protein kinase domain
  misc_feature (1)..(223): Homolog of NCBI NO: 28866604 NR Description: calcium-dependent protein kinase [Spirodela
  misc_feature (1)..(223): Homolog of NCBI NO: 2827773 NR Description: Calcium-dependent protein kinase (CDPK)
  misc_feature (1)..(204): Homolog of NCBI NO: 15227525 NR Description: calcium-dependent protein kinase, putative (CDPK)
  misc_feature (1)..(204): Homolog of NCBI NO: 34898032 NR Description: ESTs AU030197(E50746),AU030196(E50746) correspond a region of the predicted gene.~Similar to calcium-dependent
  misc_feature (1)..(204): Homolog of NCBI NO: 25553562 NR Description: OSJNBa0038F22.11 [Oryza sativa (japonica
  misc_feature (1)..(204): Homolog of NCBI NO: 21064945 NR Description: CDPK-like protein [Solanum tuberosum]
  misc_feature (1)..(223): Homolog of NCBI NO: 7428005 NR Description: calcium-dependent protein kinase (EC 2.7.1.-) 7 -
  misc_feature (1)..(204): Homolog of NCBI NO: 15222023 NR Description: protein kinase family [Arabidopsis thaliana]
  misc_feature (1)..(295): Homolog of NCBI NO: 25402738 NR Description: protein T12C24.22 [imported] - Arabidopsis
  misc_feature (1)..(295): Homolog of NCBI NO: 15222045 NR Description: protein kinase family [Arabidopsis thaliana]
MQHLSGHPGVVTLKAVFEDADKFYLVMELCSGGRLLDEMARDGTFSEQRAALVIKDLMSVVKYCHEMGVIHRDIKPENILLTKTGKMKLADFGLAARVTNGQKLSGVAGSPAYVAPEVLSGSYSEKVDIWGAGVLLHVLLLGSLPFQGGSLEAVFEAIKTVELDFNSGPWESMSVLGRDLISRMLDRDVSSRITADQVLCHPWVLFYTECTLKAVTPNVTNKIVAPKITWDRIRSHCESSASDSSSQRSEDQDECGIVDALTAAITHVRISEPKRTRLCSPGIPIQQECSSNIKSNLCTAF

SEQ ID NO: 66444 - DNA, 1089 bp, Triticum aestivum
  misc_feature (1)..(1089): Ceres Seq. ID no. 15179832
atggcattgtgtgaggaataaaccaacgaaaattgtcccaactctcctagtgtcatccacaactatcaatgctcaggttcaaaggtctaacaaactttgatcatgtttgtaggtatggtgagagcgaaggttatccttctcagagtggcatcacaaaagatgcacaggccgcacttgatcatctacttcagaggaaggacattgacacatccaggatagttatcttcgggagatctttaggaggtgctgttggagcagttcttgcaaaaaacaatcctgacaaggtgtctgctctaatattggaaaatacttttacatctatattggatatggctggtatcatgctgcccttcttaagatggttcataggcggtagttctgccaaaggcccaaaacttcttaactgcgttgttcgctctccatggagtacacttgatgttgttgcagaggtcaaacagcccattctctttctttctggattgcaagatgaactggttcccccttcacacatgaggatgctgtatgacaaagctgttgaacataacaggaattgtaggtttgttgattttctcaatggtatgcatatggatacctggatttctggaggggaccgctactggaggacaatcgaattgtttctggaccaatattccccagaagtacagagttctgatgccagctgcacaagtgaaattgctgatgatgataaagctgcataataattggaacatctagagcagcctgctgttttccaccagtttttctgatgttgatgcaattccggtctttgatggattgaagatcatttcaaacaattaattcaggtggttgttctgctccattccacctgaagaagccaaagctgtgaatatattttgaggttgttctccatcctgtgatgctgctgcatatgtgtatggaatgacacatatatatttctgagcctggctcggccttcaactcccgagtttctgtacaatgttgaattggcttcattcaagtatttgcaatttattggaactagtaccgaatgttagaaaatctggccttggtgtatgacggttcagtatagggtaatcttgttggctc

SEQ ID NO: 66445 - protein, 216 aa, Triticum aestivum
  peptide (1)..(216): Ceres Seq. ID no. 15179833
  misc_feature (16)..(98): Pfam Name: alpha/beta hydrolase fold Pfam Description: alpha/beta hydrolase fold
  misc_feature (16)..(204): Homolog of NCBI NO: 17137566 NR Description: CG18642-PA [Drosophila melanogaster]
  misc_feature (16)..(204): Homolog of NCBI NO: 34879678 NR Description: similar to 1110065L07Rik protein [Rattus
  misc_feature (16)..(204): Homolog of NCBI NO: 28483207 NR Description: RIKEN cDNA 1110065L07 [Mus musculus]
  misc_feature (16)..(204): Homolog of NCBI NO: 26336440 NR Description: unnamed protein product [Mus musculus]
  misc_feature (16)..(204): Homolog of NCBI NO: 14249592 NR Description: hypothetical protein FLJ14906 [Homo sapiens]
  misc_feature (16)..(191): Homolog of NCBI NO: 19112401 NR Description: supressor of bem1/bud5 [Schizosaccharomyces
  misc_feature (16)..(191): Homolog of NCBI NO: 2257503 NR Description: BEM46 PROTEIN [Schizosaccharomyces pombe]
  misc_feature (16)..(191): Homolog of NCBI NO: 987287 NR Description: temperature sensitive supressor of Saccharomyces
  misc_feature (16)..(202): Homolog of NCBI NO: 18420236 NR Description: expressed protein [Arabidopsis thaliana]
  misc_feature (16)..(215): Homolog of NCBI NO: 34395138 NR Description: putative membrane protein [Oryza sativa (japonica
MLRFKGLTNFDHVCRYGESEGYPSQSGITKDAQAALDHLLQRKDIDTSRIVIFGRSLGGAVGAVLAKNNPDKVSALILENTFTSILDMAGIMLPFLRWFIGGSSAKGPKLLNCVVRSPWSTLDVVAEVKQPILFLSGLQDELVPPSHMRMLYDKAVEHNRNCRFVDFLNGMHMDTWISGGDRYWRTIELFLDQYSPEVQSSDASCTSEIADDDKAA

SEQ ID NO: 66446 - protein, 129 aa, Triticum aestivum
  peptide (1)..(129): Ceres Seq. ID no. 15179834
  misc_feature (1)..(117): Homolog of NCBI NO: 17137566 NR Description: CG18642-PA [Drosophila melanogaster]
  misc_feature (1)..(117): Homolog of NCBI NO: 34879678 NR Description: similar to 1110065L07Rik protein [Rattus
  misc_feature (1)..(117): Homolog of NCBI NO: 28483207 NR Description: RIKEN cDNA 1110065L07 [Mus musculus]
  misc_feature (1)..(117): Homolog of NCBI NO: 26336440 NR Description: unnamed protein product [Mus musculus]
  misc_feature (1)..(117): Homolog of NCBI NO: 14249592 NR Description: hypothetical protein FLJ14906 [Homo sapiens]
  misc_feature (1)..(104): Homolog of NCBI NO: 2257503 NR Description: BEM46 PROTEIN [Schizosaccharomyces pombe]
  misc_feature (1)..(104): Homolog of NCBI NO: 19112401 NR Description: supressor of bem1/bud5 [Schizosaccharomyces
  misc_feature (1)..(104): Homolog of NCBI NO: 987287 NR Description: temperature sensitive supressor of Saccharomyces
  misc_feature (1)..(115): Homolog of NCBI NO: 18420236 NR Description: expressed protein [Arabidopsis thaliana]
  misc_feature (1)..(128): Homolog of NCBI NO: 34395138 NR Description: putative membrane protein [Oryza sativa (japonica
MAGIMLPFLRWFIGGSSAKGPKLLNCVVRSPWSTLDVVAEVKQPILFLSGLQDELVPPSHMRMLYDKAVEHNRNCRFVDFLNGMHMDTWISGGDRYWRTIELFLDQYSPEVQSSDASCTSEIADDDKAA

SEQ ID NO: 66447 - protein, 125 aa, Triticum aestivum
  peptide (1)..(125): Ceres Seq. ID no. 15179835
  misc_feature (1)..(113): Homolog of NCBI NO: 17137566 NR Description: CG18642-PA [Drosophila melanogaster]
  misc_feature (1)..(113): Homolog of NCBI NO: 28483207 NR Description: RIKEN cDNA 1110065L07 [Mus musculus]
  misc_feature (1)..(113): Homolog of NCBI NO: 34879678 NR Description: similar to 1110065L07Rik protein [Rattus
  misc_feature (1)..(113): Homolog of NCBI NO: 26336440 NR Description: unnamed protein product [Mus musculus]
  misc_feature (1)..(113): Homolog of NCBI NO: 14249592 NR Description: hypothetical protein FLJ14906 [Homo sapiens]
  misc_feature (1)..(100): Homolog of NCBI NO: 2257503 NR Description: BEM46 PROTEIN [Schizosaccharomyces pombe]
  misc_feature (1)..(100): Homolog of NCBI NO: 19112401 NR Description: supressor of bem1/bud5 [Schizosaccharomyces
  misc_feature (1)..(100): Homolog of NCBI NO: 987287 NR Description: temperature sensitive supressor of Saccharomyces
  misc_feature (1)..(111): Homolog of NCBI NO: 18420236 NR Description: expressed protein [Arabidopsis thaliana]
  misc_feature (1)..(124): Homolog of NCBI NO: 34395138 NR Description: putative membrane protein [Oryza sativa (japonica
MLPFLRWFIGGSSAKGPKLLNCVVRSPWSTLDVVAEVKQPILFLSGLQDELVPPSHMRMLYDKAVEHNRNCRFVDFLNGMHMDTWISGGDRYWRTIELFLDQYSPEVQSSDASCTSEIADDDKAA

SEQ ID NO: 66448 - DNA, 1015 bp, Triticum aestivum
  misc_feature (1)..(1015): Ceres Seq. ID no. 12621037
gatcgtcaggcagcaacccccgcacatctgctccctcctccaccagctccccatcctcaacgagctcccaccacccgctgctacccagcatggccgccgccgccaccgccgtccgcttccacacggccgccgcgcgacgcgccgcccctcggcgaccggcgcgcttcgccgtgcgcgcagatgccgcgcaggcggcgacggcgctgacgcaggatgacctcaagaggcttgcggcggtgcgtgcggtggagcaggtgcagagtggtatggttctgggcctcgggacaggctccacggccgcctttgccgtcgccgagatcggtgcgcttcttgccaacgggaagctctccggcatcgtcggtgtgcccacttccaagcgcacctttgagcaggccatgtccctgggaatccctctttccacgctcgacgaccaccccgtgatcgacctcgccattgacggcgctgacgaggttgatccagatcttaaccttgtgaaagggcggggtggagcccttctccgggagaagatggtcgaagctgcatcaggaaagtttgttgttgtcgttgatgagacgaaactagttactggcctaggagggagcggtcttgccatgcctgtggaagttgtgcagttctgctggaagtacaatcaagtaagtctgcagggtctgttcaatgaagaaggttgcgaggcaaagctgagattgaatgaggatggcaagccctatgttactgacaactcgaaatacatcgtagatttatacttcaagacgccaatcaaggatgcgttgggcgcgggcaaggagattgcagctttggaaggagttgttgagcatgggttgttcttgaacatggcaagctcagtgatcattgctggatcagacggtgtcagtgtcaaaacaaagtgacttttttggatcggctgttgttgatgtgttgaacttacggtttttcactgaataatctatctgtgtaaaaggaggaaataatgctcttctataaatatatcttttcc

SEQ ID NO: 66449 - protein, 301 aa, Triticum aestivum
  peptide (1)..(301): Ceres Seq. ID no. 12621038
  misc_feature (118)..(297): Pfam Name: Ribose 5-phosphate isomerase A (phosphoriboisomerase A) Pfam Description: Ribose 5-phosphate isomerase A
  misc_feature (47)..(295): Homolog of NCBI NO: 38347196 NR Description: OSJNBa0023J03.8 [Oryza sativa (japonica
  misc_feature (60)..(301): Homolog of NCBI NO: 13430836 NR Description: putative ribose 5-phosphate isomerase
  misc_feature (60)..(301): Homolog of NCBI NO: 15223936 NR Description: putative ribose 5-phosphate isomerase
  misc_feature (60)..(301): Homolog of NCBI NO: 21592672 NR Description: putative ribose 5-phosphate isomerase
  misc_feature (68)..(301): Homolog of NCBI NO: 15226223 NR Description: putative ribose 5-phosphate isomerase
  misc_feature (15)..(301): Homolog of NCBI NO: 21594002 NR Description: putative ribose 5-phosphate isomerase
  misc_feature (15)..(301): Homolog of NCBI NO: 15229349 NR Description: putative ribose 5-phosphate isomerase
  misc_feature (68)..(301): Homolog of NCBI NO: 18654317 NR Description: ribose-5-phosphate isomerase [Spinacia oleracea]
  misc_feature (30)..(301): Homolog of NCBI NO: 34393836 NR Description: putative ribose-5-phosphate isomerase
  misc_feature (30)..(301): Homolog of NCBI NO: 34393835 NR Description: putative ribose-5-phosphate isomerase
SSGSNPRTSAPSSTSSPSSTSSHHPLLPSMAAAATAVRFHTAAARRAAPRRPARFAVRADAAQAATALTQDDLKRLAAVRAVEQVQSGMVLGLGTGSTAAFAVAEIGALLANGKLSGIVGVPTSKRTFEQAMSLGIPLSTLDDHPVIDLAIDGADEVDPDLNLVKGRGGALLREKMVEAASGKFVVVVDETKLVTGLGGSGLAMPVEVVQFCWKYNQVSLQGLFNEEGCEAKLRLNEDGKPYVTDNSKYIVDLYFKTPIKDALGAGKEIAALEGVVEHGLFLNMASSVIIAGSDGVSVKTK

SEQ ID NO: 66450 - protein, 272 aa, Triticum aestivum
  peptide (1)..(272): Ceres Seq. ID no. 12621039
  misc_feature (89)..(268): Pfam Name: Ribose 5-phosphate isomerase A (phosphoriboisomerase A) Pfam Description: Ribose 5-phosphate isomerase A
  misc_feature (18)..(266): Homolog of NCBI NO: 38347196 NR Description: OSJNBa0023J03.8 [Oryza sativa (japonica
  misc_feature (31)..(272): Homolog of NCBI NO: 13430836 NR Description: putative ribose 5-phosphate isomerase
  misc_feature (31)..(272): Homolog of NCBI NO: 15223936 NR Description: putative ribose 5-phosphate isomerase
  misc_feature (31)..(272): Homolog of NCBI NO: 21592672 NR Description: putative ribose 5-phosphate isomerase
  misc_feature (39)..(272): Homolog of NCBI NO: 15226223 NR Description: putative ribose 5-phosphate isomerase
  misc_feature (1)..(272): Homolog of NCBI NO: 21594002 NR Description: putative ribose 5-phosphate isomerase
  misc_feature (1)..(272): Homolog of NCBI NO: 15229349 NR Description: putative ribose 5-phosphate isomerase
  misc_feature (39)..(272): Homolog of NCBI NO: 18654317 NR Description: ribose-5-phosphate isomerase [Spinacia oleracea]
  misc_feature (1)..(272): Homolog of NCBI NO: 34393836 NR Description: putative ribose-5-phosphate isomerase
  misc_feature (1)..(272): Homolog of NCBI NO: 34393835 NR Description: putative ribose-5-phosphate isomerase
MAAAATAVRFHTAAARRAAPRRPARFAVRADAAQAATALTQDDLKRLAAVRAVEQVQSGMVLGLGTGSTAAFAVAEIGALLANGKLSGIVGVPTSKRTFEQAMSLGIPLSTLDDHPVIDLAIDGADEVDPDLNLVKGRGGALLREKMVEAASGKFVVVVDETKLVTGLGGSGLAMPVEVVQFCWKYNQVSLQGLFNEEGCEAKLRLNEDGKPYVTDNSKYIVDLYFKTPIKDALGAGKEIAALEGVVEHGLFLNMASSVIIAGSDGVSVKTK

SEQ ID NO: 66451 - protein, 213 aa, Triticum aestivum
  peptide (1)..(213): Ceres Seq. ID no. 12621040
  misc_feature (30)..(209): Pfam Name: Ribose 5-phosphate isomerase A (phosphoriboisomerase A) Pfam Description: Ribose 5-phosphate isomerase A
  misc_feature (1)..(207): Homolog of NCBI NO: 38347196 NR Description: OSJNBa0023J03.8 [Oryza sativa (japonica
  misc_feature (1)..(213): Homolog of NCBI NO: 13430836 NR Description: putative ribose 5-phosphate isomerase
  misc_feature (1)..(213): Homolog of NCBI NO: 15223936 NR Description: putative ribose 5-phosphate isomerase
  misc_feature (1)..(213): Homolog of NCBI NO: 21592672 NR Description: putative ribose 5-phosphate isomerase
  misc_feature (1)..(213): Homolog of NCBI NO: 15226223 NR Description: putative ribose 5-phosphate isomerase
  misc_feature (1)..(213): Homolog of NCBI NO: 21594002 NR Description: putative ribose 5-phosphate isomerase
  misc_feature (1)..(213): Homolog of NCBI NO: 15229349 NR Description: putative ribose 5-phosphate isomerase
  misc_feature (1)..(213): Homolog of NCBI NO: 18654317 NR Description: ribose-5-phosphate isomerase [Spinacia oleracea]
  misc_feature (1)..(213): Homolog of NCBI NO: 34393836 NR Description: putative ribose-5-phosphate isomerase
  misc_feature (1)..(213): Homolog of NCBI NO: 34393835 NR Description: putative ribose-5-phosphate isomerase
MVLGLGTGSTAAFAVAEIGALLANGKLSGIVGVPTSKRTFEQAMSLGIPLSTLDDHPVIDLAIDGADEVDPDLNLVKGRGGALLREKMVEAASGKFVVVVDETKLVTGLGGSGLAMPVEVVQFCWKYNQVSLQGLFNEEGCEAKLRLNEDGKPYVTDNSKYIVDLYFKTPIKDALGAGKEIAALEGVVEHGLFLNMASSVIIAGSDGVSVKTK

SEQ ID NO: 66452 - DNA, 1313 bp, Triticum aestivum
  misc_feature (1)..(1313): Ceres Seq. ID no. 15226418
gtacaaaatggtttacctgtccaatttgggcttggaaacgaccctcttacccattacttggccaggatgtcaaggcatcagttgtatcaaatcatgtctgagttgaagaccctaactactcaaaataacgaccttgccaaaaaactgctgcaaggaattccacagcttccaaaggccctatttcaggcacagataatgctcgggctggtgacacctcagatgatgcagatggctaagagccaacagccctctagctcgttggcacaatcttctcacctcaatgaatcatttccgcagccagatgctgtgctaccaattgttcatagacctccaccaaaccctaatgccatgcaggaacaaactgcaccgctgcataactttcctcagtatcagcattcatctcagcctccagtcaaaatgtttccgcatggacatcagcctggggtgctggcacaccctccaatgctatctcagcccttcggcacctcttccagtgttcctactcaaccccttgtaaactcaggaggcttgacatcacaagttcagccttcatttttgacacagcaccctagaccaccagttatgccaactaatgtacagcaactacccttgaccaatcctcatctctcccaggttgctgctgaacctgagatactccccaatgagataagattgcctgatcgagctagtcatcaggcagagttagaccatccctcgaaattgagaaaattggaggatggaacatcaacgccaggaattgtaaacaatagtcctgctgtttattctgctccatcgcaggtagtggtccctagtggaccatcagggagctatagttctggtgctgttcacttccagcaaccagagaatgaagcgcctcagctcacacaggacgatgagtcagcccttctgcagcaagtcttacaactgacacctgagcagctgagttcattgccagtggagcagcagcagcaggtgatacagcttcagaagatgctatcagctggtaaatagcggcataacaccagctgagtaagcacggtgaaattgttaacctacatagttaaacattgaagaaggctcgtctagccacacacacacacacacggaacttctcaactttgttggtatctctgggccatcagttttgctcctgatgattgatttatttggcattctttgtaaagttgaggtaaaaatgtggtggcaaaagaagttgtgaagaaagatgataattgtccattagtcctgtaacattttagaaaagaataatcttatgaagagagggagttgtatttgtgttccggaattgttgc

SEQ ID NO: 66453 - protein, 336 aa, Triticum aestivum
  peptide (1)..(336): Ceres Seq. ID no. 15226419
  misc_feature (8)..(216): Homolog of NCBI NO: 22330606 NR Description: proline-rich protein family [Arabidopsis
  misc_feature (13)..(308): Homolog of NCBI NO: 22330574 NR Description: cleavage stimulation factor, putative
  misc_feature (13)..(308): Homolog of NCBI NO: 21591633 NR Description: cleavage stimulation factor 64 [Arabidopsis
VQNGLPVQFGLGNDPLTHYLARMSRHQLYQIMSELKTLTTQNNDLAKKLLQGIPQLPKALFQAQIMLGLVTPQMMQMAKSQQPSSSLAQSSHLNESFPQPDAVLPIVHRPPPNPNAMQEQTAPLHNFPQYQHSSQPPVKMFPHGHQPGVLAHPPMLSQPFGTSSSVPTQPLVNSGGLTSQVQPSFLTQHPRPPVMPTNVQQLPLTNPHLSQVAAEPEILPNEIRLPDRASHQAELDHPSKLRKLEDGTSTPGIVNNSPAVYSAPSQVVVPSGPSGSYSSGAVHFQQPENEAPQLTQDDESALLQQVLQLTPEQLSSLPVEQQQQVIQLQKMLSAGK

SEQ ID NO: 66454 - protein, 314 aa, Triticum aestivum
  peptide (1)..(314): Ceres Seq. ID no. 15226420
  misc_feature (1)..(194): Homolog of NCBI NO: 22330606 NR Description: proline-rich protein family [Arabidopsis
  misc_feature (1)..(286): Homolog of NCBI NO: 22330574 NR Description: cleavage stimulation factor, putative
  misc_feature (1)..(286): Homolog of NCBI NO: 21591633 NR Description: cleavage stimulation factor 64 [Arabidopsis
MSRHQLYQIMSELKTLTTQNNDLAKKLLQGIPQLPKALFQAQIMLGLVTPQMMQMAKSQQPSSSLAQSSHLNESFPQPDAVLPIVHRPPPNPNAMQEQTAPLHNFPQYQHSSQPPVKMFPHGHQPGVLAHPPMLSQPFGTSSSVPTQPLVNSGGLTSQVQPSFLTQHPRPPVMPTNVQQLPLTNPHLSQVAAEPEILPNEIRLPDRASHQAELDHPSKLRKLEDGTSTPGIVNNSPAVYSAPSQVVVPSGPSGSYSSGAVHFQQPENEAPQLTQDDESALLQQVLQLTPEQLSSLPVEQQQQVIQLQKMLSAGK

SEQ ID NO: 66455 - protein, 305 aa, Triticum aestivum
  peptide (1)..(305): Ceres Seq. ID no. 15226421
  misc_feature (1)..(185): Homolog of NCBI NO: 22330606 NR Description: proline-rich protein family [Arabidopsis
  misc_feature (1)..(277): Homolog of NCBI NO: 22330574 NR Description: cleavage stimulation factor, putative
  misc_feature (1)..(277): Homolog of NCBI NO: 21591633 NR Description: cleavage stimulation factor 64 [Arabidopsis
MSELKTLTTQNNDLAKKLLQGIPQLPKALFQAQIMLGLVTPQMMQMAKSQQPSSSLAQSSHLNESFPQPDAVLPIVHRPPPNPNAMQEQTAPLHNFPQYQHSSQPPVKMFPHGHQPGVLAHPPMLSQPFGTSSSVPTQPLVNSGGLTSQVQPSFLTQHPRPPVMPTNVQQLPLTNPHLSQVAAEPEILPNEIRLPDRASHQAELDHPSKLRKLEDGTSTPGIVNNSPAVYSAPSQVVVPSGPSGSYSSGAVHFQQPENEAPQLTQDDESALLQQVLQLTPEQLSSLPVEQQQQVIQLQKMLSAGK

SEQ ID NO: 66456 - DNA, 1720 bp, Triticum aestivum
  misc_feature (1)..(1720): Ceres Seq. ID no. 14302216
ctgaaaatttcacttgaccgccaagtcccaaagcacaagtggaacacgaaactttgatgtggcgggccgatgtgccccaagcaatgtcaaaggcgaaatggaaacggggggcgtataagttcgaaaaattctccatccccccttctctctctctctccctccgtcgttcgatccccgacgccatcgtgcgcatcgccggccaggacaaggcatacatacaggtacagcggcccctcgtagggacaagaagagacccacccagaggcagaggcccgcctcaaatgcgccgccggccgcgcgtcgccgcacgatgagccccgccgcgacggacgccggcggcgacctcttcgccgccaacctcaagggcgcgctcctcgccgtcgcctcctccaccttcgtcggggtcagcttcatcgtcaagaagaagggcctccgccgcgccggcgccgtcggctcccgggcaggtgtcggagggtatgggtacctctgggagccgctctggtgggtcgggatggtcaccatgcttgttggggagaccgccaatttcgtggcttacatgtttgcgccagccgtcctcgtcgctccgctgggagcactcagcatcattgtcagtgctgttctagcccatttcatgctgaatgagaagttgcagcgggtgggcgtcctgggctgtattctctgcattgttgggtcgacggtgatcatcctccacgctcctgaggagaggcccccggactcggtggagcagatttggcgcctggcaacgcaacctaccttcctttgctacgctgctctagcagtggctgtgtcattgcttcttatactatattgtgctccacggtatgggcagacgaacataatgatctatgttggtatttgctctgttgtcggatccctcacggtaatgagcatcaaggctgtgggcattgcgattaaacttaccattcagggcgaaaaccaggctgggtatttccagacgtggctgtttgtgacggtttcagctatatgcttagtcatccaattagtttacctgaacaaggcattggatactttcaatacggcgctggtttctcccatctattatgccatgttcacaaccctcactattttagcaagtgccataatgttcaaggattggtctgggcagagcgcaagcattattgcctccgagacttgtggatttctcacagttcttgccggtattattgtgctacattccaccaaagaacccgatcaaaatctgtccccagacctttatgcatctctcactgcacccctccctccaaagatatattggcacatccaaggaaacggcggcgacgtagggaagcaaaaagaggacgactcacttccctgcgatttcatcaccgtcgtgcgccaggactacttcgtctagaaaattctcaggacggcatatgcgtttcatatgtgccagccagcctcaagaccttcatgtggcgagggtggaccccagggcctgttaccgacggtacaaggccatcctggcctgaaaaaatgtgaaaattttgcagagacatcgtgttgtaccataccatgaccaaaccggttgcgtcggagctaggtgttgtacgattacctgtgtactgtagaaatcgcgccgtgtgaggaggatgttgttgtaggggggtttgtgagggatgttgtagatgttgttgcctgtctgatgtgaataccaaagcacacaacgctttctgttgcc

SEQ ID NO: 66457 - protein, 361 aa, Triticum aestivum
  peptide (1)..(361): Ceres Seq. ID no. 14302217
  misc_feature (16)..(309): Pfam Name: Protein of unknown function (DUF803) Pfam Description: Protein of unknown function (DUF803)
  misc_feature (16)..(306): Homolog of NCBI NO: 25406128 NR Description: unknown protein F17M19.5 [imported] - Arabidopsis
  misc_feature (16)..(306): Homolog of NCBI NO: 18409942 NR Description: expressed protein [Arabidopsis thaliana]
  misc_feature (16)..(312): Homolog of NCBI NO: 21593618 NR Description: unknown [Arabidopsis thaliana]
  misc_feature (16)..(312): Homolog of NCBI NO: 18414079 NR Description: expressed protein [Arabidopsis thaliana]
  misc_feature (16)..(312): Homolog of NCBI NO: 15229534 NR Description: purine permease - related [Arabidopsis thaliana]
  misc_feature (1)..(315): Homolog of NCBI NO: 20161440 NR Description: B1065E10.15 [Oryza sativa (japonica
  misc_feature (1)..(99): Homolog of NCBI NO: 34908722 NR Description: hypothetical protein~similar to Arabidopsis
  misc_feature (198)..(361): Homolog of NCBI NO: 34908722 NR Description: hypothetical protein~similar to Arabidopsis
  misc_feature (16)..(313): Homolog of NCBI NO: 26449939 NR Description: unknown protein [Arabidopsis thaliana]
  misc_feature (16)..(309): Homolog of NCBI NO: 30681265 NR Description: expressed protein [Arabidopsis thaliana]
MSPAATDAGGDLFAANLKGALLAVASSTFVGVSFIVKKKGLRRAGAVGSRAGVGGYGYLWEPLWWVGMVTMLVGETANFVAYMFAPAVLVAPLGALSIIVSAVLAHFMLNEKLQRVGVLGCILCIVGSTVIILHAPEERPPDSVEQIWRLATQPTFLCYAALAVAVSLLLILYCAPRYGQTNIMIYVGICSVVGSLTVMSIKAVGIAIKLTIQGENQAGYFQTWLFVTVSAICLVIQLVYLNKALDTFNTALVSPIYYAMFTTLTILASAIMFKDWSGQSASIIASETCGFLTVLAGIIVLHSTKEPDQNLSPDLYASLTAPLPPKIYWHIQGNGGDVGKQKEDDSLPCDFITVVRQDYFV

SEQ ID NO: 66458 - protein, 294 aa, Triticum aestivum
  peptide (1)..(294): Ceres Seq. ID no. 14302218
  misc_feature (1)..(242): Pfam Name: Protein of unknown function (DUF803) Pfam Description: Protein of unknown function (DUF803)
  misc_feature (1)..(239): Homolog of NCBI NO: 25406128 NR Description: unknown protein F17M19.5 [imported] - Arabidopsis
  misc_feature (1)..(239): Homolog of NCBI NO: 18409942 NR Description: expressed protein [Arabidopsis thaliana]
  misc_feature (1)..(245): Homolog of NCBI NO: 21593618 NR Description: unknown [Arabidopsis thaliana]
  misc_feature (1)..(245): Homolog of NCBI NO: 18414079 NR Description: expressed protein [Arabidopsis thaliana]
  misc_feature (1)..(245): Homolog of NCBI NO: 15229534 NR Description: purine permease - related [Arabidopsis thaliana]
  misc_feature (1)..(248): Homolog of NCBI NO: 20161440 NR Description: B1065E10.15 [Oryza sativa (japonica
  misc_feature (1)..(32): Homolog of NCBI NO: 34908722 NR Description: hypothetical protein~similar to Arabidopsis
  misc_feature (131)..(294): Homolog of NCBI NO: 34908722 NR Description: hypothetical protein~similar to Arabidopsis
  misc_feature (1)..(246): Homolog of NCBI NO: 26449939 NR Description: unknown protein [Arabidopsis thaliana]
  misc_feature (1)..(242): Homolog of NCBI NO: 30681265 NR Description: expressed protein [Arabidopsis thaliana]
MVTMLVGETANFVAYMFAPAVLVAPLGALSIIVSAVLAHFMLNEKLQRVGVLGCILCIVGSTVIILHAPEERPPDSVEQIWRLATQPTFLCYAALAVAVSLLLILYCAPRYGQTNIMIYVGICSVVGSLTVMSIKAVGIAIKLTIQGENQAGYFQTWLFVTVSAICLVIQLVYLNKALDTFNTALVSPIYYAMFTTLTILASAIMFKDWSGQSASIIASETCGFLTVLAGIIVLHSTKEPDQNLSPDLYASLTAPLPPKIYWHIQGNGGDVGKQKEDDSLPCDFITVVRQDYFV

SEQ ID NO: 66459 - protein, 291 aa, Triticum aestivum
  peptide (1)..(291): Ceres Seq. ID no. 14302219
  misc_feature (1)..(239): Pfam Name: Protein of unknown function (DUF803) Pfam Description: Protein of unknown function (DUF803)
  misc_feature (1)..(236): Homolog of NCBI NO: 25406128 NR Description: unknown protein F17M19.5 [imported] - Arabidopsis
  misc_feature (1)..(236): Homolog of NCBI NO: 18409942 NR Description: expressed protein [Arabidopsis thaliana]
  misc_feature (1)..(242): Homolog of NCBI NO: 21593618 NR Description: unknown [Arabidopsis thaliana]
  misc_feature (1)..(242): Homolog of NCBI NO: 18414079 NR Description: expressed protein [Arabidopsis thaliana]
  misc_feature (1)..(242): Homolog of NCBI NO: 15229534 NR Description: purine permease - related [Arabidopsis thaliana]
  misc_feature (1)..(245): Homolog of NCBI NO: 20161440 NR Description: B1065E10.15 [Oryza sativa (japonica
  misc_feature (1)..(29): Homolog of NCBI NO: 34908722 NR Description: hypothetical protein~similar to Arabidopsis
  misc_feature (128)..(291): Homolog of NCBI NO: 34908722 NR Description: hypothetical protein~similar to Arabidopsis
  misc_feature (1)..(243): Homolog of NCBI NO: 26449939 NR Description: unknown protein [Arabidopsis thaliana]
  misc_feature (1)..(239): Homolog of NCBI NO: 30681265 NR Description: expressed protein [Arabidopsis thaliana]
MLVGETANFVAYMFAPAVLVAPLGALSIIVSAVLAHFMLNEKLQRVGVLGCILCIVGSTVIILHAPEERPPDSVEQIWRLATQPTFLCYAALAVAVSLLLILYCAPRYGQTNIMIYVGICSVVGSLTVMSIKAVGIAIKLTIQGENQAGYFQTWLFVTVSAICLVIQLVYLNKALDTFNTALVSPIYYAMFTTLTILASAIMFKDWSGQSASIIASETCGFLTVLAGIIVLHSTKEPDQNLSPDLYASLTAPLPPKIYWHIQGNGGDVGKQKEDDSLPCDFITVVRQDYFV

SEQ ID NO: 66460 - DNA, 1542 bp, Triticum aestivum
  misc_feature (1)..(1542): Ceres Seq. ID no. 14303097
cccggcctctccaacgagtctcaacttccttatccaacgatccgctggacgggactaactaggctgtcacatcccttccatctaccacaaccaacggcgtcggcgataatggccgccttgccgcagctgcttctgatcctcttccccgcggaggttgccgtcctgaccctgctgctggcctcggcggcgggagcgcgggctcacgcctcctcgtcctcgtcatcggcgacgtaccgctgcggctggtgcccgcgcaggtccaccgcgtccatcctccctcccggcgccggcgcactgaccggtgccgcctgcgggtatggtggccaggcggcggagatggccgtcgacggggggttccacattgcggccgtcagcgccagtttcttccgcggtggccgggcctgcggcgcctgctaccagctgatgtgcaggggacggagcgcgtgcgcggcgggcggcgtcaaggtcgtcgtcgtcgccgacgtggcagagacgaacatgaccggtggtggtgccggtgggcggtttctgctcagcaaggacgccttcgccgccttggcgacgccagaccgtaacgccgagctcgcggacgcagacgtcgacgtggacttcaggaggattccctgcgtgtacaagagcaagaacttggcggttaaagtggaggagacgagcagcagggaccggggttacctcgccctccgcttcctctaccagggcggccagaccgacatcgccgccgtcgaggtcgcgcaggcggtcaccggttccagcggcaccaacaacgacgcagcaccgttgcagacatcctggcagtacatgacccggcgcgaggcgtccccgtcgatgtggcgcacgtcgcgcgtgccggccggtctgctgcagctccggcttgtggtcaccgcgggctccggcggcaagtggctgcgcgccgacggggcggtgctccccgcgaattggcagcccggcgcggtctacgacaccggcctgcgcgtcaccgacgtcgccgcaagcacctgcggcggcgcctcctgttcctccacggacgagggcgacgacgccgagcagctccgatgacacgcttcccggcatgcatgatgcatccaccacggaccgatcgatggtccattggagccggcccgcacgtcaacggcgacgccgcgcatgcagatctgcaccggccagccgccggaatatcggtcgatgctgcatgtacactgtacagagacgtgtacatcgcaacgtacgacatgcatgcatgtgtgcacggccgacgacgagttccggttaggacaaaacctccatggtcccgctctaaacagaggatgttggcgcgtagcttcacgtgtggagggaagggactaatgcagagaagaacatgtagatggctctgttcaggtcttggaatcacatgacagcactactgttttggctgctcgtcctcttcctctttggaatagtaggagagtattattgtaggttgattgcatgggctgattaagattgatcagttgccgactaagactaagttaactgtattgcatt

SEQ ID NO: 66461 - protein, 357 aa, Triticum aestivum
  peptide (1)..(357): Ceres Seq. ID no. 14303098
  misc_feature (216)..(316): Pfam Name: Pollen allergen Pfam Description: Pollen allergen
  misc_feature (73)..(284): Homolog of NCBI NO: 37536544 NR Description: putative pollen allergen [Oryza sativa (japonica
  misc_feature (107)..(339): Homolog of NCBI NO: 37536544 NR Description: putative pollen allergen [Oryza sativa (japonica
  misc_feature (80)..(284): Homolog of NCBI NO: 21654743 NR Description: expansin-like protein 1 [Oryza sativa]
  misc_feature (177)..(339): Homolog of NCBI NO: 25136297 NR Description: expansin-like protein [Oryza sativa (japonica
  misc_feature (125)..(339): Homolog of NCBI NO: 21654743 NR Description: expansin-like protein 1 [Oryza sativa]
  misc_feature (52)..(257): Homolog of NCBI NO: 34901594 NR Description: P0571D04.11 [Oryza sativa (japonica
  misc_feature (176)..(348): Homolog of NCBI NO: 34901594 NR Description: P0571D04.11 [Oryza sativa (japonica
  misc_feature (75)..(310): Homolog of NCBI NO: 33111959 NR Description: expansin-like protein [Quercus robur]
  misc_feature (93)..(351): Homolog of NCBI NO: 7484482 NR Description: probable allergen - Monterey pine
  misc_feature (80)..(339): Homolog of NCBI NO: 20502989 NR Description: Putative pollen allergen [Oryza sativa (japonica
PGLSNESQLPYPTIRWTGLTRLSHPFHLPQPTASAIMAALPQLLLILFPAEVAVLTLLLASAAGARAHASSSSSSATYRCGWCPRRSTASILPPGAGALTGAACGYGGQAAEMAVDGGFHIAAVSASFFRGGRACGACYQLMCRGRSACAAGGVKVVVVADVAETNMTGGGAGGRFLLSKDAFAALATPDRNAELADADVDVDFRRIPCVYKSKNLAVKVEETSSRDRGYLALRFLYQGGQTDIAAVEVAQAVTGSSGTNNDAAPLQTSWQYMTRREASPSMWRTSRVPAGLLQLRLVVTAGSGGKWLRADGAVLPANWQPGAVYDTGLRVTDVAASTCGGASCSSTDEGDDAEQLR

SEQ ID NO: 66462 - protein, 321 aa, Triticum aestivum
  peptide (1)..(321): Ceres Seq. ID no. 14303099
  misc_feature (180)..(280): Pfam Name: Pollen allergen Pfam Description: Pollen allergen
  misc_feature (37)..(248): Homolog of NCBI NO: 37536544 NR Description: putative pollen allergen [Oryza sativa (japonica
  misc_feature (71)..(303): Homolog of NCBI NO: 37536544 NR Description: putative pollen allergen [Oryza sativa (japonica
  misc_feature (44)..(248): Homolog of NCBI NO: 21654743 NR Description: expansin-like protein 1 [Oryza sativa]
  misc_feature (141)..(303): Homolog of NCBI NO: 25136297 NR Description: expansin-like protein [Oryza sativa (japonica
  misc_feature (89)..(303): Homolog of NCBI NO: 21654743 NR Description: expansin-like protein 1 [Oryza sativa]
  misc_feature (16)..(221): Homolog of NCBI NO: 34901594 NR Description: P0571D04.11 [Oryza sativa (japonica
  misc_feature (140)..(312): Homolog of NCBI NO: 34901594 NR Description: P0571D04.11 [Oryza sativa (japonica
  misc_feature (39)..(274): Homolog of NCBI NO: 33111959 NR Description: expansin-like protein [Quercus robur]
  misc_feature (57)..(315): Homolog of NCBI NO: 7484482 NR Description: probable allergen - Monterey pine
  misc_feature (44)..(303): Homolog of NCBI NO: 20502989 NR Description: Putative pollen allergen [Oryza sativa (japonica
MAALPQLLLILFPAEVAVLTLLLASAAGARAHASSSSSSATYRCGWCPRRSTASILPPGAGALTGAACGYGGQAAEMAVDGGFHIAAVSASFFRGGRACGACYQLMCRGRSACAAGGVKVVVVADVAETNMTGGGAGGRFLLSKDAFAALATPDRNAELADADVDVDFRRIPCVYKSKNLAVKVEETSSRDRGYLALRFLYQGGQTDIAAVEVAQAVTGSSGTNNDAAPLQTSWQYMTRREASPSMWRTSRVPAGLLQLRLVVTAGSGGKWLRADGAVLPANWQPGAVYDTGLRVTDVAASTCGGASCSSTDEGDDAEQLR

SEQ ID NO: 66463 - protein, 245 aa, Triticum aestivum
  peptide (1)..(245): Ceres Seq. ID no. 14303100
  misc_feature (104)..(204): Pfam Name: Pollen allergen Pfam Description: Pollen allergen
  misc_feature (1)..(172): Homolog of NCBI NO: 37536544 NR Description: putative pollen allergen [Oryza sativa (japonica
  misc_feature (1)..(227): Homolog of NCBI NO: 37536544 NR Description: putative pollen allergen [Oryza sativa (japonica
  misc_feature (1)..(172): Homolog of NCBI NO: 21654743 NR Description: expansin-like protein 1 [Oryza sativa]
  misc_feature (65)..(227): Homolog of NCBI NO: 25136297 NR Description: expansin-like protein [Oryza sativa (japonica
  misc_feature (13)..(227): Homolog of NCBI NO: 21654743 NR Description: expansin-like protein 1 [Oryza sativa]
  misc_feature (1)..(145): Homolog of NCBI NO: 34901594 NR Description: P0571D04.11 [Oryza sativa (japonica
  misc_feature (64)..(236): Homolog of NCBI NO: 34901594 NR Description: P0571D04.11 [Oryza sativa (japonica
  misc_feature (1)..(198): Homolog of NCBI NO: 33111959 NR Description: expansin-like protein [Quercus robur]
  misc_feature (1)..(239): Homolog of NCBI NO: 7484482 NR Description: probable allergen - Monterey pine
  misc_feature (1)..(227): Homolog of NCBI NO: 20502989 NR Description: Putative pollen allergen [Oryza sativa (japonica
MAVDGGFHIAAVSASFFRGGRACGACYQLMCRGRSACAAGGVKVVVVADVAETNMTGGGAGGRFLLSKDAFAALATPDRNAELADADVDVDFRRIPCVYKSKNLAVKVEETSSRDRGYLALRFLYQGGQTDIAAVEVAQAVTGSSGTNNDAAPLQTSWQYMTRREASPSMWRTSRVPAGLLQLRLVVTAGSGGKWLRADGAVLPANWQPGAVYDTGLRVTDVAASTCGGASCSSTDEGDDAEQLR

SEQ ID NO: 66464 - DNA, 582 bp, Triticum aestivum
  misc_feature (1)..(582): Ceres Seq. ID no. 13658948
aatccccatccgcccgtctctctcctacgctctccccgcccgcctcgccccgctcctcccccgcagcggcgagctactcccgagccagggagagacaggcggcggcggcagcttccccttcccctcctcctctcctccctcgccctcgccgagaaacaacgagagtttcctcttccgtcagcaatggagaacatgagatccgagaacaaccgtggcgcggccatggagggcgtcaagctcgcgtctgaggcggcggccaacaccaaccgcagggccctgagggacatcaagaacatcctcggcgcccctcaccagccccaggccgtcagcaagaggggcttgcaagaaaaacccgccgccggtgccaagagccaagctggcgccgtcggccaccggccggtgaccaggaaattcgccgccatcctgcagcaaacgcagcctgcaaacgccccgctggcaccaattggcagtgagaggcagaagaggaatgctgacaccgcgttcaatgctccttcagacatggagtgcagcaaggcttcagatgatgaccttgatgagatgatgaccaatgagctaaaggag

SEQ ID NO: 66465 - protein, 194 aa, Triticum aestivum
  peptide (1)..(194): Ceres Seq. ID no. 13658949
  misc_feature (67)..(181): Homolog of NCBI NO: 6331704 NR Description: cyclin [Oryza sativa]
  misc_feature (67)..(181): Homolog of NCBI NO: 38345935 NR Description: OSJNBb0078D11.10 [Oryza sativa (japonica
  misc_feature (62)..(193): Homolog of NCBI NO: 2130122 NR Description: cyclin III - maize
  misc_feature (62)..(193): Homolog of NCBI NO: 3913236 NR Description: G2/mitotic-specific cyclin 2 (B-like cyclin)
NPHPPVSLLRSPRPPRPAPPPQRRATPEPGRDRRRRQLPLPLLLSSLALAEKQREFPLPSAMENMRSENNRGAAMEGVKLASEAAANTNRRALRDIKNILGAPHQPQAVSKRGLQEKPAAGAKSQAGAVGHRPVTRKFAAILQQTQPANAPLAPIGSERQKRNADTAFNAPSDMECSKASDDDLDEMMTNELKE

SEQ ID NO: 66466 - protein, 133 aa, Triticum aestivum
  peptide (1)..(133): Ceres Seq. ID no. 13658950
  misc_feature (6)..(120): Homolog of NCBI NO: 6331704 NR Description: cyclin [Oryza sativa]
  misc_feature (6)..(120): Homolog of NCBI NO: 38345935 NR Description: OSJNBb0078D11.10 [Oryza sativa (japonica
  misc_feature (1)..(132): Homolog of NCBI NO: 2130122 NR Description: cyclin III - maize
  misc_feature (1)..(132): Homolog of NCBI NO: 3913236 NR Description: G2/mitotic-specific cyclin 2 (B-like cyclin)
MENMRSENNRGAAMEGVKLASEAAANTNRRALRDIKNILGAPHQPQAVSKRGLQEKPAAGAKSQAGAVGHRPVTRKFAAILQQTQPANAPLAPIGSERQKRNADTAFNAPSDMECSKASDDDLDEMMTNELKE

SEQ ID NO: 66467 - protein, 130 aa, Triticum aestivum
  peptide (1)..(130): Ceres Seq. ID no. 13658951
  misc_feature (3)..(117): Homolog of NCBI NO: 6331704 NR Description: cyclin [Oryza sativa]
  misc_feature (3)..(117): Homolog of NCBI NO: 38345935 NR Description: OSJNBb0078D11.10 [Oryza sativa (japonica
  misc_feature (1)..(129): Homolog of NCBI NO: 2130122 NR Description: cyclin III - maize
  misc_feature (1)..(129): Homolog of NCBI NO: 3913236 NR Description: G2/mitotic-specific cyclin 2 (B-like cyclin)
MRSENNRGAAMEGVKLASEAAANTNRRALRDIKNILGAPHQPQAVSKRGLQEKPAAGAKSQAGAVGHRPVTRKFAAILQQTQPANAPLAPIGSERQKRNADTAFNAPSDMECSKASDDDLDEMMTNELKE

SEQ ID NO: 66468 - DNA, 1765 bp, Triticum aestivum
  misc_feature (1)..(1765): Ceres Seq. ID no. 15176787
acttacccgaggcacgaccacaactatttccaccttttgccagtgccagtgccacctgcaaaacatattctgaaaacattgcagtccacccactttgcttaggttcgagatgaagcagaccgtggtgatgtaccccggcgccggcgtcggccacgttggccccgtgacggagctcgccaacgtcttcctcaagcacggctacgacgtcaccgtggtgctcgtcgagccgcctttcaagtcgacagactccgccgccaccgccatcgagcgcatcgccgcctccaaccctttcatctccttccatgtcctcccgcccctccctgcgccagactttgccgcctccggcaagcaccctttcctactcatgctccagctcttgcacgattataacgagcggtcggaagcgttcctccgtggcatcccccggaagagcttgcactctgttatcctcgacatgttctgcgtccacgccaccgacgtctgcgtgaagctcggcgtcccggtctacacgttcttcgtcgggggcgcctcgtgcctgtcggtcctaacccaggtcccggcagtgatcgccggcaggcagacgggcttgaaggaactcggggacatgcccctcgatttcctcggcgtcccgccgatgccagcgtctcatctcatcaaggagctgctggagcaccccgaggatgagatgtgcaaggccatgacagacgtctggaagcgcaacacggagaccatgggcgttatggtgaacacgtttgagtcattggagagccgggcggtgcagtctctcatggacctccccggcaggaagctgcgtccgatctactgcgtcgggccgttggtcagcaagggcgccaaggatgcctccgacaaagcagagaggaacgagtgccttgagtggctcgatgcgcagcccgaccgcagcgtcgtgttcctctgtttcgggagcatgggcacgctctcggcggagcagctcaaggagatggccgttgggttggagcggtctgggcagcggttcctatggtccgtgcgcaacccggccggaagcaacaacccgaagaaatacttggaggtgcgccccgagccggaccttgacgcgctgcttcctcaagggttcctggagcggaccaagggcaggggcctcgtcgtcaagtcatgggcgccgcaggcgaacgtgctccgccaccgcgcgacgggcgcgttcgtgacgcactgcggatggaactcggtgctggaggccgttgcggccggggtgccgatgctgtgcctgccgctggaggcggagcagaagatgaacaaggtgtgcgtgacggaggacatgggcgtcgccgtggagctggagggatacatggcaggttttgtcaaggcagaggaggtggaggccaaggtgaggctggtgattgagggcggggatgggaggcagctcagggcccgggcggctgctcgcagggaagaggccgaggcggcgctgggggaagggggctcgtcgcgggcgtcgtttgcccagtttctgttggacgtggacaatctcggaaagcagctcggcgagtgacgcactacttgcaaattgcgactgctctttgccttctacgtatatgttgctagtccaagttgccctcttgtttatattttacttgcattgcatgctcaatcacttaacttactagtaagtgtgtgtgtgtgtagcaccatcttaataaatcggctatgtaagtgccaggtaccgcagttacctccacatatatttatgatgttttctcttcctggc

SEQ ID NO: 66469 - protein, 479 aa, Triticum aestivum
  peptide (1)..(479): Ceres Seq. ID no. 15176788
  misc_feature (4)..(473): Pfam Name: UDP-glucoronosyl and UDP-glucosyl transferase Pfam Description: UDP-glucoronosyl and UDP-glucosyl transferase
  misc_feature (112)..(470): Homolog of NCBI NO: 15222344 NR Description: UDP-glycosyltransferase family [Arabidopsis
  misc_feature (1)..(473): Homolog of NCBI NO: 19911209 NR Description: glucosyltransferase-13 [Vigna angularis]
  misc_feature (105)..(470): Homolog of NCBI NO: 7488111 NR Description: probable glucosyltransferase - Arabidopsis
  misc_feature (132)..(459): Homolog of NCBI NO: 7433902 NR Description: UTP-glucose glucosyltransferase homolog
  misc_feature (1)..(470): Homolog of NCBI NO: 11994646 NR Description: UTP-glucose glucosyltransferase [Arabidopsis
  misc_feature (2)..(467): Homolog of NCBI NO: 22535568 NR Description: putative glucosyltransferase
  misc_feature (1)..(479): Homolog of NCBI NO: 34908644 NR Description: putative flavonol 3-O-glucosyltransferase
  misc_feature (3)..(467): Homolog of NCBI NO: 34910228 NR Description: putative flavonol glucosyltransferase
  misc_feature (1)..(470): Homolog of NCBI NO: 34910204 NR Description: putative flavonol glucosyltransferase
  misc_feature (1)..(473): Homolog of NCBI NO: 34910206 NR Description: putative flavonol glucosyltransferase
MKQTVVMYPGAGVGHVGPVTELANVFLKHGYDVTVVLVEPPFKSTDSAATAIERIAASNPFISFHVLPPLPAPDFAASGKHPFLLMLQLLHDYNERSEAFLRGIPRKSLHSVILDMFCVHATDVCVKLGVPVYTFFVGGASCLSVLTQVPAVIAGRQTGLKELGDMPLDFLGVPPMPASHLIKELLEHPEDEMCKAMTDVWKRNTETMGVMVNTFESLESRAVQSLMDLPGRKLRPIYCVGPLVSKGAKDASDKAERNECLEWLDAQPDRSVVFLCFGSMGTLSAEQLKEMAVGLERSGQRFLWSVRNPAGSNNPKKYLEVRPEPDLDALLPQGFLERTKGRGLVVKSWAPQANVLRHRATGAFVTHCGWNSVLEAVAAGVPMLCLPLEAEQKMNKVCVTEDMGVAVELEGYMAGFVKAEEVEAKVRLVIEGGDGRQLRARAAARREEAEAALGEGGSSRASFAQFLLDVDNLGKQLGE

SEQ ID NO: 66470 - protein, 473 aa, Triticum aestivum
  peptide (1)..(473): Ceres Seq. ID no. 15176789
  misc_feature (1)..(467): Pfam Name: UDP-glucoronosyl and UDP-glucosyl transferase Pfam Description: UDP-glucoronosyl and UDP-glucosyl transferase
  misc_feature (106)..(464): Homolog of NCBI NO: 15222344 NR Description: UDP-glycosyltransferase family [Arabidopsis
  misc_feature (1)..(467): Homolog of NCBI NO: 19911209 NR Description: glucosyltransferase-13 [Vigna angularis]
  misc_feature (99)..(464): Homolog of NCBI NO: 7488111 NR Description: probable glucosyltransferase - Arabidopsis
  misc_feature (126)..(453): Homolog of NCBI NO: 7433902 NR Description: UTP-glucose glucosyltransferase homolog
  misc_feature (1)..(464): Homolog of NCBI NO: 11994646 NR Description: UTP-glucose glucosyltransferase [Arabidopsis
  misc_feature (1)..(461): Homolog of NCBI NO: 22535568 NR Description: putative glucosyltransferase
  misc_feature (1)..(473): Homolog of NCBI NO: 34908644 NR Description: putative flavonol 3-O-glucosyltransferase
  misc_feature (1)..(461): Homolog of NCBI NO: 34910228 NR Description: putative flavonol glucosyltransferase
  misc_feature (1)..(464): Homolog of NCBI NO: 34910204 NR Description: putative flavonol glucosyltransferase
  misc_feature (1)..(467): Homolog of NCBI NO: 34910206 NR Description: putative flavonol glucosyltransferase
MYPGAGVGHVGPVTELANVFLKHGYDVTVVLVEPPFKSTDSAATAIERIAASNPFISFHVLPPLPAPDFAASGKHPFLLMLQLLHDYNERSEAFLRGIPRKSLHSVILDMFCVHATDVCVKLGVPVYTFFVGGASCLSVLTQVPAVIAGRQTGLKELGDMPLDFLGVPPMPASHLIKELLEHPEDEMCKAMTDVWKRNTETMGVMVNTFESLESRAVQSLMDLPGRKLRPIYCVGPLVSKGAKDASDKAERNECLEWLDAQPDRSVVFLCFGSMGTLSAEQLKEMAVGLERSGQRFLWSVRNPAGSNNPKKYLEVRPEPDLDALLPQGFLERTKGRGLVVKSWAPQANVLRHRATGAFVTHCGWNSVLEAVAAGVPMLCLPLEAEQKMNKVCVTEDMGVAVELEGYMAGFVKAEEVEAKVRLVIEGGDGRQLRARAAARREEAEAALGEGGSSRASFAQFLLDVDNLGKQLGE

SEQ ID NO: 66471 - protein, 394 aa, Triticum aestivum
  peptide (1)..(394): Ceres Seq. ID no. 15176790
  misc_feature (1)..(388): Pfam Name: UDP-glucoronosyl and UDP-glucosyl transferase Pfam Description: UDP-glucoronosyl and UDP-glucosyl transferase
  misc_feature (27)..(385): Homolog of NCBI NO: 15222344 NR Description: UDP-glycosyltransferase family [Arabidopsis
  misc_feature (1)..(388): Homolog of NCBI NO: 19911209 NR Description: glucosyltransferase-13 [Vigna angularis]
  misc_feature (20)..(385): Homolog of NCBI NO: 7488111 NR Description: probable glucosyltransferase - Arabidopsis
  misc_feature (47)..(374): Homolog of NCBI NO: 7433902 NR Description: UTP-glucose glucosyltransferase homolog
  misc_feature (1)..(385): Homolog of NCBI NO: 11994646 NR Description: UTP-glucose glucosyltransferase [Arabidopsis
  misc_feature (1)..(382): Homolog of NCBI NO: 22535568 NR Description: putative glucosyltransferase
  misc_feature (1)..(394): Homolog of NCBI NO: 34908644 NR Description: putative flavonol 3-O-glucosyltransferase
  misc_feature (1)..(382): Homolog of NCBI NO: 34910228 NR Description: putative flavonol glucosyltransferase
  misc_feature (1)..(385): Homolog of NCBI NO: 34910204 NR Description: putative flavonol glucosyltransferase
  misc_feature (1)..(388): Homolog of NCBI NO: 34910206 NR Description: putative flavonol glucosyltransferase
MLQLLHDYNERSEAFLRGIPRKSLHSVILDMFCVHATDVCVKLGVPVYTFFVGGASCLSVLTQVPAVIAGRQTGLKELGDMPLDFLGVPPMPASHLIKELLEHPEDEMCKAMTDVWKRNTETMGVMVNTFESLESRAVQSLMDLPGRKLRPIYCVGPLVSKGAKDASDKAERNECLEWLDAQPDRSVVFLCFGSMGTLSAEQLKEMAVGLERSGQRFLWSVRNPAGSNNPKKYLEVRPEPDLDALLPQGFLERTKGRGLVVKSWAPQANVLRHRATGAFVTHCGWNSVLEAVAAGVPMLCLPLEAEQKMNKVCVTEDMGVAVELEGYMAGFVKAEEVEAKVRLVIEGGDGRQLRARAAARREEAEAALGEGGSSRASFAQFLLDVDNLGKQLGE

SEQ ID NO: 66472 - DNA, 1585 bp, Triticum aestivum
  misc_feature (1)..(1585): Ceres Seq. ID no. 12578422
agtgtgcttctgcctaagtagtgttgacacctacctccccaccctcccaagaagaaaagaggaatagcccagccagagagagcagagcagatccgttcccggcgagtcggcggcgacaccgctggagaagaagacgtccacgacagccggcgaccgcatcggcatcggcatcgccgtctccttccccaccctacccagtttgccatcaacagcgcatcatgcagaggcccagcaaactgcctgccgtctctctccccggacgccctacctttttcggaccccaaggttgggctgacctcccagatggcttgcttcactccatcgttgatcggctgggctccttccgagaccttcttggcttcgccacaacatgcccctcgtggcatgctgccttctcctcatacccgtcaaaatccacgttcctcacaaaacttccacctctcctcatccagccccatattcgggcacaaggtcctcttcttccttgtaccagtggttgtcgtgagctatacccatgtaaggttgttgatccagccaaccgaaacgccgcccttcgctgttggatccctcaagataccctggagaagatgacatttattggatcctcctatggtaagctcatctactactgcaacggatactgtcgcatcatcgatgtgttcaccggtgacgaggtctcaactccacgtctcccatcccgtgctggatgttcaaaacttcacttggctggcattctaacagccccacttgcatcacccaactcacatctccttgtcagtaccgagtccttcctgcttgatctgcctgttggaaacgactcttggtccgaactccagcttccttgtcagtttgtaatagaccattttgtggagttggatggtcagctcattgtctcgaatagctatgggagatcctacgctctgcagctggcccctcagcatggcctgcaggagataaaaaccaagcctgtgggaggaaggccggtggtaggaaggctggtggtttgtggtgatatgcttctcattctgagttttggcgagttccaccgcctcgacatgtcaactgagcccgcgacacgggtggccgtggagaagctgggcgagcgggcactctttgtaggggcggaagcgaagagctcggcactttcttgcatgagcccggagctatggggaggaaggagtgacatcgtgtactttgctcgtacagctcgaccttggtttctctataggctgtgtggcaggccagatcgcttgcaggatagaccaacacgaccaacacgcgctgaacccgcaggctttggaagcaccccagtgcagtcatcagttcggccgctctggctgtacccaagcatgttctactcggatggccaatgaatgaatgatccgtgcctgccagccaactacgtacagttgccgcagcaccagcttcatctgagatttccctttgagatccagggagtagagattggtttttgctgcatgggcagaatttggtatgtatgtagttagtttgttgaacttgataagttttaacttttgcggtgtcggcactagctttactagaataactcagttatccggttttt

SEQ ID NO: 66473 - protein, 384 aa, Triticum aestivum
  peptide (1)..(384): Ceres Seq. ID no. 12578423
  misc_feature (144)..(319): Homolog of NCBI NO: 34897928 NR Description: Similar to Arabidopsis thaliana DNA chromosome 4,
  misc_feature (22)..(319): Homolog of NCBI NO: 24413941 NR Description: putative selenium-binding protein
  misc_feature (27)..(328): Homolog of NCBI NO: 34897862 NR Description: hypothetical protein [Oryza sativa (japonica
  misc_feature (2)..(384): Homolog of NCBI NO: 34897916 NR Description: hypothetical protein [Oryza sativa (japonica
  misc_feature (1)..(350): Homolog of NCBI NO: 34897914 NR Description: hypothetical protein [Oryza sativa (japonica
  misc_feature (1)..(384): Homolog of NCBI NO: 34897864 NR Description: hypothetical protein [Oryza sativa (japonica
MQRPSKLPAVSLPGRPTFFGPQGWADLPDGLLHSIVDRLGSFRDLLGFATTCPSWHAAFSSYPSKSTFLTKLPPLLIQPHIRAQGPLLPCTSGCRELYPCKVVDPANRNAALRCWIPQDTLEKMTFIGSSYGKLIYYCNGYCRIIDVFTGDEVSTPRLPSRAGCSKLHLAGILTAPLASPNSHLLVSTESFLLDLPVGNDSWSELQLPCQFVIDHFVELDGQLIVSNSYGRSYALQLAPQHGLQEIKTKPVGGRPVVGRLVVCGDMLLILSFGEFHRLDMSTEPATRVAVEKLGERALFVGAEAKSSALSCMSPELWGGRSDIVYFARTARPWFLYRLCGRPDRLQDRPTRPTRAEPAGFGSTPVQSSVRPLWLYPSMFYSDGQ

SEQ ID NO: 66474 - protein, 261 aa, Triticum aestivum
  peptide (1)..(261): Ceres Seq. ID no. 12578424
  misc_feature (21)..(196): Homolog of NCBI NO: 34897928 NR Description: Similar to Arabidopsis thaliana DNA chromosome 4,
  misc_feature (1)..(196): Homolog of NCBI NO: 24413941 NR Description: putative selenium-binding protein
  misc_feature (1)..(205): Homolog of NCBI NO: 34897862 NR Description: hypothetical protein [Oryza sativa (japonica
  misc_feature (1)..(261): Homolog of NCBI NO: 34897916 NR Description: hypothetical protein [Oryza sativa (japonica
  misc_feature (1)..(227): Homolog of NCBI NO: 34897914 NR Description: hypothetical protein [Oryza sativa (japonica
  misc_feature (1)..(261): Homolog of NCBI NO: 34897864 NR Description: hypothetical protein [Oryza sativa (japonica
MTFIGSSYGKLIYYCNGYCRIIDVFTGDEVSTPRLPSRAGCSKLHLAGILTAPLASPNSHLLVSTESFLLDLPVGNDSWSELQLPCQFVIDHFVELDGQLIVSNSYGRSYALQLAPQHGLQEIKTKPVGGRPVVGRLVVCGDMLLILSFGEFHRLDMSTEPATRVAVEKLGERALFVGAEAKSSALSCMSPELWGGRSDIVYFARTARPWFLYRLCGRPDRLQDRPTRPTRAEPAGFGSTPVQSSVRPLWLYPSMFYSDGQ

SEQ ID NO: 66475 - DNA, 2130 bp, Triticum aestivum
  misc_feature (1)..(2130): Ceres Seq. ID no. 14303672
ccctcgctagcctcgggtgggtctatcctcttccctcgctgagaatggcgtctccggcctccacctccgcgccggtctccctctccctctccctcccgctccgcccttccccgtgccgccgcctccccgcgcccttctcccgcctccctccccgccgcttcaccctctcgccgacccgccccgccgccgcgctgctctccagccccagccccagccccagccacgcgcagcacgagcacaaggacgaggaagatgaagaagaggagtatggtgaagatgaggagctcgtggaggaggatgacttggtggaggtggggtacgtgagcggcgcgcacggggtgcgcggcgacgtcctcgtctcgccccgcaccgacttccccgagctccgcttcgccacgccggggaagaggtggctgagggctcgcgccgccgggaagatgcaggtcagggagttcgagctcgtcagggggaaagcccacacggggaagaagggctggatcgtgcgcttcgacggcgtcgactccttggacgaggccaggcagatagttggttcggctgttctcgtgaagaccgaggataggccggaactggaggaggatgagatctattcgctcgatcttgttggcatgactgttattgtcaaggatacaggcaagcttgtaggcactgttgcacaggtcttcaattttggaggtggcgatcttctccaggttatggttggctctgctgagaatgctgtgcagactgattcagaaaatcaggattcaactccatcccgtcaacacgtgtggattccatttgctgaagatattgtgcctgatattgatatggagactagagagatgtggattacaccaccaaagggtcttcttgaggtcaacacacgtcctgagaaatcaaagaaagaaaggcgtgcgatggattggaaggaaaagaagaaactacagcgtcgcataactgcagcaaagaaggtactacatgaaatggaacagggccatattctggaaggtttgctatcaggggacaagctcgaaaaggcttcacttgctgaacaaattgcgagcattgacttccaattgttcaaacatgcaatgcatagcgtcagcaagcaggttgacagcatgtcaaagaatgttcttgccaattcctcttcatcaagaaaaaacgtgatgaggatacctcgcgaaaccctcatgaatcatggtgagaaagagaagaatgtcttcagtagtgaatttagcaaaggctgtgagatccttcaaaagtcaaaagcagcaattgtacttgttacaaatggctcagactctgatattgtggatgctgagtttcagagattgcttaactcttttagtgagttaatgaaggtagaagaaaatcatatatctccccctttttttattgtttctcctgacgatcatgtggattcagttcggaactacttgatagagaacgactattttggttttgacactcagaaggtatgggtccttgaagagatgaaactaccagttgtcagtctgtcctctgagctagggagcaaaaaaattctgctgaagtccccatgggagatacttcaaaggccagctggatctggggcgattttcagctcactatcatcaaataaaattttggaatcgttcaatgcaatgggcatagagtacgtacagatatgcagcccctctgacgaactagtcctcgggcatcctctgctcttcggtgctgcaagttcgcgcagtgtggatgtcggtgtcaagctccgcaagaccagcgacaagacggaagatggtttcgatttgatcctttccatcgaccacttgaacaagatgtgccgagacgtcgccaaggccaggttctctgcccaccccgagcagcacgaacacgtcgagcttgtcgacggccagtgggtcaccgtccagccagaggggccgaactctcaccggttgagtaccaatgttacaagtgttttggattcttgctctcctgacaagctgtgcgtcatggagattgttgagtagcggctagtgaatctttttgctaatgtactgtaggactgtacatagccagccacaaccaagtactttttttttaaacggagcctcatccattaattaagaagagagttgtccggct

SEQ ID NO: 66476 - protein, 670 aa, Triticum aestivum
  peptide (1)..(670): Ceres Seq. ID no. 14303673
  misc_feature (103)..(192): Pfam Name: RimM N-terminal domain Pfam Description: RimM N-terminal domain
  misc_feature (102)..(237): Homolog of NCBI NO: 37525225 NR Description: 16S rRNA processing protein
  misc_feature (330)..(593): Homolog of NCBI NO: 32417642 NR Description: hypothetical protein [Neurospora crassa]
  misc_feature (102)..(246): Homolog of NCBI NO: 37521074 NR Description: probable 16S rRNA processing protein [Gloeobacter
  misc_feature (102)..(292): Homolog of NCBI NO: 23040973 NR Description: hypothetical protein [Trichodesmium erythraeum
  misc_feature (99)..(294): Homolog of NCBI NO: 17230304 NR Description: probable 16S rRNA processing protein [Nostoc sp.
  misc_feature (99)..(293): Homolog of NCBI NO: 23125796 NR Description: hypothetical protein [Nostoc punctiforme]
  misc_feature (256)..(292): Homolog of NCBI NO: 33864685 NR Description: possible 16S rRNA processing protein RimM
  misc_feature (95)..(237): Homolog of NCBI NO: 33864685 NR Description: possible 16S rRNA processing protein RimM
  misc_feature (328)..(668): Homolog of NCBI NO: 18422672 NR Description: expressed protein [Arabidopsis thaliana]
  misc_feature (12)..(668): Homolog of NCBI NO: 10177579 NR Description: gene_id:K11I1.1~similar to unknown
LASLGWVYPLPSLRMASPASTSAPVSLSLSLPLRPSPCRRLPAPFSRLPPRRFTLSPTRPAAALLSSPSPSPSHAQHEHKDEEDEEEEYGEDEELVEEDDLVEVGYVSGAHGVRGDVLVSPRTDFPELRFATPGKRWLRARAAGKMQVREFELVRGKAHTGKKGWIVRFDGVDSLDEARQIVGSAVLVKTEDRPELEEDEIYSLDLVGMTVIVKDTGKLVGTVAQVFNFGGGDLLQVMVGSAENAVQTDSENQDSTPSRQHVWIPFAEDIVPDIDMETREMWITPPKGLLEVNTRPEKSKKERRAMDWKEKKKLQRRITAAKKVLHEMEQGHILEGLLSGDKLEKASLAEQIASIDFQLFKHAMHSVSKQVDSMSKNVLANSSSSRKNVMRIPRETLMNHGEKEKNVFSSEFSKGCEILQKSKAAIVLVTNGSDSDIVDAEFQRLLNSFSELMKVEENHISPPFFIVSPDDHVDSVRNYLIENDYFGFDTQKVWVLEEMKLPVVSLSSELGSKKILLKSPWEILQRPAGSGAIFSSLSSNKILESFNAMGIEYVQICSPSDELVLGHPLLFGAASSRSVDVGVKLRKTSDKTEDGFDLILSIDHLNKMCRDVAKARFSAHPEQHEHVELVDGQWVTVQPEGPNSHRLSTNVTSVLDSCSPDKLCVMEIVE

SEQ ID NO: 66477 - protein, 656 aa, Triticum aestivum
  peptide (1)..(656): Ceres Seq. ID no. 14303674
  misc_feature (89)..(178): Pfam Name: RimM N-terminal domain Pfam Description: RimM N-terminal domain
  misc_feature (88)..(223): Homolog of NCBI NO: 37525225 NR Description: 16S rRNA processing protein
  misc_feature (316)..(579): Homolog of NCBI NO: 32417642 NR Description: hypothetical protein [Neurospora crassa]
  misc_feature (88)..(232): Homolog of NCBI NO: 37521074 NR Description: probable 16S rRNA processing protein [Gloeobacter
  misc_feature (88)..(278): Homolog of NCBI NO: 23040973 NR Description: hypothetical protein [Trichodesmium erythraeum
  misc_feature (85)..(280): Homolog of NCBI NO: 17230304 NR Description: probable 16S rRNA processing protein [Nostoc sp.
  misc_feature (85)..(279): Homolog of NCBI NO: 23125796 NR Description: hypothetical protein [Nostoc punctiforme]
  misc_feature (242)..(278): Homolog of NCBI NO: 33864685 NR Description: possible 16S rRNA processing protein RimM
  misc_feature (81)..(223): Homolog of NCBI NO: 33864685 NR Description: possible 16S rRNA processing protein RimM
  misc_feature (314)..(654): Homolog of NCBI NO: 18422672 NR Description: expressed protein [Arabidopsis thaliana]
  misc_feature (1)..(654): Homolog of NCBI NO: 10177579 NR Description: gene_id:K11I1.1~similar to unknown
MASPASTSAPVSLSLSLPLRPSPCRRLPAPFSRLPPRRFTLSPTRPAAALLSSPSPSPSHAQHEHKDEEDEEEEYGEDEELVEEDDLVEVGYVSGAHGVRGDVLVSPRTDFPELRFATPGKRWLRARAAGKMQVREFELVRGKAHTGKKGWIVRFDGVDSLDEARQIVGSAVLVKTEDRPELEEDEIYSLDLVGMTVIVKDTGKLVGTVAQVFNFGGGDLLQVMVGSAENAVQTDSENQDSTPSRQHVWIPFAEDIVPDIDMETREMWITPPKGLLEVNTRPEKSKKERRAMDWKEKKKLQRRITAAKKVLHEMEQGHILEGLLSGDKLEKASLAEQIASIDFQLFKHAMHSVSKQVDSMSKNVLANSSSSRKNVMRIPRETLMNHGEKEKNVFSSEFSKGCEILQKSKAAIVLVTNGSDSDIVDAEFQRLLNSFSELMKVEENHISPPFFIVSPDDHVDSVRNYLIENDYFGFDTQKVWVLEEMKLPVVSLSSELGSKKILLKSPWEILQRPAGSGAIFSSLSSNKILESFNAMGIEYVQICSPSDELVLGHPLLFGAASSRSVDVGVKLRKTSDKTEDGFDLILSIDHLNKMCRDVAKARFSAHPEQHEHVELVDGQWVTVQPEGPNSHRLSTNVTSVLDSCSPDKLCVMEIVE

SEQ ID NO: 66478 - protein, 525 aa, Triticum aestivum
  peptide (1)..(525): Ceres Seq. ID no. 14303675
  misc_feature (53)..(145): Pfam Name: PRC-barrel domain Pfam Description: PRC-barrel domain
  misc_feature (1)..(92): Homolog of NCBI NO: 37525225 NR Description: 16S rRNA processing protein
  misc_feature (185)..(448): Homolog of NCBI NO: 32417642 NR Description: hypothetical protein [Neurospora crassa]
  misc_feature (1)..(101): Homolog of NCBI NO: 37521074 NR Description: probable 16S rRNA processing protein [Gloeobacter
  misc_feature (1)..(147): Homolog of NCBI NO: 23040973 NR Description: hypothetical protein [Trichodesmium erythraeum
  misc_feature (1)..(149): Homolog of NCBI NO: 17230304 NR Description: probable 16S rRNA processing protein [Nostoc sp.
  misc_feature (1)..(148): Homolog of NCBI NO: 23125796 NR Description: hypothetical protein [Nostoc punctiforme]
  misc_feature (111)..(147): Homolog of NCBI NO: 33864685 NR Description: possible 16S rRNA processing protein RimM
  misc_feature (1)..(92): Homolog of NCBI NO: 33864685 NR Description: possible 16S rRNA processing protein RimM
  misc_feature (183)..(523): Homolog of NCBI NO: 18422672 NR Description: expressed protein [Arabidopsis thaliana]
  misc_feature (1)..(523): Homolog of NCBI NO: 10177579 NR Description: gene_id:K11I1.1~similar to unknown
MQVREFELVRGKAHTGKKGWIVRFDGVDSLDEARQIVGSAVLVKTEDRPELEEDEIYSLDLVGMTVIVKDTGKLVGTVAQVFNFGGGDLLQVMVGSAENAVQTDSENQDSTPSRQHVWIPFAEDIVPDIDMETREMWITPPKGLLEVNTRPEKSKKERRAMDWKEKKKLQRRITAAKKVLHEMEQGHILEGLLSGDKLEKASLAEQIASIDFQLFKHAMHSVSKQVDSMSKNVLANSSSSRKNVMRIPRETLMNHGEKEKNVFSSEFSKGCEILQKSKAAIVLVTNGSDSDIVDAEFQRLLNSFSELMKVEENHISPPFFIVSPDDHVDSVRNYLIENDYFGFDTQKVWVLEEMKLPVVSLSSELGSKKILLKSPWEILQRPAGSGAIFSSLSSNKILESFNAMGIEYVQICSPSDELVLGHPLLFGAASSRSVDVGVKLRKTSDKTEDGFDLILSIDHLNKMCRDVAKARFSAHPEQHEHVELVDGQWVTVQPEGPNSHRLSTNVTSVLDSCSPDKLCVMEIVE

SEQ ID NO: 66479 - DNA, 1812 bp, Triticum aestivum
  misc_feature (1)..(1812): Ceres Seq. ID no. 15224473
taattcactacgccgctatttattttactattaattgccccgactccgtctccgtccccgtccccgtcccccgtccccgccccctccgccgtcgccaccccaaattcccacgcaaaccctaagccagccagccagccagctagctcgacagcccagcccagcccaatggcggaggacgccggcgacagggaccagcagcagcagcagcagcccgccgcggccgcgggggccggagcagggcacgaggacgggggcggcagggacgagagctccgtcaagctcttcgtcggccaggtgcccaagctcatgaccgaggccgagctggccgccatgttccgcgacgtcgccgtcgtcgacgaggtcaccgtcatccgcgacaaggccaccaaggcgtcccgaggttgctgcttcctgatctgcccatcaagggaggaggctgacaaagcagtgaatgcatatcacaacaaacgcacgcttcctggggccccaagtccattgcaagtaaaatatgccgatggagagttggaaaggctggagcacaaacttttcattggaatgctacccaaaaatgtgacagatactgaaatgactgatttattttcacaatatggaaatatcaaggatttgcagattttgagaggttcacaacagacgagcaaagctggttgcgcctttctgaagtatgaaacaaaagagcaggctgtggcagctatcgaagctctaaatgggaagcacaaaatagagggttcaagtgtgcctttggttgtaaaatgggctgacacagaaaaggaaaggcaggctcgaaaagcacaaaaggctcaatttccgcagtctaatatgtcaaatgcaaatgccatgcaacaaagttcattatttggtgctttacagatgggatatgtgcctccgtataatggatttggctaccagccacaaggaacctatggacttatgcagtaccctttatctccgatgcaaaatcaagcaggcttcccgaatatggttcagcctgtcaatcaaggaagctcaatacggggcgttaattctgaattatcccctaattcacttcctaggtcattcaattcaatgcagttgggcagcccttatccagctgggcctggtatgcagtatcctgggtcatatgctggtggtggcatcaatagtcgtccttacatgaactctcataattcagtcaataaagttccgaatgcaaatgctacatctcccacatcttcaagcaccagcagcaacactggtcctcagctagagggtcctcctggagccaacttgtttatctatcacatcccgcaagaatttggcgaccaagatctagcaaatgcatttcagagttttggtagagtattgagtgccaaagtgtttgtagacaaaacgaccggtgctagtaaatgcttcggttttgtaagctacgattctcctgctcctgcgcaggcagccataagtatgatgaatgggttccaattaggtggcaaaaagctgaaagtacaactcaagagagacaacagcaagcacaataaactttattgacagcgcccagtcgataccttccaacacgatcaggaaaaaccggtacatatgtgtcgcacaattgatcgtttgtcccattgtttcttctggcctccaccatgtgtcgtcgtcggtgggggcttgtgtatcttggctcaattcaattcaacattcttgaaaactgctaaagtgtgtatttcgtcgcagcatagttgtagcatctgtaccatcagattcagacccattgtacatcagacattgattcattcaattgctcccttttttctaccg

SEQ ID NO: 66480 - protein, 458 aa, Triticum aestivum
  peptide (1)..(458): Ceres Seq. ID no. 15224474
  misc_feature (127)..(199): Pfam Name: RNA recognition motif. (a.k.a. RRM, RBD, or RNP domain) Pfam Description: RNA recognition motif. (a.k.a. RRM, RBD, or RNP
  misc_feature (348)..(452): Homolog of NCBI NO: 16660677 NR Description: neuroblastoma apoptosis-related RNA-binding
  misc_feature (33)..(363): Homolog of NCBI NO: 16660677 NR Description: neuroblastoma apoptosis-related RNA-binding
  misc_feature (33)..(319): Homolog of NCBI NO: 7488302 NR Description: ribonucleoprotein homolog F21B7.26 - Arabidopsis
  misc_feature (33)..(366): Homolog of NCBI NO: 22329313 NR Description: RNA-binding protein, putative [Arabidopsis
  misc_feature (22)..(450): Homolog of NCBI NO: 33354192 NR Description: putative CUG triplet repeat RNA-binding protein 1
  misc_feature (33)..(456): Homolog of NCBI NO: 25386552 NR Description: protein F21B7.8 [imported] - Arabidopsis thaliana
  misc_feature (33)..(425): Homolog of NCBI NO: 30679366 NR Description: RNA-binding protein, putative [Arabidopsis
  misc_feature (33)..(452): Homolog of NCBI NO: 18412143 NR Description: RNA-binding protein, putative [Arabidopsis
  misc_feature (33)..(452): Homolog of NCBI NO: 7488303 NR Description: ribonucleoprotein homolog T4I9.1 - Arabidopsis
  misc_feature (17)..(456): Homolog of NCBI NO: 34907248 NR Description: putative ribonucleoprotein
MAEDAGDRDQQQQQQPAAAAGAGAGHEDGGGRDESSVKLFVGQVPKLMTEAELAAMFRDVAVVDEVTVIRDKATKASRGCCFLICPSREEADKAVNAYHNKRTLPGAPSPLQVKYADGELERLEHKLFIGMLPKNVTDTEMTDLFSQYGNIKDLQILRGSQQTSKAGCAFLKYETKEQAVAAIEALNGKHKIEGSSVPLVVKWADTEKERQARKAQKAQFPQSNMSNANAMQQSSLFGALQMGYVPPYNGFGYQPQGTYGLMQYPLSPMQNQAGFPNMVQPVNQGSSIRGVNSELSPNSLPRSFNSMQLGSPYPAGPGMQYPGSYAGGGINSRPYMNSHNSVNKVPNANATSPTSSSTSSNTGPQLEGPPGANLFIYHIPQEFGDQDLANAFQSFGRVLSAKVFVDKTTGASKCFGFVSYDSPAPAQAAISMMNGFQLGGKKLKVQLKRDNSKHNKLY

SEQ ID NO: 66481 - protein, 411 aa, Triticum aestivum
  peptide (1)..(411): Ceres Seq. ID no. 15224475
  misc_feature (80)..(152): Pfam Name: RNA recognition motif. (a.k.a. RRM, RBD, or RNP domain) Pfam Description: RNA recognition motif. (a.k.a. RRM, RBD, or RNP
  misc_feature (301)..(405): Homolog of NCBI NO: 16660677 NR Description: neuroblastoma apoptosis-related RNA-binding
  misc_feature (1)..(316): Homolog of NCBI NO: 16660677 NR Description: neuroblastoma apoptosis-related RNA-binding
  misc_feature (1)..(272): Homolog of NCBI NO: 7488302 NR Description: ribonucleoprotein homolog F21B7.26 - Arabidopsis
  misc_feature (1)..(319): Homolog of NCBI NO: 22329313 NR Description: RNA-binding protein, putative [Arabidopsis
  misc_feature (1)..(403): Homolog of NCBI NO: 33354192 NR Description: putative CUG triplet repeat RNA-binding protein 1
  misc_feature (1)..(409): Homolog of NCBI NO: 25386552 NR Description: protein F21B7.8 [imported] - Arabidopsis thaliana
  misc_feature (1)..(378): Homolog of NCBI NO: 30679366 NR Description: RNA-binding protein, putative [Arabidopsis
  misc_feature (1)..(405): Homolog of NCBI NO: 18412143 NR Description: RNA-binding protein, putative [Arabidopsis
  misc_feature (1)..(405): Homolog of NCBI NO: 7488303 NR Description: ribonucleoprotein homolog T4I9.1 - Arabidopsis
  misc_feature (1)..(409): Homolog of NCBI NO: 34907248 NR Description: putative ribonucleoprotein
MTEAELAAMFRDVAVVDEVTVIRDKATKASRGCCFLICPSREEADKAVNAYHNKRTLPGAPSPLQVKYADGELERLEHKLFIGMLPKNVTDTEMTDLFSQYGNIKDLQILRGSQQTSKAGCAFLKYETKEQAVAAIEALNGKHKIEGSSVPLVVKWADTEKERQARKAQKAQFPQSNMSNANAMQQSSLFGALQMGYVPPYNGFGYQPQGTYGLMQYPLSPMQNQAGFPNMVQPVNQGSSIRGVNSELSPNSLPRSFNSMQLGSPYPAGPGMQYPGSYAGGGINSRPYMNSHNSVNKVPNANATSPTSSSTSSNTGPQLEGPPGANLFIYHIPQEFGDQDLANAFQSFGRVLSAKVFVDKTTGASKCFGFVSYDSPAPAQAAISMMNGFQLGGKKLKVQLKRDNSKHNKLY

SEQ ID NO: 66482 - protein, 403 aa, Triticum aestivum
  peptide (1)..(403): Ceres Seq. ID no. 15224476
  misc_feature (72)..(144): Pfam Name: RNA recognition motif. (a.k.a. RRM, RBD, or RNP domain) Pfam Description: RNA recognition motif. (a.k.a. RRM, RBD, or RNP
  misc_feature (293)..(397): Homolog of NCBI NO: 16660677 NR Description: neuroblastoma apoptosis-related RNA-binding
  misc_feature (1)..(308): Homolog of NCBI NO: 16660677 NR Description: neuroblastoma apoptosis-related RNA-binding
  misc_feature (1)..(264): Homolog of NCBI NO: 7488302 NR Description: ribonucleoprotein homolog F21B7.26 - Arabidopsis
  misc_feature (1)..(311): Homolog of NCBI NO: 22329313 NR Description: RNA-binding protein, putative [Arabidopsis
  misc_feature (1)..(395): Homolog of NCBI NO: 33354192 NR Description: putative CUG triplet repeat RNA-binding protein 1
  misc_feature (1)..(401): Homolog of NCBI NO: 25386552 NR Description: protein F21B7.8 [imported] - Arabidopsis thaliana
  misc_feature (1)..(370): Homolog of NCBI NO: 30679366 NR Description: RNA-binding protein, putative [Arabidopsis
  misc_feature (1)..(397): Homolog of NCBI NO: 18412143 NR Description: RNA-binding protein, putative [Arabidopsis
  misc_feature (1)..(397): Homolog of NCBI NO: 7488303 NR Description: ribonucleoprotein homolog T4I9.1 - Arabidopsis
  misc_feature (1)..(401): Homolog of NCBI NO: 34907248 NR Description: putative ribonucleoprotein
MFRDVAVVDEVTVIRDKATKASRGCCFLICPSREEADKAVNAYHNKRTLPGAPSPLQVKYADGELERLEHKLFIGMLPKNVTDTEMTDLFSQYGNIKDLQILRGSQQTSKAGCAFLKYETKEQAVAAIEALNGKHKIEGSSVPLVVKWADTEKERQARKAQKAQFPQSNMSNANAMQQSSLFGALQMGYVPPYNGFGYQPQGTYGLMQYPLSPMQNQAGFPNMVQPVNQGSSIRGVNSELSPNSLPRSFNSMQLGSPYPAGPGMQYPGSYAGGGINSRPYMNSHNSVNKVPNANATSPTSSSTSSNTGPQLEGPPGANLFIYHIPQEFGDQDLANAFQSFGRVLSAKVFVDKTTGASKCFGFVSYDSPAPAQAAISMMNGFQLGGKKLKVQLKRDNSKHNKLY

SEQ ID NO: 66483 - DNA, 1945 bp, Triticum aestivum
  misc_feature (1)..(1945): Ceres Seq. ID no. 12784451
acaaggggaagtggatccccattccaaacccagcgcacctatccccattccgttccccgccgcggcacttggcgtcgtccgccccgcagctcagctccacacgcccgcccactccctccgccacaagcgatggcgaccatcaccacgcagctccgctccgcgctcctctccccggccgcctcgtcctcgtcctcctcctcaccgcgccgcggcggccggcgcgcgccctcctccgtccgctgcgatgcctctcccccggcggcgtccgcgtcggcctccctcgacccggacttcgacaagaaggccttccgccacaacctcacccgcagcgacaactacaaccgcaagggcttcggccacaagaaggagaccctcgagctcatgagccaggagtacaccagcgatgtgataaagacgctcaaggacaacgggaacgagtacacctgggggccggtgaccgtgaagctggcggaggcctacggcttctgctggggcgtcgagcgcgccgtgcagatcgcctacgaggcgcgcaagcagttccccgaggagcgcatctggatcaccaacgagatcatccacaaccccacggtcaacaagaaattggaggacatgggtgtcaaagatattcctgttaacgctggtattaaggattttgatgttattgaacaaggcgatgttgttgtcttgcctgcatttggagctgctgtggatgagatgtacacattaaatgagaagaacgtgcaaattgttgatacgacatgcccttgggtttcaaaggtgtggaacatggttgagaagcataagaagggcgactatacttctattattcacggaaaatatgcccatgaagagactgttgccactgcttcttttgcagggaagtacattattgtgaagaatatggtcgaggcaacatatgtatgtgattatatacttggtggccaacttgatgggtctagctcaactagagaggagttccttgagaaattcaaaaaggctgtttctccaggattcgatcctgatgttgacttggaaaaggtgggcattgcaaatcaaacaacaatgcttaaaggagaaactgaacaaattggaaaacttgttgagaagactatgatgcgtaagtatggagtcgagaatgccaatgaacactttgttgcattcaacactatttgtgatgccacacaggaaagacaggatgcgatgtatcacctagtgaaggaaaaggttgaccttattctggttattggagggtggaactccagtaatacctctcatttgcaagaaattggagaactcagtggaattccgtcctactggattgacagtgaacaaaggattggaccaggaaacaggattagctacaagctaaatcacggtgagcttattgaggcagaaaactggctaccagaagggcctatcacaattggagttacttctggtgcctcaaccccggacaaggttgttgaggatacgctacacaaggtgtttgacattaagcgtcaagaagttttgcaggttgcatagattttcagcaaaattggccaggggataataatagttgatggcctggcaaaggttagtagaacaattgtgcgacctatcgttgtacagtagctaagaatgtaatgctttaggcacatacttttacgaggatatctgtgctgggatacatatatatgttgtaatcacttgtaccacgaacagtagtacacttgtatcagctgctataacccctggccccttgaaaaatcgttttcataggctgattacatagatatcaaccactgggtttgttgctggatagggctcaaatgcaggactccctgtatgtagcaagtgcaagaaatgcagggtttcctttgtatattagggcgcaagtccaattcccattctgatatgttcatgtgtcatctgttgtaattgaatttaacttttctccgtattc

SEQ ID NO: 66484 - protein, 507 aa, Triticum aestivum
  peptide (1)..(507): Ceres Seq. ID no. 12784452
  misc_feature (154)..(498): Pfam Name: LytB protein Pfam Description: LytB protein
  misc_feature (99)..(504): Homolog of NCBI NO: 33239748 NR Description: 4-hydroxy-3-methylbut-2-enyl diphosphate
  misc_feature (99)..(495): Homolog of NCBI NO: 33864788 NR Description: LytB protein homolog [Synechococcus sp. WH 8102]
  misc_feature (99)..(499): Homolog of NCBI NO: 23040062 NR Description: hypothetical protein [Trichodesmium erythraeum
  misc_feature (99)..(507): Homolog of NCBI NO: 16331361 NR Description: hypothetical protein [Synechocystis sp. PCC 6803]
  misc_feature (99)..(504): Homolog of NCBI NO: 23128578 NR Description: hypothetical protein [Nostoc punctiforme]
  misc_feature (99)..(499): Homolog of NCBI NO: 17228480 NR Description: hypothetical protein [Nostoc sp. PCC 7120]
  misc_feature (99)..(499): Homolog of NCBI NO: 22298585 NR Description: ORF_ID:tlr1041~penicillin tolerance protein LytB
  misc_feature (63)..(507): Homolog of NCBI NO: 7485313 NR Description: hypothetical protein F10M10.120 - Arabidopsis
  misc_feature (63)..(507): Homolog of NCBI NO: 18418433 NR Description: putative protein
  misc_feature (44)..(507): Homolog of NCBI NO: 10716963 NR Description: LYTB-like protein precursor [Adonis palaestina]
TRGSGSPFQTQRTYPHSVPRRGTWRRPPRSSAPHARPLPPPQAMATITTQLRSALLSPAASSSSSSSPRRGGRRAPSSVRCDASPPAASASASLDPDFDKKAFRHNLTRSDNYNRKGFGHKKETLELMSQEYTSDVIKTLKDNGNEYTWGPVTVKLAEAYGFCWGVERAVQIAYEARKQFPEERIWITNEIIHNPTVNKKLEDMGVKDIPVNAGIKDFDVIEQGDVVVLPAFGAAVDEMYTLNEKNVQIVDTTCPWVSKVWNMVEKHKKGDYTSIIHGKYAHEETVATASFAGKYIIVKNMVEATYVCDYILGGQLDGSSSTREEFLEKFKKAVSPGFDPDVDLEKVGIANQTTMLKGETEQIGKLVEKTMMRKYGVENANEHFVAFNTICDATQERQDAMYHLVKEKVDLILVIGGWNSSNTSHLQEIGELSGIPSYWIDSEQRIGPGNRISYKLNHGELIEAENWLPEGPITIGVTSGASTPDKVVEDTLHKVFDIKRQEVLQVA

SEQ ID NO: 66485 - protein, 464 aa, Triticum aestivum
  peptide (1)..(464): Ceres Seq. ID no. 12784453
  misc_feature (111)..(455): Pfam Name: LytB protein Pfam Description: LytB protein
  misc_feature (56)..(461): Homolog of NCBI NO: 33239748 NR Description: 4-hydroxy-3-methylbut-2-enyl diphosphate
  misc_feature (56)..(452): Homolog of NCBI NO: 33864788 NR Description: LytB protein homolog [Synechococcus sp. WH 8102]
  misc_feature (56)..(456): Homolog of NCBI NO: 23040062 NR Description: hypothetical protein [Trichodesmium erythraeum
  misc_feature (56)..(464): Homolog of NCBI NO: 16331361 NR Description: hypothetical protein [Synechocystis sp. PCC 6803]
  misc_feature (56)..(461): Homolog of NCBI NO: 23128578 NR Description: hypothetical protein [Nostoc punctiforme]
  misc_feature (56)..(456): Homolog of NCBI NO: 17228480 NR Description: hypothetical protein [Nostoc sp. PCC 7120]
  misc_feature (56)..(456): Homolog of NCBI NO: 22298585 NR Description: ORF_ID:tlr1041~penicillin tolerance protein LytB
  misc_feature (20)..(464): Homolog of NCBI NO: 7485313 NR Description: hypothetical protein F10M10.120 - Arabidopsis
  misc_feature (20)..(464): Homolog of NCBI NO: 18418433 NR Description: putative protein
  misc_feature (1)..(464): Homolog of NCBI NO: 10716963 NR Description: LYTB-like protein precursor [Adonis palaestina]
MATITTQLRSALLSPAASSSSSSSPRRGGRRAPSSVRCDASPPAASASASLDPDFDKKAFRHNLTRSDNYNRKGFGHKKETLELMSQEYTSDVIKTLKDNGNEYTWGPVTVKLAEAYGFCWGVERAVQIAYEARKQFPEERIWITNEIIHNPTVNKKLEDMGVKDIPVNAGIKDFDVIEQGDVVVLPAFGAAVDEMYTLNEKNVQIVDTTCPWVSKVWNMVEKHKKGDYTSIIHGKYAHEETVATASFAGKYIIVKNMVEATYVCDYILGGQLDGSSSTREEFLEKFKKAVSPGFDPDVDLEKVGIANQTTMLKGETEQIGKLVEKTMMRKYGVENANEHFVAFNTICDATQERQDAMYHLVKEKVDLILVIGGWNSSNTSHLQEIGELSGIPSYWIDSEQRIGPGNRISYKLNHGELIEAENWLPEGPITIGVTSGASTPDKVVEDTLHKVFDIKRQEVLQVA

SEQ ID NO: 66486 - protein, 380 aa, Triticum aestivum
  peptide (1)..(380): Ceres Seq. ID no. 12784454
  misc_feature (27)..(371): Pfam Name: LytB protein Pfam Description: LytB protein
  misc_feature (1)..(377): Homolog of NCBI NO: 33239748 NR Description: 4-hydroxy-3-methylbut-2-enyl diphosphate
  misc_feature (1)..(368): Homolog of NCBI NO: 33864788 NR Description: LytB protein homolog [Synechococcus sp. WH 8102]
  misc_feature (1)..(372): Homolog of NCBI NO: 23040062 NR Description: hypothetical protein [Trichodesmium erythraeum
  misc_feature (1)..(380): Homolog of NCBI NO: 16331361 NR Description: hypothetical protein [Synechocystis sp. PCC 6803]
  misc_feature (1)..(377): Homolog of NCBI NO: 23128578 NR Description: hypothetical protein [Nostoc punctiforme]
  misc_feature (1)..(372): Homolog of NCBI NO: 17228480 NR Description: hypothetical protein [Nostoc sp. PCC 7120]
  misc_feature (1)..(372): Homolog of NCBI NO: 22298585 NR Description: ORF_ID:tlr1041~penicillin tolerance protein LytB
  misc_feature (1)..(380): Homolog of NCBI NO: 7485313 NR Description: hypothetical protein F10M10.120 - Arabidopsis
  misc_feature (1)..(380): Homolog of NCBI NO: 18418433 NR Description: putative protein
  misc_feature (1)..(380): Homolog of NCBI NO: 10716963 NR Description: LYTB-like protein precursor [Adonis palaestina]
MSQEYTSDVIKTLKDNGNEYTWGPVTVKLAEAYGFCWGVERAVQIAYEARKQFPEERIWITNEIIHNPTVNKKLEDMGVKDIPVNAGIKDFDVIEQGDVVVLPAFGAAVDEMYTLNEKNVQIVDTTCPWVSKVWNMVEKHKKGDYTSIIHGKYAHEETVATASFAGKYIIVKNMVEATYVCDYILGGQLDGSSSTREEFLEKFKKAVSPGFDPDVDLEKVGIANQTTMLKGETEQIGKLVEKTMMRKYGVENANEHFVAFNTICDATQERQDAMYHLVKEKVDLILVIGGWNSSNTSHLQEIGELSGIPSYWIDSEQRIGPGNRISYKLNHGELIEAENWLPEGPITIGVTSGASTPDKVVEDTLHKVFDIKRQEVLQVA

SEQ ID NO: 66487 - DNA, 2300 bp, Triticum aestivum
  misc_feature (1)..(2300): Ceres Seq. ID no. 13598023
gcccgacctcccacctccgcagtacaaccccctcctcctcctcccgggcggccatggcggcatgtacgccagcgacggccgccgtgtccttctctcttccgtcgtacccgcgccgcctccggcgccgcccgtccctcctccgcgctgcgtccactgcggcgcccccgtcccccgacctctccatccagctctctccccgcccttccccgcgcacctcgcctcccgtagtaccatccctcgcccgcgaccgcgcagaggacctgcaggccgagtcccgcgccatgacccgagccgctgccgccaccgtctacacccccgagctactcgcctcccgctacggctcccaacctttccaggtggcgatgagagcggcggaggtgctctcgaagctgggggcattcgggctaaagctgctgctcgaccagcagaggggggagtcgtcctcgtcagcgaagaggcgtgccagggcggtcgagctgcgaactgtactgacaaggcttggcccgacgttcgtcaagattgggcagggtttgtccacgcggcctgacctctgcccgactgagtatctcgaggagctctccgagctgcaggattctctccccacatttccagatgaagaggcatttgcctgtatcgagagggagcttggctttcctcttgattcaatgtactcagcaatgtcaccttcaccgatagctgcagcaagtttaggtcaagtttacaaggcacggttgaaatactctgagcagttggtagctgtcaaggtgcaaagacctggcatcgaggatgccataggccgtgatttttacctactgaggggacttggttttctaataaataagtatgttgacattataactactgatgcagttgctctgatagatgaatttgcccgaagagttttccaagagcttaattatgtccaggaaggccaaaacgcacgaaggtttaaaaaattatatgctgacaagcaagacatattggtccctgatatattttgggattacacaagtgcaaaggtactgacaatggaatggattgagggtgtaaagcttaatcaacaagctgccattgaaggccaaggcttgaaggtcctggacttggtaaacattggtatacagtgtagcctaaggcagctactagagtatggttactttcatgctgacccgcatcctggtaatattttggcaacacctgaagggaagcttgcttttcttgattttggcatgatgagtgaaaccccagaggatgcaagggtagccatcatagggcatgtcgttcacatggtcaatcgggattatgaagcgatggctcgtgattattatgcacttgattttctgaaacctgaagtggatgtatccccaatcgtacctgccctcaagattttttttgatgatgctttggattcaacagtgagtgagctaaactttaaaaccatagttgatggcttaggcgctgttctttatcagtacccattcaatgtaccggcctactatgcgttgatactgcgatcactcactgtgctggaaggtctggcactctatgccgatcctaattttaaggtgcttgctgcctcatatccttactttgctaaaagattactcacagatcccaatccatatctcagagatgctctgattgagctgctattcaaggatgaaaaattcaggtggaataggcttgaaaatcttcttgttcaaggacgccaggatagagagtttgtagcgaaggatgctctacaaccggttttgaaacttctacttggtccagatggggagaatttaagagtgctagttgtgaaagaagcggttcgtgtcacagaagccatcaccttcggaacactgattgattcatacaacgcagctccagaatttttgaagccattaatatccaatggcaatccagctggaccatttaagataagtgatgttgagcgggaacaaatgttggagctacgagacactgttctcagaatatggggtcttctgagatcctctgatacctttgatccaagtcttttgcagccaattgtacaggtgctacaagagcgtgaagcccgtatgtttggttctcgtattgctggaggtgtctcgcagcgccttgcagcccgcttgctgcagcagctgctcaggatcccacctgcacctgttcctggatcttcttagaatctttgtagataggctcacactaaaccatgtaaattgacacgatactttctgcaccaaaaggaaaaaaaagaaaagcaactataataatcagtaggtaaaaaaaaaaaaaaaaaagcttatcgataccgtcga

SEQ ID NO: 66488 - protein, 720 aa, Triticum aestivum
  peptide (1)..(720): Ceres Seq. ID no. 15222246
  misc_feature (213)..(332): Pfam Name: ABC1 family Pfam Description: ABC1 family
  misc_feature (97)..(706): Homolog of NCBI NO: 33241332 NR Description: Predicted protein kinase
  misc_feature (87)..(706): Homolog of NCBI NO: 33867054 NR Description: possible protein kinase: ABC1 family
  misc_feature (87)..(713): Homolog of NCBI NO: 33864536 NR Description: possible protein kinase:ABC1 family
  misc_feature (103)..(601): Homolog of NCBI NO: 37522693 NR Description: hypothetical protein glr3124 [Gloeobacter
  misc_feature (77)..(717): Homolog of NCBI NO: 16331408 NR Description: ABC1-like [Synechocystis sp. PCC 6803]
  misc_feature (102)..(709): Homolog of NCBI NO: 17232452 NR Description: hypothetical protein [Nostoc sp. PCC 7120]
  misc_feature (67)..(715): Homolog of NCBI NO: 22298493 NR Description: ORF_ID:tll0950~hypothetical protein
  misc_feature (82)..(720): Homolog of NCBI NO: 23042448 NR Description: hypothetical protein [Trichodesmium erythraeum
  misc_feature (153)..(717): Homolog of NCBI NO: 14532490 NR Description: At1g79600/F20B17_3 [Arabidopsis thaliana]
  misc_feature (40)..(717): Homolog of NCBI NO: 18412437 NR Description: expressed protein [Arabidopsis thaliana]
PTSHLRSTTPSSSSRAAMAACTPATAAVSFSLPSYPRRLRRRPSLLRAASTAAPPSPDLSIQLSPRPSPRTSPPVVPSLARDRAEDLQAESRAMTRAAAATVYTPELLASRYGSQPFQVAMRAAEVLSKLGAFGLKLLLDQQRGESSSSAKRRARAVELRTVLTRLGPTFVKIGQGLSTRPDLCPTEYLEELSELQDSLPTFPDEEAFACIERELGFPLDSMYSAMSPSPIAAASLGQVYKARLKYSEQLVAVKVQRPGIEDAIGRDFYLLRGLGFLINKYVDIITTDAVALIDEFARRVFQELNYVQEGQNARRFKKLYADKQDILVPDIFWDYTSAKVLTMEWIEGVKLNQQAAIEGQGLKVLDLVNIGIQCSLRQLLEYGYFHADPHPGNILATPEGKLAFLDFGMMSETPEDARVAIIGHVVHMVNRDYEAMARDYYALDFLKPEVDVSPIVPALKIFFDDALDSTVSELNFKTIVDGLGAVLYQYPFNVPAYYALILRSLTVLEGLALYADPNFKVLAASYPYFAKRLLTDPNPYLRDALIELLFKDEKFRWNRLENLLVQGRQDREFVAKDALQPVLKLLLGPDGENLRVLVVKEAVRVTEAITFGTLIDSYNAAPEFLKPLISNGNPAGPFKISDVEREQMLELRDTVLRIWGLLRSSDTFDPSLLQPIVQVLQEREARMFGSRIAGGVSQRLAARLLQQLLRIPPAPVPGSS

SEQ ID NO: 66489 - protein, 703 aa, Triticum aestivum
  peptide (1)..(703): Ceres Seq. ID no. 15222247
  misc_feature (196)..(315): Pfam Name: ABC1 family Pfam Description: ABC1 family
  misc_feature (80)..(689): Homolog of NCBI NO: 33241332 NR Description: Predicted protein kinase
  misc_feature (70)..(689): Homolog of NCBI NO: 33867054 NR Description: possible protein kinase: ABC1 family
  misc_feature (70)..(696): Homolog of NCBI NO: 33864536 NR Description: possible protein kinase:ABC1 family
  misc_feature (86)..(584): Homolog of NCBI NO: 37522693 NR Description: hypothetical protein glr3124 [Gloeobacter
  misc_feature (60)..(700): Homolog of NCBI NO: 16331408 NR Description: ABC1-like [Synechocystis sp. PCC 6803]
  misc_feature (85)..(692): Homolog of NCBI NO: 17232452 NR Description: hypothetical protein [Nostoc sp. PCC 7120]
  misc_feature (50)..(698): Homolog of NCBI NO: 22298493 NR Description: ORF_ID:tll0950~hypothetical protein
  misc_feature (65)..(703): Homolog of NCBI NO: 23042448 NR Description: hypothetical protein [Trichodesmium erythraeum
  misc_feature (136)..(700): Homolog of NCBI NO: 14532490 NR Description: At1g79600/F20B17_3 [Arabidopsis thaliana]
  misc_feature (23)..(700): Homolog of NCBI NO: 18412437 NR Description: expressed protein [Arabidopsis thaliana]
MAACTPATAAVSFSLPSYPRRLRRRPSLLRAASTAAPPSPDLSIQLSPRPSPRTSPPVVPSLARDRAEDLQAESRAMTRAAAATVYTPELLASRYGSQPFQVAMRAAEVLSKLGAFGLKLLLDQQRGESSSSAKRRARAVELRTVLTRLGPTFVKIGQGLSTRPDLCPTEYLEELSELQDSLPTFPDEEAFACIERELGFPLDSMYSAMSPSPIAAASLGQVYKARLKYSEQLVAVKVQRPGIEDAIGRDFYLLRGLGFLINKYVDIITTDAVALIDEFARRVFQELNYVQEGQNARRFKKLYADKQDILVPDIFWDYTSAKVLTMEWIEGVKLNQQAAIEGQGLKVLDLVNIGIQCSLRQLLEYGYFHADPHPGNILATPEGKLAFLDFGMMSETPEDARVAIIGHVVHMVNRDYEAMARDYYALDFLKPEVDVSPIVPALKIFFDDALDSTVSELNFKTIVDGLGAVLYQYPFNVPAYYALILRSLTVLEGLALYADPNFKVLAASYPYFAKRLLTDPNPYLRDALIELLFKDEKFRWNRLENLLVQGRQDREFVAKDALQPVLKLLLGPDGENLRVLVVKEAVRVTEAITFGTLIDSYNAAPEFLKPLISNGNPAGPFKISDVEREQMLELRDTVLRIWGLLRSSDTFDPSLLQPIVQVLQEREARMFGSRIAGGVSQRLAARLLQQLLRIPPAPVPGSS

SEQ ID NO: 66490 - protein, 627 aa, Triticum aestivum
  peptide (1)..(627): Ceres Seq. ID no. 15222248
  misc_feature (120)..(239): Pfam Name: ABC1 family Pfam Description: ABC1 family
  misc_feature (4)..(613): Homolog of NCBI NO: 33241332 NR Description: Predicted protein kinase
  misc_feature (1)..(613): Homolog of NCBI NO: 33867054 NR Description: possible protein kinase: ABC1 family
  misc_feature (1)..(620): Homolog of NCBI NO: 33864536 NR Description: possible protein kinase:ABC1 family
  misc_feature (10)..(508): Homolog of NCBI NO: 37522693 NR Description: hypothetical protein glr3124 [Gloeobacter
  misc_feature (1)..(624): Homolog of NCBI NO: 16331408 NR Description: ABC1-like [Synechocystis sp. PCC 6803]
  misc_feature (9)..(616): Homolog of NCBI NO: 17232452 NR Description: hypothetical protein [Nostoc sp. PCC 7120]
  misc_feature (1)..(622): Homolog of NCBI NO: 22298493 NR Description: ORF_ID:tll0950~hypothetical protein
  misc_feature (1)..(627): Homolog of NCBI NO: 23042448 NR Description: hypothetical protein [Trichodesmium erythraeum
  misc_feature (60)..(624): Homolog of NCBI NO: 14532490 NR Description: At1g79600/F20B17_3 [Arabidopsis thaliana]
  misc_feature (1)..(624): Homolog of NCBI NO: 18412437 NR Description: expressed protein [Arabidopsis thaliana]
MTRAAAATVYTPELLASRYGSQPFQVAMRAAEVLSKLGAFGLKLLLDQQRGESSSSAKRRARAVELRTVLTRLGPTFVKIGQGLSTRPDLCPTEYLEELSELQDSLPTFPDEEAFACIERELGFPLDSMYSAMSPSPIAAASLGQVYKARLKYSEQLVAVKVQRPGIEDAIGRDFYLLRGLGFLINKYVDIITTDAVALIDEFARRVFQELNYVQEGQNARRFKKLYADKQDILVPDIFWDYTSAKVLTMEWIEGVKLNQQAAIEGQGLKVLDLVNIGIQCSLRQLLEYGYFHADPHPGNILATPEGKLAFLDFGMMSETPEDARVAIIGHVVHMVNRDYEAMARDYYALDFLKPEVDVSPIVPALKIFFDDALDSTVSELNFKTIVDGLGAVLYQYPFNVPAYYALILRSLTVLEGLALYADPNFKVLAASYPYFAKRLLTDPNPYLRDALIELLFKDEKFRWNRLENLLVQGRQDREFVAKDALQPVLKLLLGPDGENLRVLVVKEAVRVTEAITFGTLIDSYNAAPEFLKPLISNGNPAGPFKISDVEREQMLELRDTVLRIWGLLRSSDTFDPSLLQPIVQVLQEREARMFGSRIAGGVSQRLAARLLQQLLRIPPAPVPGSS

SEQ ID NO: 66491 - DNA, 1955 bp, Triticum aestivum
  misc_feature (1)..(1955): Ceres Seq. ID no. 15170099
atagccagatccatagggttcttctttttcttccccggcccaccgttcctctacagatcgaagtaggtcgcagctacctcgatcttctcacccatggcgtcctcgaacaagcactggccgagcatgttcaggtccaaccctgctgcctgcgacttccaccaccagcctgacatgagcaacacccacaccaggtcctccttgatctcctcagggcttgaccaggagatgacaaggagcccaggggagacgaaaccgcggtggaacccccggccggagcagatctggatcctggaggggatcttcaactccggcgtcgtcaaccctccccgcgacgagatccgccgcatccgcctccgcctgcaggagtacggccacgtcgccgacgccaacgtcttctactggttccagaaccgcaagtcccgcaccaagaacaagcttcgcgccgccgcggccgcagccgctgcccagggccaacagcctaccggcggtcgcgccgccgtgatgcgcgcgtccctagcggtgaggatgcctgcgccggctccggtgacgccgccgaggcgtttcctcgcgccgtccggcacgctccaggcgccgacgtcctcgtcatcgtcctcctccgaccgctcctccggatccagcaggtcggtgaccatgaaaacgacggccatggcgtctgcggcggcagcctccctgtcccagccgatgctgccgctgtcgaccgccgccatcgacctgttcgccccggctccaccactgacaccgtcgcctgggctgtccgcgtgccagctctactaccagctgcagaacaatcccatgtcgtcgatgccgacgccgacgccggtgcgcgagctggtaacctccatccctgagcagccgccgctccacctgcagtggccgccgcagagccagagccagtacctgccagccaccgagctcggcggcttcctcggctcgcatgcccacacgcatccgacggcggtctcccctggcgcgctcctcctgcctggcctctgcaccgactcggcgttagggcagcatgagatcgtggacgacatgagctcctccaagctgggtctcggcgtcggcggccagttcaacttcaacgtggcggcggatccaccctccgacgcggtgagcgccgtgattaaggacgacgagaaggcaaggctggggtttctgcaccactacggcctcggcgccaccgccggcgcggacgtcagtgcggccgtcctcccatgcactccgcctaccggcaacgccgccgcaagctctgcattcaccgatcagctgcaagggctcctggacgccgggctgctggccggaggaggcgcgccgacgccaatggcgacggtagtgaccgtggccgccgggcggccgggcgcccccgtgcaatgctacagcgtgccggcgatggtgcgcatggacgtgaaggcgctgttcggcccggcggccgtgatgctcgggcagaccggcgaggcaatccccgtcgacggggccggggtcaccgccgagcccctccagaacggcgcctgctactacgtcctgatgtgagactcgctgaagatcgatcgccgatgcctgtgtacgtcttgggtcaagggcgccgcgcgggagaatttgggcaaggcgaattatagttatctctacctagttgctacaaggaaaaaaagtccttatatatagctagctgctagtatattttgctttggtcagtatgtggatctactatagcttctaatcgagcgtcttgtgttactcttattttagtgaggatatcttctaacatggacaatagtgttggcttaatttcctgttgcaataagctgccccatgttgctagtactattcagtggtggtattaagatttaagcatcctcttatatttttaaaaaaatatttaaggttggctaacatgcatgtatgagatgagatgaactttgatgagaggcatgagg

SEQ ID NO: 66492 - protein, 485 aa, Triticum aestivum
  peptide (1)..(485): Ceres Seq. ID no. 15170100
  misc_feature (53)..(115): Pfam Name: Homeobox domain Pfam Description: Homeobox domain
  misc_feature (50)..(135): Homolog of NCBI NO: 40253638 NR Description: putative homeodomain protein
  misc_feature (361)..(484): Homolog of NCBI NO: 40253638 NR Description: putative homeodomain protein
  misc_feature (1)..(116): Homolog of NCBI NO: 15237353 NR Description: homeodomain protein [Arabidopsis thaliana]
  misc_feature (1)..(116): Homolog of NCBI NO: 25408317 NR Description: probable homeodomain transcription factor
  misc_feature (444)..(484): Homolog of NCBI NO: 37955180 NR Description: WOX8 protein [Arabidopsis thaliana]
  misc_feature (1)..(116): Homolog of NCBI NO: 37955180 NR Description: WOX8 protein [Arabidopsis thaliana]
  misc_feature (444)..(484): Homolog of NCBI NO: 30685885 NR Description: homeodomain transcription factor -related
  misc_feature (1)..(116): Homolog of NCBI NO: 30685885 NR Description: homeodomain transcription factor -related
  misc_feature (377)..(485): Homolog of NCBI NO: 34910936 NR Description: OSJNBb0063G05.13 [Oryza sativa (japonica
  misc_feature (1)..(413): Homolog of NCBI NO: 34910936 NR Description: OSJNBb0063G05.13 [Oryza sativa (japonica
MASSNKHWPSMFRSNPAACDFHHQPDMSNTHTRSSLISSGLDQEMTRSPGETKPRWNPRPEQIWILEGIFNSGVVNPPRDEIRRIRLRLQEYGHVADANVFYWFQNRKSRTKNKLRAAAAAAAAQGQQPTGGRAAVMRASLAVRMPAPAPVTPPRRFLAPSGTLQAPTSSSSSSSDRSSGSSRSVTMKTTAMASAAAASLSQPMLPLSTAAIDLFAPAPPLTPSPGLSACQLYYQLQNNPMSSMPTPTPVRELVTSIPEQPPLHLQWPPQSQSQYLPATELGGFLGSHAHTHPTAVSPGALLLPGLCTDSALGQHEIVDDMSSSKLGLGVGGQFNFNVAADPPSDAVSAVIKDDEKARLGFLHHYGLGATAGADVSAAVLPCTPPTGNAAASSAFTDQLQGLLDAGLLAGGGAPTPMATVVTVAAGRPGAPVQCYSVPAMVRMDVKALFGPAAVMLGQTGEAIPVDGAGVTAEPLQNGACYYVLM

SEQ ID NO: 66493 - protein, 475 aa, Triticum aestivum
  peptide (1)..(475): Ceres Seq. ID no. 15170101
  misc_feature (43)..(105): Pfam Name: Homeobox domain Pfam Description: Homeobox domain
  misc_feature (40)..(125): Homolog of NCBI NO: 40253638 NR Description: putative homeodomain protein
  misc_feature (351)..(474): Homolog of NCBI NO: 40253638 NR Description: putative homeodomain protein
  misc_feature (1)..(106): Homolog of NCBI NO: 15237353 NR Description: homeodomain protein [Arabidopsis thaliana]
  misc_feature (1)..(106): Homolog of NCBI NO: 25408317 NR Description: probable homeodomain transcription factor
  misc_feature (434)..(474): Homolog of NCBI NO: 37955180 NR Description: WOX8 protein [Arabidopsis thaliana]
  misc_feature (1)..(106): Homolog of NCBI NO: 37955180 NR Description: WOX8 protein [Arabidopsis thaliana]
  misc_feature (434)..(474): Homolog of NCBI NO: 30685885 NR Description: homeodomain transcription factor -related
  misc_feature (1)..(106): Homolog of NCBI NO: 30685885 NR Description: homeodomain transcription factor -related
  misc_feature (367)..(475): Homolog of NCBI NO: 34910936 NR Description: OSJNBb0063G05.13 [Oryza sativa (japonica
  misc_feature (1)..(403): Homolog of NCBI NO: 34910936 NR Description: OSJNBb0063G05.13 [Oryza sativa (japonica
MFRSNPAACDFHHQPDMSNTHTRSSLISSGLDQEMTRSPGETKPRWNPRPEQIWILEGIFNSGVVNPPRDEIRRIRLRLQEYGHVADANVFYWFQNRKSRTKNKLRAAAAAAAAQGQQPTGGRAAVMRASLAVRMPAPAPVTPPRRFLAPSGTLQAPTSSSSSSSDRSSGSSRSVTMKTTAMASAAAASLSQPMLPLSTAAIDLFAPAPPLTPSPGLSACQLYYQLQNNPMSSMPTPTPVRELVTSIPEQPPLHLQWPPQSQSQYLPATELGGFLGSHAHTHPTAVSPGALLLPGLCTDSALGQHEIVDDMSSSKLGLGVGGQFNFNVAADPPSDAVSAVIKDDEKARLGFLHHYGLGATAGADVSAAVLPCTPPTGNAAASSAFTDQLQGLLDAGLLAGGGAPTPMATVVTVAAGRPGAPVQCYSVPAMVRMDVKALFGPAAVMLGQTGEAIPVDGAGVTAEPLQNGACYYVLM

SEQ ID NO: 66494 - protein, 459 aa, Triticum aestivum
  peptide (1)..(459): Ceres Seq. ID no. 15170102
  misc_feature (27)..(89): Pfam Name: Homeobox domain Pfam Description: Homeobox domain
  misc_feature (24)..(109): Homolog of NCBI NO: 40253638 NR Description: putative homeodomain protein
  misc_feature (335)..(458): Homolog of NCBI NO: 40253638 NR Description: putative homeodomain protein
  misc_feature (1)..(90): Homolog of NCBI NO: 15237353 NR Description: homeodomain protein [Arabidopsis thaliana]
  misc_feature (1)..(90): Homolog of NCBI NO: 25408317 NR Description: probable homeodomain transcription factor
  misc_feature (418)..(458): Homolog of NCBI NO: 37955180 NR Description: WOX8 protein [Arabidopsis thaliana]
  misc_feature (1)..(90): Homolog of NCBI NO: 37955180 NR Description: WOX8 protein [Arabidopsis thaliana]
  misc_feature (418)..(458): Homolog of NCBI NO: 30685885 NR Description: homeodomain transcription factor -related
  misc_feature (1)..(90): Homolog of NCBI NO: 30685885 NR Description: homeodomain transcription factor -related
  misc_feature (351)..(459): Homolog of NCBI NO: 34910936 NR Description: OSJNBb0063G05.13 [Oryza sativa (japonica
  misc_feature (1)..(387): Homolog of NCBI NO: 34910936 NR Description: OSJNBb0063G05.13 [Oryza sativa (japonica
MSNTHTRSSLISSGLDQEMTRSPGETKPRWNPRPEQIWILEGIFNSGVVNPPRDEIRRIRLRLQEYGHVADANVFYWFQNRKSRTKNKLRAAAAAAAAQGQQPTGGRAAVMRASLAVRMPAPAPVTPPRRFLAPSGTLQAPTSSSSSSSDRSSGSSRSVTMKTTAMASAAAASLSQPMLPLSTAAIDLFAPAPPLTPSPGLSACQLYYQLQNNPMSSMPTPTPVRELVTSIPEQPPLHLQWPPQSQSQYLPATELGGFLGSHAHTHPTAVSPGALLLPGLCTDSALGQHEIVDDMSSSKLGLGVGGQFNFNVAADPPSDAVSAVIKDDEKARLGFLHHYGLGATAGADVSAAVLPCTPPTGNAAASSAFTDQLQGLLDAGLLAGGGAPTPMATVVTVAAGRPGAPVQCYSVPAMVRMDVKALFGPAAVMLGQTGEAIPVDGAGVTAEPLQNGACYYVLM

SEQ ID NO: 66495 - DNA, 1294 bp, Triticum aestivum
  misc_feature (1)..(1294): Ceres Seq. ID no. 15225240
cccgtctccgactgcgccgccgccccctcccccagcctcgcttcgctcccgcggggatggaaaaccgcgatggttcctcactgccagactttcttgagctccagcgcacccgtgttctctgcaaggccgatgcccccactcatacagaagggtttcaatactcgggtgcttttgctgctatgggagttgacactagtgtttcagttgagaagttctgcaagaactttaaaatcgagataaatcgacttacagatgaggatatggagtttgatatgattggcgttgatgcatcgatagctaatgctttccggagaatcctcattgcagaggttcctacaatggccattgagaaagtcttcatggttgacaatacctcagttatagcagatgaggtcctttcacaccgactaggccttattccacttgatgctgatccaaggctttttgattatatctctgatgatgtcccaaatgaaaggaacactattgtgtacaaactgcatgtttcatgtgaaaagggttcccaaaggcttacagttaagtctggtcaattggagtggttgccagaaggcagtcaattaactatggcatctcctgcgcaatctggggacaatcagaggacctacacatcctttggtcaaagccaacagaatacctctgaaaggcctctcggtgtgaagtataatgacataacaattgccaggcttgggccaggacaggctattgagcttgaggcacatgctgttaagggagtggggaaagttcatgcgaagtggtctccagttgctacagcctggtacaggatgctccccgaggttgttcttctcaaagaaattaaaaatggtgatgcagaggagctagtgaaaagatgcccagttaatgtttttgacattgaagacctgggaaagggggagaagagagcagttgttgcaaagccaagatcatgcaccctttgtagggaatgtgtcagactggctgacgatcaagtagagctacggcgtgttagagaccacttcatttttacaatcgagtccaccggagctcttccgccagaggtgctcttcacagaggccgtgaagatccttgaggagaagtgcgagcgagtgatatccgaactttcctgagcctgatataaagttttcagtactgttctgatgtagtttttctattgctatgttgtgtcgaggacgaaagcttagtgtactaatataggttactgtgaaacttctgtatccaatattctggagtcacattcagctaatttattactgagctggtatatgcagcagtcctg

SEQ ID NO: 66496 - protein, 373 aa, Triticum aestivum
  peptide (1)..(373): Ceres Seq. ID no. 15225241
  misc_feature (118)..(259): Pfam Name: RNA polymerase Rpb3/RpoA insert domain Pfam Description: RNA polymerase Rpb3/RpoA insert domain
  misc_feature (31)..(372): Homolog of NCBI NO: 6677787 NR Description: RNA polymerase 1-1; RNA polymerase 1-1 (40 kDa
  misc_feature (47)..(372): Homolog of NCBI NO: 14198113 NR Description: POLR1C protein [Homo sapiens]
  misc_feature (35)..(372): Homolog of NCBI NO: 1914859 NR Description: homologous to 40kD subunit of RNA-polymerase I
  misc_feature (31)..(372): Homolog of NCBI NO: 19113623 NR Description: dna-directed rna polymerases i and iii
  misc_feature (31)..(372): Homolog of NCBI NO: 3914807 NR Description: DNA-directed RNA polymerase I 40 kDa polypeptide
  misc_feature (35)..(372): Homolog of NCBI NO: 34193909 NR Description: RNA polymerase 1-1 [Danio rerio]
  misc_feature (25)..(368): Homolog of NCBI NO: 514322 NR Description: RNA polymerase subunit
  misc_feature (25)..(368): Homolog of NCBI NO: 15219820 NR Description: RNA polymerase subunit [Arabidopsis thaliana]
  misc_feature (25)..(368): Homolog of NCBI NO: 21592304 NR Description: RNA polymerase subunit [Arabidopsis thaliana]
  misc_feature (25)..(373): Homolog of NCBI NO: 15219773 NR Description: RNA polymerase subunit [Arabidopsis thaliana]
RLRLRRRPLPQPRFAPAGMENRDGSSLPDFLELQRTRVLCKADAPTHTEGFQYSGAFAAMGVDTSVSVEKFCKNFKIEINRLTDEDMEFDMIGVDASIANAFRRILIAEVPTMAIEKVFMVDNTSVIADEVLSHRLGLIPLDADPRLFDYISDDVPNERNTIVYKLHVSCEKGSQRLTVKSGQLEWLPEGSQLTMASPAQSGDNQRTYTSFGQSQQNTSERPLGVKYNDITIARLGPGQAIELEAHAVKGVGKVHAKWSPVATAWYRMLPEVVLLKEIKNGDAEELVKRCPVNVFDIEDLGKGEKRAVVAKPRSCTLCRECVRLADDQVELRRVRDHFIFTIESTGALPPEVLFTEAVKILEEKCERVISELS

SEQ ID NO: 66497 - protein, 355 aa, Triticum aestivum
  peptide (1)..(355): Ceres Seq. ID no. 15225242
  misc_feature (100)..(241): Pfam Name: RNA polymerase Rpb3/RpoA insert domain Pfam Description: RNA polymerase Rpb3/RpoA insert domain
  misc_feature (13)..(354): Homolog of NCBI NO: 6677787 NR Description: RNA polymerase 1-1; RNA polymerase 1-1 (40 kDa
  misc_feature (29)..(354): Homolog of NCBI NO: 14198113 NR Description: POLR1C protein [Homo sapiens]
  misc_feature (17)..(354): Homolog of NCBI NO: 1914859 NR Description: homologous to 40kD subunit of RNA-polymerase I
  misc_feature (13)..(354): Homolog of NCBI NO: 19113623 NR Description: dna-directed rna polymerases i and iii
  misc_feature (13)..(354): Homolog of NCBI NO: 3914807 NR Description: DNA-directed RNA polymerase I 40 kDa polypeptide
  misc_feature (17)..(354): Homolog of NCBI NO: 34193909 NR Description: RNA polymerase 1-1 [Danio rerio]
  misc_feature (7)..(350): Homolog of NCBI NO: 514322 NR Description: RNA polymerase subunit
  misc_feature (7)..(350): Homolog of NCBI NO: 15219820 NR Description: RNA polymerase subunit [Arabidopsis thaliana]
  misc_feature (7)..(350): Homolog of NCBI NO: 21592304 NR Description: RNA polymerase subunit [Arabidopsis thaliana]
  misc_feature (7)..(355): Homolog of NCBI NO: 15219773 NR Description: RNA polymerase subunit [Arabidopsis thaliana]
MENRDGSSLPDFLELQRTRVLCKADAPTHTEGFQYSGAFAAMGVDTSVSVEKFCKNFKIEINRLTDEDMEFDMIGVDASIANAFRRILIAEVPTMAIEKVFMVDNTSVIADEVLSHRLGLIPLDADPRLFDYISDDVPNERNTIVYKLHVSCEKGSQRLTVKSGQLEWLPEGSQLTMASPAQSGDNQRTYTSFGQSQQNTSERPLGVKYNDITIARLGPGQAIELEAHAVKGVGKVHAKWSPVATAWYRMLPEVVLLKEIKNGDAEELVKRCPVNVFDIEDLGKGEKRAVVAKPRSCTLCRECVRLADDQVELRRVRDHFIFTIESTGALPPEVLFTEAVKILEEKCERVISELS

SEQ ID NO: 66498 - protein, 314 aa, Triticum aestivum
  peptide (1)..(314): Ceres Seq. ID no. 15225243
  misc_feature (59)..(200): Pfam Name: RNA polymerase Rpb3/RpoA insert domain Pfam Description: RNA polymerase Rpb3/RpoA insert domain
  misc_feature (1)..(313): Homolog of NCBI NO: 6677787 NR Description: RNA polymerase 1-1; RNA polymerase 1-1 (40 kDa
  misc_feature (1)..(313): Homolog of NCBI NO: 14198113 NR Description: POLR1C protein [Homo sapiens]
  misc_feature (1)..(313): Homolog of NCBI NO: 1914859 NR Description: homologous to 40kD subunit of RNA-polymerase I
  misc_feature (1)..(313): Homolog of NCBI NO: 19113623 NR Description: dna-directed rna polymerases i and iii
  misc_feature (1)..(313): Homolog of NCBI NO: 3914807 NR Description: DNA-directed RNA polymerase I 40 kDa polypeptide
  misc_feature (1)..(313): Homolog of NCBI NO: 34193909 NR Description: RNA polymerase 1-1 [Danio rerio]
  misc_feature (1)..(309): Homolog of NCBI NO: 514322 NR Description: RNA polymerase subunit
  misc_feature (1)..(309): Homolog of NCBI NO: 15219820 NR Description: RNA polymerase subunit [Arabidopsis thaliana]
  misc_feature (1)..(309): Homolog of NCBI NO: 21592304 NR Description: RNA polymerase subunit [Arabidopsis thaliana]
  misc_feature (1)..(314): Homolog of NCBI NO: 15219773 NR Description: RNA polymerase subunit [Arabidopsis thaliana]
MGVDTSVSVEKFCKNFKIEINRLTDEDMEFDMIGVDASIANAFRRILIAEVPTMAIEKVFMVDNTSVIADEVLSHRLGLIPLDADPRLFDYISDDVPNERNTIVYKLHVSCEKGSQRLTVKSGQLEWLPEGSQLTMASPAQSGDNQRTYTSFGQSQQNTSERPLGVKYNDITIARLGPGQAIELEAHAVKGVGKVHAKWSPVATAWYRMLPEVVLLKEIKNGDAEELVKRCPVNVFDIEDLGKGEKRAVVAKPRSCTLCRECVRLADDQVELRRVRDHFIFTIESTGALPPEVLFTEAVKILEEKCERVISELS

SEQ ID NO: 66499 - DNA, 1423 bp, Triticum aestivum
  misc_feature (1)..(1423): Ceres Seq. ID no. 13658993
agtacgagtcctactaaaactcttgtcatgtcctgggcaataaataggccgatcaaccaccgcccaccgcaccagaagcaaacaccgccggcctgccatggcgcgactgccggacaagattccggcgagccaattcaacgccgccctatccttcatacaacatatcaaagccggcctcgcgtccagccagaccatccacgcagagctcctccacctcctcgcgtgcttgggcaggggcgagaccgccgacacccacgccgtcctggccagggcggacgccatcctccggggccatcccgacctcctccagcgcttcgacgcctttctcggccgtcccagccaccaccaagctgccaaacccgtccgtgaagaccctgtcgccgccgcgccgccgccgaagcggcccaagagggagcaccgccgcacggtcgccgagtgcgccgggcccatgcggttcttggagcgggtgaagatggcggacgccggactctacgacatgctcctggtgcttctgttcaacgtggagatggaggggacgctgaacgcgcatcaaatctacgcgaaggccctcgaggttttcggctccgccgacagccctctcctccgcggcttcacggagttcctgccgctgccgacggccgggcgtgactttctgacgcggcgccgcgcaaaggaggagccggagcacggaccgaagcgcaaggccgtccccgccggcaagccgagcccgagcgcggcaaagaaaccccgcgccgaccacgaccggaagacgaagagcggcagtgtctccgcgtttagggacgcgtgggagttcgagaccacctactcgaagctggcggtcacgctaagacgcaccgagaaatccctggaagagctcgagccaaggaaggagtcgccggaagaagtcgagccggaggcggcgccgggacaccatgggcggccgcgcacgctggagcaactctaccctggccgcgagtgccaggaggtcctccaggagatgtatggcggcatgtgggggcagatgcgggtggcgctcgaggacggcgcgcgcaccgaggtggcgctgcggacgatattgcgcaggctgacgaagctggagcaggtggccgtgaagatggcgatggggcggcgcgatcccgcccgcgtcgaggcccgagtgaagctgcttgtcttagagcggcgggatggcgcccacgccgatggcgggatgaacaagcttaatgtagagttgtagcctgaccgtgtggtggttcttcgaaaggagcggcggcacgtacattgtcgcggtgacccggccgtgcgtgccaccggccggcatgtcgtgaagttgaagaccaagattatcgttgctttgagacgttaatttactttagctttttttcagtttggtcagtccatttcttggccgtcgatttttgctccg

SEQ ID NO: 66500 - protein, 378 aa, Triticum aestivum
  peptide (1)..(378): Ceres Seq. ID no. 13658994
  misc_feature (207)..(349): Homolog of NCBI NO: 37533642 NR Description: hypothetical protein [Oryza sativa (japonica
  misc_feature (207)..(349): Homolog of NCBI NO: 20043077 NR Description: Hypothetical protein [Oryza sativa (japonica
MARLPDKIPASQFNAALSFIQHIKAGLASSQTIHAELLHLLACLGRGETADTHAVLARADAILRGHPDLLQRFDAFLGRPSHHQAAKPVREDPVAAAPPPKRPKREHRRTVAECAGPMRFLERVKMADAGLYDMLLVLLFNVEMEGTLNAHQIYAKALEVFGSADSPLLRGFTEFLPLPTAGRDFLTRRRAKEEPEHGPKRKAVPAGKPSPSAAKKPRADHDRKTKSGSVSAFRDAWEFETTYSKLAVTLRRTEKSLEELEPRKESPEEVEPEAAPGHHGRPRTLEQLYPGRECQEVLQEMYGGMWGQMRVALEDGARTEVALRTILRRLTKLEQVAVKMAMGRRDPARVEARVKLLVLERRDGAHADGGMNKLNVEL

SEQ ID NO: 66501 - protein, 261 aa, Triticum aestivum
  peptide (1)..(261): Ceres Seq. ID no. 13658995
  misc_feature (90)..(232): Homolog of NCBI NO: 37533642 NR Description: hypothetical protein [Oryza sativa (japonica
  misc_feature (90)..(232): Homolog of NCBI NO: 20043077 NR Description: Hypothetical protein [Oryza sativa (japonica
MRFLERVKMADAGLYDMLLVLLFNVEMEGTLNAHQIYAKALEVFGSADSPLLRGFTEFLPLPTAGRDFLTRRRAKEEPEHGPKRKAVPAGKPSPSAAKKPRADHDRKTKSGSVSAFRDAWEFETTYSKLAVTLRRTEKSLEELEPRKESPEEVEPEAAPGHHGRPRTLEQLYPGRECQEVLQEMYGGMWGQMRVALEDGARTEVALRTILRRLTKLEQVAVKMAMGRRDPARVEARVKLLVLERRDGAHADGGMNKLNVEL

SEQ ID NO: 66502 - protein, 253 aa, Triticum aestivum
  peptide (1)..(253): Ceres Seq. ID no. 13658996
  misc_feature (82)..(224): Homolog of NCBI NO: 37533642 NR Description: hypothetical protein [Oryza sativa (japonica
  misc_feature (82)..(224): Homolog of NCBI NO: 20043077 NR Description: Hypothetical protein [Oryza sativa (japonica
MADAGLYDMLLVLLFNVEMEGTLNAHQIYAKALEVFGSADSPLLRGFTEFLPLPTAGRDFLTRRRAKEEPEHGPKRKAVPAGKPSPSAAKKPRADHDRKTKSGSVSAFRDAWEFETTYSKLAVTLRRTEKSLEELEPRKESPEEVEPEAAPGHHGRPRTLEQLYPGRECQEVLQEMYGGMWGQMRVALEDGARTEVALRTILRRLTKLEQVAVKMAMGRRDPARVEARVKLLVLERRDGAHADGGMNKLNVEL

SEQ ID NO: 66503 - DNA, 1725 bp, Triticum aestivum
  misc_feature (1)..(1725): Ceres Seq. ID no. 14307944
atcactatcgtgtaacttcgtacgttgccgactactttcaatggcggcctttgcaaagatcgccatggagtgcctgcacgatcccctcatctggctacttcttgcgtcggtggccttggtcatcctgcaaagacggcggctgaaactgaacccgccgccgctccctccaggccccaagccgctaccgatcatcggcaacctgatgatggcggaccagctgacccaccgtggcctggcggcgctggccaagcagtacggcgggttgctgcacctccgcctgggctcgctccgcgtcttcgcggtgtccaccccggagtacgcgcgcgaggtgctccaggcgcaggacagcgacttctggtaccgcccagcctccatcgccgtccgctacctcacctacggctgctccgacatggcgttcgcgcgcgacgggccctactggcgccagatgcgcaagctgtgcgtcaccaagctcttcagccgccggcgcgccgagacctggctggccgtgcgcgacgggtacggggagctcgcccgggccgtcggcaggtccagcggcgaggccgtgaacctcggcgagctcatcttcaagcacaccgttagcatcatcttccgggccgccttcggcgtgcgcgacgtccaaggactggacgagttcatccccatgttcaaggagttctccaagctcttagaggcgttccacgtcggtgacttcttcccttggctaagctggatgggccggcggggcttcgaccggcgccttcgcaccgtgcgcggcgctctaggaacgtttgtggacaagatcattgacgagcacgtgaggaggggcaagaaccccgacgacgccgacgctgacatggtagacggcctactcgcgctcctcgctgatgccaaccaagccagcggggaggacgacctccgcttcacccgcgacaacgttagggccatgatgatggacatgttgtttggcgggccggacacggtggggttcaccattgagtgggcgatggcagagatgatgcattgccctgacatccttctgcggctgcagcaggagctcgtcgacattgtggggcttgatcggactgttgacgaatcggaccttggcaagctccccttcctcaagtgtgtcatcaaggagacgctccgaatgcacccaccgatcccgattcacctccacgggaacaccaaagattgcgtcctcggtggctactccgtgcccaggggctcccgtgtctttatcaacgcgtgggcgatcaaccgcgacggcgaggcgtggaaggaccctaacgcgttccggccatcgaggttcatgccagatggggaagccaccgggctggatctcaagggcggctgctacgagctattgtcgttcggttcgggggggcgctcgtgcccagcacaggggcttggccagcacgccgtggagtttgccatcgcgcagcttgtgcatgggttcaactggaagctacccggtgacatgaaaccaacggagctcgacatgagcgacatgaacggtgtcactgtgtcccgcgccacacgactctatgcagttcccacaccccggctcaattgtcctttgtaatattaattagaacatcgagctctttgttgtgacgtattgtaggtggaactacttgccataagattgcgtgtcaggctttagatacaaacacgtggtacacaactacacaccatggaatatggagtgtgcaaccgccttcctcc

SEQ ID NO: 66504 - protein, 526 aa, Triticum aestivum
  peptide (1)..(526): Ceres Seq. ID no. 14307945
  misc_feature (55)..(514): Pfam Name: Cytochrome P450 Pfam Description: Cytochrome P450
  misc_feature (55)..(526): Homolog of NCBI NO: 5002354 NR Description: ferulate-5-hydroxylase
  misc_feature (32)..(524): Homolog of NCBI NO: 10197654 NR Description: cytochrome p450-dependent monooxygenase [Brassica
  misc_feature (27)..(524): Homolog of NCBI NO: 10197652 NR Description: cytochrome p450-dependent monooxygenase [Brassica
  misc_feature (32)..(526): Homolog of NCBI NO: 6688937 NR Description: ferulate-5-hydroxylase [Populus balsamifera
  misc_feature (27)..(524): Homolog of NCBI NO: 10197650 NR Description: cytochrome p450-dependent monooxygenase [Brassica
  misc_feature (25)..(526): Homolog of NCBI NO: 15234332 NR Description: cytochrome P450 84A1 / ferulate-5-hydroxylase
  misc_feature (25)..(526): Homolog of NCBI NO: 12578901 NR Description: ferulate-5-hydroxylase [Arabidopsis thaliana]
  misc_feature (25)..(526): Homolog of NCBI NO: 12578893 NR Description: ferulate-5-hydroxylase [Arabidopsis thaliana]
  misc_feature (21)..(526): Homolog of NCBI NO: 5731998 NR Description: aldehyde 5-hydroxylase [Liquidambar styraciflua]
  misc_feature (20)..(526): Homolog of NCBI NO: 27476080 NR Description: Hypothetical protein [Oryza sativa (japonica
SLSCNFVRCRLLSMAAFAKIAMECLHDPLIWLLLASVALVILQRRRLKLNPPPLPPGPKPLPIIGNLMMADQLTHRGLAALAKQYGGLLHLRLGSLRVFAVSTPEYAREVLQAQDSDFWYRPASIAVRYLTYGCSDMAFARDGPYWRQMRKLCVTKLFSRRRAETWLAVRDGYGELARAVGRSSGEAVNLGELIFKHTVSIIFRAAFGVRDVQGLDEFIPMFKEFSKLLEAFHVGDFFPWLSWMGRRGFDRRLRTVRGALGTFVDKIIDEHVRRGKNPDDADADMVDGLLALLADANQASGEDDLRFTRDNVRAMMMDMLFGGPDTVGFTIEWAMAEMMHCPDILLRLQQELVDIVGLDRTVDESDLGKLPFLKCVIKETLRMHPPIPIHLHGNTKDCVLGGYSVPRGSRVFINAWAINRDGEAWKDPNAFRPSRFMPDGEATGLDLKGGCYELLSFGSGGRSCPAQGLGQHAVEFAIAQLVHGFNWKLPGDMKPTELDMSDMNGVTVSRATRLYAVPTPRLNCPL

SEQ ID NO: 66505 - protein, 513 aa, Triticum aestivum
  peptide (1)..(513): Ceres Seq. ID no. 14307946
  misc_feature (42)..(501): Pfam Name: Cytochrome P450 Pfam Description: Cytochrome P450
  misc_feature (42)..(513): Homolog of NCBI NO: 5002354 NR Description: ferulate-5-hydroxylase
  misc_feature (19)..(511): Homolog of NCBI NO: 10197654 NR Description: cytochrome p450-dependent monooxygenase [Brassica
  misc_feature (14)..(511): Homolog of NCBI NO: 10197652 NR Description: cytochrome p450-dependent monooxygenase [Brassica
  misc_feature (19)..(513): Homolog of NCBI NO: 6688937 NR Description: ferulate-5-hydroxylase [Populus balsamifera
  misc_feature (14)..(511): Homolog of NCBI NO: 10197650 NR Description: cytochrome p450-dependent monooxygenase [Brassica
  misc_feature (12)..(513): Homolog of NCBI NO: 15234332 NR Description: cytochrome P450 84A1 / ferulate-5-hydroxylase
  misc_feature (12)..(513): Homolog of NCBI NO: 12578901 NR Description: ferulate-5-hydroxylase [Arabidopsis thaliana]
  misc_feature (12)..(513): Homolog of NCBI NO: 12578893 NR Description: ferulate-5-hydroxylase [Arabidopsis thaliana]
  misc_feature (8)..(513): Homolog of NCBI NO: 5731998 NR Description: aldehyde 5-hydroxylase [Liquidambar styraciflua]
  misc_feature (7)..(513): Homolog of NCBI NO: 27476080 NR Description: Hypothetical protein [Oryza sativa (japonica
MAAFAKIAMECLHDPLIWLLLASVALVILQRRRLKLNPPPLPPGPKPLPIIGNLMMADQLTHRGLAALAKQYGGLLHLRLGSLRVFAVSTPEYAREVLQAQDSDFWYRPASIAVRYLTYGCSDMAFARDGPYWRQMRKLCVTKLFSRRRAETWLAVRDGYGELARAVGRSSGEAVNLGELIFKHTVSIIFRAAFGVRDVQGLDEFIPMFKEFSKLLEAFHVGDFFPWLSWMGRRGFDRRLRTVRGALGTFVDKIIDEHVRRGKNPDDADADMVDGLLALLADANQASGEDDLRFTRDNVRAMMMDMLFGGPDTVGFTIEWAMAEMMHCPDILLRLQQELVDIVGLDRTVDESDLGKLPFLKCVIKETLRMHPPIPIHLHGNTKDCVLGGYSVPRGSRVFINAWAINRDGEAWKDPNAFRPSRFMPDGEATGLDLKGGCYELLSFGSGGRSCPAQGLGQHAVEFAIAQLVHGFNWKLPGDMKPTELDMSDMNGVTVSRATRLYAVPTPRLNCPL

SEQ ID NO: 66506 - protein, 505 aa, Triticum aestivum
  peptide (1)..(505): Ceres Seq. ID no. 14307947
  misc_feature (34)..(493): Pfam Name: Cytochrome P450 Pfam Description: Cytochrome P450
  misc_feature (34)..(505): Homolog of NCBI NO: 5002354 NR Description: ferulate-5-hydroxylase
  misc_feature (11)..(503): Homolog of NCBI NO: 10197654 NR Description: cytochrome p450-dependent monooxygenase [Brassica
  misc_feature (6)..(503): Homolog of NCBI NO: 10197652 NR Description: cytochrome p450-dependent monooxygenase [Brassica
  misc_feature (11)..(505): Homolog of NCBI NO: 6688937 NR Description: ferulate-5-hydroxylase [Populus balsamifera
  misc_feature (6)..(503): Homolog of NCBI NO: 10197650 NR Description: cytochrome p450-dependent monooxygenase [Brassica
  misc_feature (4)..(505): Homolog of NCBI NO: 12578901 NR Description: ferulate-5-hydroxylase [Arabidopsis thaliana]
  misc_feature (4)..(505): Homolog of NCBI NO: 15234332 NR Description: cytochrome P450 84A1 / ferulate-5-hydroxylase
  misc_feature (4)..(505): Homolog of NCBI NO: 12578893 NR Description: ferulate-5-hydroxylase [Arabidopsis thaliana]
  misc_feature (1)..(505): Homolog of NCBI NO: 5731998 NR Description: aldehyde 5-hydroxylase [Liquidambar styraciflua]
  misc_feature (1)..(505): Homolog of NCBI NO: 27476080 NR Description: Hypothetical protein [Oryza sativa (japonica
MECLHDPLIWLLLASVALVILQRRRLKLNPPPLPPGPKPLPIIGNLMMADQLTHRGLAALAKQYGGLLHLRLGSLRVFAVSTPEYAREVLQAQDSDFWYRPASIAVRYLTYGCSDMAFARDGPYWRQMRKLCVTKLFSRRRAETWLAVRDGYGELARAVGRSSGEAVNLGELIFKHTVSIIFRAAFGVRDVQGLDEFIPMFKEFSKLLEAFHVGDFFPWLSWMGRRGFDRRLRTVRGALGTFVDKIIDEHVRRGKNPDDADADMVDGLLALLADANQASGEDDLRFTRDNVRAMMMDMLFGGPDTVGFTIEWAMAEMMHCPDILLRLQQELVDIVGLDRTVDESDLGKLPFLKCVIKETLRMHPPIPIHLHGNTKDCVLGGYSVPRGSRVFINAWAINRDGEAWKDPNAFRPSRFMPDGEATGLDLKGGCYELLSFGSGGRSCPAQGLGQHAVEFAIAQLVHGFNWKLPGDMKPTELDMSDMNGVTVSRATRLYAVPTPRLNCPL

SEQ ID NO: 66507 - DNA, 1620 bp, Triticum aestivum
  misc_feature (1)..(1620): Ceres Seq. ID no. 14302212
agaacatcctagtcgaaaactcatctcaccagaccgcaccaccccgcctccctcctcgtgccctccgccgccgccgcagcctctgcctcggcctcgaggcctccgcccgccacctccgcgcggccagggctcgagaggcgaccccggtctgcccgcccccgcttccggaacaccccgcccccgccgcaatgcagagcgcggcggccatcgggctcctccggccatgcgccgcgcggcccatcctcaagagccctagccccggggccgcccgcctcccggcctcccgcacggccctccgcctctccgccgccgcgccccgcgcgggcctcgtggcggcggcggggctcggccgcatcgggctcgtgccggcgtcgcctgagcaggagaagaggagcgactgcctcgtggccgccgcggccgcggggaaggcgtcggcgggcgaggaggccgtggaggaaagcggagcagcgctcgccaagacgctccagctcggcgtcttcttcgggctctggtacctcttcaacatctacttcaacatctacaacaagcaggtcctcaaggtttttccttatcccataaacatcacaacagttcagtttgctgttggaactacgatttccttgtttatgtgggccacgggtatccttaaaagaccaaagatttccggtgcacagcttcttgctatcctccctttggctattgtccataccatgggcaatcttttcaccaacatgagccttgggaaggttgcagtgtcatttacacatacaatcaaggccatggagcctttcttctcagttctactttctgcaatgttccttggcgagctgcctactccttgggttgttttgtctcttcttcctattgttggtggtgtggcattggcatctatttctgaagcttcttttaactgggctggatttttgagtgcaatggcttcaaatgtgaccttccagtcaaggaatgtcctcagcaagaagcttatgctgaagaaagaggcatctctggacaacatcaatctcttctcgattattacagtcatgtcattcttccttctagctcctgtaaccttgttgaccgaaggtgttaaggtcactcctacttatctgcagtctgctggtctgaacttacaacaagtgtacacaaggtctttgattgccgcattctgtttccatgcataccaacaggtgtcatacatgatcctcgcaagggtgtcaccagttacccattcggtaggtaactgcgtcaagcgtgtggtggtcattgttacatctgttctgttcttcaagactcctgtgtctccaatcaactctatcggaaccgcgatcgctcttgcgggagttttcctgtactcacaactgaagagacttcagcccaagcccaaggctgcttgattgcattctgttcgtcaggatcaatagagcgttgccactcttggaatcggtgctttagtttagccggacatattgggaagccttgttgagtaactagtaccgtgcaggatcatttgtaattcagtaatgagcattttgaccaggaaagttttgaaatctctttcaccgttctctacttggacgttctagttgccactttaataaaacctccgcagtttgattgtgc

SEQ ID NO: 66508 - protein, 463 aa, Triticum aestivum
  peptide (1)..(463): Ceres Seq. ID no. 14302213
  misc_feature (172)..(297): Pfam Name: Integral membrane protein DUF6 Pfam Description: Integral membrane protein DUF6
  misc_feature (85)..(463): Homolog of NCBI NO: 1778141 NR Description: phosphate/phosphoenolpyruvate translocator
  misc_feature (85)..(463): Homolog of NCBI NO: 15242801 NR Description: triose phosphate/phosphate translocator, putative
  misc_feature (85)..(463): Homolog of NCBI NO: 21554233 NR Description: phosphate/phosphoenolpyruvate translocator
  misc_feature (125)..(463): Homolog of NCBI NO: 7489170 NR Description: phosphate/phosphoenolpyruvate translocator
  misc_feature (116)..(461): Homolog of NCBI NO: 7489171 NR Description: phosphate/phosphoenolpyruvate translocator
  misc_feature (63)..(463): Homolog of NCBI NO: 1706110 NR Description: Triose phosphate/phosphate translocator,
  misc_feature (63)..(463): Homolog of NCBI NO: 29647427 NR Description: putative phosphoenolpyruvate/phosphate
  misc_feature (63)..(463): Homolog of NCBI NO: 7489742 NR Description: glucose-6-phosphate/phosphate-translocator
  misc_feature (63)..(463): Homolog of NCBI NO: 7489743 NR Description: glucose-6-phosphate/phosphate-translocator
  misc_feature (63)..(463): Homolog of NCBI NO: 13991929 NR Description: phosphoenolpyruvate/phosphate translocator [Oryza
NILVENSSHQTAPPRLPPRALRRRRSLCLGLEASARHLRAARAREATPVCPPPLPEHPAPAAMQSAAAIGLLRPCAARPILKSPSPGAARLPASRTALRLSAAAPRAGLVAAAGLGRIGLVPASPEQEKRSDCLVAAAAAGKASAGEEAVEESGAALAKTLQLGVFFGLWYLFNIYFNIYNKQVLKVFPYPINITTVQFAVGTTISLFMWATGILKRPKISGAQLLAILPLAIVHTMGNLFTNMSLGKVAVSFTHTIKAMEPFFSVLLSAMFLGELPTPWVVLSLLPIVGGVALASISEASFNWAGFLSAMASNVTFQSRNVLSKKLMLKKEASLDNINLFSIITVMSFFLLAPVTLLTEGVKVTPTYLQSAGLNLQQVYTRSLIAAFCFHAYQQVSYMILARVSPVTHSVGNCVKRVVVIVTSVLFFKTPVSPINSIGTAIALAGVFLYSQLKRLQPKPKAA

SEQ ID NO: 66509 - protein, 401 aa, Triticum aestivum
  peptide (1)..(401): Ceres Seq. ID no. 14302214
  misc_feature (110)..(235): Pfam Name: Integral membrane protein DUF6 Pfam Description: Integral membrane protein DUF6
  misc_feature (23)..(401): Homolog of NCBI NO: 1778141 NR Description: phosphate/phosphoenolpyruvate translocator
  misc_feature (23)..(401): Homolog of NCBI NO: 15242801 NR Description: triose phosphate/phosphate translocator, putative
  misc_feature (23)..(401): Homolog of NCBI NO: 21554233 NR Description: phosphate/phosphoenolpyruvate translocator
  misc_feature (63)..(401): Homolog of NCBI NO: 7489170 NR Description: phosphate/phosphoenolpyruvate translocator
  misc_feature (54)..(399): Homolog of NCBI NO: 7489171 NR Description: phosphate/phosphoenolpyruvate translocator
  misc_feature (1)..(401): Homolog of NCBI NO: 1706110 NR Description: Triose phosphate/phosphate translocator,
  misc_feature (1)..(401): Homolog of NCBI NO: 29647427 NR Description: putative phosphoenolpyruvate/phosphate
  misc_feature (1)..(401): Homolog of NCBI NO: 7489742 NR Description: glucose-6-phosphate/phosphate-translocator
  misc_feature (1)..(401): Homolog of NCBI NO: 7489743 NR Description: glucose-6-phosphate/phosphate-translocator
  misc_feature (1)..(401): Homolog of NCBI NO: 13991929 NR Description: phosphoenolpyruvate/phosphate translocator [Oryza
MQSAAAIGLLRPCAARPILKSPSPGAARLPASRTALRLSAAAPRAGLVAAAGLGRIGLVPASPEQEKRSDCLVAAAAAGKASAGEEAVEESGAALAKTLQLGVFFGLWYLFNIYFNIYNKQVLKVFPYPINITTVQFAVGTTISLFMWATGILKRPKISGAQLLAILPLAIVHTMGNLFTNMSLGKVAVSFTHTIKAMEPFFSVLLSAMFLGELPTPWVVLSLLPIVGGVALASISEASFNWAGFLSAMASNVTFQSRNVLSKKLMLKKEASLDNINLFSIITVMSFFLLAPVTLLTEGVKVTPTYLQSAGLNLQQVYTRSLIAAFCFHAYQQVSYMILARVSPVTHSVGNCVKRVVVIVTSVLFFKTPVSPINSIGTAIALAGVFLYSQLKRLQPKPKAA

SEQ ID NO: 66510 - protein, 255 aa, Triticum aestivum
  peptide (1)..(255): Ceres Seq. ID no. 14302215
  misc_feature (1)..(89): Pfam Name: Integral membrane protein DUF6 Pfam Description: Integral membrane protein DUF6
  misc_feature (1)..(255): Homolog of NCBI NO: 1778141 NR Description: phosphate/phosphoenolpyruvate translocator
  misc_feature (1)..(255): Homolog of NCBI NO: 15242801 NR Description: triose phosphate/phosphate translocator, putative
  misc_feature (1)..(255): Homolog of NCBI NO: 21554233 NR Description: phosphate/phosphoenolpyruvate translocator
  misc_feature (1)..(255): Homolog of NCBI NO: 7489170 NR Description: phosphate/phosphoenolpyruvate translocator
  misc_feature (1)..(253): Homolog of NCBI NO: 7489171 NR Description: phosphate/phosphoenolpyruvate translocator
  misc_feature (1)..(255): Homolog of NCBI NO: 1706110 NR Description: Triose phosphate/phosphate translocator,
  misc_feature (1)..(255): Homolog of NCBI NO: 29647427 NR Description: putative phosphoenolpyruvate/phosphate
  misc_feature (1)..(255): Homolog of NCBI NO: 7489742 NR Description: glucose-6-phosphate/phosphate-translocator
  misc_feature (1)..(255): Homolog of NCBI NO: 7489743 NR Description: glucose-6-phosphate/phosphate-translocator
  misc_feature (1)..(255): Homolog of NCBI NO: 13991929 NR Description: phosphoenolpyruvate/phosphate translocator [Oryza
MWATGILKRPKISGAQLLAILPLAIVHTMGNLFTNMSLGKVAVSFTHTIKAMEPFFSVLLSAMFLGELPTPWVVLSLLPIVGGVALASISEASFNWAGFLSAMASNVTFQSRNVLSKKLMLKKEASLDNINLFSIITVMSFFLLAPVTLLTEGVKVTPTYLQSAGLNLQQVYTRSLIAAFCFHAYQQVSYMILARVSPVTHSVGNCVKRVVVIVTSVLFFKTPVSPINSIGTAIALAGVFLYSQLKRLQPKPKAA

SEQ ID NO: 66511 - DNA, 2475 bp, Triticum aestivum
  misc_feature (1)..(2475): Ceres Seq. ID no. 13658778
atctccttgagcggtttggcactctgactcgatcttgtctcttggactagcttgccgccggcggcacaagattcgccttttcttcttcttcttgttccgcgctctgctgtccatcgcgcaaggggaataatggcgacgaagccttcgcaggacgcgccgctcccgctccacaccgtgcaaacggaccagcccctcgccaccgtcaaccggctcctcgccgccgtccacctggcgctcggcgcggcagccatcgcccaccgcggcgcccacgtgatgctggcggccgacctggtcctcctcttcctgtgggcgctgtcgcaggcgcccatgtggcgccccgtgtcccgcaccgccttcccgtcccggctctcgcgcgccgccctcccggccgtggacgtgatggtggtgacggccgacccggagaaggagcccgcggcgaaggtgatgaacacggtggtctccgccatggcgctcgactacccgggcgggcggctgagcgtgtacctctccgacgacgccgggtcaccgcggacgctgctcgccgccaggaaggcctacgccttcgccagggcctgggtgcccttctgcaggaagtacggcgtgcggtgcccgtgccccgacaggttcttcgccggcgatgacaagctcgacctcggtagtcaccaccaccacgagctcgccgacgacaggctaagaatcaagaatatgtacgagacgttcaatgagggtgtccgggaggtgatgagcgacgcagatctttctcagagktgcacaaaagcagatcacgatgctcacgtcgagatcatcaccggcgatgagcaagacagcagcaacagcaactccggcgacggcgaggaggatgaggacgccatgcccttgctggtctacgtgtctcgcgagaagcggaggtcgtcgactcaccacttcaaagccggcgcactcaacgtccttctccgtgtgtcgagcctgttgagcaactcgccgtacgtgatggtgctggactgcgacatgtactgcaacagccggagctccatcctcgaggccatgtgcttccacctcgacggccgccgccgcgccgatctcgccttcgtgcagttccctcagatgttccacaacctcagcagcagcgacatctacgccaacgagctcagatccatcttctggacgcggtggaaaggcttggatggcctccggggcccgatcctctccggcaccggcttctgcgccaggagagacgccatctacggcgcccggccggccagctcgcaagatcagttctccggtgtggaggtcggcgagcttaagagaaggtttggcgtctcgaatggtcacatagcgtcgctgcgccgatccgggaccgggagcaccattgttgcacgtgatgctctcccacaggaggatgcagagttggtggcgtcctgcgcttacgagacgggcaccgaatggggcgagcaggtcggcttcttgtaccagtcggtggtggaggactacttcacgggctaccggcagctctactgccgagggtggacgtccgtctactgcttcccggcggcggcgtcgaggccgccgttcctcggcagcgtgcccaccaacctcaacgacgcgctggtgcagaacaagcggtggatgtccggcatgctcgccgtcggcctgtccaggcactgccccctcgcctccgccgccatctgcgtgcctcagagcatgggcttcgcctactacgccttcatggccctgtacgccttccccgtgctctgctacgccaccgtgccgcagctctgcttcctccgcggcggcacgtcgttcccaggggcggcttcgacgctctggttcgccgccgtgttcgcgtcgtcgtcgctgcagcacctggtggaggtgtcggtggccaagcgtgggctggcgttgaggacgtggtggaacgagcagaggttctgggcgctcaacgccgtcacgggccagctcttcgcctgcctcggcgtcgccctcaacctggtcggcgccggcggccgggcggtggacttcgacctcaccagcaaggcgtccgacgacaggctctaccgggatggcgtgttcgacttcgccggatgcaccacgctgctcctgccggccaccacgctctgcctgctcaacgccgcggcgctcgtcggcggggtctggaagatggtcggcaggggcggcagcgtgtccggcgagctgttcctcctctgctacgtcgcggcgctgagctatccgctgctgcaagggatgttcctcaggcgggatcccgcaagagttcctgcgccgatcacggcgatgtccgtcgccatggttgccgctctgctgtccttgtttggttaaggcggccactttcattccagagagtttgagtgacacctaagataccttgatactcctaccagtttggtttgattcatccaagcttccaaataccgtgcatatatgagcagaaaagacaagaataaaacggcattttttttt

SEQ ID NO: 66512 - protein, 734 aa, Triticum aestivum
  peptide (1)..(734): Ceres Seq. ID no. 15219919
  misc_feature (48)..(373): Pfam Name: Cellulose synthase Pfam Description: Cellulose synthase
  misc_feature (390)..(732): Homolog of NCBI NO: 37781495 NR Description: cellulose synthase 6 [Populus tremuloides]
  misc_feature (422)..(732): Homolog of NCBI NO: 16519227 NR Description: cellulose synthase-like protein OsCslE2 [Oryza
  misc_feature (1)..(373): Homolog of NCBI NO: 16519227 NR Description: cellulose synthase-like protein OsCslE2 [Oryza
  misc_feature (48)..(730): Homolog of NCBI NO: 2262116 NR Description: cellulose synthase isolog [Arabidopsis thaliana]
  misc_feature (60)..(380): Homolog of NCBI NO: 21954719 NR Description: cellulose synthase catalytic subunit [Mesotaenium
  misc_feature (380)..(732): Homolog of NCBI NO: 21954719 NR Description: cellulose synthase catalytic subunit [Mesotaenium
  misc_feature (414)..(734): Homolog of NCBI NO: 2262115 NR Description: cellulose synthase isolog [Arabidopsis thaliana]
  misc_feature (48)..(373): Homolog of NCBI NO: 2262115 NR Description: cellulose synthase isolog [Arabidopsis thaliana]
  misc_feature (48)..(373): Homolog of NCBI NO: 30686386 NR Description: cellulose synthase - related [Arabidopsis
  misc_feature (414)..(734): Homolog of NCBI NO: 30686386 NR Description: cellulose synthase - related [Arabidopsis
  misc_feature (213)..(213): Xaa is any aa, unknown or other
MATKPSQDAPLPLHTVQTDQPLATVNRLLAAVHLALGAAAIAHRGAHVMLAADLVLLFLWALSQAPMWRPVSRTAFPSRLSRAALPAVDVMVVTADPEKEPAAKVMNTVVSAMALDYPGGRLSVYLSDDAGSPRTLLAARKAYAFARAWVPFCRKYGVRCPCPDRFFAGDDKLDLGSHHHHELADDRLRIKNMYETFNEGVREVMSDADLSQXCTKADHDAHVEIITGDEQDSSNSNSGDGEEDEDAMPLLVYVSREKRRSSTHHFKAGALNVLLRVSSLLSNSPYVMVLDCDMYCNSRSSILEAMCFHLDGRRRADLAFVQFPQMFHNLSSSDIYANELRSIFWTRWKGLDGLRGPILSGTGFCARRDAIYGARPASSQDQFSGVEVGELKRRFGVSNGHIASLRRSGTGSTIVARDALPQEDAELVASCAYETGTEWGEQVGFLYQSVVEDYFTGYRQLYCRGWTSVYCFPAAASRPPFLGSVPTNLNDALVQNKRWMSGMLAVGLSRHCPLASAAICVPQSMGFAYYAFMALYAFPVLCYATVPQLCFLRGGTSFPGAASTLWFAAVFASSSLQHLVEVSVAKRGLALRTWWNEQRFWALNAVTGQLFACLGVALNLVGAGGRAVDFDLTSKASDDRLYRDGVFDFAGCTTLLLPATTLCLLNAAALVGGVWKMVGRGGSVSGELFLLCYVAALSYPLLQGMFLRRDPARVPAPITAMSVAMVAALLSLFG

SEQ ID NO: 66513 - protein, 686 aa, Triticum aestivum
  peptide (1)..(686): Ceres Seq. ID no. 15219920
  misc_feature (1)..(325): Pfam Name: Cellulose synthase Pfam Description: Cellulose synthase
  misc_feature (342)..(684): Homolog of NCBI NO: 37781495 NR Description: cellulose synthase 6 [Populus tremuloides]
  misc_feature (374)..(684): Homolog of NCBI NO: 16519227 NR Description: cellulose synthase-like protein OsCslE2 [Oryza
  misc_feature (1)..(325): Homolog of NCBI NO: 16519227 NR Description: cellulose synthase-like protein OsCslE2 [Oryza
  misc_feature (1)..(682): Homolog of NCBI NO: 2262116 NR Description: cellulose synthase isolog [Arabidopsis thaliana]
  misc_feature (12)..(332): Homolog of NCBI NO: 21954719 NR Description: cellulose synthase catalytic subunit [Mesotaenium
  misc_feature (332)..(684): Homolog of NCBI NO: 21954719 NR Description: cellulose synthase catalytic subunit [Mesotaenium
  misc_feature (366)..(686): Homolog of NCBI NO: 2262115 NR Description: cellulose synthase isolog [Arabidopsis thaliana]
  misc_feature (1)..(325): Homolog of NCBI NO: 2262115 NR Description: cellulose synthase isolog [Arabidopsis thaliana]
  misc_feature (1)..(325): Homolog of NCBI NO: 30686386 NR Description: cellulose synthase - related [Arabidopsis
  misc_feature (366)..(686): Homolog of NCBI NO: 30686386 NR Description: cellulose synthase - related [Arabidopsis
  misc_feature (165)..(165): Xaa is any aa, unknown or other
MLAADLVLLFLWALSQAPMWRPVSRTAFPSRLSRAALPAVDVMVVTADPEKEPAAKVMNTVVSAMALDYPGGRLSVYLSDDAGSPRTLLAARKAYAFARAWVPFCRKYGVRCPCPDRFFAGDDKLDLGSHHHHELADDRLRIKNMYETFNEGVREVMSDADLSQXCTKADHDAHVEIITGDEQDSSNSNSGDGEEDEDAMPLLVYVSREKRRSSTHHFKAGALNVLLRVSSLLSNSPYVMVLDCDMYCNSRSSILEAMCFHLDGRRRADLAFVQFPQMFHNLSSSDIYANELRSIFWTRWKGLDGLRGPILSGTGFCARRDAIYGARPASSQDQFSGVEVGELKRRFGVSNGHIASLRRSGTGSTIVARDALPQEDAELVASCAYETGTEWGEQVGFLYQSVVEDYFTGYRQLYCRGWTSVYCFPAAASRPPFLGSVPTNLNDALVQNKRWMSGMLAVGLSRHCPLASAAICVPQSMGFAYYAFMALYAFPVLCYATVPQLCFLRGGTSFPGAASTLWFAAVFASSSLQHLVEVSVAKRGLALRTWWNEQRFWALNAVTGQLFACLGVALNLVGAGGRAVDFDLTSKASDDRLYRDGVFDFAGCTTLLLPATTLCLLNAAALVGGVWKMVGRGGSVSGELFLLCYVAALSYPLLQGMFLRRDPARVPAPITAMSVAMVAALLSLFG

SEQ ID NO: 66514 - protein, 668 aa, Triticum aestivum
  peptide (1)..(668): Ceres Seq. ID no. 15219921
  misc_feature (1)..(307): Pfam Name: Cellulose synthase Pfam Description: Cellulose synthase
  misc_feature (324)..(666): Homolog of NCBI NO: 37781495 NR Description: cellulose synthase 6 [Populus tremuloides]
  misc_feature (356)..(666): Homolog of NCBI NO: 16519227 NR Description: cellulose synthase-like protein OsCslE2 [Oryza
  misc_feature (1)..(307): Homolog of NCBI NO: 16519227 NR Description: cellulose synthase-like protein OsCslE2 [Oryza
  misc_feature (1)..(664): Homolog of NCBI NO: 2262116 NR Description: cellulose synthase isolog [Arabidopsis thaliana]
  misc_feature (1)..(314): Homolog of NCBI NO: 21954719 NR Description: cellulose synthase catalytic subunit [Mesotaenium
  misc_feature (314)..(666): Homolog of NCBI NO: 21954719 NR Description: cellulose synthase catalytic subunit [Mesotaenium
  misc_feature (348)..(668): Homolog of NCBI NO: 2262115 NR Description: cellulose synthase isolog [Arabidopsis thaliana]
  misc_feature (1)..(307): Homolog of NCBI NO: 2262115 NR Description: cellulose synthase isolog [Arabidopsis thaliana]
  misc_feature (1)..(307): Homolog of NCBI NO: 30686386 NR Description: cellulose synthase - related [Arabidopsis
  misc_feature (348)..(668): Homolog of NCBI NO: 30686386 NR Description: cellulose synthase - related [Arabidopsis
  misc_feature (147)..(147): Xaa is any aa, unknown or other
MWRPVSRTAFPSRLSRAALPAVDVMVVTADPEKEPAAKVMNTVVSAMALDYPGGRLSVYLSDDAGSPRTLLAARKAYAFARAWVPFCRKYGVRCPCPDRFFAGDDKLDLGSHHHHELADDRLRIKNMYETFNEGVREVMSDADLSQXCTKADHDAHVEIITGDEQDSSNSNSGDGEEDEDAMPLLVYVSREKRRSSTHHFKAGALNVLLRVSSLLSNSPYVMVLDCDMYCNSRSSILEAMCFHLDGRRRADLAFVQFPQMFHNLSSSDIYANELRSIFWTRWKGLDGLRGPILSGTGFCARRDAIYGARPASSQDQFSGVEVGELKRRFGVSNGHIASLRRSGTGSTIVARDALPQEDAELVASCAYETGTEWGEQVGFLYQSVVEDYFTGYRQLYCRGWTSVYCFPAAASRPPFLGSVPTNLNDALVQNKRWMSGMLAVGLSRHCPLASAAICVPQSMGFAYYAFMALYAFPVLCYATVPQLCFLRGGTSFPGAASTLWFAAVFASSSLQHLVEVSVAKRGLALRTWWNEQRFWALNAVTGQLFACLGVALNLVGAGGRAVDFDLTSKASDDRLYRDGVFDFAGCTTLLLPATTLCLLNAAALVGGVWKMVGRGGSVSGELFLLCYVAALSYPLLQGMFLRRDPARVPAPITAMSVAMVAALLSLFG

SEQ ID NO: 66515 - DNA, 1384 bp, Triticum aestivum
  misc_feature (1)..(1384): Ceres Seq. ID no. 13658295
agaacatcctawtcgammmacacccgaccaactctcgctcactcgccggagggaaacagagcaaagatgaccacggcggcggcggcgacgacgatgcgtctgtcttccccgttcaaggccccgcctctccgtcctccctgccaccgcgtcgtcccgtcgaggcggggccccgggcgggccgggctggccgtctcggcggccgccggcgggtcgccccccaccgtgctcgtcaccggcgccggaggacgaacaggccaaattgtgtacaagaagctgaaggagaaggcagaccagtttgtggccagagggctggtcaggacgccggacagcaaatctaagatcgatgggggcgacgacgtgttcatcggagacattagggatcctgggagcattgcgccggcgatcgacggcattgacgcgctcatcatcctcaccagtggggtcccgaagatgaagccagggtttgatcctagcaaagggggtcggcccgagttttacttcgaggaagggtctgatcctgagcaggtggattggataggccaaaagaaccaaatcgacgctgccaagagcattggtgtaaagcagatagttttggttggatccatgggtggaacagatctcaaccatccattaaacaagcttgggaatgggaatatactggtgtggaaacggaaggcagaacagtacctagcggactctggtgtaccatatacaattataagggctggaggactacaagacaaagatggtggtgtgcgtgagttgattgttggaaaggatgacgagatcttgaagacggaaacaaaaactattgccagggcagatgttgcagaagtttgcatacaggccttgctatttgaggaagcaaagttcaaggcatttgatctggcttcaaaacctgaaggtgaaggaacaccgacgacagattttaagtctgtttttgcacaaattgctactcgcttctaagaagacaagatcattctggccaatgaaatggggacagttttttaattaggcgatatggaatttgtaccgggtcaggaggctcctcatctgatcaagtagcaaaagtagggaagcatgcaccttgttattgagcagaagaagcagcagatcgttgtgctttgagagaagagttctgaggatttgggctatgaaagaagagtagtgagactggtgttgatgtaaactatttttttttcttcttgttgctttgttcccaacgtcggacatggtaattgtgacagagaatgagtctagattaccgcagttattgcggcgattagttctaggctagacgtataaaaaattgtttattaggaacgcttgcctgggtttcaacattaatacggttcctaattgaattgataaaaaaatctgaggt

SEQ ID NO: 66516 - protein, 321 aa, Triticum aestivum
  peptide (1)..(321): Ceres Seq. ID no. 15219896
  misc_feature (75)..(149): Pfam Name: Isoflavone reductase Pfam Description: Isoflavone reductase
  misc_feature (69)..(319): Homolog of NCBI NO: 17230395 NR Description: hypothetical protein [Nostoc sp. PCC 7120]
  misc_feature (174)..(307): Homolog of NCBI NO: 37523053 NR Description: hypothetical protein gll3484 [Gloeobacter
  misc_feature (65)..(314): Homolog of NCBI NO: 30689062 NR Description: expressed protein [Arabidopsis thaliana]
  misc_feature (160)..(317): Homolog of NCBI NO: 16330694 NR Description: hypothetical protein [Synechocystis sp. PCC 6803]
  misc_feature (73)..(316): Homolog of NCBI NO: 11358410 NR Description: hypothetical protein T7H20.290 - Arabidopsis
  misc_feature (73)..(321): Homolog of NCBI NO: 18413869 NR Description: expressed protein [Arabidopsis thaliana]
  misc_feature (66)..(321): Homolog of NCBI NO: 34897418 NR Description: unknown protein [Oryza sativa (japonica
  misc_feature (59)..(321): Homolog of NCBI NO: 7485430 NR Description: hypothetical protein At2g37660 [imported] -
  misc_feature (59)..(321): Homolog of NCBI NO: 18404496 NR Description: expressed protein [Arabidopsis thaliana]
  misc_feature (30)..(321): Homolog of NCBI NO: 14719331 NR Description: putative 3-beta hydroxysteroid
  misc_feature (4)..(4): Xaa is any aa, unknown or other
  misc_feature (6)..(6): Xaa is any aa, unknown or other
  misc_feature (7)..(7): Xaa is any aa, unknown or other
RTSXSXXTRPTLAHSPEGNRAKMTTAAAATTMRLSSPFKAPPLRPPCHRVVPSRRGPGRAGLAVSAAAGGSPPTVLVTGAGGRTGQIVYKKLKEKADQFVARGLVRTPDSKSKIDGGDDVFIGDIRDPGSIAPAIDGIDALIILTSGVPKMKPGFDPSKGGRPEFYFEEGSDPEQVDWIGQKNQIDAAKSIGVKQIVLVGSMGGTDLNHPLNKLGNGNILVWKRKAEQYLADSGVPYTIIRAGGLQDKDGGVRELIVGKDDEILKTETKTIARADVAEVCIQALLFEEAKFKAFDLASKPEGEGTPTTDFKSVFAQIATRF

SEQ ID NO: 66517 - protein, 299 aa, Triticum aestivum
  peptide (1)..(299): Ceres Seq. ID no. 15219897
  misc_feature (53)..(127): Pfam Name: Isoflavone reductase Pfam Description: Isoflavone reductase
  misc_feature (47)..(297): Homolog of NCBI NO: 17230395 NR Description: hypothetical protein [Nostoc sp. PCC 7120]
  misc_feature (152)..(285): Homolog of NCBI NO: 37523053 NR Description: hypothetical protein gll3484 [Gloeobacter
  misc_feature (43)..(292): Homolog of NCBI NO: 30689062 NR Description: expressed protein [Arabidopsis thaliana]
  misc_feature (138)..(295): Homolog of NCBI NO: 16330694 NR Description: hypothetical protein [Synechocystis sp. PCC 6803]
  misc_feature (51)..(294): Homolog of NCBI NO: 11358410 NR Description: hypothetical protein T7H20.290 - Arabidopsis
  misc_feature (51)..(299): Homolog of NCBI NO: 18413869 NR Description: expressed protein [Arabidopsis thaliana]
  misc_feature (44)..(299): Homolog of NCBI NO: 34897418 NR Description: unknown protein [Oryza sativa (japonica
  misc_feature (37)..(299): Homolog of NCBI NO: 7485430 NR Description: hypothetical protein At2g37660 [imported] -
  misc_feature (37)..(299): Homolog of NCBI NO: 18404496 NR Description: expressed protein [Arabidopsis thaliana]
  misc_feature (8)..(299): Homolog of NCBI NO: 14719331 NR Description: putative 3-beta hydroxysteroid
MTTAAAATTMRLSSPFKAPPLRPPCHRVVPSRRGPGRAGLAVSAAAGGSPPTVLVTGAGGRTGQIVYKKLKEKADQFVARGLVRTPDSKSKIDGGDDVFIGDIRDPGSIAPAIDGIDALIILTSGVPKMKPGFDPSKGGRPEFYFEEGSDPEQVDWIGQKNQIDAAKSIGVKQIVLVGSMGGTDLNHPLNKLGNGNILVWKRKAEQYLADSGVPYTIIRAGGLQDKDGGVRELIVGKDDEILKTETKTIARADVAEVCIQALLFEEAKFKAFDLASKPEGEGTPTTDFKSVFAQIATRF

SEQ ID NO: 66518 - protein, 290 aa, Triticum aestivum
  peptide (1)..(290): Ceres Seq. ID no. 15219898
  misc_feature (44)..(118): Pfam Name: Isoflavone reductase Pfam Description: Isoflavone reductase
  misc_feature (38)..(288): Homolog of NCBI NO: 17230395 NR Description: hypothetical protein [Nostoc sp. PCC 7120]
  misc_feature (143)..(276): Homolog of NCBI NO: 37523053 NR Description: hypothetical protein gll3484 [Gloeobacter
  misc_feature (34)..(283): Homolog of NCBI NO: 30689062 NR Description: expressed protein [Arabidopsis thaliana]
  misc_feature (129)..(286): Homolog of NCBI NO: 16330694 NR Description: hypothetical protein [Synechocystis sp. PCC 6803]
  misc_feature (42)..(285): Homolog of NCBI NO: 11358410 NR Description: hypothetical protein T7H20.290 - Arabidopsis
  misc_feature (42)..(290): Homolog of NCBI NO: 18413869 NR Description: expressed protein [Arabidopsis thaliana]
  misc_feature (35)..(290): Homolog of NCBI NO: 34897418 NR Description: unknown protein [Oryza sativa (japonica
  misc_feature (28)..(290): Homolog of NCBI NO: 7485430 NR Description: hypothetical protein At2g37660 [imported] -
  misc_feature (28)..(290): Homolog of NCBI NO: 18404496 NR Description: expressed protein [Arabidopsis thaliana]
  misc_feature (1)..(290): Homolog of NCBI NO: 14719331 NR Description: putative 3-beta hydroxysteroid
MRLSSPFKAPPLRPPCHRVVPSRRGPGRAGLAVSAAAGGSPPTVLVTGAGGRTGQIVYKKLKEKADQFVARGLVRTPDSKSKIDGGDDVFIGDIRDPGSIAPAIDGIDALIILTSGVPKMKPGFDPSKGGRPEFYFEEGSDPEQVDWIGQKNQIDAAKSIGVKQIVLVGSMGGTDLNHPLNKLGNGNILVWKRKAEQYLADSGVPYTIIRAGGLQDKDGGVRELIVGKDDEILKTETKTIARADVAEVCIQALLFEEAKFKAFDLASKPEGEGTPTTDFKSVFAQIATRF

SEQ ID NO: 66519 - DNA, 2001 bp, Triticum aestivum
  misc_feature (1)..(2001): Ceres Seq. ID no. 14301550
accgacaggattcgccgccgcgccaccccggagctcccgcccaggctcgccgcctcatcgtccgtcatccgccttgtggccgcgggagcacagacctcgccaaaacatccatccggggtcccggctgccggccaggtcgatcgcctcccctctcctccgaaatcgttccccaccaaaacatctctcgtcgccgccacgctccacgtccaggcaggatgcgctgcctccgccgcgcgggcgcggccgcccacctgctccgctccgcgacgaccggccccgccaagcacgctcgcacggccctcgagcagatgcctccgccgcctgccgccttcccatgtcgcgcgcgcgcccaccacctgctcggaggaatgcgcggccagtggctctgcacggcgacggggtccaccggcgcccccgacctcgccgtggaccagcacttcaccgtggtgcctggcctaggccccgatgtctccgaggtggcggggctcaccggcgcccacgatcttgccgtggaccaggacttcacagtggtgcctggcccaggcctcgatgtctccaaggaggcggagagggtctgccgcgtgctgtccaccgtgccggagccgagggttgcatcagccctcgacgcgctcggggcctctgtgtcgcctcagctcgtggcggaggtgctcaagaacctgagcaacgctggcatcctcgccctcgccttcttccggtgggcggagaggcagcaaggcttcgtgtacacggcggagagcttccacaacctcatcgaagcgctcggcaagatcaagcagttcaggctggtctggagcctggtggaggccatgcggtgccgcggcttgctttccaaggacacgttcaggctcatcgtcaggaggtacgccagggcaaggaaggtcaaggaagctgtcgagacgtttgagaagatggccggcttcgggctcaaagcagacttatcagattacaattggttgatcgacgtgctgagcaaatccaagcaagtcaagaaggcgcaagccatcttcaaggagatgaagaggaacggaaagtttgttcccgatttgaagacctacactgtcctcatggaaggctggggccatgagaaggacttgctgatgcttaagtcggtgtaccaagaaatgctcgatgcaggcctgaagcctgatgtcgtggcatacgggatgctcattagttccttttgcaagtctggcaaatgtgatgaggccatcaaggtgttctgtgagatggaagccaatggttgcatgccaagccctcatgtgtattgcatgcttatcaatgggcttggctcagaggagaggctggatgaggctttgaagtattttgagctttctaaggccagtgggtttcccatggaggtacctacatgtaatgcagttgttggggcttactgcagagcctcaaaattccagcatgccttcaagatggtcgatgagatgagaaagagtggaatcggtccaaattcccggacttatgatattattcttcaccatcttataaagtctcagaagatagaagaggcttataatgtgttccagggaatgggcaaggatggctgtgaacctcagctcaacacatatacaatgatggttagtatgttctgcagtaatgaaagggttgatgtggccttgaaggtgtggaaccaaatgaaggagaagggtgttctgccatgtatgcacatgttttctgcattgatcaacgggttatgctttgagaacaggctggaagaagcttgcgtatatttccaggagatgttggacaaagggatcaggccacctggtcagcttttcagtaatttaaaggaagctcttattgagggaggaagaattagtctggcacaggagatggctttgaagttggatggattacggaaaacacctatgcgtcgttgaggaatcatgcaaataatctgttgcagcagcatatggcttttggctgttagaagctcagtcaaaattgtggtaacaaagaaaacttcag

SEQ ID NO: 66520 - protein, 636 aa, Triticum aestivum
  peptide (1)..(636): Ceres Seq. ID no. 14301551
  misc_feature (566)..(600): Pfam Name: PPR repeat Pfam Description: PPR repeat
  misc_feature (133)..(610): Homolog of NCBI NO: 21686921 NR Description: putative reverse transcriptase
  misc_feature (183)..(622): Homolog of NCBI NO: 15239161 NR Description: pentatricopeptide (PPR) repeat-containing protein
  misc_feature (180)..(627): Homolog of NCBI NO: 15219049 NR Description: hypothetical protein [Arabidopsis thaliana]
  misc_feature (186)..(623): Homolog of NCBI NO: 15241508 NR Description: pentatricopeptide (PPR) repeat-containing protein
  misc_feature (186)..(623): Homolog of NCBI NO: 15228788 NR Description: pentatricopeptide (PPR) repeat-containing protein
  misc_feature (186)..(623): Homolog of NCBI NO: 15228767 NR Description: pentatricopeptide (PPR) repeat-containing protein
  misc_feature (187)..(622): Homolog of NCBI NO: 15229604 NR Description: expressed protein [Arabidopsis thaliana]
  misc_feature (183)..(634): Homolog of NCBI NO: 15223926 NR Description: pentatricopeptide (PPR) repeat-containing protein
  misc_feature (182)..(634): Homolog of NCBI NO: 14488357 NR Description: unknown protein [Oryza sativa (japonica
  misc_feature (183)..(634): Homolog of NCBI NO: 15223927 NR Description: pentatricopeptide (PPR) repeat-containing protein
RQDSPPRHPGAPAQARRLIVRHPPCGRGSTDLAKTSIRGPGCRPGRSPPLSSEIVPHQNISRRRHAPRPGRMRCLRRAGAAAHLLRSATTGPAKHARTALEQMPPPPAAFPCRARAHHLLGGMRGQWLCTATGSTGAPDLAVDQHFTVVPGLGPDVSEVAGLTGAHDLAVDQDFTVVPGPGLDVSKEAERVCRVLSTVPEPRVASALDALGASVSPQLVAEVLKNLSNAGILALAFFRWAERQQGFVYTAESFHNLIEALGKIKQFRLVWSLVEAMRCRGLLSKDTFRLIVRRYARARKVKEAVETFEKMAGFGLKADLSDYNWLIDVLSKSKQVKKAQAIFKEMKRNGKFVPDLKTYTVLMEGWGHEKDLLMLKSVYQEMLDAGLKPDVVAYGMLISSFCKSGKCDEAIKVFCEMEANGCMPSPHVYCMLINGLGSEERLDEALKYFELSKASGFPMEVPTCNAVVGAYCRASKFQHAFKMVDEMRKSGIGPNSRTYDIILHHLIKSQKIEEAYNVFQGMGKDGCEPQLNTYTMMVSMFCSNERVDVALKVWNQMKEKGVLPCMHMFSALINGLCFENRLEEACVYFQEMLDKGIRPPGQLFSNLKEALIEGGRISLAQEMALKLDGLRKTPMRR

SEQ ID NO: 66521 - protein, 565 aa, Triticum aestivum
  peptide (1)..(565): Ceres Seq. ID no. 14301552
  misc_feature (495)..(529): Pfam Name: PPR repeat Pfam Description: PPR repeat
  misc_feature (62)..(539): Homolog of NCBI NO: 21686921 NR Description: putative reverse transcriptase
  misc_feature (112)..(551): Homolog of NCBI NO: 15239161 NR Description: pentatricopeptide (PPR) repeat-containing protein
  misc_feature (109)..(556): Homolog of NCBI NO: 15219049 NR Description: hypothetical protein [Arabidopsis thaliana]
  misc_feature (115)..(552): Homolog of NCBI NO: 15241508 NR Description: pentatricopeptide (PPR) repeat-containing protein
  misc_feature (115)..(552): Homolog of NCBI NO: 15228788 NR Description: pentatricopeptide (PPR) repeat-containing protein
  misc_feature (115)..(552): Homolog of NCBI NO: 15228767 NR Description: pentatricopeptide (PPR) repeat-containing protein
  misc_feature (116)..(551): Homolog of NCBI NO: 15229604 NR Description: expressed protein [Arabidopsis thaliana]
  misc_feature (112)..(563): Homolog of NCBI NO: 15223926 NR Description: pentatricopeptide (PPR) repeat-containing protein
  misc_feature (111)..(563): Homolog of NCBI NO: 14488357 NR Description: unknown protein [Oryza sativa (japonica
  misc_feature (112)..(563): Homolog of NCBI NO: 15223927 NR Description: pentatricopeptide (PPR) repeat-containing protein
MRCLRRAGAAAHLLRSATTGPAKHARTALEQMPPPPAAFPCRARAHHLLGGMRGQWLCTATGSTGAPDLAVDQHFTVVPGLGPDVSEVAGLTGAHDLAVDQDFTVVPGPGLDVSKEAERVCRVLSTVPEPRVASALDALGASVSPQLVAEVLKNLSNAGILALAFFRWAERQQGFVYTAESFHNLIEALGKIKQFRLVWSLVEAMRCRGLLSKDTFRLIVRRYARARKVKEAVETFEKMAGFGLKADLSDYNWLIDVLSKSKQVKKAQAIFKEMKRNGKFVPDLKTYTVLMEGWGHEKDLLMLKSVYQEMLDAGLKPDVVAYGMLISSFCKSGKCDEAIKVFCEMEANGCMPSPHVYCMLINGLGSEERLDEALKYFELSKASGFPMEVPTCNAVVGAYCRASKFQHAFKMVDEMRKSGIGPNSRTYDIILHHLIKSQKIEEAYNVFQGMGKDGCEPQLNTYTMMVSMFCSNERVDVALKVWNQMKEKGVLPCMHMFSALINGLCFENRLEEACVYFQEMLDKGIRPPGQLFSNLKEALIEGGRISLAQEMALKLDGLRKTPMRR

SEQ ID NO: 66522 - protein, 534 aa, Triticum aestivum
  peptide (1)..(534): Ceres Seq. ID no. 14301553
  misc_feature (464)..(498): Pfam Name: PPR repeat Pfam Description: PPR repeat
  misc_feature (31)..(508): Homolog of NCBI NO: 21686921 NR Description: putative reverse transcriptase
  misc_feature (81)..(520): Homolog of NCBI NO: 15239161 NR Description: pentatricopeptide (PPR) repeat-containing protein
  misc_feature (78)..(525): Homolog of NCBI NO: 15219049 NR Description: hypothetical protein [Arabidopsis thaliana]
  misc_feature (84)..(521): Homolog of NCBI NO: 15241508 NR Description: pentatricopeptide (PPR) repeat-containing protein
  misc_feature (84)..(521): Homolog of NCBI NO: 15228788 NR Description: pentatricopeptide (PPR) repeat-containing protein
  misc_feature (84)..(521): Homolog of NCBI NO: 15228767 NR Description: pentatricopeptide (PPR) repeat-containing protein
  misc_feature (85)..(520): Homolog of NCBI NO: 15229604 NR Description: expressed protein [Arabidopsis thaliana]
  misc_feature (81)..(532): Homolog of NCBI NO: 15223926 NR Description: pentatricopeptide (PPR) repeat-containing protein
  misc_feature (80)..(532): Homolog of NCBI NO: 14488357 NR Description: unknown protein [Oryza sativa (japonica
  misc_feature (81)..(532): Homolog of NCBI NO: 15223927 NR Description: pentatricopeptide (PPR) repeat-containing protein
MPPPPAAFPCRARAHHLLGGMRGQWLCTATGSTGAPDLAVDQHFTVVPGLGPDVSEVAGLTGAHDLAVDQDFTVVPGPGLDVSKEAERVCRVLSTVPEPRVASALDALGASVSPQLVAEVLKNLSNAGILALAFFRWAERQQGFVYTAESFHNLIEALGKIKQFRLVWSLVEAMRCRGLLSKDTFRLIVRRYARARKVKEAVETFEKMAGFGLKADLSDYNWLIDVLSKSKQVKKAQAIFKEMKRNGKFVPDLKTYTVLMEGWGHEKDLLMLKSVYQEMLDAGLKPDVVAYGMLISSFCKSGKCDEAIKVFCEMEANGCMPSPHVYCMLINGLGSEERLDEALKYFELSKASGFPMEVPTCNAVVGAYCRASKFQHAFKMVDEMRKSGIGPNSRTYDIILHHLIKSQKIEEAYNVFQGMGKDGCEPQLNTYTMMVSMFCSNERVDVALKVWNQMKEKGVLPCMHMFSALINGLCFENRLEEACVYFQEMLDKGIRPPGQLFSNLKEALIEGGRISLAQEMALKLDGLRKTPMRR

SEQ ID NO: 66523 - DNA, 1780 bp, Triticum aestivum
  misc_feature (1)..(1780): Ceres Seq. ID no. 13664362
  misc_feature: Pfam Name: GHMP_kinases_C Pfam Description: GHMP kinases C terminal
gctaatcctaattctagtccaaagttcccgtcgctgcgttcaggcagccgccggcgaccagtgaatgcttccgcatcccgtcgcgcaaaaggtagctgagacgagtgtccagccgccagcgagcctaccctacccgagctcacccacatcggcagccgccaccgccgccgccgcgttgctgcgcgcagaggaggagcgccatgatttgattctctgaatctttccccacgccgggcgatacttcctatgcgccaccgccgcccgcggatcacacagcagcggcagtagcgcgagggaggcagtcagaggccgaaagatttggatcgatggagatccgcgcccgcgcgcccggcaagatcatcctcgccggcgagcacgccgtcgtccacggctcctccgccgtcgccgccgccatcgacctctacacgcagtcctccctccacctgcccccgccaggggatggcggcgccggcggggaggtggaggtcgacctgacggactcgggcctcgccttctcctggccatgctcgcgcctcctcgaggcgctgggggagacctgccgcaaggcggagctgcaggccccgaggccctgctccccggaggagctggcctccattkycaggctcgtggagctgcacgagatacccgaggccaagatctggctctccgcaggcctctccgcgttcctctacctctacacttccatcctggggtgtaggcctgggaaggtcgtggtgagctcgggtctgccgatgggcgcggggcttggttcgtcggccgcgttctccgtgtcgttgtcgggcgcgctgctgacggcggcaggagtggtttgcgctgagggcgccgtcgacggaacagagtggcggttgttggggaaggatcatcttgagctggttaacacgtgggcgttccagggggaaaagattattcatggcaagccttctggcattgacaacgctgtcagcacttttgggagcatgatcaaattcaagaagggagaattgacaaacctcaaatctggcaatccagtcaaaatgctcattactgatacaagggttggtaggaacaccaaggctctggttgctggtgtgtctgaaagagcatctaggcatcccgatgctatggcttccgtcttccatgcagtgaacaccattagtgaagagctttccagcattgttgagttagctgccactgatgagatagccatgacctcaaaggaagaaaagctagcagaactcatggagatgaaccaaggtttgctccagtgcatgggagtcagccattcctctatagaaaccgtgctgcgctcgacattgaagtataacttggtctcgaagctcaccggagctggtggtggaggctgtgttttgacgttgataccaactctattgtccaagttagttttggagaaggtcaccacggagctagaatcgcatggtttccgctgcttcaaagtcgaggtcggtggacaaggtcttcagattcaccaaggataagataatgctcgctcctctttcaatggagatgttgtacactatttttaggtttgcttgaccttctgagacgaaagtattctttctattctgtgcctagcagaccacttactgtatcaatcaataagcgagtttgtcagtcgcatgattgttgttgtatcagatcaataaaccctgttccatagtcgggcgtggttggaaggaatatttgaggtgccatgttgcatctgatctgatgtatcattgttatcaaagttgagttcattgggttgggtcatttttcttgt

SEQ ID NO: 66524 - protein, 389 aa, Triticum aestivum
  peptide (1)..(389): Ceres Seq. ID no. 15220316
  misc_feature: Pfam Name: GHMP_kinases_C Pfam Description: GHMP kinases C terminal
  misc_feature (3)..(387): Homolog of NCBI NO: 28828936 NR Description: similar to Rattus norvegicus (Rat). Mevalonate
  misc_feature (7)..(387): Homolog of NCBI NO: 13592007 NR Description: mevalonate kinase [Rattus norvegicus]
  misc_feature (7)..(387): Homolog of NCBI NO: 12963731 NR Description: mevalonate kinase [Mus musculus]
  misc_feature (7)..(387): Homolog of NCBI NO: 33303805 NR Description: mevalonate kinase [synthetic construct]
  misc_feature (7)..(387): Homolog of NCBI NO: 4557769 NR Description: mevalonate kinase [Homo sapiens]
  misc_feature (7)..(387): Homolog of NCBI NO: 450346 NR Description: ORF for viral-cellular fusion transcript
  misc_feature (1)..(386): Homolog of NCBI NO: 15240936 NR Description: mevalonate kinase [Arabidopsis thaliana]
  misc_feature (1)..(386): Homolog of NCBI NO: 5578718 NR Description: mevalonate kinase [Arabidopsis thaliana]
  misc_feature (1)..(385): Homolog of NCBI NO: 16417946 NR Description: mevalonate kinase [Hevea brasiliensis]
  misc_feature (1)..(358): Homolog of NCBI NO: 37532842 NR Description: putative mevalonate kinase
  misc_feature (98)..(98): Xaa is any aa, unknown or other
MEIRARAPGKIILAGEHAVVHGSSAVAAAIDLYTQSSLHLPPPGDGGAGGEVEVDLTDSGLAFSWPCSRLLEALGETCRKAELQAPRPCSPEELASIXRLVELHEIPEAKIWLSAGLSAFLYLYTSILGCRPGKVVVSSGLPMGAGLGSSAAFSVSLSGALLTAAGVVCAEGAVDGTEWRLLGKDHLELVNTWAFQGEKIIHGKPSGIDNAVSTFGSMIKFKKGELTNLKSGNPVKMLITDTRVGRNTKALVAGVSERASRHPDAMASVFHAVNTISEELSSIVELAATDEIAMTSKEEKLAELMEMNQGLLQCMGVSHSSIETVLRSTLKYNLVSKLTGAGGGGCVLTLIPTLLSKLVLEKVTTELESHGFRCFKVEVGGQGLQIHQG

SEQ ID NO: 66525 - protein, 247 aa, Triticum aestivum
  peptide (1)..(247): Ceres Seq. ID no. 15220317
  misc_feature: Pfam Name: GHMP_kinases_C Pfam Description: GHMP kinases C terminal
  misc_feature (1)..(245): Homolog of NCBI NO: 28828936 NR Description: similar to Rattus norvegicus (Rat). Mevalonate
  misc_feature (1)..(245): Homolog of NCBI NO: 13592007 NR Description: mevalonate kinase [Rattus norvegicus]
  misc_feature (1)..(245): Homolog of NCBI NO: 12963731 NR Description: mevalonate kinase [Mus musculus]
  misc_feature (1)..(245): Homolog of NCBI NO: 4557769 NR Description: mevalonate kinase [Homo sapiens]
  misc_feature (1)..(245): Homolog of NCBI NO: 33303805 NR Description: mevalonate kinase [synthetic construct]
  misc_feature (1)..(245): Homolog of NCBI NO: 450346 NR Description: ORF for viral-cellular fusion transcript
  misc_feature (1)..(244): Homolog of NCBI NO: 15240936 NR Description: mevalonate kinase [Arabidopsis thaliana]
  misc_feature (1)..(244): Homolog of NCBI NO: 5578718 NR Description: mevalonate kinase [Arabidopsis thaliana]
  misc_feature (1)..(243): Homolog of NCBI NO: 16417946 NR Description: mevalonate kinase [Hevea brasiliensis]
  misc_feature (1)..(216): Homolog of NCBI NO: 37532842 NR Description: putative mevalonate kinase
MGAGLGSSAAFSVSLSGALLTAAGVVCAEGAVDGTEWRLLGKDHLELVNTWAFQGEKIIHGKPSGIDNAVSTFGSMIKFKKGELTNLKSGNPVKMLITDTRVGRNTKALVAGVSERASRHPDAMASVFHAVNTISEELSSIVELAATDEIAMTSKEEKLAELMEMNQGLLQCMGVSHSSIETVLRSTLKYNLVSKLTGAGGGGCVLTLIPTLLSKLVLEKVTTELESHGFRCFKVEVGGQGLQIHQG

SEQ ID NO: 66526 - DNA, 770 bp, Triticum aestivum
  misc_feature (1)..(770): Ceres Seq. ID no. 13659044
atgttgtccctcctgcctcttcgcttgccgtcccccgtagccagcacgctcccaggcgccgcctacctcctccccggcctcgccaggattcccatcctccgaaccccaccgcgagccagcatgagcgcggccgcctccacgccggacgcagtcccgtctcccgccgccgccgccgccgctgtcggcgaggaagcgaggaaggaggccgaggacgtggtggtgcagtacgtggtgctgcggcgcgacctggcggacgcgtggccgctggggagcgtggtggcgcaggggtgccacgccgccgtggccgccgtctgggcgcaccgcgaccacccggacaccgccgcctactgcgcgcccggcaacctcgacagcatgcacaaggtaacattggaggtgaaaggggagacacagctgaagaacttggctgagaaactggaagcagctggtgtacggcacaagctgtggatagagcagcccgagaacatcccgacttgcatagccacagcaccctgcccaaagtcgcaggtagcttcgttctttaggaagctaaaactttgcaaatgactgaagagtaatacctatccaggttgctggtcttggttgttatgggatgacattagtagctttgctgcattgaggtcacacattttagtcccatgttattggtgatacctgtttcagtctttcatcaactgattgttcctgtttaagaaatggatgtgctcgtattggcatgacaaataatagtgaatcgatgagttttgtgttgg

SEQ ID NO: 66527 - protein, 187 aa, Triticum aestivum
  peptide (1)..(187): Ceres Seq. ID no. 13659045
  misc_feature (70)..(187): Homolog of NCBI NO: 23612187 NR Description: hypothetical protein [Plasmodium falciparum 3D7]
  misc_feature (70)..(187): Homolog of NCBI NO: 23479593 NR Description: Drosophila melanogaster CG14903 gene product
  misc_feature (73)..(185): Homolog of NCBI NO: 31241677 NR Description: ENSANGP00000018456 [Anopheles gambiae]
  misc_feature (48)..(185): Homolog of NCBI NO: 39585949 NR Description: Hypothetical protein CBG13912 [Caenorhabditis
  misc_feature (74)..(185): Homolog of NCBI NO: 25148624 NR Description: Low molecular weight phosphotyrosine protein
  misc_feature (73)..(187): Homolog of NCBI NO: 24647481 NR Description: CG14903-PA [Drosophila melanogaster]
  misc_feature (72)..(187): Homolog of NCBI NO: 27716785 NR Description: similar to CG14903-PA
  misc_feature (57)..(187): Homolog of NCBI NO: 37546977 NR Description: similar to ENSANGP00000018456 [Homo sapiens]
  misc_feature (59)..(187): Homolog of NCBI NO: 15238224 NR Description: expressed protein [Arabidopsis thaliana]
  misc_feature (1)..(187): Homolog of NCBI NO: 38346909 NR Description: OSJNBb0015N08.9 [Oryza sativa (japonica
MLSLLPLRLPSPVASTLPGAAYLLPGLARIPILRTPPRASMSAAASTPDAVPSPAAAAAAVGEEARKEAEDVVVQYVVLRRDLADAWPLGSVVAQGCHAAVAAVWAHRDHPDTAAYCAPGNLDSMHKVTLEVKGETQLKNLAEKLEAAGVRHKLWIEQPENIPTCIATAPCPKSQVASFFRKLKLCK

SEQ ID NO: 66528 - protein, 147 aa, Triticum aestivum
  peptide (1)..(147): Ceres Seq. ID no. 13659046
  misc_feature (30)..(147): Homolog of NCBI NO: 23612187 NR Description: hypothetical protein [Plasmodium falciparum 3D7]
  misc_feature (30)..(147): Homolog of NCBI NO: 23479593 NR Description: Drosophila melanogaster CG14903 gene product
  misc_feature (33)..(145): Homolog of NCBI NO: 31241677 NR Description: ENSANGP00000018456 [Anopheles gambiae]
  misc_feature (8)..(145): Homolog of NCBI NO: 39585949 NR Description: Hypothetical protein CBG13912 [Caenorhabditis
  misc_feature (34)..(145): Homolog of NCBI NO: 25148624 NR Description: Low molecular weight phosphotyrosine protein
  misc_feature (33)..(147): Homolog of NCBI NO: 24647481 NR Description: CG14903-PA [Drosophila melanogaster]
  misc_feature (32)..(147): Homolog of NCBI NO: 27716785 NR Description: similar to CG14903-PA
  misc_feature (17)..(147): Homolog of NCBI NO: 37546977 NR Description: similar to ENSANGP00000018456 [Homo sapiens]
  misc_feature (19)..(147): Homolog of NCBI NO: 15238224 NR Description: expressed protein [Arabidopsis thaliana]
  misc_feature (1)..(147): Homolog of NCBI NO: 38346909 NR Description: OSJNBb0015N08.9 [Oryza sativa (japonica
MSAAASTPDAVPSPAAAAAAVGEEARKEAEDVVVQYVVLRRDLADAWPLGSVVAQGCHAAVAAVWAHRDHPDTAAYCAPGNLDSMHKVTLEVKGETQLKNLAEKLEAAGVRHKLWIEQPENIPTCIATAPCPKSQVASFFRKLKLCK

SEQ ID NO: 66529 - protein, 141 aa, Triticum aestivum
  peptide (1)..(141): Ceres Seq. ID no. 13659047
VVPPASSLAVPRSQHAPRRRLPPPRPRQDSHPPNPTASQHERGRLHAGRSPVSRRRRRRCRRGSEEGGRGRGGAVRGAAARPGGRVAAGERGGAGVPRRRGRRLGAPRPPGHRRLLRARQPRQHAQGNIGGERGDTAEELG

SEQ ID NO: 66530 - DNA, 882 bp, Triticum aestivum
  misc_feature (1)..(882): Ceres Seq. ID no. 13664236
ctcaccaccccccacagcatctcgcgatcccaaagtccaaccagcctccgccgcctctcctcgcctcgcctgcgagatcagcgccgccttctcccccgtctgtttcgtcggaggagtatcagcaagatgtcaactgccactgctccaggagtgtcctttgctaaatccgggtctgggtcccgggctgttgctccggcgatcaggagcgcttccttcatcggttacgccaagcaaacaccaaacttgtctggcctaaggatgtcaaacaagttcagggtgtctgccgcggccgtgcacaaggtgaagctcataagcccagacggtgaagagcacgagtttgaggcccctgaagacacctacattctcgaggcagctgaaaatgctggagtggagctgccattctcctgccgcgccggatcgtgctccacatgcgcgggcaagatgactaccggggaggttgatcagtcggagggctccttcctcgatgagaaccagatgggtgagggataccttctgacctgtatttcataccgcaaggcggattgcgtcattcaaacccaccaagaggaggaactctactagttgtctcacatgtgcttgtgtggcacaattgttgaagttccatggcggattcgttgttcagttgccttctgttattatctagagagatggctaggtgggtgtatcttcctggtgatcagtccggtcttttgatgagatcgttctatatgagttgtgacaataattgatgtaaaatggtttgtcaatccaaactgcatctgtttagattgcagcaattcgaactaccatacactgttggaggtcttgaaaacatgttgtacttatgggtcacttccttgaggaattatatttggccgctcc

SEQ ID NO: 66531 - protein, 193 aa, Triticum aestivum
  peptide (1)..(193): Ceres Seq. ID no. 15220302
  misc_feature (104)..(180): Pfam Name: 2Fe-2S iron-sulfur cluster binding domain Pfam Description: 2Fe-2S iron-sulfur cluster binding domain
  misc_feature (43)..(193): Homolog of NCBI NO: 15225888 NR Description: ferredoxin, putative [Arabidopsis thaliana]
  misc_feature (112)..(193): Homolog of NCBI NO: 2073385 NR Description: root ferredoxin [Oryza sativa]
  misc_feature (98)..(193): Homolog of NCBI NO: 6688560 NR Description: putative ferredoxin [Lycopersicon esculentum]
  misc_feature (69)..(193): Homolog of NCBI NO: 13182955 NR Description: ferredoxin [Impatiens balsamina]
  misc_feature (43)..(192): Homolog of NCBI NO: 2129915 NR Description: ferredoxin
  misc_feature (51)..(193): Homolog of NCBI NO: 40714664 NR Description: putative ferredoxin [Oryza sativa (japonica
  misc_feature (43)..(193): Homolog of NCBI NO: 119958 NR Description: Ferredoxin III, chloroplast precursor (Fd III)
  misc_feature (43)..(193): Homolog of NCBI NO: 3023750 NR Description: Ferredoxin VI, chloroplast precursor (Fd VI)
  misc_feature (43)..(193): Homolog of NCBI NO: 7430754 NR Description: ferredoxin [2Fe-2S], root - rice
  misc_feature (43)..(193): Homolog of NCBI NO: 19569591 NR Description: ferredoxin precursor [Triticum aestivum]
LTTPHSISRSQSPTSLRRLSSPRLRDQRRLLPRLFRRRSISKMSTATAPGVSFAKSGSGSRAVAPAIRSASFIGYAKQTPNLSGLRMSNKFRVSAAAVHKVKLISPDGEEHEFEAPEDTYILEAAENAGVELPFSCRAGSCSTCAGKMTTGEVDQSEGSFLDENQMGEGYLLTCISYRKADCVIQTHQEEELY

SEQ ID NO: 66532 - protein, 151 aa, Triticum aestivum
  peptide (1)..(151): Ceres Seq. ID no. 15220303
  misc_feature (62)..(138): Pfam Name: 2Fe-2S iron-sulfur cluster binding domain Pfam Description: 2Fe-2S iron-sulfur cluster binding domain
  misc_feature (1)..(151): Homolog of NCBI NO: 15225888 NR Description: ferredoxin, putative [Arabidopsis thaliana]
  misc_feature (70)..(151): Homolog of NCBI NO: 2073385 NR Description: root ferredoxin [Oryza sativa]
  misc_feature (56)..(151): Homolog of NCBI NO: 6688560 NR Description: putative ferredoxin [Lycopersicon esculentum]
  misc_feature (27)..(151): Homolog of NCBI NO: 13182955 NR Description: ferredoxin [Impatiens balsamina]
  misc_feature (1)..(150): Homolog of NCBI NO: 2129915 NR Description: ferredoxin
  misc_feature (9)..(151): Homolog of NCBI NO: 40714664 NR Description: putative ferredoxin [Oryza sativa (japonica
  misc_feature (1)..(151): Homolog of NCBI NO: 119958 NR Description: Ferredoxin III, chloroplast precursor (Fd III)
  misc_feature (1)..(151): Homolog of NCBI NO: 3023750 NR Description: Ferredoxin VI, chloroplast precursor (Fd VI)
  misc_feature (1)..(151): Homolog of NCBI NO: 7430754 NR Description: ferredoxin [2Fe-2S], root - rice
  misc_feature (1)..(151): Homolog of NCBI NO: 19569591 NR Description: ferredoxin precursor [Triticum aestivum]
MSTATAPGVSFAKSGSGSRAVAPAIRSASFIGYAKQTPNLSGLRMSNKFRVSAAAVHKVKLISPDGEEHEFEAPEDTYILEAAENAGVELPFSCRAGSCSTCAGKMTTGEVDQSEGSFLDENQMGEGYLLTCISYRKADCVIQTHQEEELY

SEQ ID NO: 66533 - protein, 107 aa, Triticum aestivum
  peptide (1)..(107): Ceres Seq. ID no. 15220304
  misc_feature (18)..(94): Pfam Name: 2Fe-2S iron-sulfur cluster binding domain Pfam Description: 2Fe-2S iron-sulfur cluster binding domain
  misc_feature (1)..(107): Homolog of NCBI NO: 15225888 NR Description: ferredoxin, putative [Arabidopsis thaliana]
  misc_feature (26)..(107): Homolog of NCBI NO: 2073385 NR Description: root ferredoxin [Oryza sativa]
  misc_feature (12)..(107): Homolog of NCBI NO: 6688560 NR Description: putative ferredoxin [Lycopersicon esculentum]
  misc_feature (1)..(107): Homolog of NCBI NO: 13182955 NR Description: ferredoxin [Impatiens balsamina]
  misc_feature (1)..(106): Homolog of NCBI NO: 2129915 NR Description: ferredoxin
  misc_feature (1)..(107): Homolog of NCBI NO: 40714664 NR Description: putative ferredoxin [Oryza sativa (japonica
  misc_feature (1)..(107): Homolog of NCBI NO: 119958 NR Description: Ferredoxin III, chloroplast precursor (Fd III)
  misc_feature (1)..(107): Homolog of NCBI NO: 3023750 NR Description: Ferredoxin VI, chloroplast precursor (Fd VI)
  misc_feature (1)..(107): Homolog of NCBI NO: 7430754 NR Description: ferredoxin [2Fe-2S], root - rice
  misc_feature (1)..(107): Homolog of NCBI NO: 19569591 NR Description: ferredoxin precursor [Triticum aestivum]
MSNKFRVSAAAVHKVKLISPDGEEHEFEAPEDTYILEAAENAGVELPFSCRAGSCSTCAGKMTTGEVDQSEGSFLDENQMGEGYLLTCISYRKADCVIQTHQEEELY

SEQ ID NO: 66534 - DNA, 1469 bp, Triticum aestivum
  misc_feature (1)..(1469): Ceres Seq. ID no. 13591377
actccacacacacacaccggacacaagcccacccagcgccctaccacccaaccagcacccgccgcccgcccgcccgccatgtcgtccgccgcgccggcgccggcgccggaggagcagcggccgcgcccggtgcgcttcggcatcatgggctgcgcgtccatcgcgcgcaagctcgcgcgggcgatgctgctggccgcgcccgcggccgccgtggccgccgtcggcagccgctccgaggccaaggcgcgcctcttcgccgccgacaacggcctccccgcgggcgcgcgcctgcacggctcctacgaggcgctcctcgacgacccggccgtcgacgccgtctacctgccgctccccaccagcctccacgtgcagtgggtcaccgccgccgccgcgcggggcaagcacgtgctcctcgagaagcccaccgcgctctgcgccgccgacctcgacgccatcctcgccgcctgcgacgccagcggcgtccagttcatggactccaccatgtggatgcaccacccccgcaccgccaagatgcgcgacctcctccccgccgacgtcggcgacgtcagagttataaacagtctgttcagcttccgagcaaacgaagatttcctccagaatgacatcagggtgaagccagacctcgacgcgctgggcgtactcggcgatgccgggtggtactgcatccgcgcgatcctgtgggccgtcaactacgagctcccgaagaacgtgatcgcgctccccgaccctgtcaagaaccaagccggcgtgctcatcgcctgcggcgcgacgctctactgggccgacggaaagacggccaccttccactgctcgttcctcgccaacctcaccatggacctgaccgtcgtcggcaccgacggcacgctccacgtcaccgacttcatcatcccgtacgaggagaagtccggcccgttcagcgtggcgtccaggtcgaacttcgccgagctccacaccgggtgggttccgcagcccagcaggcacgtcgtcacgactgacctgccgcaggaggccctgatggtccaggagttctgcaggctggtgcagggcatcagagacgccggcgccaagcctgagggcaagtggccggccatcaccaggaagacgcaggttgtgatggacgcggtgaaggcttccattgacaagggatttgagtctgtcgatgttgtgagctaagaaaatgcaacacgtagctggtcattctggtgatatgtcttccaagccatggtgcatacctggccattccggtgatcttcaaggccatggcgtatggattgtgcgtttgctcaaatcgtacttgtgcgcaagcgcaaaactacttatatatattggaataataactcgaattattattgccataccaaggacaacattgcagttatcaagttcaatgatatattgctacggatttattgtgtggtattttggcaatatggatgcttgcgaggtcc

SEQ ID NO: 66535 - protein, 397 aa, Triticum aestivum
  peptide (1)..(397): Ceres Seq. ID no. 13591378
  misc_feature (44)..(167): Pfam Name: Oxidoreductase family, NAD-binding Rossmann fold Pfam Description: Oxidoreductase family, NAD-binding Rossmann fold
  misc_feature (9)..(307): Homolog of NCBI NO: 16119237 NR Description: AGR_pAT_7p [Agrobacterium tumefaciens]
  misc_feature (44)..(319): Homolog of NCBI NO: 15616405 NR Description: oxidoreductase [Bacillus halodurans]
  misc_feature (37)..(389): Homolog of NCBI NO: 17549134 NR Description: CONSERVED HYPOTHETICAL PROTEIN [Ralstonia
  misc_feature (42)..(393): Homolog of NCBI NO: 15218937 NR Description: oxidoreductase -related [Arabidopsis thaliana]
  misc_feature (44)..(393): Homolog of NCBI NO: 25518452 NR Description: hypothetical protein F23M19.12 [imported] -
  misc_feature (44)..(393): Homolog of NCBI NO: 18399170 NR Description: expressed protein [Arabidopsis thaliana]
  misc_feature (43)..(391): Homolog of NCBI NO: 7488933 NR Description: protein AX110P - carrot
  misc_feature (66)..(395): Homolog of NCBI NO: 21954073 NR Description: putative AX110P protein [Arabidopsis thaliana]
  misc_feature (44)..(395): Homolog of NCBI NO: 15233990 NR Description: AX110P -related protein [Arabidopsis thaliana]
  misc_feature (16)..(350): Homolog of NCBI NO: 37534168 NR Description: putative oxidoreductase [Oryza sativa (japonica
TPHTHTGHKPTQRPTTQPAPAARPPAMSSAAPAPAPEEQRPRPVRFGIMGCASIARKLARAMLLAAPAAAVAAVGSRSEAKARLFAADNGLPAGARLHGSYEALLDDPAVDAVYLPLPTSLHVQWVTAAAARGKHVLLEKPTALCAADLDAILAACDASGVQFMDSTMWMHHPRTAKMRDLLPADVGDVRVINSLFSFRANEDFLQNDIRVKPDLDALGVLGDAGWYCIRAILWAVNYELPKNVIALPDPVKNQAGVLIACGATLYWADGKTATFHCSFLANLTMDLTVVGTDGTLHVTDFIIPYEEKSGPFSVASRSNFAELHTGWVPQPSRHVVTTDLPQEALMVQEFCRLVQGIRDAGAKPEGKWPAITRKTQVVMDAVKASIDKGFESVDVVS

SEQ ID NO: 66536 - protein, 371 aa, Triticum aestivum
  peptide (1)..(371): Ceres Seq. ID no. 13591379
  misc_feature (18)..(141): Pfam Name: Oxidoreductase family, NAD-binding Rossmann fold Pfam Description: Oxidoreductase family, NAD-binding Rossmann fold
  misc_feature (1)..(281): Homolog of NCBI NO: 16119237 NR Description: AGR_pAT_7p [Agrobacterium tumefaciens]
  misc_feature (18)..(293): Homolog of NCBI NO: 15616405 NR Description: oxidoreductase [Bacillus halodurans]
  misc_feature (11)..(363): Homolog of NCBI NO: 17549134 NR Description: CONSERVED HYPOTHETICAL PROTEIN [Ralstonia
  misc_feature (16)..(367): Homolog of NCBI NO: 15218937 NR Description: oxidoreductase -related [Arabidopsis thaliana]
  misc_feature (18)..(367): Homolog of NCBI NO: 25518452 NR Description: hypothetical protein F23M19.12 [imported] -
  misc_feature (18)..(367): Homolog of NCBI NO: 18399170 NR Description: expressed protein [Arabidopsis thaliana]
  misc_feature (17)..(365): Homolog of NCBI NO: 7488933 NR Description: protein AX110P - carrot
  misc_feature (40)..(369): Homolog of NCBI NO: 21954073 NR Description: putative AX110P protein [Arabidopsis thaliana]
  misc_feature (18)..(369): Homolog of NCBI NO: 15233990 NR Description: AX110P -related protein [Arabidopsis thaliana]
  misc_feature (1)..(324): Homolog of NCBI NO: 37534168 NR Description: putative oxidoreductase [Oryza sativa (japonica
MSSAAPAPAPEEQRPRPVRFGIMGCASIARKLARAMLLAAPAAAVAAVGSRSEAKARLFAADNGLPAGARLHGSYEALLDDPAVDAVYLPLPTSLHVQWVTAAAARGKHVLLEKPTALCAADLDAILAACDASGVQFMDSTMWMHHPRTAKMRDLLPADVGDVRVINSLFSFRANEDFLQNDIRVKPDLDALGVLGDAGWYCIRAILWAVNYELPKNVIALPDPVKNQAGVLIACGATLYWADGKTATFHCSFLANLTMDLTVVGTDGTLHVTDFIIPYEEKSGPFSVASRSNFAELHTGWVPQPSRHVVTTDLPQEALMVQEFCRLVQGIRDAGAKPEGKWPAITRKTQVVMDAVKASIDKGFESVDVVS

SEQ ID NO: 66537 - protein, 349 aa, Triticum aestivum
  peptide (1)..(349): Ceres Seq. ID no. 13591380
  misc_feature (1)..(119): Pfam Name: Oxidoreductase family, NAD-binding Rossmann fold Pfam Description: Oxidoreductase family, NAD-binding Rossmann fold
  misc_feature (1)..(259): Homolog of NCBI NO: 16119237 NR Description: AGR_pAT_7p [Agrobacterium tumefaciens]
  misc_feature (1)..(271): Homolog of NCBI NO: 15616405 NR Description: oxidoreductase [Bacillus halodurans]
  misc_feature (1)..(341): Homolog of NCBI NO: 17549134 NR Description: CONSERVED HYPOTHETICAL PROTEIN [Ralstonia
  misc_feature (1)..(345): Homolog of NCBI NO: 15218937 NR Description: oxidoreductase -related [Arabidopsis thaliana]
  misc_feature (1)..(345): Homolog of NCBI NO: 25518452 NR Description: hypothetical protein F23M19.12 [imported] -
  misc_feature (1)..(345): Homolog of NCBI NO: 18399170 NR Description: expressed protein [Arabidopsis thaliana]
  misc_feature (1)..(343): Homolog of NCBI NO: 7488933 NR Description: protein AX110P - carrot
  misc_feature (18)..(347): Homolog of NCBI NO: 21954073 NR Description: putative AX110P protein [Arabidopsis thaliana]
  misc_feature (1)..(347): Homolog of NCBI NO: 15233990 NR Description: AX110P -related protein [Arabidopsis thaliana]
  misc_feature (1)..(302): Homolog of NCBI NO: 37534168 NR Description: putative oxidoreductase [Oryza sativa (japonica
MGCASIARKLARAMLLAAPAAAVAAVGSRSEAKARLFAADNGLPAGARLHGSYEALLDDPAVDAVYLPLPTSLHVQWVTAAAARGKHVLLEKPTALCAADLDAILAACDASGVQFMDSTMWMHHPRTAKMRDLLPADVGDVRVINSLFSFRANEDFLQNDIRVKPDLDALGVLGDAGWYCIRAILWAVNYELPKNVIALPDPVKNQAGVLIACGATLYWADGKTATFHCSFLANLTMDLTVVGTDGTLHVTDFIIPYEEKSGPFSVASRSNFAELHTGWVPQPSRHVVTTDLPQEALMVQEFCRLVQGIRDAGAKPEGKWPAITRKTQVVMDAVKASIDKGFESVDVVS

SEQ ID NO: 66538 - DNA, 1079 bp, Triticum aestivum
  misc_feature (1)..(1079): Ceres Seq. ID no. 12626444
gtagactccaggaaagggaattcctcaaccatactgccttttcatggatcattccagctgaggattaaggagagaaattaaccgcatcccggggccgcgcgcgagtgtgatgcgcgcagcttgccggcggcgatggatttgccgtggctggacctccccttcaccttcctcacgctgctcctggccacccgcctggcgtacgactactacggcgtcgtcgccgccaccttcgccggcagcttcgcgctccagatcttcctcttctactgcttcgcgcgctggtaccgccacaccatgggcgcccgcgccgagctgctcccctcgtcgacgacgtcgcagcagcgcgacgaggggtccccgcccgtcctgaccccgctgctggaggcgtcgagcggagccggcgccgccgcggccgcgggggccctgctggccaaccggtgcctggccttcgtgttcatggtgttcgtcccgctcatcatcgtcgtcttcgagcggagccaggcggacgtcgtcgcctacgcgctctgcctcgccaacatactcgtcatggtcgtctggctctcgccggaggcgcccggctccatgtcggccaccaagtccttcctggggctcagcgacgacgaggacgaggagagcggcggcgccgaggacaagtgctgcgtctgcctcgccggcatgcgggaggagcaggccctccgggacctgccgcggtgcgggcaccggttccatgagaagtgcatcggcaagtggctcaagaccgggcacccgacatgccccgtgtgccgggcgctggtcttgccgccgccggccgtgcacgcggacccgttcgacgactctgttagccccgtctagctctgtttctcccctgcatccagtctaacaatcattcccatagaaaatcagacccctattcagcatcagacgctggaaatggtgaattgctgggtaatttgctactctctcttcttgataatgcgtagttgtctgaacaaatgttcgactgtagcctgtaaataaggactgtacatttttcctttttactctgaaggttgagatgacggagtcttgcatgtttttgc

SEQ ID NO: 66539 - protein, 239 aa, Triticum aestivum
  peptide (1)..(239): Ceres Seq. ID no. 12626445
  misc_feature (175)..(217): Pfam Name: Zinc finger, C3HC4 type (RING finger) Pfam Description: Zinc finger, C3HC4 type (RING finger)
  misc_feature (165)..(226): Homolog of NCBI NO: 34907968 NR Description: P0446G04.15 [Oryza sativa (japonica
  misc_feature (166)..(225): Homolog of NCBI NO: 25408427 NR Description: probable RING zinc finger protein
  misc_feature (162)..(231): Homolog of NCBI NO: 8698833 NR Description: EL5 [Oryza sativa (japonica cultivar-group)]
  misc_feature (175)..(227): Homolog of NCBI NO: 15240066 NR Description: C3HC4-type RING zinc finger protein-like; protein
  misc_feature (172)..(224): Homolog of NCBI NO: 15233696 NR Description: putative protein; protein id: At4g38140.1
  misc_feature (151)..(223): Homolog of NCBI NO: 15226188 NR Description: hypothetical protein; protein id: At2g34000.1
  misc_feature (163)..(221): Homolog of NCBI NO: 25403249 NR Description: protein F21J9.24 [imported] - Arabidopsis
  misc_feature (167)..(222): Homolog of NCBI NO: 34894518 NR Description: P0551A11.23 [Oryza sativa (japonica
  misc_feature (84)..(225): Homolog of NCBI NO: 34909640 NR Description: P0503C12.20 [Oryza sativa (japonica
  misc_feature (101)..(227): Homolog of NCBI NO: 15234956 NR Description: putative protein; protein id: At4g10160.1
MDLPWLDLPFTFLTLLLATRLAYDYYGVVAATFAGSFALQIFLFYCFARWYRHTMGARAELLPSSTTSQQRDEGSPPVLTPLLEASSGAGAAAAAGALLANRCLAFVFMVFVPLIIVVFERSQADVVAYALCLANILVMVVWLSPEAPGSMSATKSFLGLSDDEDEESGGAEDKCCVCLAGMREEQALRDLPRCGHRFHEKCIGKWLKTGHPTCPVCRALVLPPPAVHADPFDDSVSPV

SEQ ID NO: 66540 - protein, 185 aa, Triticum aestivum
  peptide (1)..(185): Ceres Seq. ID no. 12626446
  misc_feature (121)..(163): Pfam Name: Zinc finger, C3HC4 type (RING finger) Pfam Description: Zinc finger, C3HC4 type (RING finger)
  misc_feature (111)..(172): Homolog of NCBI NO: 34907968 NR Description: P0446G04.15 [Oryza sativa (japonica
  misc_feature (112)..(171): Homolog of NCBI NO: 25408427 NR Description: probable RING zinc finger protein
  misc_feature (108)..(177): Homolog of NCBI NO: 8698833 NR Description: EL5 [Oryza sativa (japonica cultivar-group)]
  misc_feature (121)..(173): Homolog of NCBI NO: 15240066 NR Description: C3HC4-type RING zinc finger protein-like; protein
  misc_feature (118)..(170): Homolog of NCBI NO: 15233696 NR Description: putative protein; protein id: At4g38140.1
  misc_feature (97)..(169): Homolog of NCBI NO: 15226188 NR Description: hypothetical protein; protein id: At2g34000.1
  misc_feature (109)..(167): Homolog of NCBI NO: 25403249 NR Description: protein F21J9.24 [imported] - Arabidopsis
  misc_feature (113)..(168): Homolog of NCBI NO: 34894518 NR Description: P0551A11.23 [Oryza sativa (japonica
  misc_feature (30)..(171): Homolog of NCBI NO: 34909640 NR Description: P0503C12.20 [Oryza sativa (japonica
  misc_feature (47)..(173): Homolog of NCBI NO: 15234956 NR Description: putative protein; protein id: At4g10160.1
MGARAELLPSSTTSQQRDEGSPPVLTPLLEASSGAGAAAAAGALLANRCLAFVFMVFVPLIIVVFERSQADVVAYALCLANILVMVVWLSPEAPGSMSATKSFLGLSDDEDEESGGAEDKCCVCLAGMREEQALRDLPRCGHRFHEKCIGKWLKTGHPTCPVCRALVLPPPAVHADPFDDSVSPV

SEQ ID NO: 66541 - protein, 131 aa, Triticum aestivum
  peptide (1)..(131): Ceres Seq. ID no. 12626447
  misc_feature (67)..(109): Pfam Name: Zinc finger, C3HC4 type (RING finger) Pfam Description: Zinc finger, C3HC4 type (RING finger)
  misc_feature (57)..(118): Homolog of NCBI NO: 34907968 NR Description: P0446G04.15 [Oryza sativa (japonica
  misc_feature (58)..(117): Homolog of NCBI NO: 25408427 NR Description: probable RING zinc finger protein
  misc_feature (54)..(123): Homolog of NCBI NO: 8698833 NR Description: EL5 [Oryza sativa (japonica cultivar-group)]
  misc_feature (67)..(119): Homolog of NCBI NO: 15240066 NR Description: C3HC4-type RING zinc finger protein-like; protein
  misc_feature (64)..(116): Homolog of NCBI NO: 15233696 NR Description: putative protein; protein id: At4g38140.1
  misc_feature (43)..(115): Homolog of NCBI NO: 15226188 NR Description: hypothetical protein; protein id: At2g34000.1
  misc_feature (55)..(113): Homolog of NCBI NO: 25403249 NR Description: protein F21J9.24 [imported] - Arabidopsis
  misc_feature (59)..(114): Homolog of NCBI NO: 34894518 NR Description: P0551A11.23 [Oryza sativa (japonica
  misc_feature (1)..(117): Homolog of NCBI NO: 34909640 NR Description: P0503C12.20 [Oryza sativa (japonica
  misc_feature (1)..(119): Homolog of NCBI NO: 15234956 NR Description: putative protein; protein id: At4g10160.1
MVFVPLIIVVFERSQADVVAYALCLANILVMVVWLSPEAPGSMSATKSFLGLSDDEDEESGGAEDKCCVCLAGMREEQALRDLPRCGHRFHEKCIGKWLKTGHPTCPVCRALVLPPPAVHADPFDDSVSPV

SEQ ID NO: 66542 - DNA, 1634 bp, Triticum aestivum
  misc_feature (1)..(1634): Ceres Seq. ID no. 13658888
ctcgccgccccgactcgacccgacgcgactcccctcccaagcccaaatccccaaatcgcccctaaaaccctagccgccgccgccatggccgcctcccccaccgcctccgcctccggctccacggccgcggcggcggcggccgcctccgaggccaacgacgggcccacgctctccgtggtcaccaagcgcctccgcgcgctgcgcaagaagcagaaccgcatcgcgcagatggaggaggccgtcgccgccggcaagacgctcaaccaggagcagaaggaggtgatgcgctccaagcccaccctcgccgccgtcatcgacgagctcgagcgcctccgcacgccgctcgccgtcgccgtcgccgaggaggtctccgtcgcccccgcccccgccccggccccggagccctccggctccgattcctccgtccaggacctcctcgcgctcgtctacttcggcgccctcttcgacgtcaagccgcagagcgacttcatcgccacgatggtcgcgcgcgagcatgagcggagcagctgcatcacctatgactgcgtcggggacgacaccgtggacctgctcgtggagggcgacctcgacgtcgtgtccgctgtggccgcccttgccgccgctcgccctgcttccgcggtgggcgtctcccaccgcgacgcgctccaggcctgtgcccaccatgcccgcttatggctcgcccgcgctgacgagcccatccaccctggctcctctgttacttatgctgcggtgagggctaagctggacaggatcatggcatcagactactacacagcagctgcagttggaggagggagctatggagctgaaggtgtgcaggcacaggagagtatgactgcctcaccagaggcatcagcagtggaggagaacctagctgctgaaggtcacaaggaggagaaggaagactcccatgctacggaaatttacaatgatcatcagtctgactcagcagacgtgcaaaatgtggatcgtgaagcccccgtgaaccctcccgaggaatatccctctgttcaggcagagcaggagaagtttgacatggaagagcaagatgagagggatgctgagccaaaagagcagcagttccagcaccctaggcggtctcatcagaaccagcggggaggtggtcgtggcaggaggggggcctaccccaatggccgtggcgggcgtggaggcggccgcggcatgggcggcggataccagaatgggcgtggataccagggtgggggtggcggataccagggaggcggtggcgagtaccagaatggccggggtggtggtggcggttactacaacaacaacaacgaagaagggtactaccagccgaggaacttcaacaccaggggcaggggtggtcggtctggcggcggcaactctcactacagcaaccagggaggaggcggcgcgcagggaggtggccacgcgtacgccgagagggttgaggcaaatgcttagttgttgaattattttgcttgggtggaggtcacgagagggagagagtctgggagccattttgttattatagaactaacttagcctgttattacgtcgcaatccgtcccccatctgtgagttggttttgttggtccaatccaatgactgcatatggttggtcg

SEQ ID NO: 66543 - protein, 490 aa, Triticum aestivum
  peptide (1)..(490): Ceres Seq. ID no. 15219930
  misc_feature (339)..(479): Pfam Name: Herpesvirus latent membrane protein 1 (LMP1) Pfam Description: Herpesvirus latent membrane protein 1 (LMP1)
  misc_feature (346)..(482): Homolog of NCBI NO: 121644 NR Description: Glycine-rich cell wall structural protein
  misc_feature (380)..(477): Homolog of NCBI NO: 34809534 NR Description: Epa4p [Candida glabrata]
  misc_feature (380)..(479): Homolog of NCBI NO: 121644 NR Description: Glycine-rich cell wall structural protein
  misc_feature (380)..(477): Homolog of NCBI NO: 34809533 NR Description: Epa5p [Candida glabrata]
  misc_feature (380)..(477): Homolog of NCBI NO: 34809533 NR Description: Epa5p [Candida glabrata]
  misc_feature (380)..(477): Homolog of NCBI NO: 34809533 NR Description: Epa5p [Candida glabrata]
  misc_feature (380)..(477): Homolog of NCBI NO: 34809533 NR Description: Epa5p [Candida glabrata]
  misc_feature (44)..(126): Homolog of NCBI NO: 15223426 NR Description: glycine-rich protein [Arabidopsis thaliana]
  misc_feature (279)..(469): Homolog of NCBI NO: 15223426 NR Description: glycine-rich protein [Arabidopsis thaliana]
  misc_feature (65)..(448): Homolog of NCBI NO: 15223426 NR Description: glycine-rich protein [Arabidopsis thaliana]
LAAPTRPDATPLPSPNPQIAPKTLAAAAMAASPTASASGSTAAAAAAASEANDGPTLSVVTKRLRALRKKQNRIAQMEEAVAAGKTLNQEQKEVMRSKPTLAAVIDELERLRTPLAVAVAEEVSVAPAPAPAPEPSGSDSSVQDLLALVYFGALFDVKPQSDFIATMVAREHERSSCITYDCVGDDTVDLLVEGDLDVVSAVAALAAARPASAVGVSHRDALQACAHHARLWLARADEPIHPGSSVTYAAVRAKLDRIMASDYYTAAAVGGGSYGAEGVQAQESMTASPEASAVEENLAAEGHKEEKEDSHATEIYNDHQSDSADVQNVDREAPVNPPEEYPSVQAEQEKFDMEEQDERDAEPKEQQFQHPRRSHQNQRGGGRGRRGAYPNGRGGRGGGRGMGGGYQNGRGYQGGGGGYQGGGGEYQNGRGGGGGYYNNNNEEGYYQPRNFNTRGRGGRSGGGNSHYSNQGGGGAQGGGHAYAERVEANA

SEQ ID NO: 66544 - protein, 462 aa, Triticum aestivum
  peptide (1)..(462): Ceres Seq. ID no. 15219931
  misc_feature (311)..(451): Pfam Name: Herpesvirus latent membrane protein 1 (LMP1) Pfam Description: Herpesvirus latent membrane protein 1 (LMP1)
  misc_feature (318)..(454): Homolog of NCBI NO: 121644 NR Description: Glycine-rich cell wall structural protein
  misc_feature (352)..(449): Homolog of NCBI NO: 34809534 NR Description: Epa4p [Candida glabrata]
  misc_feature (352)..(451): Homolog of NCBI NO: 121644 NR Description: Glycine-rich cell wall structural protein
  misc_feature (352)..(449): Homolog of NCBI NO: 34809533 NR Description: Epa5p [Candida glabrata]
  misc_feature (352)..(449): Homolog of NCBI NO: 34809533 NR Description: Epa5p [Candida glabrata]
  misc_feature (352)..(449): Homolog of NCBI NO: 34809533 NR Description: Epa5p [Candida glabrata]
  misc_feature (352)..(449): Homolog of NCBI NO: 34809533 NR Description: Epa5p [Candida glabrata]
  misc_feature (16)..(98): Homolog of NCBI NO: 15223426 NR Description: glycine-rich protein [Arabidopsis thaliana]
  misc_feature (251)..(441): Homolog of NCBI NO: 15223426 NR Description: glycine-rich protein [Arabidopsis thaliana]
  misc_feature (37)..(420): Homolog of NCBI NO: 15223426 NR Description: glycine-rich protein [Arabidopsis thaliana]
MAASPTASASGSTAAAAAAASEANDGPTLSVVTKRLRALRKKQNRIAQMEEAVAAGKTLNQEQKEVMRSKPTLAAVIDELERLRTPLAVAVAEEVSVAPAPAPAPEPSGSDSSVQDLLALVYFGALFDVKPQSDFIATMVAREHERSSCITYDCVGDDTVDLLVEGDLDVVSAVAALAAARPASAVGVSHRDALQACAHHARLWLARADEPIHPGSSVTYAAVRAKLDRIMASDYYTAAAVGGGSYGAEGVQAQESMTASPEASAVEENLAAEGHKEEKEDSHATEIYNDHQSDSADVQNVDREAPVNPPEEYPSVQAEQEKFDMEEQDERDAEPKEQQFQHPRRSHQNQRGGGRGRRGAYPNGRGGRGGGRGMGGGYQNGRGYQGGGGGYQGGGGEYQNGRGGGGGYYNNNNEEGYYQPRNFNTRGRGGRSGGGNSHYSNQGGGGAQGGGHAYAERVEANA

SEQ ID NO: 66545 - protein, 414 aa, Triticum aestivum
  peptide (1)..(414): Ceres Seq. ID no. 15219932
  misc_feature (263)..(403): Pfam Name: Herpesvirus latent membrane protein 1 (LMP1) Pfam Description: Herpesvirus latent membrane protein 1 (LMP1)
  misc_feature (270)..(406): Homolog of NCBI NO: 121644 NR Description: Glycine-rich cell wall structural protein
  misc_feature (304)..(401): Homolog of NCBI NO: 34809534 NR Description: Epa4p [Candida glabrata]
  misc_feature (304)..(403): Homolog of NCBI NO: 121644 NR Description: Glycine-rich cell wall structural protein
  misc_feature (304)..(401): Homolog of NCBI NO: 34809533 NR Description: Epa5p [Candida glabrata]
  misc_feature (304)..(401): Homolog of NCBI NO: 34809533 NR Description: Epa5p [Candida glabrata]
  misc_feature (304)..(401): Homolog of NCBI NO: 34809533 NR Description: Epa5p [Candida glabrata]
  misc_feature (304)..(401): Homolog of NCBI NO: 34809533 NR Description: Epa5p [Candida glabrata]
  misc_feature (1)..(50): Homolog of NCBI NO: 15223426 NR Description: glycine-rich protein [Arabidopsis thaliana]
  misc_feature (203)..(393): Homolog of NCBI NO: 15223426 NR Description: glycine-rich protein [Arabidopsis thaliana]
  misc_feature (1)..(372): Homolog of NCBI NO: 15223426 NR Description: glycine-rich protein [Arabidopsis thaliana]
MEEAVAAGKTLNQEQKEVMRSKPTLAAVIDELERLRTPLAVAVAEEVSVAPAPAPAPEPSGSDSSVQDLLALVYFGALFDVKPQSDFIATMVAREHERSSCITYDCVGDDTVDLLVEGDLDVVSAVAALAAARPASAVGVSHRDALQACAHHARLWLARADEPIHPGSSVTYAAVRAKLDRIMASDYYTAAAVGGGSYGAEGVQAQESMTASPEASAVEENLAAEGHKEEKEDSHATEIYNDHQSDSADVQNVDREAPVNPPEEYPSVQAEQEKFDMEEQDERDAEPKEQQFQHPRRSHQNQRGGGRGRRGAYPNGRGGRGGGRGMGGGYQNGRGYQGGGGGYQGGGGEYQNGRGGGGGYYNNNNEEGYYQPRNFNTRGRGGRSGGGNSHYSNQGGGGAQGGGHAYAERVEANA

SEQ ID NO: 66546 - DNA, 2137 bp, Triticum aestivum
  misc_feature (1)..(2137): Ceres Seq. ID no. 14302871
agactagtaactgtccaatcaaatcaaaccgaggagggacggtgcagtccctcgttaattttactggaccatctctctgactctcctctccacctcgcccgcttctcttctttacctagccttctcgggtaagctggctaggaccagtggcagcagcagtagtgggagcaggagctgcttggcttgccgttgctgcctttcacgtccacctgcgcgggcgtgaggcgtggaatccaaacaatggcgctgggatccgcggatctataggcgaggccaggcgcgggatgggatctgggaccagcaaggccgcttcgccggcgccggcgccggccggcggcgaggccaaggcgcggaatgggaagccgagggggaggagcctgatgcgcctgcccagctactcctgcttccggggcttcacgcccgagtctgacccttcttcttcgctgccggcgccgccgccgctaggggtcgagtcaagcaagggaggggagacgccttcactcgctcacattggcatatcagataatgatgctccatcagctcctaaactgaatccaagtgaaggcagaacgacgccttcatcagataccgacagagatcaaggtgatgatgtattgcagaatgtcactgctaccaggactgcagtcgacgacgaccaatcgccaaatccttctgaccggccgcatccatgctttggtgtcaactttgggttgagtagagccgtcagcttgggatcatcagtggcatgctccattatgtcaaccggcctctcctcttcagctaatcctagtattggaaatgtggaccatccttccgatgcaagcatccctcaacaaggtggtgcatcaacttctgggatttattcaagtctggatatgctaagggatagcgtcacaacacaagctagagccgctcatcaggctaggagaaatttgctggaatctgaagatgctaacttgaggcattcgcacagaaggatgggaccccaggaaccttctgaaggcagtgtccggtttagccggacacttagtgttggaagacttcgtgacagggtcctcaggaggactccattctcagatagtttattcacctcttcactttatgatagaccagtgtggacagcaggaaatgccagtgcgaggcaagattcatctgtgatgcaacggactaattcagacagaggttccgaaccgcaatcagaaccttcaactaacagcacgtacaattctggctctgcaactctaagagaggccagtaatcgggatcttcttgagcggagatcagcttttcttgaaaggaggaggaggatacgatctcaggtccgagctctccaaaggttgggcagcaggtttgaaaatttatcaggtcatgagagatcatgcattctatctggtcaacatagaacaggaaattgcaactgcagggcaagcagtcgaccaggtaatcctgatgaagaatccggcacaagggctagcatatcaagaattgttatgctagcagaagcactctttgaggtcttggatgaaatccaccaacagtctgctgctttatcctcaaggacatcattaccttcaattggatccgttcctgctccaaaggagatcgtcgagagtcttcctgtcaaggtgtacagaaagccgttgaaacaccaaactgatgaggctgcacaatgctacatttgccttgtcgaatatgaagaaggagactgtgttcgcatacttccatgcaatcacgaatttcatctaacatgtgtagataagtggctgaaagagattcacagggtttgtccactctgtcgtggcgatgtctgccgatcggattcgtcgagcatagggaaattcagctgattccttttatctcttaaggatccagcttcttgcgagaaaaaaatggagcttccgacacggttatttgatccagccggatagagcccgcagaatgttgcgggtgtgatttgatcttcatttctagtctggtctgaacaactcaggatgctcctgtgtgttatagcagatttgcatggcggtcatcccattataaacgatgagcttccatgcgaatttgagatttgttgtacggtggtgtgaagcctgttgatatattggttatatatatggcttgcgttttcgtgatgttg

SEQ ID NO: 66547 - protein, 363 aa, Triticum aestivum
  peptide (1)..(363): Ceres Seq. ID no. 14302872
  misc_feature (306)..(347): Pfam Name: Zinc finger, C3HC4 type (RING finger) Pfam Description: Zinc finger, C3HC4 type (RING finger)
  misc_feature (257)..(350): Homolog of NCBI NO: 19745198 NR Description: RING finger protein OIP1 [Rattus norvegicus]
  misc_feature (257)..(350): Homolog of NCBI NO: 10437428 NR Description: unnamed protein product [Homo sapiens]
  misc_feature (283)..(361): Homolog of NCBI NO: 37552455 NR Description: similar to RING finger protein 11 (Sid1669)
  misc_feature (278)..(348): Homolog of NCBI NO: 15219150 NR Description: zinc finger (C3HC4-type RING finger) protein
  misc_feature (281)..(358): Homolog of NCBI NO: 34577091 NR Description: ring finger protein 13 isoform 3; RING zinc
  misc_feature (228)..(362): Homolog of NCBI NO: 29477113 NR Description: Similar to hypothetical protein LOC51255 [Danio
  misc_feature (240)..(351): Homolog of NCBI NO: 34894518 NR Description: P0551A11.23 [Oryza sativa (japonica
  misc_feature (1)..(343): Homolog of NCBI NO: 10177000 NR Description: gene_id:K9E15.7~unknown protein [Arabidopsis
  misc_feature (1)..(358): Homolog of NCBI NO: 22327588 NR Description: zinc finger (C3HC4-type RING finger) protein
  misc_feature (1)..(358): Homolog of NCBI NO: 17978924 NR Description: AT5g45290/K9E15_7 [Arabidopsis thaliana]
MSTGLSSSANPSIGNVDHPSDASIPQQGGASTSGIYSSLDMLRDSVTTQARAAHQARRNLLESEDANLRHSHRRMGPQEPSEGSVRFSRTLSVGRLRDRVLRRTPFSDSLFTSSLYDRPVWTAGNASARQDSSVMQRTNSDRGSEPQSEPSTNSTYNSGSATLREASNRDLLERRSAFLERRRRIRSQVRALQRLGSRFENLSGHERSCILSGQHRTGNCNCRASSRPGNPDEESGTRASISRIVMLAEALFEVLDEIHQQSAALSSRTSLPSIGSVPAPKEIVESLPVKVYRKPLKHQTDEAAQCYICLVEYEEGDCVRILPCNHEFHLTCVDKWLKEIHRVCPLCRGDVCRSDSSSIGKFS

SEQ ID NO: 66548 - protein, 520 aa, Triticum aestivum
  peptide (1)..(520): Ceres Seq. ID no. 14302873
  misc_feature (463)..(504): Pfam Name: Zinc finger, C3HC4 type (RING finger) Pfam Description: Zinc finger, C3HC4 type (RING finger)
  misc_feature (414)..(507): Homolog of NCBI NO: 19745198 NR Description: RING finger protein OIP1 [Rattus norvegicus]
  misc_feature (414)..(507): Homolog of NCBI NO: 10437428 NR Description: unnamed protein product [Homo sapiens]
  misc_feature (440)..(518): Homolog of NCBI NO: 37552455 NR Description: similar to RING finger protein 11 (Sid1669)
  misc_feature (435)..(505): Homolog of NCBI NO: 15219150 NR Description: zinc finger (C3HC4-type RING finger) protein
  misc_feature (438)..(515): Homolog of NCBI NO: 34577091 NR Description: ring finger protein 13 isoform 3; RING zinc
  misc_feature (385)..(519): Homolog of NCBI NO: 29477113 NR Description: Similar to hypothetical protein LOC51255 [Danio
  misc_feature (397)..(508): Homolog of NCBI NO: 34894518 NR Description: P0551A11.23 [Oryza sativa (japonica
  misc_feature (144)..(500): Homolog of NCBI NO: 10177000 NR Description: gene_id:K9E15.7~unknown protein [Arabidopsis
  misc_feature (144)..(515): Homolog of NCBI NO: 22327588 NR Description: zinc finger (C3HC4-type RING finger) protein
  misc_feature (144)..(515): Homolog of NCBI NO: 17978924 NR Description: AT5g45290/K9E15_7 [Arabidopsis thaliana]
MGSGTSKAASPAPAPAGGEAKARNGKPRGRSLMRLPSYSCFRGFTPESDPSSSLPAPPPLGVESSKGGETPSLAHIGISDNDAPSAPKLNPSEGRTTPSSDTDRDQGDDVLQNVTATRTAVDDDQSPNPSDRPHPCFGVNFGLSRAVSLGSSVACSIMSTGLSSSANPSIGNVDHPSDASIPQQGGASTSGIYSSLDMLRDSVTTQARAAHQARRNLLESEDANLRHSHRRMGPQEPSEGSVRFSRTLSVGRLRDRVLRRTPFSDSLFTSSLYDRPVWTAGNASARQDSSVMQRTNSDRGSEPQSEPSTNSTYNSGSATLREASNRDLLERRSAFLERRRRIRSQVRALQRLGSRFENLSGHERSCILSGQHRTGNCNCRASSRPGNPDEESGTRASISRIVMLAEALFEVLDEIHQQSAALSSRTSLPSIGSVPAPKEIVESLPVKVYRKPLKHQTDEAAQCYICLVEYEEGDCVRILPCNHEFHLTCVDKWLKEIHRVCPLCRGDVCRSDSSSIGKFS

SEQ ID NO: 66549 - protein, 488 aa, Triticum aestivum
  peptide (1)..(488): Ceres Seq. ID no. 14302874
  misc_feature (431)..(472): Pfam Name: Zinc finger, C3HC4 type (RING finger) Pfam Description: Zinc finger, C3HC4 type (RING finger)
  misc_feature (382)..(475): Homolog of NCBI NO: 19745198 NR Description: RING finger protein OIP1 [Rattus norvegicus]
  misc_feature (382)..(475): Homolog of NCBI NO: 10437428 NR Description: unnamed protein product [Homo sapiens]
  misc_feature (408)..(486): Homolog of NCBI NO: 37552455 NR Description: similar to RING finger protein 11 (Sid1669)
  misc_feature (403)..(473): Homolog of NCBI NO: 15219150 NR Description: zinc finger (C3HC4-type RING finger) protein
  misc_feature (406)..(483): Homolog of NCBI NO: 34577091 NR Description: ring finger protein 13 isoform 3; RING zinc
  misc_feature (353)..(487): Homolog of NCBI NO: 29477113 NR Description: Similar to hypothetical protein LOC51255 [Danio
  misc_feature (365)..(476): Homolog of NCBI NO: 34894518 NR Description: P0551A11.23 [Oryza sativa (japonica
  misc_feature (112)..(468): Homolog of NCBI NO: 10177000 NR Description: gene_id:K9E15.7~unknown protein [Arabidopsis
  misc_feature (112)..(483): Homolog of NCBI NO: 22327588 NR Description: zinc finger (C3HC4-type RING finger) protein
  misc_feature (112)..(483): Homolog of NCBI NO: 17978924 NR Description: AT5g45290/K9E15_7 [Arabidopsis thaliana]
MRLPSYSCFRGFTPESDPSSSLPAPPPLGVESSKGGETPSLAHIGISDNDAPSAPKLNPSEGRTTPSSDTDRDQGDDVLQNVTATRTAVDDDQSPNPSDRPHPCFGVNFGLSRAVSLGSSVACSIMSTGLSSSANPSIGNVDHPSDASIPQQGGASTSGIYSSLDMLRDSVTTQARAAHQARRNLLESEDANLRHSHRRMGPQEPSEGSVRFSRTLSVGRLRDRVLRRTPFSDSLFTSSLYDRPVWTAGNASARQDSSVMQRTNSDRGSEPQSEPSTNSTYNSGSATLREASNRDLLERRSAFLERRRRIRSQVRALQRLGSRFENLSGHERSCILSGQHRTGNCNCRASSRPGNPDEESGTRASISRIVMLAEALFEVLDEIHQQSAALSSRTSLPSIGSVPAPKEIVESLPVKVYRKPLKHQTDEAAQCYICLVEYEEGDCVRILPCNHEFHLTCVDKWLKEIHRVCPLCRGDVCRSDSSSIGKFS

SEQ ID NO: 66550 - DNA, 2231 bp, Triticum aestivum
  misc_feature (1)..(2231): Ceres Seq. ID no. 14303173
acctcgctcactccccaagctcactctcacacccacttcaaacccctccaccccaaaccccagccacccacccaccatggccgcccaccccaccgggaccaagaagcggagcggcagcggccatggggccgccgcggccctcgtcgtcgccgccctcctcgtcctctgctccaccgcgtccatggcgctcaccccggacggcgaggcgctgctggagctcaagctggcattcaacgccacggcggggcagcggctgggcagctggcgggccgccgaccccaacccctgcggctgggagggcgtctcctgctccttcccggacctcagggtccatgccataaatctgccctacatgcagctcgggggcatcatctcgcccagcatcggcaggctcaccaagctgcagagactagctctgcaccagaacagcctgcacggccccatccccgccgagatcaggaactgcaccgagctcagagccatttacctgagagccaactacctgcaaggcggcatccctccggggatcggcgacctcactcacctcaccatcctggacctgtccagcaatctgctgcggggtgcaataccggcgacgatcgggagcctaactcatttgcggttcctgaacctctccaccaacttcttctcgggagagatcccgaatgtcggcgtcctcggaaccttcaagagcagctcgtatgtcggaaatctggagctttgtgggctgcccatacagaaaggttgccgcggaaccctcgggttccctgcggtgctgccgcactctgaccccctctcctcctctggtgtttctccaatcaccaacaataataaaacctcacactttctgaatggcgttgtgatcggttcaatgtcaaccatggccatcgcgctggtcgcggtgctaggcttcctctgggtatgcttgctgtccaggaagaagaatggtgtgaactatgagaaaatggacaagcaaactgtcccggatggtgcaaagcttgtgacataccagtggaaccttccgtattcgtcgggcgagatcattagaaggctggagctgcttgatgaagaggatgtggttggttgcggcgggtttggtacggtgtacaagatggtgatggatgatggcacggcgtttgccgtcaagagggttgacctcaatcgagagaggcgagacaagacttttgagaaggagctcgagatcctgggcagcattaggcatatcaaccttgtcaatctgcaaggatactgccggctctccacggccaaactactcatatatgatttcatggagctgggcagcttggatagctacctccatggagatgcacaggaggatcagccattgaactggaatgcgcgtatgaagatcgccctgggctctgcccgcggtttggcatatctgcaccatgattgctcgccggggatcgtccaccgggacatcaaagccagcaacatccttctggacagatgcttggagccgcgcgtgtctgatttcggcctcgcgaggctgctggtggacaatgagacccatgtaaccactgtcgtggcgggtaccttcgggtacctagcaccagagtacctgcaaaatgggcattcgaccgagaaatcagacgtgtatagctttggggtgcttttgctggaactggtgaccggaaagaggcctacggattcttgcttcctcaacaagggtctcaacatcgtcggctggctgaacacgctgagcggggagcatcgcctggaggagatcctggactcgcggtcgggcgacgcggaggtggaggcggtggaggggatcctggacatcgcggccatgtgcacggacgcggacccggggcagcggccgtccatgggcgcggtgctcaagatgctggaggaggagatcctgtcgccctgcctcagcgagctctactacgagcagcacctggagctctgagagccttgagtgtaggtgagtgagtggacagtgccagttgtgcaggtactgctgctcatgatcgaccgatgatggcctggatctggattgaagaagctcaagttttgtagatacgcttgatgatgaaccaccaccgtgtgtgtaggatggactgtgttggcatctctagactagcgagtggttcttgggtcagaaccaggaccaatgcagcaatcggctgtgctttttgtacatagggttggagacctttgagccttttctttcatcccctttttccgacgtggttgcttcttcg

SEQ ID NO: 66551 - protein, 644 aa, Triticum aestivum
  peptide (1)..(644): Ceres Seq. ID no. 14303174
  misc_feature (45)..(630): Homolog of NCBI NO: 38679443 NR Description: benzothiadiazole-induced somatic embryogenesis
  misc_feature (45)..(630): Homolog of NCBI NO: 40253600 NR Description: putative somatic embryogenesis receptor kinase 1
  misc_feature (48)..(630): Homolog of NCBI NO: 13897310 NR Description: SERK2 protein [Zea mays]
  misc_feature (54)..(630): Homolog of NCBI NO: 13897308 NR Description: SERK1 protein [Zea mays]
  misc_feature (53)..(630): Homolog of NCBI NO: 21740899 NR Description: OSJNBa0036B21.13 [Oryza sativa (japonica
  misc_feature (137)..(637): Homolog of NCBI NO: 15227455 NR Description: leucine-rich repeat transmembrane protein kinase,
  misc_feature (137)..(637): Homolog of NCBI NO: 30692520 NR Description: leucine-rich repeat transmembrane protein kinase,
  misc_feature (137)..(637): Homolog of NCBI NO: 25403114 NR Description: probable protein kinase [imported] - Arabidopsis
  misc_feature (67)..(639): Homolog of NCBI NO: 10177448 NR Description: receptor-like protein kinase [Arabidopsis
  misc_feature (38)..(639): Homolog of NCBI NO: 30697726 NR Description: leucine rich repeat protein family [Arabidopsis
PRSLPKLTLTPTSNPSTPNPSHPPTMAAHPTGTKKRSGSGHGAAAALVVAALLVLCSTASMALTPDGEALLELKLAFNATAGQRLGSWRAADPNPCGWEGVSCSFPDLRVHAINLPYMQLGGIISPSIGRLTKLQRLALHQNSLHGPIPAEIRNCTELRAIYLRANYLQGGIPPGIGDLTHLTILDLSSNLLRGAIPATIGSLTHLRFLNLSTNFFSGEIPNVGVLGTFKSSSYVGNLELCGLPIQKGCRGTLGFPAVLPHSDPLSSSGVSPITNNNKTSHFLNGVVIGSMSTMAIALVAVLGFLWVCLLSRKKNGVNYEKMDKQTVPDGAKLVTYQWNLPYSSGEIIRRLELLDEEDVVGCGGFGTVYKMVMDDGTAFAVKRVDLNRERRDKTFEKELEILGSIRHINLVNLQGYCRLSTAKLLIYDFMELGSLDSYLHGDAQEDQPLNWNARMKIALGSARGLAYLHHDCSPGIVHRDIKASNILLDRCLEPRVSDFGLARLLVDNETHVTTVVAGTFGYLAPEYLQNGHSTEKSDVYSFGVLLLELVTGKRPTDSCFLNKGLNIVGWLNTLSGEHRLEEILDSRSGDAEVEAVEGILDIAAMCTDADPGQRPSMGAVLKMLEEEILSPCLSELYYEQHLEL

SEQ ID NO: 66552 - protein, 619 aa, Triticum aestivum
  peptide (1)..(619): Ceres Seq. ID no. 14303175
  misc_feature (20)..(605): Homolog of NCBI NO: 38679443 NR Description: benzothiadiazole-induced somatic embryogenesis
  misc_feature (20)..(605): Homolog of NCBI NO: 40253600 NR Description: putative somatic embryogenesis receptor kinase 1
  misc_feature (23)..(605): Homolog of NCBI NO: 13897310 NR Description: SERK2 protein [Zea mays]
  misc_feature (29)..(605): Homolog of NCBI NO: 13897308 NR Description: SERK1 protein [Zea mays]
  misc_feature (28)..(605): Homolog of NCBI NO: 21740899 NR Description: OSJNBa0036B21.13 [Oryza sativa (japonica
  misc_feature (112)..(612): Homolog of NCBI NO: 15227455 NR Description: leucine-rich repeat transmembrane protein kinase,
  misc_feature (112)..(612): Homolog of NCBI NO: 30692520 NR Description: leucine-rich repeat transmembrane protein kinase,
  misc_feature (112)..(612): Homolog of NCBI NO: 25403114 NR Description: probable protein kinase [imported] - Arabidopsis
  misc_feature (42)..(614): Homolog of NCBI NO: 10177448 NR Description: receptor-like protein kinase [Arabidopsis
  misc_feature (13)..(614): Homolog of NCBI NO: 30697726 NR Description: leucine rich repeat protein family [Arabidopsis
MAAHPTGTKKRSGSGHGAAAALVVAALLVLCSTASMALTPDGEALLELKLAFNATAGQRLGSWRAADPNPCGWEGVSCSFPDLRVHAINLPYMQLGGIISPSIGRLTKLQRLALHQNSLHGPIPAEIRNCTELRAIYLRANYLQGGIPPGIGDLTHLTILDLSSNLLRGAIPATIGSLTHLRFLNLSTNFFSGEIPNVGVLGTFKSSSYVGNLELCGLPIQKGCRGTLGFPAVLPHSDPLSSSGVSPITNNNKTSHFLNGVVIGSMSTMAIALVAVLGFLWVCLLSRKKNGVNYEKMDKQTVPDGAKLVTYQWNLPYSSGEIIRRLELLDEEDVVGCGGFGTVYKMVMDDGTAFAVKRVDLNRERRDKTFEKELEILGSIRHINLVNLQGYCRLSTAKLLIYDFMELGSLDSYLHGDAQEDQPLNWNARMKIALGSARGLAYLHHDCSPGIVHRDIKASNILLDRCLEPRVSDFGLARLLVDNETHVTTVVAGTFGYLAPEYLQNGHSTEKSDVYSFGVLLLELVTGKRPTDSCFLNKGLNIVGWLNTLSGEHRLEEILDSRSGDAEVEAVEGILDIAAMCTDADPGQRPSMGAVLKMLEEEILSPCLSELYYEQHLEL

SEQ ID NO: 66553 - protein, 584 aa, Triticum aestivum
  peptide (1)..(584): Ceres Seq. ID no. 14303176
  misc_feature (1)..(570): Homolog of NCBI NO: 38679443 NR Description: benzothiadiazole-induced somatic embryogenesis
  misc_feature (1)..(570): Homolog of NCBI NO: 40253600 NR Description: putative somatic embryogenesis receptor kinase 1
  misc_feature (1)..(570): Homolog of NCBI NO: 13897310 NR Description: SERK2 protein [Zea mays]
  misc_feature (1)..(570): Homolog of NCBI NO: 13897308 NR Description: SERK1 protein [Zea mays]
  misc_feature (1)..(570): Homolog of NCBI NO: 21740899 NR Description: OSJNBa0036B21.13 [Oryza sativa (japonica
  misc_feature (77)..(577): Homolog of NCBI NO: 15227455 NR Description: leucine-rich repeat transmembrane protein kinase,
  misc_feature (77)..(577): Homolog of NCBI NO: 30692520 NR Description: leucine-rich repeat transmembrane protein kinase,
  misc_feature (77)..(577): Homolog of NCBI NO: 25403114 NR Description: probable protein kinase [imported] - Arabidopsis
  misc_feature (7)..(579): Homolog of NCBI NO: 10177448 NR Description: receptor-like protein kinase [Arabidopsis
  misc_feature (1)..(579): Homolog of NCBI NO: 30697726 NR Description: leucine rich repeat protein family [Arabidopsis
MALTPDGEALLELKLAFNATAGQRLGSWRAADPNPCGWEGVSCSFPDLRVHAINLPYMQLGGIISPSIGRLTKLQRLALHQNSLHGPIPAEIRNCTELRAIYLRANYLQGGIPPGIGDLTHLTILDLSSNLLRGAIPATIGSLTHLRFLNLSTNFFSGEIPNVGVLGTFKSSSYVGNLELCGLPIQKGCRGTLGFPAVLPHSDPLSSSGVSPITNNNKTSHFLNGVVIGSMSTMAIALVAVLGFLWVCLLSRKKNGVNYEKMDKQTVPDGAKLVTYQWNLPYSSGEIIRRLELLDEEDVVGCGGFGTVYKMVMDDGTAFAVKRVDLNRERRDKTFEKELEILGSIRHINLVNLQGYCRLSTAKLLIYDFMELGSLDSYLHGDAQEDQPLNWNARMKIALGSARGLAYLHHDCSPGIVHRDIKASNILLDRCLEPRVSDFGLARLLVDNETHVTTVVAGTFGYLAPEYLQNGHSTEKSDVYSFGVLLLELVTGKRPTDSCFLNKGLNIVGWLNTLSGEHRLEEILDSRSGDAEVEAVEGILDIAAMCTDADPGQRPSMGAVLKMLEEEILSPCLSELYYEQHLEL

SEQ ID NO: 66554 - DNA, 1310 bp, Triticum aestivum
  misc_feature (1)..(1310): Ceres Seq. ID no. 13658577
ctagaacatcctaatcgaaaaccacatcttctattttcaaatattcatctttaaggaactaatcagtcagaaatttgggcaatagttatttctccccattgtcaaccttgtcaattgaaagtactatatgagaaatctacacgcctggtaccatacctcggtgagtaactgagtactccagcttcatatgttagtggttctgatttcaggtgttttgtattacagggcatcaagtgtttatagcatacttctactattactccgtgactcaaacaattataaaataaggatgcatgcggctgttgctttagcagtgccagtcacaaggcttgattatggtagctcctttccagatgttgtcagaggcctcacacatgttcttgagtcattaagttcgaacagttcatcatcgccttcaaatttcaaacaccgggacaaccttgagaaacagcttacgtttactgctctgcatttgcttggttttgtttcaccgaaggatgaccaaagcctgaaagattttcttatcaagaaggcatcctttctggaagactggctgaagggtttatgctcagcattcaatagtgccgaggaccagcctctggcaagcgagaccataaatgacgaggatggtttcagcccaaatgtgtcacagaaagttatgttatcttctgctgtagtgtccttgctcaatgtatatacaagtggaaaccagcaagttattactcagagatttgagcaattggctagaagcacagcgtgagcgtcaaaaatcaatggtggtctccacacccatcaacgagcagcaagatattggtcatccaccttagagaagccaactcgcctatcaattggttcttgaggcttccaataaagcgaggcaacctgacctgtacgtcaatacattccatgaagtcgacgaagctgctgagttgggtgatttcagatcaagggcagctcctggcagctagccaagtagtcggtcaatgcagaattgccttgacatgttgtattctagtgtaaaaatagttgttgaatttcttccaggtttggccatgttgtacatcgtgtttacttatgatcactagtgtgcatacacggagcagacatgtatactgaaggattattcggctagatcagtactacagattaatagctagatcagtactacagactgtagttccatataaactgcaacattatggatttggcttgggttgaatgctttgttagaccacaagcatgatgattttggatctgtgagcgcaacagaaaatgaatgccggccatttcagctgggggtaccaaccgtt

SEQ ID NO: 66555 - protein, 190 aa, Triticum aestivum
  peptide (1)..(190): Ceres Seq. ID no. 13658578
  misc_feature (17)..(111): Homolog of NCBI NO: 28829187 NR Description: similar to Plasmodium falciparum. Malaria antigen
  misc_feature (14)..(52): Homolog of NCBI NO: 7485853 NR Description: hypothetical protein F20D10.230 - Arabidopsis
  misc_feature (50)..(90): Homolog of NCBI NO: 7485853 NR Description: hypothetical protein F20D10.230 - Arabidopsis
  misc_feature (14)..(52): Homolog of NCBI NO: 30691695 NR Description: expressed protein [Arabidopsis thaliana]
  misc_feature (50)..(185): Homolog of NCBI NO: 30691695 NR Description: expressed protein [Arabidopsis thaliana]
MLVVLISGVLYYRASSVYSILLLLLRDSNNYKIRMHAAVALAVPVTRLDYGSSFPDVVRGLTHVLESLSSNSSSSPSNFKHRDNLEKQLTFTALHLLGFVSPKDDQSLKDFLIKKASFLEDWLKGLCSAFNSAEDQPLASETINDEDGFSPNVSQKVMLSSAVVSLLNVYTSGNQQVITQRFEQLARSTA

SEQ ID NO: 66556 - protein, 156 aa, Triticum aestivum
  peptide (1)..(156): Ceres Seq. ID no. 13658579
  misc_feature (1)..(77): Homolog of NCBI NO: 28829187 NR Description: similar to Plasmodium falciparum. Malaria antigen
  misc_feature (1)..(18): Homolog of NCBI NO: 7485853 NR Description: hypothetical protein F20D10.230 - Arabidopsis
  misc_feature (16)..(56): Homolog of NCBI NO: 7485853 NR Description: hypothetical protein F20D10.230 - Arabidopsis
  misc_feature (1)..(18): Homolog of NCBI NO: 30691695 NR Description: expressed protein [Arabidopsis thaliana]
  misc_feature (16)..(151): Homolog of NCBI NO: 30691695 NR Description: expressed protein [Arabidopsis thaliana]
MHAAVALAVPVTRLDYGSSFPDVVRGLTHVLESLSSNSSSSPSNFKHRDNLEKQLTFTALHLLGFVSPKDDQSLKDFLIKKASFLEDWLKGLCSAFNSAEDQPLASETINDEDGFSPNVSQKVMLSSAVVSLLNVYTSGNQQVITQRFEQLARSTA

SEQ ID NO: 66557 - DNA, 1732 bp, Triticum aestivum
  misc_feature (1)..(1732): Ceres Seq. ID no. 13658498
ctagaacmyccctmmtcgwtaaaacatgagcccatccaaagccgtgaccagtagccataacctgctccattaacacccacacccgcagagaaataagacaccaccggctcgggctctggtaatcaggcaggctcaatcagtgggaataagttgatgatctgtcgtctctaagccgcccgccacgacgcgccatcctccaccacctccctcttaaaagcccccgcttccttgcttcttcaagcccaattccccgcccgctccctccgtccaccgccacccaagagagagaggctctctagattctagccccgcagcaacattagccccatggtgtccttcctgctgggcgccgccgtggccaccgtctgcgtcctcttcttcatgtccgccagccccggccgcagcctcgtcgacgtcgccgcatggagccacaacaacggcaccgccgcccagcaccaccaccacctgcgctccgtcgccgacgacgccgacgccgcccgcaacctctccgtcgtcgtcgccgctccggcacccgcccccgtccaggcgtcgccgtacggggacctggaggaggtgctggcgcgggcggcgacggcggaccggacggtgatcatgacgcagatcaacgcggcgtggaccaagccgggctcgctgctggacctcttcttcgagagcttccgcaccggggagggcggcgtggcgcgcctgctcgaccacctcgtcatcgtcaccatggacccggcggcgtacgcggggtgccagctcgtgcacccgcactgctactttctcaggacgaccggcgtcgactaccgcggcgagaagttcttcatgagcaaggactacctcgagatgatgtggggccgcaacaagttccagcagaccatcctccagctcggatacaacttcctcttcacggacgtggacgtgatgtggttccgtgacccgttcaagcacatctccatgggggcggacatcgccatctccagcgacgtcttcatgggggacccctacagcctcggcaacttccccaacggcggcttcctcttcgtgcgctcctgcaacaagaccatcgagttctaccgccactggcaggccggccgctaccgcttcttcggcaagcacgagcaggacgtgttcaacctcatcaagcacgacatgacggaccgcctcggcgtcgccatccagttcctcgacaccacctacatcagcggcttctgtcagctcagcagggacctcaacaagatctgcaccctgcacgccaactgctgcgtcgggctcggggccaagctgcatgatttgaggaatgtgctggacgtgtggaggaactacacggcggcgccggtgcccgacaagagggccggcaagttccagtggaaggtgcccgggatatgcatccactgatccaactcatggatgagttggttgcccattctttctgttcttcttgcttcgccttctccttctcgtggaaagagagggaggggattgagagggtcagcatcgatcgattgattcattttgtgaaatcatttcagctagatgattattactccctcttatattagtttacggagggagtagtaagttattatactatatatgtacacaaacatacacagagtagcagtactccagtatgcgtgcagcacatgcatgcatgtatgctggtcctggccgaccctccctggcctgtaattaaagatgaatgagtaaagcagtagcctgtttatgc

SEQ ID NO: 66558 - protein, 357 aa, Triticum aestivum
  peptide (1)..(357): Ceres Seq. ID no. 15220638
  misc_feature (80)..(357): Homolog of NCBI NO: 38344278 NR Description: OSJNBa0013K16.10 [Oryza sativa (japonica
  misc_feature (70)..(355): Homolog of NCBI NO: 15235236 NR Description: hypothetical protein common family [Arabidopsis
  misc_feature (46)..(355): Homolog of NCBI NO: 18395292 NR Description: hypothetical protein [Arabidopsis thaliana]
  misc_feature (1)..(357): Homolog of NCBI NO: 19386741 NR Description: P0678F11.31 [Oryza sativa (japonica
  misc_feature (80)..(355): Homolog of NCBI NO: 15223826 NR Description: expressed protein [Arabidopsis thaliana]
  misc_feature (75)..(355): Homolog of NCBI NO: 19386738 NR Description: P0678F11.28 [Oryza sativa (japonica
  misc_feature (23)..(357): Homolog of NCBI NO: 34904674 NR Description: P0446G09.1 [Oryza sativa (japonica
  misc_feature (73)..(357): Homolog of NCBI NO: 34897440 NR Description: putative regulatory protein
  misc_feature (1)..(357): Homolog of NCBI NO: 19386737 NR Description: P0678F11.26 [Oryza sativa (japonica
  misc_feature (1)..(357): Homolog of NCBI NO: 34897442 NR Description: putative regulatory protein
MVSFLLGAAVATVCVLFFMSASPGRSLVDVAAWSHNNGTAAQHHHHLRSVADDADAARNLSVVVAAPAPAPVQASPYGDLEEVLARAATADRTVIMTQINAAWTKPGSLLDLFFESFRTGEGGVARLLDHLVIVTMDPAAYAGCQLVHPHCYFLRTTGVDYRGEKFFMSKDYLEMMWGRNKFQQTILQLGYNFLFTDVDVMWFRDPFKHISMGADIAISSDVFMGDPYSLGNFPNGGFLFVRSCNKTIEFYRHWQAGRYRFFGKHEQDVFNLIKHDMTDRLGVAIQFLDTTYISGFCQLSRDLNKICTLHANCCVGLGAKLHDLRNVLDVWRNYTAAPVPDKRAGKFQWKVPGICIH

SEQ ID NO: 66559 - protein, 339 aa, Triticum aestivum
  peptide (1)..(339): Ceres Seq. ID no. 15220639
  misc_feature (62)..(339): Homolog of NCBI NO: 38344278 NR Description: OSJNBa0013K16.10 [Oryza sativa (japonica
  misc_feature (52)..(337): Homolog of NCBI NO: 15235236 NR Description: hypothetical protein common family [Arabidopsis
  misc_feature (28)..(337): Homolog of NCBI NO: 18395292 NR Description: hypothetical protein [Arabidopsis thaliana]
  misc_feature (1)..(339): Homolog of NCBI NO: 19386741 NR Description: P0678F11.31 [Oryza sativa (japonica
  misc_feature (62)..(337): Homolog of NCBI NO: 15223826 NR Description: expressed protein [Arabidopsis thaliana]
  misc_feature (57)..(337): Homolog of NCBI NO: 19386738 NR Description: P0678F11.28 [Oryza sativa (japonica
  misc_feature (5)..(339): Homolog of NCBI NO: 34904674 NR Description: P0446G09.1 [Oryza sativa (japonica
  misc_feature (55)..(339): Homolog of NCBI NO: 34897440 NR Description: putative regulatory protein
  misc_feature (1)..(339): Homolog of NCBI NO: 19386737 NR Description: P0678F11.26 [Oryza sativa (japonica
  misc_feature (1)..(339): Homolog of NCBI NO: 34897442 NR Description: putative regulatory protein
MSASPGRSLVDVAAWSHNNGTAAQHHHHLRSVADDADAARNLSVVVAAPAPAPVQASPYGDLEEVLARAATADRTVIMTQINAAWTKPGSLLDLFFESFRTGEGGVARLLDHLVIVTMDPAAYAGCQLVHPHCYFLRTTGVDYRGEKFFMSKDYLEMMWGRNKFQQTILQLGYNFLFTDVDVMWFRDPFKHISMGADIAISSDVFMGDPYSLGNFPNGGFLFVRSCNKTIEFYRHWQAGRYRFFGKHEQDVFNLIKHDMTDRLGVAIQFLDTTYISGFCQLSRDLNKICTLHANCCVGLGAKLHDLRNVLDVWRNYTAAPVPDKRAGKFQWKVPGICIH

SEQ ID NO: 66560 - protein, 262 aa, Triticum aestivum
  peptide (1)..(262): Ceres Seq. ID no. 15220640
  misc_feature (1)..(262): Homolog of NCBI NO: 38344278 NR Description: OSJNBa0013K16.10 [Oryza sativa (japonica
  misc_feature (1)..(260): Homolog of NCBI NO: 15235236 NR Description: hypothetical protein common family [Arabidopsis
  misc_feature (1)..(260): Homolog of NCBI NO: 18395292 NR Description: hypothetical protein [Arabidopsis thaliana]
  misc_feature (1)..(262): Homolog of NCBI NO: 19386741 NR Description: P0678F11.31 [Oryza sativa (japonica
  misc_feature (1)..(260): Homolog of NCBI NO: 15223826 NR Description: expressed protein [Arabidopsis thaliana]
  misc_feature (1)..(260): Homolog of NCBI NO: 19386738 NR Description: P0678F11.28 [Oryza sativa (japonica
  misc_feature (1)..(262): Homolog of NCBI NO: 34904674 NR Description: P0446G09.1 [Oryza sativa (japonica
  misc_feature (1)..(262): Homolog of NCBI NO: 34897440 NR Description: putative regulatory protein
  misc_feature (1)..(262): Homolog of NCBI NO: 19386737 NR Description: P0678F11.26 [Oryza sativa (japonica
  misc_feature (1)..(262): Homolog of NCBI NO: 34897442 NR Description: putative regulatory protein
MTQINAAWTKPGSLLDLFFESFRTGEGGVARLLDHLVIVTMDPAAYAGCQLVHPHCYFLRTTGVDYRGEKFFMSKDYLEMMWGRNKFQQTILQLGYNFLFTDVDVMWFRDPFKHISMGADIAISSDVFMGDPYSLGNFPNGGFLFVRSCNKTIEFYRHWQAGRYRFFGKHEQDVFNLIKHDMTDRLGVAIQFLDTTYISGFCQLSRDLNKICTLHANCCVGLGAKLHDLRNVLDVWRNYTAAPVPDKRAGKFQWKVPGICIH

SEQ ID NO: 66561 - DNA, 1531 bp, Triticum aestivum
  misc_feature (1)..(1531): Ceres Seq. ID no. 13663419
gcaactgtaccgactgcaacacagtttcttcagtaagcatgagaactatgacccatcgtctccccccagctgtggctgcggtggccgtggtcttggtggcgctgacgtgcctccaccggccagctgccgcgagcggccatgccgcggaccgcatagcccggctgcctgggcagccggcggtggacttcgacatgtactccggctacatcaccgtggacgagggcgccggacggtcgctgttctatctgctgcaagaggcgccggaggacgcccagccggcgccgctcgtgctgtggctcaacggcggccccggctgctcctccgtcgcctacggcgcgtcggaggagctcggcgcgttccgcgtcaagccccgcggcgccggcctcgtcctcaacgagtaccgctggaacaaagtggccaacgtgctgttcttggactcgccggccggcgtcgggttctcctacaccaacacctcttccgacatctacacctccggcgacaacagaacggcgcacgactcgtacgccttcctggcgaaatggttcgagaggttcccgcactacaagtaccgcgacttctacatcgccggcgagagctacgccgggcactacgtcccggagctgtcccagctggtccaccggagcaaaaaccccgtcatcaacctcaagggcttcatggtcgggaacggcctcatcgacgactaccacgactacgtgggcaccttcgagttctggtggaaccacgggatcgtctccgacgacacctaccgccgcctcaaggaggcctgcctccacgactccttcatccacccctcgccggcgtgcgacgccgccacggacgtcgccacggcggagcagggcaacatcgacatgtacagcctctacacgcccgtctgcaacatcacgtcgtcctcgtcgttggcggcgagccggccccggcccagggggcgctacccatggctgaccgggtcctacgacccgtgcacggaacggtactcgacggcgtactacaaccggcgggacgtgcagatggctctccacgccaacgtcaccggcgccatgaactacacgtgggcgacctgcagcgacaccattaatacccactggcatgatgctccgaggtccatgcttcccatttacagggagcttattgcagcgggcctcaggatttgggtgttcagcggtgacacggacgcggtagtccccttgacagcaacaagatactccatcggcggtctgggtcttccaactactaccagttggtacccttggtatgacgaccaggaggtcggcggttggagccaggtgtacaagggccttacactggtgtccgtcagaggtgccggccatgaggttcccctgcatcgcccgcggcaagcgctcgtactgtttcggtacttcctgcagggcgagcccatgccaggccagaccaagaatgcgacggtggcttagcaacaaagggatggaagtcaaatagtaatttcgatgtgagaaaacaagagtgatcatcaataaagcaatagatgcttctt

SEQ ID NO: 66562 - protein, 482 aa, Triticum aestivum
  peptide (1)..(482): Ceres Seq. ID no. 13663420
  misc_feature (45)..(300): Homolog of NCBI NO: 576335 NR Description: Chain A, Serine Carboxypeptidase Ii
  misc_feature (44)..(303): Homolog of NCBI NO: 21431500 NR Description: null
  misc_feature (34)..(473): Homolog of NCBI NO: 15227493 NR Description: serine carboxypeptidase -related [Arabidopsis
  misc_feature (27)..(473): Homolog of NCBI NO: 15231911 NR Description: serine carboxypeptidase -related [Arabidopsis
  misc_feature (26)..(475): Homolog of NCBI NO: 34908012 NR Description: putative carboxypeptidase D
  misc_feature (23)..(473): Homolog of NCBI NO: 34895992 NR Description: putative carboxypeptidase D
  misc_feature (321)..(480): Homolog of NCBI NO: 7428205 NR Description: carboxypeptidase D (EC 3.4.16.6) - wheat
  misc_feature (44)..(304): Homolog of NCBI NO: 7428205 NR Description: carboxypeptidase D (EC 3.4.16.6) - wheat
  misc_feature (13)..(482): Homolog of NCBI NO: 20455471 NR Description: Serine carboxypeptidase II precursor
  misc_feature (13)..(482): Homolog of NCBI NO: 7428204 NR Description: carboxypeptidase D (EC 3.4.16.6) precursor -
NCTDCNTVSSVSMRTMTHRLPPAVAAVAVVLVALTCLHRPAAASGHAADRIARLPGQPAVDFDMYSGYITVDEGAGRSLFYLLQEAPEDAQPAPLVLWLNGGPGCSSVAYGASEELGAFRVKPRGAGLVLNEYRWNKVANVLFLDSPAGVGFSYTNTSSDIYTSGDNRTAHDSYAFLAKWFERFPHYKYRDFYIAGESYAGHYVPELSQLVHRSKNPVINLKGFMVGNGLIDDYHDYVGTFEFWWNHGIVSDDTYRRLKEACLHDSFIHPSPACDAATDVATAEQGNIDMYSLYTPVCNITSSSSLAASRPRPRGRYPWLTGSYDPCTERYSTAYYNRRDVQMALHANVTGAMNYTWATCSDTINTHWHDAPRSMLPIYRELIAAGLRIWVFSGDTDAVVPLTATRYSIGGLGLPTTTSWYPWYDDQEVGGWSQVYKGLTLVSVRGAGHEVPLHRPRQALVLFRYFLQGEPMPGQTKNATVA

SEQ ID NO: 66563 - protein, 470 aa, Triticum aestivum
  peptide (1)..(470): Ceres Seq. ID no. 13663421
  misc_feature (33)..(288): Homolog of NCBI NO: 576335 NR Description: Chain A, Serine Carboxypeptidase Ii
  misc_feature (32)..(291): Homolog of NCBI NO: 21431500 NR Description: null
  misc_feature (22)..(461): Homolog of NCBI NO: 15227493 NR Description: serine carboxypeptidase -related [Arabidopsis
  misc_feature (15)..(461): Homolog of NCBI NO: 15231911 NR Description: serine carboxypeptidase -related [Arabidopsis
  misc_feature (14)..(463): Homolog of NCBI NO: 34908012 NR Description: putative carboxypeptidase D
  misc_feature (11)..(461): Homolog of NCBI NO: 34895992 NR Description: putative carboxypeptidase D
  misc_feature (309)..(468): Homolog of NCBI NO: 7428205 NR Description: carboxypeptidase D (EC 3.4.16.6) - wheat
  misc_feature (32)..(292): Homolog of NCBI NO: 7428205 NR Description: carboxypeptidase D (EC 3.4.16.6) - wheat
  misc_feature (1)..(470): Homolog of NCBI NO: 20455471 NR Description: Serine carboxypeptidase II precursor
  misc_feature (1)..(470): Homolog of NCBI NO: 7428204 NR Description: carboxypeptidase D (EC 3.4.16.6) precursor -
MRTMTHRLPPAVAAVAVVLVALTCLHRPAAASGHAADRIARLPGQPAVDFDMYSGYITVDEGAGRSLFYLLQEAPEDAQPAPLVLWLNGGPGCSSVAYGASEELGAFRVKPRGAGLVLNEYRWNKVANVLFLDSPAGVGFSYTNTSSDIYTSGDNRTAHDSYAFLAKWFERFPHYKYRDFYIAGESYAGHYVPELSQLVHRSKNPVINLKGFMVGNGLIDDYHDYVGTFEFWWNHGIVSDDTYRRLKEACLHDSFIHPSPACDAATDVATAEQGNIDMYSLYTPVCNITSSSSLAASRPRPRGRYPWLTGSYDPCTERYSTAYYNRRDVQMALHANVTGAMNYTWATCSDTINTHWHDAPRSMLPIYRELIAAGLRIWVFSGDTDAVVPLTATRYSIGGLGLPTTTSWYPWYDDQEVGGWSQVYKGLTLVSVRGAGHEVPLHRPRQALVLFRYFLQGEPMPGQTKNATVA

SEQ ID NO: 66564 - protein, 467 aa, Triticum aestivum
  peptide (1)..(467): Ceres Seq. ID no. 13663422
  misc_feature (30)..(285): Homolog of NCBI NO: 576335 NR Description: Chain A, Serine Carboxypeptidase Ii
  misc_feature (29)..(288): Homolog of NCBI NO: 21431500 NR Description: null
  misc_feature (19)..(458): Homolog of NCBI NO: 15227493 NR Description: serine carboxypeptidase -related [Arabidopsis
  misc_feature (12)..(458): Homolog of NCBI NO: 15231911 NR Description: serine carboxypeptidase -related [Arabidopsis
  misc_feature (11)..(460): Homolog of NCBI NO: 34908012 NR Description: putative carboxypeptidase D
  misc_feature (8)..(458): Homolog of NCBI NO: 34895992 NR Description: putative carboxypeptidase D
  misc_feature (306)..(465): Homolog of NCBI NO: 7428205 NR Description: carboxypeptidase D (EC 3.4.16.6) - wheat
  misc_feature (29)..(289): Homolog of NCBI NO: 7428205 NR Description: carboxypeptidase D (EC 3.4.16.6) - wheat
  misc_feature (1)..(467): Homolog of NCBI NO: 20455471 NR Description: Serine carboxypeptidase II precursor
  misc_feature (1)..(467): Homolog of NCBI NO: 7428204 NR Description: carboxypeptidase D (EC 3.4.16.6) precursor -
MTHRLPPAVAAVAVVLVALTCLHRPAAASGHAADRIARLPGQPAVDFDMYSGYITVDEGAGRSLFYLLQEAPEDAQPAPLVLWLNGGPGCSSVAYGASEELGAFRVKPRGAGLVLNEYRWNKVANVLFLDSPAGVGFSYTNTSSDIYTSGDNRTAHDSYAFLAKWFERFPHYKYRDFYIAGESYAGHYVPELSQLVHRSKNPVINLKGFMVGNGLIDDYHDYVGTFEFWWNHGIVSDDTYRRLKEACLHDSFIHPSPACDAATDVATAEQGNIDMYSLYTPVCNITSSSSLAASRPRPRGRYPWLTGSYDPCTERYSTAYYNRRDVQMALHANVTGAMNYTWATCSDTINTHWHDAPRSMLPIYRELIAAGLRIWVFSGDTDAVVPLTATRYSIGGLGLPTTTSWYPWYDDQEVGGWSQVYKGLTLVSVRGAGHEVPLHRPRQALVLFRYFLQGEPMPGQTKNATVA

SEQ ID NO: 66565 - DNA, 1461 bp, Triticum aestivum
  misc_feature (1)..(1461): Ceres Seq. ID no. 14313350
aagagaccacacacgaccgtccaacgcatcccctctctacccctcaaaagatggccggctggacctccatcccggcggagctactcgcggaaatctccggccgcctgccaggtgacgcggaccggatccacatccatcaggtatgctcccactggcgcgcatccacttcccggctggccgcctgccgtccatggatcatcgccggccgcgaaccatggagcctggttggcccggtcggcgaacactcgttttggctgccccttggcggccgacggatctacttgggcacgcccacgccggcgggcctaccatattgctgcggcacgccccttggctggcttgctctcatggacaacctgcaatccccaacgcggtttgtcctctgggagcccctctctgaagctgagatctttctgccctgtttgcccgccgttgtccaagtcttcctctcaggagacccgctcacctcgcctgactggatggcgattgcaagccagaagctctacagcactggcacttgcatgggccagacgctcttcttctggcggcctggagatgccgcatggactatgcagctcgagcggccaaacggcagaatcgatagctcagcattccatcaggggaaattctacttcaccgacatcgggtggacccttcacgtctatgatcttgaccgctcccctcccaagcttgtccggagcacgtacctttacagtgctctgcgagagcgccatggatttcggcagttccctggcggtggcaggccggcgtggtatgtggtcgcattcaatggcgagttgctgcttgttgtgatgtaccgtgcgcccaacataaaggctgtcgaagtttaccgcccggattgggcagcggagcgcctggagctgcgggacaaggtcacggatctcggcgagtactcgctcttcttgggccgcggtgatgcgtttgccctctgtgcaaaggacttcactatgatcaggagaaattgtctctactttgtagagcacgatacagtcaagcatcaagattgggctattgtgttagacttggggtcaaatgttttccaacaaattccatatcccggagagcagatggagggcacgggcagaaataatcactggacggcgtattcgtggttctgtctcagaagacccttcttgaagggtgaagcccagtaaggtggtagatcttcactgaccatcttattatatgaaagtaaccgaatcagtattggagcagcaacagagcttcccatgtttgaatgatctaaacaccacaccaacaccagcacgtatgtcttgtcacttcagattattcctcccatgaatccttgttgaatcatggactccaacagcccaattactaaccctttggcatagaagtgttaagagctgatttatactcctagatagcaccattgttgtatctctatttctcttgctactaatataactgtcattatac

SEQ ID NO: 66566 - protein, 390 aa, Triticum aestivum
  peptide (1)..(390): Ceres Seq. ID no. 14313351
  misc_feature (20)..(66): Pfam Name: F-box domain Pfam Description: F-box domain
  misc_feature (20)..(359): Homolog of NCBI NO: 37531308 NR Description: hypothetical protein [Oryza sativa (japonica
  misc_feature (280)..(377): Homolog of NCBI NO: 37536128 NR Description: hypothetical protein [Oryza sativa (japonica
  misc_feature (20)..(163): Homolog of NCBI NO: 37536128 NR Description: hypothetical protein [Oryza sativa (japonica
  misc_feature (278)..(351): Homolog of NCBI NO: 37536134 NR Description: hypothetical protein [Oryza sativa (japonica
  misc_feature (20)..(272): Homolog of NCBI NO: 37536134 NR Description: hypothetical protein [Oryza sativa (japonica
  misc_feature (281)..(335): Homolog of NCBI NO: 37536110 NR Description: hypothetical protein [Oryza sativa (japonica
  misc_feature (18)..(124): Homolog of NCBI NO: 37536110 NR Description: hypothetical protein [Oryza sativa (japonica
  misc_feature (38)..(282): Homolog of NCBI NO: 12083533 NR Description: hypothetical protein [Oryza sativa]
  misc_feature (95)..(386): Homolog of NCBI NO: 12083533 NR Description: hypothetical protein [Oryza sativa]
  misc_feature (19)..(376): Homolog of NCBI NO: 37536140 NR Description: hypothetical protein [Oryza sativa (japonica
ETTHDRPTHPLSTPQKMAGWTSIPAELLAEISGRLPGDADRIHIHQVCSHWRASTSRLAACRPWIIAGREPWSLVGPVGEHSFWLPLGGRRIYLGTPTPAGLPYCCGTPLGWLALMDNLQSPTRFVLWEPLSEAEIFLPCLPAVVQVFLSGDPLTSPDWMAIASQKLYSTGTCMGQTLFFWRPGDAAWTMQLERPNGRIDSSAFHQGKFYFTDIGWTLHVYDLDRSPPKLVRSTYLYSALRERHGFRQFPGGGRPAWYVVAFNGELLLVVMYRAPNIKAVEVYRPDWAAERLELRDKVTDLGEYSLFLGRGDAFALCAKDFTMIRRNCLYFVEHDTVKHQDWAIVLDLGSNVFQQIPYPGEQMEGTGRNNHWTAYSWFCLRRPFLKGEAQ

SEQ ID NO: 66567 - protein, 374 aa, Triticum aestivum
  peptide (1)..(374): Ceres Seq. ID no. 14313352
  misc_feature (4)..(50): Pfam Name: F-box domain Pfam Description: F-box domain
  misc_feature (4)..(343): Homolog of NCBI NO: 37531308 NR Description: hypothetical protein [Oryza sativa (japonica
  misc_feature (264)..(361): Homolog of NCBI NO: 37536128 NR Description: hypothetical protein [Oryza sativa (japonica
  misc_feature (4)..(147): Homolog of NCBI NO: 37536128 NR Description: hypothetical protein [Oryza sativa (japonica
  misc_feature (262)..(335): Homolog of NCBI NO: 37536134 NR Description: hypothetical protein [Oryza sativa (japonica
  misc_feature (4)..(256): Homolog of NCBI NO: 37536134 NR Description: hypothetical protein [Oryza sativa (japonica
  misc_feature (265)..(319): Homolog of NCBI NO: 37536110 NR Description: hypothetical protein [Oryza sativa (japonica
  misc_feature (2)..(108): Homolog of NCBI NO: 37536110 NR Description: hypothetical protein [Oryza sativa (japonica
  misc_feature (22)..(266): Homolog of NCBI NO: 12083533 NR Description: hypothetical protein [Oryza sativa]
  misc_feature (79)..(370): Homolog of NCBI NO: 12083533 NR Description: hypothetical protein [Oryza sativa]
  misc_feature (3)..(360): Homolog of NCBI NO: 37536140 NR Description: hypothetical protein [Oryza sativa (japonica
MAGWTSIPAELLAEISGRLPGDADRIHIHQVCSHWRASTSRLAACRPWIIAGREPWSLVGPVGEHSFWLPLGGRRIYLGTPTPAGLPYCCGTPLGWLALMDNLQSPTRFVLWEPLSEAEIFLPCLPAVVQVFLSGDPLTSPDWMAIASQKLYSTGTCMGQTLFFWRPGDAAWTMQLERPNGRIDSSAFHQGKFYFTDIGWTLHVYDLDRSPPKLVRSTYLYSALRERHGFRQFPGGGRPAWYVVAFNGELLLVVMYRAPNIKAVEVYRPDWAAERLELRDKVTDLGEYSLFLGRGDAFALCAKDFTMIRRNCLYFVEHDTVKHQDWAIVLDLGSNVFQQIPYPGEQMEGTGRNNHWTAYSWFCLRRPFLKGEAQ

SEQ ID NO: 66568 - protein, 275 aa, Triticum aestivum
  peptide (1)..(275): Ceres Seq. ID no. 14313353
  misc_feature (1)..(244): Homolog of NCBI NO: 37531308 NR Description: hypothetical protein [Oryza sativa (japonica
  misc_feature (165)..(262): Homolog of NCBI NO: 37536128 NR Description: hypothetical protein [Oryza sativa (japonica
  misc_feature (1)..(48): Homolog of NCBI NO: 37536128 NR Description: hypothetical protein [Oryza sativa (japonica
  misc_feature (163)..(236): Homolog of NCBI NO: 37536134 NR Description: hypothetical protein [Oryza sativa (japonica
  misc_feature (1)..(157): Homolog of NCBI NO: 37536134 NR Description: hypothetical protein [Oryza sativa (japonica
  misc_feature (166)..(220): Homolog of NCBI NO: 37536110 NR Description: hypothetical protein [Oryza sativa (japonica
  misc_feature (1)..(167): Homolog of NCBI NO: 12083533 NR Description: hypothetical protein [Oryza sativa]
  misc_feature (1)..(271): Homolog of NCBI NO: 12083533 NR Description: hypothetical protein [Oryza sativa]
  misc_feature (1)..(261): Homolog of NCBI NO: 37536140 NR Description: hypothetical protein [Oryza sativa (japonica
MDNLQSPTRFVLWEPLSEAEIFLPCLPAVVQVFLSGDPLTSPDWMAIASQKLYSTGTCMGQTLFFWRPGDAAWTMQLERPNGRIDSSAFHQGKFYFTDIGWTLHVYDLDRSPPKLVRSTYLYSALRERHGFRQFPGGGRPAWYVVAFNGELLLVVMYRAPNIKAVEVYRPDWAAERLELRDKVTDLGEYSLFLGRGDAFALCAKDFTMIRRNCLYFVEHDTVKHQDWAIVLDLGSNVFQQIPYPGEQMEGTGRNNHWTAYSWFCLRRPFLKGEAQ

SEQ ID NO: 66569 - DNA, 1731 bp, Triticum aestivum
  misc_feature (1)..(1731): Ceres Seq. ID no. 14303087
acctcacctcacctcaccgcccgcatatgaaaccccgcgcgcgcgcgcacacgcacgtacggtagataaaaagcaggtagcgccgccgtcacgtcgtgctcgtcatgggcgtcgacgccgcgctgcatggggcggcggcggaggcggcgctgcatggggcgctctcgctgcagccgcacgtggccggcgccttcttcgcgctcgcggcgtgcaccgtggcgctcgccgccctgctggccgtggcgcgcacgcgcccgccgtggtggtgcgactgcgccgtctgcgaggcctacctcacggcgtcctgggccggcgagttcgacaacctctgcgactggtatgcgcacctgctgcgccgctcgccgtcgcagaccgtgcacgtccacgtgctccgcaacgtgctcaccgccaaccccgtcaccgtcgatcacatgctgcgcgcgcgcttcgataactaccccaagggcaagcccttctccgccatcctcgccgacctgctcggccgcgggatcttcaacgtcgacggggacgcgtggctgttccagcggaagctcgccgcggctgagctggcctccccggcgctcagggctttcgcctccggcgtcgtggcctccgagctgcggggccgtctcgttcccctgcttgactctgcatgttcccacgacgacgacgacgacgacgacgacggtggcaaggtgctggacctgcaggacgtcttccgtcgcttcgccttcgactgcatatgcaagatctccttcggcctcgacccgggctgcctcgagctgtccatgccggtatcggcgttcgtggacgcgttcgacacggcgtccatgctctctgcgaggcgcgccaccgcgccgttgcagatcatatggcgcctgaagcggttcttcaacgtcggggacgagagaaagctccgggaatccgtgcgcctcgtcgacgggttcgccgcggaggtcacgcggcaacgacacaagctcggcggcgccgcgtccggcagcgacctcctgtcgcggttcatgggctccatcagcgacgagaagtacctcagggacatcgtcgtcagcttcatgctcgccggccgcgacaccatcgcctcagcgctgaccgccttcttcctgctcctctccgatcacccggaggtcgccgcggccatccgggacgaggtgtcacgcgtcgcgggcgacgacgacaacggccggccgagcttcagcaagctcaaggacatgcactacgtgcacgcggcgctgtacgagagcatgcggctgttcccgccggtgcagttcgactccaagttcgcggcgggcgacgacacgctcccggacggcacggccgtggccaagggcacgcgggtcacctaccacgcctacgccatggggcggatggagtccgtgtggggccccgactgctccgagttccggcccgagcggtggctccgcgacgggcagttcgtcccggtgagcccgtaccggtacccggtgttccaggccggcgtgcgcgtctgcgtcggcaaggacctcgcgctcatggagatgaaggccgtcatcgtcgccgtcgtccggggcttcgacatcgaggcgatcgaccggagctcgcgccggcccaagttcgcgccggggctgacggccacgttcgccggcgggttgccggtcagggttcgccggcgagggcgtccggcgagcgggcacagcccaccaacctgatacggaataaacaactgttggtgccctg

SEQ ID NO: 66570 - protein, 532 aa, Triticum aestivum
  peptide (1)..(532): Ceres Seq. ID no. 14303088
  misc_feature (73)..(521): Homolog of NCBI NO: 18000066 NR Description: cytochrome P450-dependent fatty acid hydroxylase
  misc_feature (78)..(521): Homolog of NCBI NO: 34909022 NR Description: cytochrome P450-like protein
  misc_feature (67)..(521): Homolog of NCBI NO: 18000068 NR Description: cytochrome P450-dependent fatty acid hydroxylase
  misc_feature (73)..(521): Homolog of NCBI NO: 18000072 NR Description: cytochrome P450-dependent fatty acid hydroxylase
  misc_feature (75)..(521): Homolog of NCBI NO: 21536522 NR Description: cytochrome P450-like protein [Arabidopsis
  misc_feature (75)..(521): Homolog of NCBI NO: 26452145 NR Description: putative cytochrome P450 [Arabidopsis thaliana]
  misc_feature (75)..(521): Homolog of NCBI NO: 15242759 NR Description: cytochrome P450, putative [Arabidopsis thaliana]
  misc_feature (75)..(521): Homolog of NCBI NO: 15228396 NR Description: cytochrome P450 family [Arabidopsis thaliana]
  misc_feature (54)..(521): Homolog of NCBI NO: 15226228 NR Description: cytochrome P450, putative [Arabidopsis thaliana]
  misc_feature (1)..(531): Homolog of NCBI NO: 34908446 NR Description: putative cytochrome P450 [Oryza sativa (japonica
MGVDAALHGAAAEAALHGALSLQPHVAGAFFALAACTVALAALLAVARTRPPWWCDCAVCEAYLTASWAGEFDNLCDWYAHLLRRSPSQTVHVHVLRNVLTANPVTVDHMLRARFDNYPKGKPFSAILADLLGRGIFNVDGDAWLFQRKLAAAELASPALRAFASGVVASELRGRLVPLLDSACSHDDDDDDDDGGKVLDLQDVFRRFAFDCICKISFGLDPGCLELSMPVSAFVDAFDTASMLSARRATAPLQIIWRLKRFFNVGDERKLRESVRLVDGFAAEVTRQRHKLGGAASGSDLLSRFMGSISDEKYLRDIVVSFMLAGRDTIASALTAFFLLLSDHPEVAAAIRDEVSRVAGDDDNGRPSFSKLKDMHYVHAALYESMRLFPPVQFDSKFAAGDDTLPDGTAVAKGTRVTYHAYAMGRMESVWGPDCSEFRPERWLRDGQFVPVSPYRYPVFQAGVRVCVGKDLALMEMKAVIVAVVRGFDIEAIDRSSRRPKFAPGLTATFAGGLPVRVRRRGRPASGHSPPT

SEQ ID NO: 66571 - protein, 423 aa, Triticum aestivum
  peptide (1)..(423): Ceres Seq. ID no. 14303089
  misc_feature (1)..(412): Homolog of NCBI NO: 18000066 NR Description: cytochrome P450-dependent fatty acid hydroxylase
  misc_feature (1)..(412): Homolog of NCBI NO: 34909022 NR Description: cytochrome P450-like protein
  misc_feature (1)..(412): Homolog of NCBI NO: 18000068 NR Description: cytochrome P450-dependent fatty acid hydroxylase
  misc_feature (1)..(412): Homolog of NCBI NO: 18000072 NR Description: cytochrome P450-dependent fatty acid hydroxylase
  misc_feature (1)..(412): Homolog of NCBI NO: 26452145 NR Description: putative cytochrome P450 [Arabidopsis thaliana]
  misc_feature (1)..(412): Homolog of NCBI NO: 21536522 NR Description: cytochrome P450-like protein [Arabidopsis
  misc_feature (1)..(412): Homolog of NCBI NO: 15242759 NR Description: cytochrome P450, putative [Arabidopsis thaliana]
  misc_feature (1)..(412): Homolog of NCBI NO: 15228396 NR Description: cytochrome P450 family [Arabidopsis thaliana]
  misc_feature (1)..(412): Homolog of NCBI NO: 15226228 NR Description: cytochrome P450, putative [Arabidopsis thaliana]
  misc_feature (1)..(422): Homolog of NCBI NO: 34908446 NR Description: putative cytochrome P450 [Oryza sativa (japonica
MLRARFDNYPKGKPFSAILADLLGRGIFNVDGDAWLFQRKLAAAELASPALRAFASGVVASELRGRLVPLLDSACSHDDDDDDDDGGKVLDLQDVFRRFAFDCICKISFGLDPGCLELSMPVSAFVDAFDTASMLSARRATAPLQIIWRLKRFFNVGDERKLRESVRLVDGFAAEVTRQRHKLGGAASGSDLLSRFMGSISDEKYLRDIVVSFMLAGRDTIASALTAFFLLLSDHPEVAAAIRDEVSRVAGDDDNGRPSFSKLKDMHYVHAALYESMRLFPPVQFDSKFAAGDDTLPDGTAVAKGTRVTYHAYAMGRMESVWGPDCSEFRPERWLRDGQFVPVSPYRYPVFQAGVRVCVGKDLALMEMKAVIVAVVRGFDIEAIDRSSRRPKFAPGLTATFAGGLPVRVRRRGRPASGHSPPT

SEQ ID NO: 66572 - protein, 359 aa, Triticum aestivum
  peptide (1)..(359): Ceres Seq. ID no. 14303090
MFPRRRRRRRRRWQGAGPAGRLPSLRLRLHMQDLLRPRPGLPRAVHAGIGVRGRVRHGVHALCEARHRAVADHMAPEAVLQRRGREKAPGIRAPRRRVRRGGHAATTQARRRRVRQRPPVAVHGLHQRREVPQGHRRQLHARRPRHHRLSADRLLPAPLRSPGGRRGHPGRGVTRRGRRRQRPAELQQAQGHALRARGAVREHAAVPAGAVRLQVRGGRRHAPGRHGRGQGHAGHLPRLRHGADGVRVGPRLLRVPARAVAPRRAVRPGEPVPVPGVPGRRARLRRQGPRAHGDEGRHRRRRPGLRHRGDRPELAPAQVRAGADGHVRRRVAGQGSPARASGERAQPTNLIRNKQLLVP

SEQ ID NO: 66573 - DNA, 1515 bp, Triticum aestivum
  misc_feature (1)..(1515): Ceres Seq. ID no. 14303083
acgaccttccattccacccgagcagccgcgccgcctccccgatagatgaagcttctcccgcgcctctgcatggccaccagcagcgccgccgccgcgggcgacagcgacgccagcagcaacaagctcgcctcggtcgcctccacctcctcctccaccgtctcaacctcctcctccgccgccgcggccgcggtctccgaggcgtcctcctccacgtccctcccttcgctctccaccgccacgtcgaatgccgcctccttcgcccacgtcgccacgctcctccctccgcccacggcggcgtcgacggcagcggccgtcgcggtggtggacgtctcccgcggcttcgtcgtcgccaggccggcgtccgtcgcccttcacgacctcggcaccctcgagccgacgtccacctccgacccgggccacgacaccgcgaccgccggctcggtcaagtgcgtggcgcacgtccacggtggcaaggccgtgacgggccaccaggacgggaggctgcgcctgtggcgggtctcttcgcgcgcgcccgcccggatccgcctcgccgccgcgctccccacggtctccgaccgcctccgccggttcccgctcccgtccaaccacgtcgccgtccgacgccaccaccgccggctctggatagagcatgccgacaccgtgtccggcgtcgccgcgtccacggacggccgcctcctcttctccgtctcctgggacaagacgctcaaggtctgggccatcccgtccctccgctgcttgcagtccttgccggcgcacgacgatgccgtcaacgcggtcgccgtcgcccccgacggcacggtgtacaccggctccgctgacaggcgcgttcgtgtctgggcgcccaggcccgcgtccgacaagaccaccaagcgtcagagcaagaagccggtttactacctggcggccaccctctcccgccacacggcggcggtgaacgccgtggccgtcgggtgcggggggcaggtgctctactccggcggcaacgatcgctgcgtggtggtgtgggagcgggaggacagcgcgagccacatggtcgcgatcggggcgcttcgggggcaccgcaaggcggtgctctccatcgcgagcacggggggcgggctggttgtgagcgggtcggcggatcacacggttcgggcctggcggcgcgagacggacggacgtggccacacgtgcgtcgccgtgatcgacgggcacggcagcgccgtccgttcggtggcggtggctctcgttccgggcaagaagcagctgcaggggggagaagacggcgatgacggcggcgaggaatggagggtgtgcagcgccagctttgacggcgaggtgcgggtctggtcgttgcgggtgacgacgggtttgtagtaggttggatttgctacgatttttgacgttggaaagagtgttttcctgatttttgatctgatcttgatagctgagatagagatacgtacggtcgtgtacatacaggaaagaggtaatttatctacctgtattttttgg

SEQ ID NO: 66574 - protein, 443 aa, Triticum aestivum
  peptide (1)..(443): Ceres Seq. ID no. 14303084
  misc_feature (236)..(272): Pfam Name: WD domain, G-beta repeat Pfam Description: WD domain, G-beta repeat
  misc_feature (128)..(414): Homolog of NCBI NO: 15220271 NR Description: transducin / WD-40 repeat protein family
  misc_feature (30)..(395): Homolog of NCBI NO: 15231088 NR Description: transducin / WD-40 repeat protein family
  misc_feature (130)..(399): Homolog of NCBI NO: 15225317 NR Description: transducin / WD-40 repeat protein family
  misc_feature (128)..(440): Homolog of NCBI NO: 17979259 NR Description: At1g49450/F13F21_11 [Arabidopsis thaliana]
  misc_feature (122)..(435): Homolog of NCBI NO: 31126785 NR Description: putative WD repeat-protein
  misc_feature (128)..(440): Homolog of NCBI NO: 15222143 NR Description: transducin / WD-40 repeat protein family
  misc_feature (107)..(439): Homolog of NCBI NO: 15240616 NR Description: transducin / WD-40 repeat protein family
  misc_feature (25)..(441): Homolog of NCBI NO: 15221675 NR Description: transducin / WD-40 repeat protein family
  misc_feature (28)..(398): Homolog of NCBI NO: 18395507 NR Description: transducin / WD-40 repeat protein family
  misc_feature (10)..(439): Homolog of NCBI NO: 38345251 NR Description: OSJNBb0011N17.12 [Oryza sativa (japonica
MKLLPRLCMATSSAAAAGDSDASSNKLASVASTSSSTVSTSSSAAAAAVSEASSSTSLPSLSTATSNAASFAHVATLLPPPTAASTAAAVAVVDVSRGFVVARPASVALHDLGTLEPTSTSDPGHDTATAGSVKCVAHVHGGKAVTGHQDGRLRLWRVSSRAPARIRLAAALPTVSDRLRRFPLPSNHVAVRRHHRRLWIEHADTVSGVAASTDGRLLFSVSWDKTLKVWAIPSLRCLQSLPAHDDAVNAVAVAPDGTVYTGSADRRVRVWAPRPASDKTTKRQSKKPVYYLAATLSRHTAAVNAVAVGCGGQVLYSGGNDRCVVVWEREDSASHMVAIGALRGHRKAVLSIASTGGGLVVSGSADHTVRAWRRETDGRGHTCVAVIDGHGSAVRSVAVALVPGKKQLQGGEDGDDGGEEWRVCSASFDGEVRVWSLRVTTGL

SEQ ID NO: 66575 - protein, 435 aa, Triticum aestivum
  peptide (1)..(435): Ceres Seq. ID no. 14303085
  misc_feature (228)..(264): Pfam Name: WD domain, G-beta repeat Pfam Description: WD domain, G-beta repeat
  misc_feature (120)..(406): Homolog of NCBI NO: 15220271 NR Description: transducin / WD-40 repeat protein family
  misc_feature (22)..(387): Homolog of NCBI NO: 15231088 NR Description: transducin / WD-40 repeat protein family
  misc_feature (122)..(391): Homolog of NCBI NO: 15225317 NR Description: transducin / WD-40 repeat protein family
  misc_feature (120)..(432): Homolog of NCBI NO: 17979259 NR Description: At1g49450/F13F21_11 [Arabidopsis thaliana]
  misc_feature (114)..(427): Homolog of NCBI NO: 31126785 NR Description: putative WD repeat-protein
  misc_feature (120)..(432): Homolog of NCBI NO: 15222143 NR Description: transducin / WD-40 repeat protein family
  misc_feature (99)..(431): Homolog of NCBI NO: 15240616 NR Description: transducin / WD-40 repeat protein family
  misc_feature (17)..(433): Homolog of NCBI NO: 15221675 NR Description: transducin / WD-40 repeat protein family
  misc_feature (20)..(390): Homolog of NCBI NO: 18395507 NR Description: transducin / WD-40 repeat protein family
  misc_feature (2)..(431): Homolog of NCBI NO: 38345251 NR Description: OSJNBb0011N17.12 [Oryza sativa (japonica
MATSSAAAAGDSDASSNKLASVASTSSSTVSTSSSAAAAAVSEASSSTSLPSLSTATSNAASFAHVATLLPPPTAASTAAAVAVVDVSRGFVVARPASVALHDLGTLEPTSTSDPGHDTATAGSVKCVAHVHGGKAVTGHQDGRLRLWRVSSRAPARIRLAAALPTVSDRLRRFPLPSNHVAVRRHHRRLWIEHADTVSGVAASTDGRLLFSVSWDKTLKVWAIPSLRCLQSLPAHDDAVNAVAVAPDGTVYTGSADRRVRVWAPRPASDKTTKRQSKKPVYYLAATLSRHTAAVNAVAVGCGGQVLYSGGNDRCVVVWEREDSASHMVAIGALRGHRKAVLSIASTGGGLVVSGSADHTVRAWRRETDGRGHTCVAVIDGHGSAVRSVAVALVPGKKQLQGGEDGDDGGEEWRVCSASFDGEVRVWSLRVTTGL

SEQ ID NO: 66576 - protein, 278 aa, Triticum aestivum
  peptide (1)..(278): Ceres Seq. ID no. 14303086
  misc_feature (179)..(211): Homolog of NCBI NO: 21322711 NR Description: pherophorin-dz1 protein [Volvox carteri f.
  misc_feature (179)..(211): Homolog of NCBI NO: 21322711 NR Description: pherophorin-dz1 protein [Volvox carteri f.
  misc_feature (179)..(211): Homolog of NCBI NO: 21322711 NR Description: pherophorin-dz1 protein [Volvox carteri f.
  misc_feature (179)..(211): Homolog of NCBI NO: 21322711 NR Description: pherophorin-dz1 protein [Volvox carteri f.
  misc_feature (179)..(211): Homolog of NCBI NO: 21322711 NR Description: pherophorin-dz1 protein [Volvox carteri f.
  misc_feature (179)..(211): Homolog of NCBI NO: 21322711 NR Description: pherophorin-dz1 protein [Volvox carteri f.
  misc_feature (179)..(211): Homolog of NCBI NO: 21322711 NR Description: pherophorin-dz1 protein [Volvox carteri f.
  misc_feature (179)..(213): Homolog of NCBI NO: 21322711 NR Description: pherophorin-dz1 protein [Volvox carteri f.
  misc_feature (179)..(211): Homolog of NCBI NO: 21322711 NR Description: pherophorin-dz1 protein [Volvox carteri f.
  misc_feature (162)..(217): Homolog of NCBI NO: 21322711 NR Description: pherophorin-dz1 protein [Volvox carteri f.
DLPFHPSSRAASPIDEASPAPLHGHQQRRRRGRQRRQQQQARLGRLHLLLHRLNLLLRRRGRGLRGVLLHVPPFALHRHVECRLLRPRRHAPPSAHGGVDGSGRRGGGRLPRLRRRQAGVRRPSRPRHPRADVHLRPGPRHRDRRLGQVRGARPRWQGRDGPPGREAAPVAGLFARARPDPPRRRAPHGLRPPPPVPAPVQPRRRPTPPPPALDRACRHRVRRRRVHGRPPPLLRLLGQDAQGLGHPVPPLLAVLAGARRCRQRGRRRPRRHGVHRLR

SEQ ID NO: 66577 - DNA, 1775 bp, Triticum aestivum
  misc_feature (1)..(1775): Ceres Seq. ID no. 13658513
attccgatcagccacacgagtccatcaaggcaccgtccgtccctctctctctcgcccaaacgaagaggaagaagaaaaggggggaaaccgcacgcggcggcggcttccaccgccgaacgcgcccccaaaactaaatccctccaccaaaaccccaatccccatctccatccccatccccatggcgaccggctcgcgtgcgccgcgacgccgccgcccccgctcgccgccgacgctgatcgacgacctcgtgcgcgagatcttcctgagcgtacccgtggacgaccccgtgaccatcgtccgcggcgccgccggctgcaggagctggcgcagcatgctgtccgcccccgacttcgcccgcgactaccgcagggcccgcagtgcgtcgcccgtgctgggcttcctccacaacaccaccagcgaaccggaggatcgcttcgcctcctcccacttcgtccccaccgcggccttccgcttccgccccccggcgtacgaggacctctcccgctgggacgtcctcgactcccgccatggcctcgccctcctccacgcccccaagagcaagaggaacaagggcttcgttgcctgcgacctcgtcaccggccagcggtgggaattcggcgamcccgagtgccacaacgtcatgtggtggccgcacggcgatcacatggacaagcgcwtacgctgtagtgccacggtgctctgcgccaaggcccgatgtgaccagctcgactgccatggcgatggcggccctttccgcgtggccttggtgggcaccgactatagaaacttgagatcctacgccaccgtctactcatcagagactcgtgagtggagggacaccatctctgttcacaacctggaatttcgtcaatggcagggggaacagtgctgttgtgggaaataaggtctatgtccaatgtgtagagagtgacaaagtcgtggagtacaacatgcatgagcaaaaactagcwttmwyvtgatcaccctgccatttgaggaccaggaggggatcgacgagagcattgacctcatgggggtggacgacggcagtctgctctttgcatccgtgctgaaggctaaactctgcctatggactatggaggctggtcccggcggagctgcggggtgggcgcgacgctgggctatcgagctcaaaccatcgctccctgctcgtttcctcacagacaaggcaaatatgctggttggctttgctgaaggtgttggtgtcatcttcctgagtacaagggcggggctgtacgcaattgagctcaattcaggcaaaggcaacagggttcacaaagggttttttgataagatcataccctacaggagcttctgcactagagcaataggggggttggccgacctcgcacgcgcagttagccggcgtacaggagcttctgtactagagcaatagggcggttgcccggcctctgatgaagcttcacgcgcagttgttggtgctagaaggatataactaaatggcgtcaggaccttggtttactgttttgcggcccaggaagaatttgaagtgaacttgagcctcatttgctgctggttgtgttgaatagtctggttagggtggatgcgcttttgttccatttctgcttgtgcgaaaaacttgaatcctttcgtccgagttgggtgcaacgcaaactgactgcgaggagaaattttggtgatccgttgacggttttgtggcatgaattgttgcaaatttcttcttccctatctctggctgatagagatgatattattgccttgaaaatgcactg

SEQ ID NO: 66578 - protein, 300 aa, Triticum aestivum
  peptide (1)..(300): Ceres Seq. ID no. 15220644
  misc_feature (67)..(122): Homolog of NCBI NO: 34015373 NR Description: hypothetical protein OSJNBa0070J19.13
  misc_feature (74)..(285): Homolog of NCBI NO: 34394503 NR Description: unknown protein [Oryza sativa (japonica
  misc_feature (81)..(215): Homolog of NCBI NO: 34395380 NR Description: unknown protein [Oryza sativa (japonica
  misc_feature (63)..(187): Homolog of NCBI NO: 34914028 NR Description: OJ1014_G12.29 [Oryza sativa (japonica
  misc_feature (229)..(292): Homolog of NCBI NO: 35215058 NR Description: hypothetical protein [Oryza sativa (japonica
  misc_feature (75)..(141): Homolog of NCBI NO: 35215058 NR Description: hypothetical protein [Oryza sativa (japonica
  misc_feature (74)..(245): Homolog of NCBI NO: 34915428 NR Description: hypothetical protein~similar to Oryza sativa
  misc_feature (74)..(283): Homolog of NCBI NO: 34915420 NR Description: contains EST C98814(E3124)~similar to Oryza
  misc_feature (76)..(283): Homolog of NCBI NO: 34915424 NR Description: hypothetical protein~similar to Oryza sativa
  misc_feature (76)..(283): Homolog of NCBI NO: 33146558 NR Description: unknown protein [Oryza sativa (japonica
  misc_feature (207)..(207): Xaa is any aa, unknown or other
  misc_feature (226)..(226): Xaa is any aa, unknown or other
FRSATRVHQGTVRPSLSRPNEEEEEKGGNRTRRRLPPPNAPPKLNPSTKTPIPISIPIPMATGSRAPRRRRPRSPPTLIDDLVREIFLSVPVDDPVTIVRGAAGCRSWRSMLSAPDFARDYRRARSASPVLGFLHNTTSEPEDRFASSHFVPTAAFRFRPPAYEDLSRWDVLDSRHGLALLHAPKSKRNKGFVACDLVTGQRWEFGXPECHNVMWWPHGDHMDKRXRCSATVLCAKARCDQLDCHGDGGPFRVALVGTDYRNLRSYATVYSSETREWRDTISVHNLEFRQWQGEQCCCGK

SEQ ID NO: 66579 - protein, 241 aa, Triticum aestivum
  peptide (1)..(241): Ceres Seq. ID no. 15220645
  misc_feature (8)..(63): Homolog of NCBI NO: 34015373 NR Description: hypothetical protein OSJNBa0070J19.13
  misc_feature (15)..(226): Homolog of NCBI NO: 34394503 NR Description: unknown protein [Oryza sativa (japonica
  misc_feature (22)..(156): Homolog of NCBI NO: 34395380 NR Description: unknown protein [Oryza sativa (japonica
  misc_feature (4)..(128): Homolog of NCBI NO: 34914028 NR Description: OJ1014_G12.29 [Oryza sativa (japonica
  misc_feature (170)..(233): Homolog of NCBI NO: 35215058 NR Description: hypothetical protein [Oryza sativa (japonica
  misc_feature (16)..(82): Homolog of NCBI NO: 35215058 NR Description: hypothetical protein [Oryza sativa (japonica
  misc_feature (15)..(186): Homolog of NCBI NO: 34915428 NR Description: hypothetical protein~similar to Oryza sativa
  misc_feature (15)..(224): Homolog of NCBI NO: 34915420 NR Description: contains EST C98814(E3124)~similar to Oryza
  misc_feature (17)..(224): Homolog of NCBI NO: 34915424 NR Description: hypothetical protein~similar to Oryza sativa
  misc_feature (17)..(224): Homolog of NCBI NO: 33146558 NR Description: unknown protein [Oryza sativa (japonica
  misc_feature (148)..(148): Xaa is any aa, unknown or other
  misc_feature (167)..(167): Xaa is any aa, unknown or other
MATGSRAPRRRRPRSPPTLIDDLVREIFLSVPVDDPVTIVRGAAGCRSWRSMLSAPDFARDYRRARSASPVLGFLHNTTSEPEDRFASSHFVPTAAFRFRPPAYEDLSRWDVLDSRHGLALLHAPKSKRNKGFVACDLVTGQRWEFGXPECHNVMWWPHGDHMDKRXRCSATVLCAKARCDQLDCHGDGGPFRVALVGTDYRNLRSYATVYSSETREWRDTISVHNLEFRQWQGEQCCCGK

SEQ ID NO: 66580 - protein, 228 aa, Triticum aestivum
  peptide (1)..(228): Ceres Seq. ID no. 15220646
  misc_feature (208)..(208): Xaa is any aa, unknown or other
  misc_feature (226)..(226): Xaa is any aa, unknown or other
IPISHTSPSRHRPSLSLSPKRRGRRKGGKPHAAAASTAERAPKTKSLHQNPNPHLHPHPHGDRLACAATPPPPLAADADRRPRARDLPERTRGRPRDHRPRRRRLQELAQHAVRPRLRPRLPQGPQCVARAGLPPQHHQRTGGSLRLLPLRPHRGLPLPPPGVRGPLPLGRPRLPPWPRPPPRPQEQEEQGLRCLRPRHRPAVGIRRXRVPQRHVVAARRSHGQAXTL

SEQ ID NO: 66581 - DNA, 1778 bp, Triticum aestivum
  misc_feature (1)..(1778): Ceres Seq. ID no. 13590394
aatttcctcttcgtgggcgccgcctcctcctcctcccccattctcctcctaaagccctaactaaacccatcccccctcctcgcgccgccgccgccgcaatggccgccgccgcagtgctccggggcggctcccgccgcgtcctcgcctacccggccctccgcgccgccgtgatctccggccccgccgcgctccccgacgtgcccgcggccgccgggccccagccgccgccgccctcgccgctggccgctggcctatgggcgaggtccatggccaccttcacccgcacgaagccccacgtcaacgtcggcaccatcggccacgtcgaccacggcaagaccacgctcaccgccgccatcaccaaggtgctggcggaggctgggagcgccaaggcggtggcgttcgacgagatcgacaaggctcccgaggagaaagccagaggaatcaccatctccacggctcatgtcgagtatgagaccgctaagaggcactatgctcacgtggactgtccagggcacgccgattatgtcaagaacatgatcactggtgctgctcaaatggatggtggtattcttgttgtgtcagctcctgatggccccatgccacaaactaaggagcatattcttctagctcgacaggttggtgtgccatcacttgtttgtttcttaaacaaagttgatgctgttgaagatgaagagctactagaacttgtggagatggagcttcgagagctcctcagtttctacaagttcccaggcgatgatattcctatcatccgtggatctgccttgtcagccttgaatggaacaaatgaggagattggaaagaatgctattttgaaactgatggatgccgtcgattcttacatccccgatcctgtgagggtgcttgataagtctttcttgatgccaattgaaggcattttctcaatccagggtcgtggtactgttgtgactggacgtattgaacagggggtaattaaaactggtgaggatgttgaggtcataggtttgacggagagtggtcctgtgaagactacagttactggtgttgagatgttcaaaaagatgatggatcatggagaggctggtgacaatgttggtcttcttctccgtggtcttaagcgtggtgatgtcgagcgtggccaggtggtttgcaaacccggtactgtgaagacctacaaaaagtttgaggcggaaatttacgtccttaccaaggatgaaggtggtcgccacactgcattcttctcgaattacagcccacaattctacttcaggacagctgatatctgtgggaaaatcgagttgcctccggacgtgaagatggttatgcctggtgacaacgtaaccgcaatctttgagttgatgttgcctgttccgctcgaaccaggtctaagattcgcgctgagggaaggagggaggaccgtcggcgccggagttgtcgccaaagtcatgagctaataacaataatatgttccagacctttctctttttttggcgtagtgaattttagcgaacaaatgaatgttgatatgaaggatttgtccgaccggaaacacgagataaacgagagtcgagagcaaggggactggcatggatgcatcttgtgtggatgcattcagccaaccaacttcctacggataatggtttgttaccattccgaagaattgctattttttcttctcatgttgggtagtttgctgtatcataccgcagcttgttacctagacacgcttctctggcatatattagctcggtgattcaataagaccgtcttgtttc

SEQ ID NO: 66582 - protein, 484 aa, Triticum aestivum
  peptide (1)..(484): Ceres Seq. ID no. 15220964
  misc_feature (96)..(292): Pfam Name: Elongation factor Tu GTP binding domain Pfam Description: Elongation factor Tu GTP binding domain
  misc_feature (85)..(483): Homolog of NCBI NO: 22965193 NR Description: hypothetical protein [Rhodopseudomonas palustris]
  misc_feature (92)..(483): Homolog of NCBI NO: 1169498 NR Description: Elongation factor Tu (EF-Tu)
  misc_feature (88)..(483): Homolog of NCBI NO: 22966124 NR Description: hypothetical protein [Rhodospirillum rubrum]
  misc_feature (88)..(483): Homolog of NCBI NO: 22966137 NR Description: hypothetical protein [Rhodospirillum rubrum]
  misc_feature (90)..(483): Homolog of NCBI NO: 23054529 NR Description: hypothetical protein [Geobacter metallireducens]
  misc_feature (92)..(483): Homolog of NCBI NO: 22998293 NR Description: hypothetical protein [Magnetococcus sp. MC-1]
  misc_feature (82)..(484): Homolog of NCBI NO: 1149571 NR Description: mitochondrial elongation factor Tu [Arabidopsis
  misc_feature (82)..(484): Homolog of NCBI NO: 15236220 NR Description: elongation factor Tu (EF-Tu), putative
  misc_feature (33)..(484): Homolog of NCBI NO: 11181616 NR Description: translational elongation factor EF-TuM [Zea mays]
  misc_feature (33)..(484): Homolog of NCBI NO: 18001149 NR Description: translational elongation factor Tu [Oryza sativa]
FPLRGRRLLLLPHSPPKALTKPIPPPRAAAAAMAAAAVLRGGSRRVLAYPALRAAVISGPAALPDVPAAAGPQPPPPSPLAAGLWARSMATFTRTKPHVNVGTIGHVDHGKTTLTAAITKVLAEAGSAKAVAFDEIDKAPEEKARGITISTAHVEYETAKRHYAHVDCPGHADYVKNMITGAAQMDGGILVVSAPDGPMPQTKEHILLARQVGVPSLVCFLNKVDAVEDEELLELVEMELRELLSFYKFPGDDIPIIRGSALSALNGTNEEIGKNAILKLMDAVDSYIPDPVRVLDKSFLMPIEGIFSIQGRGTVVTGRIEQGVIKTGEDVEVIGLTESGPVKTTVTGVEMFKKMMDHGEAGDNVGLLLRGLKRGDVERGQVVCKPGTVKTYKKFEAEIYVLTKDEGGRHTAFFSNYSPQFYFRTADICGKIELPPDVKMVMPGDNVTAIFELMLPVPLEPGLRFALREGGRTVGAGVVAKVMS

SEQ ID NO: 66583 - protein, 452 aa, Triticum aestivum
  peptide (1)..(452): Ceres Seq. ID no. 15220965
  misc_feature (64)..(260): Pfam Name: Elongation factor Tu GTP binding domain Pfam Description: Elongation factor Tu GTP binding domain
  misc_feature (53)..(451): Homolog of NCBI NO: 22965193 NR Description: hypothetical protein [Rhodopseudomonas palustris]
  misc_feature (60)..(451): Homolog of NCBI NO: 1169498 NR Description: Elongation factor Tu (EF-Tu)
  misc_feature (56)..(451): Homolog of NCBI NO: 22966124 NR Description: hypothetical protein [Rhodospirillum rubrum]
  misc_feature (56)..(451): Homolog of NCBI NO: 22966137 NR Description: hypothetical protein [Rhodospirillum rubrum]
  misc_feature (58)..(451): Homolog of NCBI NO: 23054529 NR Description: hypothetical protein [Geobacter metallireducens]
  misc_feature (60)..(451): Homolog of NCBI NO: 22998293 NR Description: hypothetical protein [Magnetococcus sp. MC-1]
  misc_feature (50)..(452): Homolog of NCBI NO: 1149571 NR Description: mitochondrial elongation factor Tu [Arabidopsis
  misc_feature (50)..(452): Homolog of NCBI NO: 15236220 NR Description: elongation factor Tu (EF-Tu), putative
  misc_feature (1)..(452): Homolog of NCBI NO: 11181616 NR Description: translational elongation factor EF-TuM [Zea mays]
  misc_feature (1)..(452): Homolog of NCBI NO: 18001149 NR Description: translational elongation factor Tu [Oryza sativa]
MAAAAVLRGGSRRVLAYPALRAAVISGPAALPDVPAAAGPQPPPPSPLAAGLWARSMATFTRTKPHVNVGTIGHVDHGKTTLTAAITKVLAEAGSAKAVAFDEIDKAPEEKARGITISTAHVEYETAKRHYAHVDCPGHADYVKNMITGAAQMDGGILVVSAPDGPMPQTKEHILLARQVGVPSLVCFLNKVDAVEDEELLELVEMELRELLSFYKFPGDDIPIIRGSALSALNGTNEEIGKNAILKLMDAVDSYIPDPVRVLDKSFLMPIEGIFSIQGRGTVVTGRIEQGVIKTGEDVEVIGLTESGPVKTTVTGVEMFKKMMDHGEAGDNVGLLLRGLKRGDVERGQVVCKPGTVKTYKKFEAEIYVLTKDEGGRHTAFFSNYSPQFYFRTADICGKIELPPDVKMVMPGDNVTAIFELMLPVPLEPGLRFALREGGRTVGAGVVAKVMS

SEQ ID NO: 66584 - protein, 396 aa, Triticum aestivum
  peptide (1)..(396): Ceres Seq. ID no. 15220966
  misc_feature (8)..(204): Pfam Name: Elongation factor Tu GTP binding domain Pfam Description: Elongation factor Tu GTP binding domain
  misc_feature (1)..(395): Homolog of NCBI NO: 22965193 NR Description: hypothetical protein [Rhodopseudomonas palustris]
  misc_feature (4)..(395): Homolog of NCBI NO: 1169498 NR Description: Elongation factor Tu (EF-Tu)
  misc_feature (1)..(395): Homolog of NCBI NO: 22966124 NR Description: hypothetical protein [Rhodospirillum rubrum]
  misc_feature (1)..(395): Homolog of NCBI NO: 22966137 NR Description: hypothetical protein [Rhodospirillum rubrum]
  misc_feature (2)..(395): Homolog of NCBI NO: 23054529 NR Description: hypothetical protein [Geobacter metallireducens]
  misc_feature (4)..(395): Homolog of NCBI NO: 22998293 NR Description: hypothetical protein [Magnetococcus sp. MC-1]
  misc_feature (1)..(396): Homolog of NCBI NO: 1149571 NR Description: mitochondrial elongation factor Tu [Arabidopsis
  misc_feature (1)..(396): Homolog of NCBI NO: 15236220 NR Description: elongation factor Tu (EF-Tu), putative
  misc_feature (1)..(396): Homolog of NCBI NO: 11181616 NR Description: translational elongation factor EF-TuM [Zea mays]
  misc_feature (1)..(396): Homolog of NCBI NO: 18001149 NR Description: translational elongation factor Tu [Oryza sativa]
MATFTRTKPHVNVGTIGHVDHGKTTLTAAITKVLAEAGSAKAVAFDEIDKAPEEKARGITISTAHVEYETAKRHYAHVDCPGHADYVKNMITGAAQMDGGILVVSAPDGPMPQTKEHILLARQVGVPSLVCFLNKVDAVEDEELLELVEMELRELLSFYKFPGDDIPIIRGSALSALNGTNEEIGKNAILKLMDAVDSYIPDPVRVLDKSFLMPIEGIFSIQGRGTVVTGRIEQGVIKTGEDVEVIGLTESGPVKTTVTGVEMFKKMMDHGEAGDNVGLLLRGLKRGDVERGQVVCKPGTVKTYKKFEAEIYVLTKDEGGRHTAFFSNYSPQFYFRTADICGKIELPPDVKMVMPGDNVTAIFELMLPVPLEPGLRFALREGGRTVGAGVVAKVMS

SEQ ID NO: 66585 - DNA, 1762 bp, Triticum aestivum
  misc_feature (1)..(1762): Ceres Seq. ID no. 14302071
attttgtcctgtctccctatattcccagtgtctcgctgctcgttcccatatatgcacgcacctcgcgcgtggtcaccgtgtgaagtgcctctgccagagtgccggctaccaaccccgttgccccccggaagtggaacctaggataccgcggcagccgtcgatttcatggcgccggaagaagcaagcacggccaccaccggtggcccgcgccgccgccgcgtgctagtcttccctatcccgtaccagggccacatcaaccccatgttccagctcgccggcctcctccaagaccgcggctttgccgtcaccgtcttccacacccacttcaacgcccccgacccgtcccgccaccccgcctacggcttcgtccccgtccccgacggcttgccggcgggcagccccggcacggtggcggcgaccgtcgagcacatcttcgccatcaacggctcctgcgaggcgccgttccgggagcgcctggccgccctgctggaggctcctggcggcagggacgaggtcgcgtgcctggtcgcggacgcgcacctgctgaccctcatggacgtggcgcggcagcaaggcgtgccgacgctggcgctgcgcaccggcagcgccgcctgcttccgcaacttcatggccaccccgatgctctgcgacaagggctaccttccggtgagcgcggagtcgcagctggacgcgccggtgagggagctgccgccgtaccgcgtccgggacctgatggccgtcaccagcagccgccacgagcacgatctggtgtgcaagctgctggcccgggccgtcgaggcagtgagcacctcggctggattcatactcaacaccttcgacgcgctggaggccgacgacctggcggcgacccggcgggacctcgccggcgtgccggtgttcgaggtcggcccgctccacaagatctccccggcgtcgtccagcagcctcctgccgcaggaccgctcctgcctggactggctggacgcgcaagccccggcgtccgtgctgtacatcagcttcggcagcctggcgagcatgagcggcgaggacctggccgaggcggcgtggggcgtcgccaacagcaggcagccgttcctgtgggcgctccggccgggcctcgcccgcggcgccgccctgcccgacgggttcggcgcggagaccgaaggccgtggactggtcgtgggctgggcgccgcaggaggaggtgctggcgcacggcgccgtgggcgggttctggacgcacggcgggtggaactcggcgctggagggcgcgtgcgggggcgtgccgatgctctgccggccctgcttcggcgaccagatgggcaacgcgaggtacgtggagcacgtgtggcgcgcgggcatcgcgctggacggcggcgtgctcgagcggggagcggtggagcgggccgtccggaggctcatgcggagcgaggagggggaggagatgagggggcgagcccgggagctcgggagcagagcggcggaggccatcgccgagggtgggtcgtctcgccacagtgtcgacaagctggtgaaccacatcatgtcgctgtggaagtgagttccgagtactgccagtagaccgatgcttgcattttgtcctctttaaaatgtttggatcttttcatgactatataagacttcattgaaatcaccggcacaaaaccatggaagttttatttgttgatcaagtgtcctcaaaagcttccatgttttatcccttttttccaacgcaggctcaccatatatgcccgtgaatctcc

SEQ ID NO: 66586 - protein, 464 aa, Triticum aestivum
  peptide (1)..(464): Ceres Seq. ID no. 14302072
  misc_feature (17)..(457): Pfam Name: UDP-glucoronosyl and UDP-glucosyl transferase Pfam Description: UDP-glucoronosyl and UDP-glucosyl transferase
  misc_feature (291)..(462): Homolog of NCBI NO: 34900680 NR Description: contains ESTs
  misc_feature (46)..(453): Homolog of NCBI NO: 34900678 NR Description: glucuronosyl transferase-like protein
  misc_feature (46)..(462): Homolog of NCBI NO: 33146633 NR Description: putative UDP-glucosyltransferase
  misc_feature (9)..(457): Homolog of NCBI NO: 18033228 NR Description: UDP-glucosyltransferase BX8 [Zea mays]
  misc_feature (17)..(462): Homolog of NCBI NO: 33146634 NR Description: putative UDP-glucosyltransferase
  misc_feature (6)..(445): Homolog of NCBI NO: 18033230 NR Description: UDP-glucosyltransferase BX9 [Zea mays]
  misc_feature (12)..(462): Homolog of NCBI NO: 34900682 NR Description: glucuronosyl transferase-like protein
  misc_feature (7)..(461): Homolog of NCBI NO: 34395172 NR Description: putative UDP-glucosyltransferase
  misc_feature (6)..(462): Homolog of NCBI NO: 34900662 NR Description: glucuronosyl transferase-like protein
  misc_feature (5)..(462): Homolog of NCBI NO: 34897378 NR Description: putative UDP-glucosyltransferase
MAPEEASTATTGGPRRRRVLVFPIPYQGHINPMFQLAGLLQDRGFAVTVFHTHFNAPDPSRHPAYGFVPVPDGLPAGSPGTVAATVEHIFAINGSCEAPFRERLAALLEAPGGRDEVACLVADAHLLTLMDVARQQGVPTLALRTGSAACFRNFMATPMLCDKGYLPVSAESQLDAPVRELPPYRVRDLMAVTSSRHEHDLVCKLLARAVEAVSTSAGFILNTFDALEADDLAATRRDLAGVPVFEVGPLHKISPASSSSLLPQDRSCLDWLDAQAPASVLYISFGSLASMSGEDLAEAAWGVANSRQPFLWALRPGLARGAALPDGFGAETEGRGLVVGWAPQEEVLAHGAVGGFWTHGGWNSALEGACGGVPMLCRPCFGDQMGNARYVEHVWRAGIALDGGVLERGAVERAVRRLMRSEEGEEMRGRARELGSRAAEAIAEGGSSRHSVDKLVNHIMSLWK

SEQ ID NO: 66587 - protein, 432 aa, Triticum aestivum
  peptide (1)..(432): Ceres Seq. ID no. 14302073
  misc_feature (1)..(425): Pfam Name: UDP-glucoronosyl and UDP-glucosyl transferase Pfam Description: UDP-glucoronosyl and UDP-glucosyl transferase
  misc_feature (259)..(430): Homolog of NCBI NO: 34900680 NR Description: contains ESTs
  misc_feature (14)..(421): Homolog of NCBI NO: 34900678 NR Description: glucuronosyl transferase-like protein
  misc_feature (14)..(430): Homolog of NCBI NO: 33146633 NR Description: putative UDP-glucosyltransferase
  misc_feature (1)..(425): Homolog of NCBI NO: 18033228 NR Description: UDP-glucosyltransferase BX8 [Zea mays]
  misc_feature (1)..(430): Homolog of NCBI NO: 33146634 NR Description: putative UDP-glucosyltransferase
  misc_feature (1)..(413): Homolog of NCBI NO: 18033230 NR Description: UDP-glucosyltransferase BX9 [Zea mays]
  misc_feature (1)..(430): Homolog of NCBI NO: 34900682 NR Description: glucuronosyl transferase-like protein
  misc_feature (1)..(429): Homolog of NCBI NO: 34395172 NR Description: putative UDP-glucosyltransferase
  misc_feature (1)..(430): Homolog of NCBI NO: 34900662 NR Description: glucuronosyl transferase-like protein
  misc_feature (1)..(430): Homolog of NCBI NO: 34897378 NR Description: putative UDP-glucosyltransferase
MFQLAGLLQDRGFAVTVFHTHFNAPDPSRHPAYGFVPVPDGLPAGSPGTVAATVEHIFAINGSCEAPFRERLAALLEAPGGRDEVACLVADAHLLTLMDVARQQGVPTLALRTGSAACFRNFMATPMLCDKGYLPVSAESQLDAPVRELPPYRVRDLMAVTSSRHEHDLVCKLLARAVEAVSTSAGFILNTFDALEADDLAATRRDLAGVPVFEVGPLHKISPASSSSLLPQDRSCLDWLDAQAPASVLYISFGSLASMSGEDLAEAAWGVANSRQPFLWALRPGLARGAALPDGFGAETEGRGLVVGWAPQEEVLAHGAVGGFWTHGGWNSALEGACGGVPMLCRPCFGDQMGNARYVEHVWRAGIALDGGVLERGAVERAVRRLMRSEEGEEMRGRARELGSRAAEAIAEGGSSRHSVDKLVNHIMSLWK

SEQ ID NO: 66588 - protein, 335 aa, Triticum aestivum
  peptide (1)..(335): Ceres Seq. ID no. 14302074
  misc_feature (1)..(328): Pfam Name: UDP-glucoronosyl and UDP-glucosyl transferase Pfam Description: UDP-glucoronosyl and UDP-glucosyl transferase
  misc_feature (162)..(333): Homolog of NCBI NO: 34900680 NR Description: contains ESTs
  misc_feature (1)..(324): Homolog of NCBI NO: 34900678 NR Description: glucuronosyl transferase-like protein
  misc_feature (1)..(333): Homolog of NCBI NO: 33146633 NR Description: putative UDP-glucosyltransferase
  misc_feature (1)..(328): Homolog of NCBI NO: 18033228 NR Description: UDP-glucosyltransferase BX8 [Zea mays]
  misc_feature (1)..(333): Homolog of NCBI NO: 33146634 NR Description: putative UDP-glucosyltransferase
  misc_feature (1)..(316): Homolog of NCBI NO: 18033230 NR Description: UDP-glucosyltransferase BX9 [Zea mays]
  misc_feature (1)..(333): Homolog of NCBI NO: 34900682 NR Description: glucuronosyl transferase-like protein
  misc_feature (1)..(332): Homolog of NCBI NO: 34395172 NR Description: putative UDP-glucosyltransferase
  misc_feature (1)..(333): Homolog of NCBI NO: 34900662 NR Description: glucuronosyl transferase-like protein
  misc_feature (1)..(333): Homolog of NCBI NO: 34897378 NR Description: putative UDP-glucosyltransferase
MDVARQQGVPTLALRTGSAACFRNFMATPMLCDKGYLPVSAESQLDAPVRELPPYRVRDLMAVTSSRHEHDLVCKLLARAVEAVSTSAGFILNTFDALEADDLAATRRDLAGVPVFEVGPLHKISPASSSSLLPQDRSCLDWLDAQAPASVLYISFGSLASMSGEDLAEAAWGVANSRQPFLWALRPGLARGAALPDGFGAETEGRGLVVGWAPQEEVLAHGAVGGFWTHGGWNSALEGACGGVPMLCRPCFGDQMGNARYVEHVWRAGIALDGGVLERGAVERAVRRLMRSEEGEEMRGRARELGSRAAEAIAEGGSSRHSVDKLVNHIMSLWK

SEQ ID NO: 66589 - DNA, 1773 bp, Triticum aestivum
  misc_feature (1)..(1773): Ceres Seq. ID no. 14303105
cttccacgcgcttgtctgccggccgaatcgattccaagtccaactctgagctgttccccatcgccattttccgtctccatttctccccaccttccccgacccccaaatccccacgcgaatccgcccccgccgccatggcctccccgccgggcgccgcccgcctcgccgccctgctgctcctcgcgctcctcgccgggcccgccgcgtcccgcttcgccccggcggacaaccacctcatcgcctgcggcgcgacggccccggccgtcctccccgacggccgccgcttcgtcccggactccggctgcgcgtccatgaccctccgctccgcggcccccgccctcccgtccgccgcccccgctgcgcccgcgcacgagccgccctcccctctccacgccgccgcgcgcgtcttctcctgccacgcctcctacgacctcgccgtgcgccgccgcgggcgccacgtcctgcgcctccacttctaccccttcagccccgccctcgcctccgcgcgcttccacgtcggcgccgggggcttcctcctcctccacaacttcaccgcctcgtcccccgtcgtcaaggacttcctgctccccgtcgacgccgacgtcctcgtcctcaccttcgtccccgaggccggatccgccgccttcgtcaacgccatcgagctcttctcggcgcccgaggagctcgtcggcgacatcgccaccctcgtcgccgctgacggcgtcaaccgcaccgacgggctctcctcgcaggtcttcgagacgctctaccgggtcaacgtcgccggccgcaaggtcaccccgttcaacgacacgctgtggcggacatgggtcaacgacgagggcttcctcgtcaacaaggaatcatccagcagcaaggcatggtcattcggtggccggattgcttaccccaaggacagcaggttgatgacccgagaggtggctccggacaacgtctacaactcggcgaggtcggtgaggtcagacggcaatctgacatggggtttccctgtgcccgctcgcaaccggtacctcgtgcgcatgcacttctgtgacattgtgagcaaggcactgtatcagctctacttcagtatctatgtcaatggtcatctcgcagtgaaggattttgacatttccagcaccactggatacttggcctatccgtattacatcgactatgttgtggacgttgaggatgaagggatgctgaaactggccattggtggctccaagatgagccagcctggagaagcgagtggtttcctgaatgggctcgagataatgaggatgaacaaaacgggtggcggcatggacggggatttccctgttgttctggacatggggtacctggtcagtaaggggtttggggaattcgctcgctcactgctgtgtggtttagtcttcgccgggctgtttttggttttggtcatgctggtgctgaggttgaggaccgagctgaaaaacaatggaacgctttggttcagccagtcagtggattctggtgaggggaagttggctaaagcatatcagcttgtgcccaccaagacagactattaagcagcatgagatctgagaagcttcaacttgtgtctgttatctgtatcccatggcctaatcttgtgcttcgtttgtaagtattgtagttttctagttctacatttctatgcctttcatggttgaagtttcaattgtttgagcttggccagtgcagagcacaactattgtgtgtacttaagaattaagacgtgtttgtattgctactacttcgctaaat

SEQ ID NO: 66590 - protein, 517 aa, Triticum aestivum
  peptide (1)..(517): Ceres Seq. ID no. 14303106
  misc_feature (66)..(507): Homolog of NCBI NO: 34898020 NR Description: Similar to putative receptor-like protein kinase
  misc_feature (66)..(507): Homolog of NCBI NO: 25553554 NR Description: OSJNBa0038F22.1 [Oryza sativa (japonica
  misc_feature (54)..(496): Homolog of NCBI NO: 24796812 NR Description: putative receptor-like protein kinase
  misc_feature (63)..(470): Homolog of NCBI NO: 15226565 NR Description: protein kinase family [Arabidopsis thaliana]
  misc_feature (55)..(480): Homolog of NCBI NO: 15234944 NR Description: protein kinase family [Arabidopsis thaliana]
  misc_feature (56)..(487): Homolog of NCBI NO: 15240228 NR Description: rprotein kinase family [Arabidopsis thaliana]
  misc_feature (68)..(440): Homolog of NCBI NO: 14488367 NR Description: putative protein kinase [Oryza sativa (japonica
  misc_feature (202)..(438): Homolog of NCBI NO: 18411279 NR Description: fringe-related protein [Arabidopsis thaliana]
  misc_feature (53)..(357): Homolog of NCBI NO: 24417422 NR Description: unknown [Arabidopsis thaliana]
  misc_feature (45)..(490): Homolog of NCBI NO: 15237872 NR Description: protein kinase family [Arabidopsis thaliana]
STRLSAGRIDSKSNSELFPIAIFRLHFSPPSPTPKSPRESAPAAMASPPGAARLAALLLLALLAGPAASRFAPADNHLIACGATAPAVLPDGRRFVPDSGCASMTLRSAAPALPSAAPAAPAHEPPSPLHAAARVFSCHASYDLAVRRRGRHVLRLHFYPFSPALASARFHVGAGGFLLLHNFTASSPVVKDFLLPVDADVLVLTFVPEAGSAAFVNAIELFSAPEELVGDIATLVAADGVNRTDGLSSQVFETLYRVNVAGRKVTPFNDTLWRTWVNDEGFLVNKESSSSKAWSFGGRIAYPKDSRLMTREVAPDNVYNSARSVRSDGNLTWGFPVPARNRYLVRMHFCDIVSKALYQLYFSIYVNGHLAVKDFDISSTTGYLAYPYYIDYVVDVEDEGMLKLAIGGSKMSQPGEASGFLNGLEIMRMNKTGGGMDGDFPVVLDMGYLVSKGFGEFARSLLCGLVFAGLFLVLVMLVLRLRTELKNNGTLWFSQSVDSGEGKLAKAYQLVPTKTDY

SEQ ID NO: 66591 - protein, 473 aa, Triticum aestivum
  peptide (1)..(473): Ceres Seq. ID no. 14303107
  misc_feature (22)..(463): Homolog of NCBI NO: 34898020 NR Description: Similar to putative receptor-like protein kinase
  misc_feature (22)..(463): Homolog of NCBI NO: 25553554 NR Description: OSJNBa0038F22.1 [Oryza sativa (japonica
  misc_feature (10)..(452): Homolog of NCBI NO: 24796812 NR Description: putative receptor-like protein kinase
  misc_feature (19)..(426): Homolog of NCBI NO: 15226565 NR Description: protein kinase family [Arabidopsis thaliana]
  misc_feature (11)..(436): Homolog of NCBI NO: 15234944 NR Description: protein kinase family [Arabidopsis thaliana]
  misc_feature (12)..(443): Homolog of NCBI NO: 15240228 NR Description: rprotein kinase family [Arabidopsis thaliana]
  misc_feature (24)..(396): Homolog of NCBI NO: 14488367 NR Description: putative protein kinase [Oryza sativa (japonica
  misc_feature (158)..(394): Homolog of NCBI NO: 18411279 NR Description: fringe-related protein [Arabidopsis thaliana]
  misc_feature (9)..(313): Homolog of NCBI NO: 24417422 NR Description: unknown [Arabidopsis thaliana]
  misc_feature (1)..(446): Homolog of NCBI NO: 15237872 NR Description: protein kinase family [Arabidopsis thaliana]
MASPPGAARLAALLLLALLAGPAASRFAPADNHLIACGATAPAVLPDGRRFVPDSGCASMTLRSAAPALPSAAPAAPAHEPPSPLHAAARVFSCHASYDLAVRRRGRHVLRLHFYPFSPALASARFHVGAGGFLLLHNFTASSPVVKDFLLPVDADVLVLTFVPEAGSAAFVNAIELFSAPEELVGDIATLVAADGVNRTDGLSSQVFETLYRVNVAGRKVTPFNDTLWRTWVNDEGFLVNKESSSSKAWSFGGRIAYPKDSRLMTREVAPDNVYNSARSVRSDGNLTWGFPVPARNRYLVRMHFCDIVSKALYQLYFSIYVNGHLAVKDFDISSTTGYLAYPYYIDYVVDVEDEGMLKLAIGGSKMSQPGEASGFLNGLEIMRMNKTGGGMDGDFPVVLDMGYLVSKGFGEFARSLLCGLVFAGLFLVLVMLVLRLRTELKNNGTLWFSQSVDSGEGKLAKAYQLVPTKTDY

SEQ ID NO: 66592 - protein, 414 aa, Triticum aestivum
  peptide (1)..(414): Ceres Seq. ID no. 14303108
  misc_feature (1)..(404): Homolog of NCBI NO: 34898020 NR Description: Similar to putative receptor-like protein kinase
  misc_feature (1)..(404): Homolog of NCBI NO: 25553554 NR Description: OSJNBa0038F22.1 [Oryza sativa (japonica
  misc_feature (1)..(393): Homolog of NCBI NO: 24796812 NR Description: putative receptor-like protein kinase
  misc_feature (1)..(367): Homolog of NCBI NO: 15226565 NR Description: protein kinase family [Arabidopsis thaliana]
  misc_feature (1)..(377): Homolog of NCBI NO: 15234944 NR Description: protein kinase family [Arabidopsis thaliana]
  misc_feature (1)..(384): Homolog of NCBI NO: 15240228 NR Description: rprotein kinase family [Arabidopsis thaliana]
  misc_feature (1)..(337): Homolog of NCBI NO: 14488367 NR Description: putative protein kinase [Oryza sativa (japonica
  misc_feature (99)..(335): Homolog of NCBI NO: 18411279 NR Description: fringe-related protein [Arabidopsis thaliana]
  misc_feature (1)..(254): Homolog of NCBI NO: 24417422 NR Description: unknown [Arabidopsis thaliana]
  misc_feature (1)..(387): Homolog of NCBI NO: 15237872 NR Description: protein kinase family [Arabidopsis thaliana]
MTLRSAAPALPSAAPAAPAHEPPSPLHAAARVFSCHASYDLAVRRRGRHVLRLHFYPFSPALASARFHVGAGGFLLLHNFTASSPVVKDFLLPVDADVLVLTFVPEAGSAAFVNAIELFSAPEELVGDIATLVAADGVNRTDGLSSQVFETLYRVNVAGRKVTPFNDTLWRTWVNDEGFLVNKESSSSKAWSFGGRIAYPKDSRLMTREVAPDNVYNSARSVRSDGNLTWGFPVPARNRYLVRMHFCDIVSKALYQLYFSIYVNGHLAVKDFDISSTTGYLAYPYYIDYVVDVEDEGMLKLAIGGSKMSQPGEASGFLNGLEIMRMNKTGGGMDGDFPVVLDMGYLVSKGFGEFARSLLCGLVFAGLFLVLVMLVLRLRTELKNNGTLWFSQSVDSGEGKLAKAYQLVPTKTDY

SEQ ID NO: 66593 - DNA, 949 bp, Triticum aestivum
  misc_feature (1)..(949): Ceres Seq. ID no. 15179836
aattagtcttgcaggagcaagagcgatgtctccgactgatccccgcctcctcttcatcctgtttgtcgtctttgccccggttccggccagggcggtcgacccgaccgtattggccacttttgcgggcatggggatccgcgtctccaccatggagttcgtcatcgacctggacgacctcaacatgaggcaggacatgctgataaccgtggcgacggcgagaagcatgaagagcgtcgagggactaaaggtggcgctcaagcagaccgacatcacggagctgccgacggaagtagtcctcctcaacttggtggtgccggagcggggctcctgcacgctggcgattcgagctgacaatttttatctgttagcatacacaaatgaccgtttggagtggcaggcattcctcgggagggagcacctggttccgacatcgaccccgctcccgttcacgtcggagtacaacgaaagaggcatggggccccgcaccggcctcgcggcgctccagctgagcagggcggccgtgatcgcggcggtcaacacactgctctcctcccgtcggggcgacacgggcgaccaaggccccctcaagcgcgcgctggccacgatcacgctagtcttctgcgaaggctccaggttccgcttcgtccgcgaccgggtcagagcaggctgggagaccgggagccagatcacgaaggatgaggcgctgagggtgacactctgggcaaagatcagctgcgccctcgccaagggctggaccgggggggcgacagccaggctcgcagaaagaggtggcttcccaaatactctcgagggtgccaagtcttttctgctggtactagtttacggcacgaaatgcttgagcgtcatggacgctctccctgtaacctaatctgtggctgcacctttgtttcgccaatgaataataaagaataaaggatggctccgtttc

SEQ ID NO: 66594 - protein, 287 aa, Triticum aestivum
  peptide (1)..(287): Ceres Seq. ID no. 15179837
  misc_feature (50)..(246): Pfam Name: Ribosome inactivating protein Pfam Description: Ribosome inactivating protein
  misc_feature (88)..(254): Homolog of NCBI NO: 31712080 NR Description: hypothetical protein [Oryza sativa (japonica
  misc_feature (9)..(239): Homolog of NCBI NO: 29150390 NR Description: hypothetical protein [Oryza sativa (japonica
  misc_feature (100)..(238): Homolog of NCBI NO: 34394615 NR Description: hypothetical protein [Oryza sativa (japonica
  misc_feature (50)..(246): Homolog of NCBI NO: 18150092 NR Description: RA39p [Oryza sativa]
  misc_feature (8)..(228): Homolog of NCBI NO: 29244620 NR Description: hypothetical protein [Oryza sativa (japonica
MSPTDPRLLFILFVVFAPVPARAVDPTVLATFAGMGIRVSTMEFVIDLDDLNMRQDMLITVATARSMKSVEGLKVALKQTDITELPTEVVLLNLVVPERGSCTLAIRADNFYLLAYTNDRLEWQAFLGREHLVPTSTPLPFTSEYNERGMGPRTGLAALQLSRAAVIAAVNTLLSSRRGDTGDQGPLKRALATITLVFCEGSRFRFVRDRVRAGWETGSQITKDEALRVTLWAKISCALAKGWTGGATARLAERGGFPNTLEGAKSFLLVLVYGTKCLSVMDALPVT

SEQ ID NO: 66595 - protein, 253 aa, Triticum aestivum
  peptide (1)..(253): Ceres Seq. ID no. 15179838
  misc_feature (16)..(212): Pfam Name: Ribosome inactivating protein Pfam Description: Ribosome inactivating protein
  misc_feature (54)..(220): Homolog of NCBI NO: 31712080 NR Description: hypothetical protein [Oryza sativa (japonica
  misc_feature (1)..(205): Homolog of NCBI NO: 29150390 NR Description: hypothetical protein [Oryza sativa (japonica
  misc_feature (66)..(204): Homolog of NCBI NO: 34394615 NR Description: hypothetical protein [Oryza sativa (japonica
  misc_feature (16)..(212): Homolog of NCBI NO: 18150092 NR Description: RA39p [Oryza sativa]
  misc_feature (1)..(194): Homolog of NCBI NO: 29244620 NR Description: hypothetical protein [Oryza sativa (japonica
MGIRVSTMEFVIDLDDLNMRQDMLITVATARSMKSVEGLKVALKQTDITELPTEVVLLNLVVPERGSCTLAIRADNFYLLAYTNDRLEWQAFLGREHLVPTSTPLPFTSEYNERGMGPRTGLAALQLSRAAVIAAVNTLLSSRRGDTGDQGPLKRALATITLVFCEGSRFRFVRDRVRAGWETGSQITKDEALRVTLWAKISCALAKGWTGGATARLAERGGFPNTLEGAKSFLLVLVYGTKCLSVMDALPVT

SEQ ID NO: 66596 - protein, 295 aa, Triticum aestivum
  peptide (1)..(295): Ceres Seq. ID no. 15179839
  misc_feature (58)..(254): Pfam Name: Ribosome inactivating protein Pfam Description: Ribosome inactivating protein
  misc_feature (96)..(262): Homolog of NCBI NO: 31712080 NR Description: hypothetical protein [Oryza sativa (japonica
  misc_feature (17)..(247): Homolog of NCBI NO: 29150390 NR Description: hypothetical protein [Oryza sativa (japonica
  misc_feature (108)..(246): Homolog of NCBI NO: 34394615 NR Description: hypothetical protein [Oryza sativa (japonica
  misc_feature (58)..(254): Homolog of NCBI NO: 18150092 NR Description: RA39p [Oryza sativa]
  misc_feature (16)..(236): Homolog of NCBI NO: 29244620 NR Description: hypothetical protein [Oryza sativa (japonica
ISLAGARAMSPTDPRLLFILFVVFAPVPARAVDPTVLATFAGMGIRVSTMEFVIDLDDLNMRQDMLITVATARSMKSVEGLKVALKQTDITELPTEVVLLNLVVPERGSCTLAIRADNFYLLAYTNDRLEWQAFLGREHLVPTSTPLPFTSEYNERGMGPRTGLAALQLSRAAVIAAVNTLLSSRRGDTGDQGPLKRALATITLVFCEGSRFRFVRDRVRAGWETGSQITKDEALRVTLWAKISCALAKGWTGGATARLAERGGFPNTLEGAKSFLLVLVYGTKCLSVMDALPVT

SEQ ID NO: 66597 - DNA, 1003 bp, Triticum aestivum
  misc_feature (1)..(1003): Ceres Seq. ID no. 12784040
agaaacaaccccaagcggcagccgaagaactcagaacctccgagagagacgacccaactcagaattcgcaagcctcgcttactcgccggagcagcccacgcaccagatggccgcggcaatggaggtcgacgccggcggagagaagccgtcggagaaggagctcttcctcgccgcggagtccggggacgccagcgtcttcgcctccctcgcccccgccgacctcgccgccgctctctccctccgcaacgaggacggccgctccctcgtccacgtcgccgccgcctccgcccgccccgaggccgtcgccgcgcttgtggctgcggggggcgacgccgtggcgagcgccgtgaacgggaaggacgaggaagggtgggcgccgattcactcggtggccagcagcggcaacgccgagatcctcgacatcctgctcggtcacggtgcaaatgttgatttgactactgatgctggccgaactgctcttcactatgctgctagtaaagggaggcttaacattgctgaaacgctgatagctcatcgtgcaaatgtcaacaagaaagataagtttggctgcacacccctgcatagagctgcaagtactggaaatgctgagctgtgtgaatacctgcttgaagaaggcgcagatattgatgcagttgacaagctaggacaatcacctctaatgcatgccgtcatatgcgaggacagaggggttgcccttctgctgatcagacatggtgccgatgttgacattgaagacaaggagggctacactgtccttggccgagcctctgatagcttcaggcctgcactgattgatgcggccaaggcaatgctcgaaggctgaggatgtttagctgccctaaggtaaaagatagatgggagaacatctggaacagaaaaaccgtcgttgtgtacctcgtgatacaagtatgagctgtttccctccaaaatcagattgaccagtcagactttttgttcgtggttaatgattctcgtgttgaag

SEQ ID NO: 66598 - protein, 280 aa, Triticum aestivum
  peptide (1)..(280): Ceres Seq. ID no. 12784041
  misc_feature (188)..(220): Pfam Name: Ankyrin repeat Pfam Description: Ankyrin repeat
  misc_feature (31)..(259): Homolog of NCBI NO: 32481927 NR Description: RAI14 isoform [Homo sapiens]
  misc_feature (82)..(280): Homolog of NCBI NO: 37681913 NR Description: proteasome 26S subunit, non-ATPase, 10 [Danio
  misc_feature (22)..(259): Homolog of NCBI NO: 34854366 NR Description: similar to ankycorbin [Rattus norvegicus]
  misc_feature (85)..(265): Homolog of NCBI NO: 28274854 NR Description: ankyrin repeat protein E4_8 [synthetic construct]
  misc_feature (58)..(280): Homolog of NCBI NO: 39654744 NR Description: Chain A, X-Ray Structure Of Human Gankyrin
  misc_feature (58)..(280): Homolog of NCBI NO: 4506217 NR Description: proteasome 26S non-ATPase subunit 10 isoform 1
  misc_feature (85)..(265): Homolog of NCBI NO: 28274852 NR Description: ankyrin repeat protein E4_2 [synthetic construct]
  misc_feature (40)..(280): Homolog of NCBI NO: 25295712 NR Description: probable ankyrin [imported] - Arabidopsis
  misc_feature (40)..(280): Homolog of NCBI NO: 30678058 NR Description: ankyrin -related [Arabidopsis thaliana]
  misc_feature (38)..(280): Homolog of NCBI NO: 15341604 NR Description: putative ankyrin [Oryza sativa]
ETTPSGSRRTQNLRERRPNSEFASLAYSPEQPTHQMAAAMEVDAGGEKPSEKELFLAAESGDASVFASLAPADLAAALSLRNEDGRSLVHVAAASARPEAVAALVAAGGDAVASAVNGKDEEGWAPIHSVASSGNAEILDILLGHGANVDLTTDAGRTALHYAASKGRLNIAETLIAHRANVNKKDKFGCTPLHRAASTGNAELCEYLLEEGADIDAVDKLGQSPLMHAVICEDRGVALLLIRHGADVDIEDKEGYTVLGRASDSFRPALIDAAKAMLEG

SEQ ID NO: 66599 - protein, 245 aa, Triticum aestivum
  peptide (1)..(245): Ceres Seq. ID no. 12784042
  misc_feature (153)..(185): Pfam Name: Ankyrin repeat Pfam Description: Ankyrin repeat
  misc_feature (1)..(224): Homolog of NCBI NO: 32481927 NR Description: RAI14 isoform [Homo sapiens]
  misc_feature (47)..(245): Homolog of NCBI NO: 37681913 NR Description: proteasome 26S subunit, non-ATPase, 10 [Danio
  misc_feature (1)..(224): Homolog of NCBI NO: 34854366 NR Description: similar to ankycorbin [Rattus norvegicus]
  misc_feature (50)..(230): Homolog of NCBI NO: 28274854 NR Description: ankyrin repeat protein E4_8 [synthetic construct]
  misc_feature (23)..(245): Homolog of NCBI NO: 39654744 NR Description: Chain A, X-Ray Structure Of Human Gankyrin
  misc_feature (23)..(245): Homolog of NCBI NO: 4506217 NR Description: proteasome 26S non-ATPase subunit 10 isoform 1
  misc_feature (50)..(230): Homolog of NCBI NO: 28274852 NR Description: ankyrin repeat protein E4_2 [synthetic construct]
  misc_feature (5)..(245): Homolog of NCBI NO: 25295712 NR Description: probable ankyrin [imported] - Arabidopsis
  misc_feature (5)..(245): Homolog of NCBI NO: 30678058 NR Description: ankyrin -related [Arabidopsis thaliana]
  misc_feature (3)..(245): Homolog of NCBI NO: 15341604 NR Description: putative ankyrin [Oryza sativa]
MAAAMEVDAGGEKPSEKELFLAAESGDASVFASLAPADLAAALSLRNEDGRSLVHVAAASARPEAVAALVAAGGDAVASAVNGKDEEGWAPIHSVASSGNAEILDILLGHGANVDLTTDAGRTALHYAASKGRLNIAETLIAHRANVNKKDKFGCTPLHRAASTGNAELCEYLLEEGADIDAVDKLGQSPLMHAVICEDRGVALLLIRHGADVDIEDKEGYTVLGRASDSFRPALIDAAKAMLEG

SEQ ID NO: 66600 - protein, 241 aa, Triticum aestivum
  peptide (1)..(241): Ceres Seq. ID no. 12784043
  misc_feature (149)..(181): Pfam Name: Ankyrin repeat Pfam Description: Ankyrin repeat
  misc_feature (1)..(220): Homolog of NCBI NO: 32481927 NR Description: RAI14 isoform [Homo sapiens]
  misc_feature (43)..(241): Homolog of NCBI NO: 37681913 NR Description: proteasome 26S subunit, non-ATPase, 10 [Danio
  misc_feature (1)..(220): Homolog of NCBI NO: 34854366 NR Description: similar to ankycorbin [Rattus norvegicus]
  misc_feature (46)..(226): Homolog of NCBI NO: 28274854 NR Description: ankyrin repeat protein E4_8 [synthetic construct]
  misc_feature (19)..(241): Homolog of NCBI NO: 39654744 NR Description: Chain A, X-Ray Structure Of Human Gankyrin
  misc_feature (19)..(241): Homolog of NCBI NO: 4506217 NR Description: proteasome 26S non-ATPase subunit 10 isoform 1
  misc_feature (46)..(226): Homolog of NCBI NO: 28274852 NR Description: ankyrin repeat protein E4_2 [synthetic construct]
  misc_feature (1)..(241): Homolog of NCBI NO: 25295712 NR Description: probable ankyrin [imported] - Arabidopsis
  misc_feature (1)..(241): Homolog of NCBI NO: 30678058 NR Description: ankyrin -related [Arabidopsis thaliana]
  misc_feature (1)..(241): Homolog of NCBI NO: 15341604 NR Description: putative ankyrin [Oryza sativa]
MEVDAGGEKPSEKELFLAAESGDASVFASLAPADLAAALSLRNEDGRSLVHVAAASARPEAVAALVAAGGDAVASAVNGKDEEGWAPIHSVASSGNAEILDILLGHGANVDLTTDAGRTALHYAASKGRLNIAETLIAHRANVNKKDKFGCTPLHRAASTGNAELCEYLLEEGADIDAVDKLGQSPLMHAVICEDRGVALLLIRHGADVDIEDKEGYTVLGRASDSFRPALIDAAKAMLEG

SEQ ID NO: 66601 - DNA, 841 bp, Triticum aestivum
  misc_feature (1)..(841): Ceres Seq. ID no. 13663461
accgcccagcccagcccagacgccgaccgacgccgctcgcgctcccgtctctcggcgatcctacctcctccgacgaccggctgcaaccccggccgccctcgccgccagatccgcgcggccacgcccacccgcctcgctcctcctctcgggcctcggcagatctacgcgggccgcgaccgtccctagccatgattaatttcgtgctcctaatcagccgccagggcaaggtgaggctcaccaagtggtactcgccttacacccagaaggagaggactaaggtcatccgtgagcttagtgggctcattcttactcgagggccaaaactctgcaactttgtcgagtggagaggttacaaggttgtgtacagaaggtatgccagcctctatttctgcatgtgtatcgatgctgatgataatgagctcgaagtccttgaaattatccatcattttgttgagatactggaccgttatttcggcagtgtatgcgagctggatttgatattcaatttccacaaggcgtactacgtactggatgagattctcatttctggtgagcttcaggaatctagcaagaagaatgttgcaagacttattgctgcacaggattcgttggtagaggctgctaaagaggaagctggctccatcagtaacatcattgcccaggctacgaagtaaaagtccgcgtctgatgatgccccgctgctctttggtttatgcatatgttggtaaatttgatgtaatagctcctttgctgtatccattttcccaaagaaatacgacttcccggattcaggcctgttcagaatgagtgatatgtaactacaatgcatgtgttcctttgc

SEQ ID NO: 66602 - protein, 223 aa, Triticum aestivum
  peptide (1)..(223): Ceres Seq. ID no. 13663462
  misc_feature (64)..(204): Pfam Name: Clathrin adaptor complex small chain Pfam Description: Clathrin adaptor complex small chain
  misc_feature (64)..(223): Homolog of NCBI NO: 19114322 NR Description: putative clathrin-associated protein (AP)
  misc_feature (7)..(209): Homolog of NCBI NO: 34880078 NR Description: similar to Adapter-related protein complex 1 subunit) (Golgi adaptor HA1/AP1 adaptin sigma-1B subunit)
  misc_feature (63)..(171): Homolog of NCBI NO: 30690340 NR Description: clathrin assembly protein AP19 homolog
  misc_feature (63)..(214): Homolog of NCBI NO: 23480730 NR Description: clathrin assembly protein AP19, small subunit
  misc_feature (63)..(208): Homolog of NCBI NO: 23508378 NR Description: clathrin assembly protein AP19, putative
  misc_feature (63)..(223): Homolog of NCBI NO: 2231698 NR Description: clathrin assembly protein AP19 [Arabidopsis
  misc_feature (63)..(222): Homolog of NCBI NO: 15237005 NR Description: clathrin assembly protein AP19 homolog
  misc_feature (63)..(223): Homolog of NCBI NO: 18398407 NR Description: clathrin assembly protein AP19, small subunit
  misc_feature (63)..(223): Homolog of NCBI NO: 1762309 NR Description: AP-1 Golgi-related complex component
  misc_feature (61)..(223): Homolog of NCBI NO: 34897116 NR Description: putative clathrin assembly protein [Oryza sativa]
RPAQPRRRPTPLALPSLGDPTSSDDRLQPRPPSPPDPRGHAHPPRSSSRASADLRGPRPSLAMINFVLLISRQGKVRLTKWYSPYTQKERTKVIRELSGLILTRGPKLCNFVEWRGYKVVYRRYASLYFCMCIDADDNELEVLEIIHHFVEILDRYFGSVCELDLIFNFHKAYYVLDEILISGELQESSKKNVARLIAAQDSLVEAAKEEAGSISNIIAQATK

SEQ ID NO: 66603 - protein, 161 aa, Triticum aestivum; identical to SEQ ID NO: 56184
  peptide (1)..(161): Ceres Seq. ID no. 13663463
  misc_feature (2)..(142): Pfam Name: Clathrin adaptor complex small chain Pfam Description: Clathrin adaptor complex small chain
  misc_feature (2)..(161): Homolog of NCBI NO: 19114322 NR Description: putative clathrin-associated protein (AP)
  misc_feature (1)..(147): Homolog of NCBI NO: 34880078 NR Description: similar to Adapter-related protein complex 1 subunit) (Golgi adaptor HA1/AP1 adaptin sigma-1B subunit)
  misc_feature (1)..(109): Homolog of NCBI NO: 30690340 NR Description: clathrin assembly protein AP19 homolog
  misc_feature (1)..(152): Homolog of NCBI NO: 23480730 NR Description: clathrin assembly protein AP19, small subunit
  misc_feature (1)..(146): Homolog of NCBI NO: 23508378 NR Description: clathrin assembly protein AP19, putative
  misc_feature (1)..(161): Homolog of NCBI NO: 2231698 NR Description: clathrin assembly protein AP19 [Arabidopsis
  misc_feature (1)..(160): Homolog of NCBI NO: 15237005 NR Description: clathrin assembly protein AP19 homolog
  misc_feature (1)..(161): Homolog of NCBI NO: 18398407 NR Description: clathrin assembly protein AP19, small subunit
  misc_feature (1)..(161): Homolog of NCBI NO: 1762309 NR Description: AP-1 Golgi-related complex component
  misc_feature (1)..(161): Homolog of NCBI NO: 34897116 NR Description: putative clathrin assembly protein [Oryza sativa]

SEQ ID NO: 66604 - DNA, 1031 bp, Triticum aestivum
  misc_feature (1)..(1031): Ceres Seq. ID no. 13658873
aacggcgacgagcgaatcgcgtgaatgagatgagatgggactgggagacgccggcgacggaagcggaggcggaggcgttgcaggagcgcatctgggacctccacgacaagctcagccacgccatcctcgccctctccgcctgcgccggccttccggcctgccgctgccggggcgcccccaacggccacgtaatcctcaaggggcagcggccgccgcaggggggagggcacgtcgaccttgccgcggcggcggcggccatggcggacgcgcggggcctgcacgccatccgcaccgcgctcgaggaccttgagggccacctccacttccttcgcgatgttcagtcacaacagcgtgccgatcgagatgccgcgattgctagggtgcagcaaagtcgtattctccttgctgcaaggttggctgaacatagaggaaaggggcatggagtcattgaggaagccttgggttttgtgggtgatgtgcgtgacaagagccattttgtctcgcccgaagatgtgtatgggatgcacagccaatcaggggaagatgaggaggatcgcagggggcatggttcaaacatggtggtgcgtgtggtatcctgcagttttgctttagccaagaacattttaagattcgagacgatgggtagtgtgctgggtaatgctactgtgtttgcagtaagtatgctcacattcttgcagcttcatcaattggcctctggtaaacaaatgccagcggtccagtataggagaaccgacaatgtttctctctctggagggtcaagaaaagacactaaaggaaagcatctggaagtgttattagctagaggttgagcaatcatcagatacaggaagctttgttctcctttgagttttggtcggttttgttaggtcactaggcactagccattgcattcttttggatggggctggtctacagtctaccttcatcgttagaagctgtaccacacaggatgtaaatggtttgagattagcaatagatgcactggaagaatctgcaagtcggttcccttt

SEQ ID NO: 66605 - protein, 275 aa, Triticum aestivum
  peptide (1)..(275): Ceres Seq. ID no. 13658874
  misc_feature (22)..(275): Homolog of NCBI NO: 34904152 NR Description: P0417G05.19 [Oryza sativa (japonica
  misc_feature (22)..(275): Homolog of NCBI NO: 21592900 NR Description: unknown [Arabidopsis thaliana]
  misc_feature (22)..(275): Homolog of NCBI NO: 15238704 NR Description: expressed protein [Arabidopsis thaliana]
RRRANRVNEMRWDWETPATEAEAEALQERIWDLHDKLSHAILALSACAGLPACRCRGAPNGHVILKGQRPPQGGGHVDLAAAAAAMADARGLHAIRTALEDLEGHLHFLRDVQSQQRADRDAAIARVQQSRILLAARLAEHRGKGHGVIEEALGFVGDVRDKSHFVSPEDVYGMHSQSGEDEEDRRGHGSNMVVRVVSCSFALAKNILRFETMGSVLGNATVFAVSMLTFLQLHQLASGKQMPAVQYRRTDNVSLSGGSRKDTKGKHLEVLLARG

SEQ ID NO: 66606 - protein, 266 aa, Triticum aestivum
  peptide (1)..(266): Ceres Seq. ID no. 13658875
  misc_feature (13)..(266): Homolog of NCBI NO: 34904152 NR Description: P0417G05.19 [Oryza sativa (japonica
  misc_feature (13)..(266): Homolog of NCBI NO: 21592900 NR Description: unknown [Arabidopsis thaliana]
  misc_feature (13)..(266): Homolog of NCBI NO: 15238704 NR Description: expressed protein [Arabidopsis thaliana]
MRWDWETPATEAEAEALQERIWDLHDKLSHAILALSACAGLPACRCRGAPNGHVILKGQRPPQGGGHVDLAAAAAAMADARGLHAIRTALEDLEGHLHFLRDVQSQQRADRDAAIARVQQSRILLAARLAEHRGKGHGVIEEALGFVGDVRDKSHFVSPEDVYGMHSQSGEDEEDRRGHGSNMVVRVVSCSFALAKNILRFETMGSVLGNATVFAVSMLTFLQLHQLASGKQMPAVQYRRTDNVSLSGGSRKDTKGKHLEVLLARG

SEQ ID NO: 66607 - protein, 190 aa, Triticum aestivum
  peptide (1)..(190): Ceres Seq. ID no. 13658876
  misc_feature (1)..(190): Homolog of NCBI NO: 34904152 NR Description: P0417G05.19 [Oryza sativa (japonica
  misc_feature (1)..(190): Homolog of NCBI NO: 21592900 NR Description: unknown [Arabidopsis thaliana]
  misc_feature (1)..(190): Homolog of NCBI NO: 15238704 NR Description: expressed protein [Arabidopsis thaliana]
MADARGLHAIRTALEDLEGHLHFLRDVQSQQRADRDAAIARVQQSRILLAARLAEHRGKGHGVIEEALGFVGDVRDKSHFVSPEDVYGMHSQSGEDEEDRRGHGSNMVVRVVSCSFALAKNILRFETMGSVLGNATVFAVSMLTFLQLHQLASGKQMPAVQYRRTDNVSLSGGSRKDTKGKHLEVLLARG

SEQ ID NO: 66608 - DNA, 1231 bp, Triticum aestivum
  misc_feature (1)..(1231): Ceres Seq. ID no. 14303051
actcgacccagccacagcctggttgcttggcgtcctcgttgccttacccttccaaacgagctccatcgtctccactttccacagcccacctccacctaccgcagcagcaagggcccttgtcgcgcggcggcggcggggaggatgtcatcgccgccggcaccggtattcgagaggctggccgggatccggcccctcgccgagtccggccgcttcaaggcatggttcctggaccagttcggtgttcttcatgacgggaagaaaccctacccgggcgccattttggcattggagaagctcgctgggaatggcgccaagatggtgataatcagcaattcctcaaggcggtcgtctgtaaccatggagaagctgcagagccttgggtttgacacgtcttgtttcctcggggcgatcaccagcggggaactcacccatcagtaccttgacaagagggatgacccatggtttgcatctctgggaaggaagtgtgtccatctgacatggggcaatcgaggtgcaatttctctggagggacttggtttgcaagttgtgaacaatgttgacgatgcagagtttatactagcccatggtactgaagccctgggtttaccttctggtgatccactttcgaaaagtcttgaggagcttgagcagattctagtgcttggtatacaaaagcgacttccaatggtggtagctaatccagattatgtcactgttgaagctcgaaacctgcgtgtcatgcctggcaccctggcagcaaaatacgagagtcttggtggtgaagtaaaatggatggggaagcctgataaggttatctatacatcagcaatgtccctagcaggtgttgaagcacatgaatgtatcaccgtaggtgattcgctgcaccacgacatcaaaggcgcaaatggagccggaatggcatctgcattcatcactggaggtatccatgcggctgaacttggactcggtgaatttggagaaactgctggagatgatgccgtcagtgcgttgtgttgcaagcatagctcatacccatcttacgttttgccttcatttgcatggtagaaaacacggtttagattcaggcacaccgtttaaacgggattgcggtctaggataatgatgctcttttcagttgtcaaagtgagcatcaagaccgtggaggtgtttcagtgccgcgctaaattattagcgttatgcattttccggaaataaaatatctgttgaaatg

SEQ ID NO: 66609 - protein, 354 aa, Triticum aestivum
  peptide (1)..(354): Ceres Seq. ID no. 14303052
  misc_feature (71)..(314): Pfam Name: haloacid dehalogenase-like hydrolase Pfam Description: haloacid dehalogenase-like hydrolase
  misc_feature (77)..(317): Homolog of NCBI NO: 22963159 NR Description: hypothetical protein [Rhodopseudomonas palustris]
  misc_feature (58)..(196): Homolog of NCBI NO: 15964548 NR Description: CONSERVED HYPOTHETICAL PROTEIN [Sinorhizobium
  misc_feature (175)..(353): Homolog of NCBI NO: 15964548 NR Description: CONSERVED HYPOTHETICAL PROTEIN [Sinorhizobium
  misc_feature (66)..(315): Homolog of NCBI NO: 15965982 NR Description: CONSERVED HYPOTHETICAL PROTEIN [Sinorhizobium
  misc_feature (59)..(319): Homolog of NCBI NO: 36958658 NR Description: HAD superfamily protein involved in
  misc_feature (48)..(354): Homolog of NCBI NO: 22968911 NR Description: hypothetical protein [Rhodospirillum rubrum]
  misc_feature (53)..(317): Homolog of NCBI NO: 13473111 NR Description: hypothetical protein [Mesorhizobium loti]
  misc_feature (58)..(354): Homolog of NCBI NO: 23014406 NR Description: hypothetical protein [Magnetospirillum
  misc_feature (120)..(352): Homolog of NCBI NO: 15238168 NR Description: haloacid dehalogenase-like hydrolase family
  misc_feature (46)..(354): Homolog of NCBI NO: 19310550 NR Description: unknown protein [Arabidopsis thaliana]
TRPSHSLVAWRPRCLTLPNELHRLHFPQPTSTYRSSKGPCRAAAAGRMSSPPAPVFERLAGIRPLAESGRFKAWFLDQFGVLHDGKKPYPGAILALEKLAGNGAKMVIISNSSRRSSVTMEKLQSLGFDTSCFLGAITSGELTHQYLDKRDDPWFASLGRKCVHLTWGNRGAISLEGLGLQVVNNVDDAEFILAHGTEALGLPSGDPLSKSLEELEQILVLGIQKRLPMVVANPDYVTVEARNLRVMPGTLAAKYESLGGEVKWMGKPDKVIYTSAMSLAGVEAHECITVGDSLHHDIKGANGAGMASAFITGGIHAAELGLGEFGETAGDDAVSALCCKHSSYPSYVLPSFAW

SEQ ID NO: 66610 - protein, 307 aa, Triticum aestivum
  peptide (1)..(307): Ceres Seq. ID no. 14303053
  misc_feature (24)..(267): Pfam Name: haloacid dehalogenase-like hydrolase Pfam Description: haloacid dehalogenase-like hydrolase
  misc_feature (30)..(270): Homolog of NCBI NO: 22963159 NR Description: hypothetical protein [Rhodopseudomonas palustris]
  misc_feature (11)..(149): Homolog of NCBI NO: 15964548 NR Description: CONSERVED HYPOTHETICAL PROTEIN [Sinorhizobium
  misc_feature (128)..(306): Homolog of NCBI NO: 15964548 NR Description: CONSERVED HYPOTHETICAL PROTEIN [Sinorhizobium
  misc_feature (19)..(268): Homolog of NCBI NO: 15965982 NR Description: CONSERVED HYPOTHETICAL PROTEIN [Sinorhizobium
  misc_feature (12)..(272): Homolog of NCBI NO: 36958658 NR Description: HAD superfamily protein involved in
  misc_feature (1)..(307): Homolog of NCBI NO: 22968911 NR Description: hypothetical protein [Rhodospirillum rubrum]
  misc_feature (6)..(270): Homolog of NCBI NO: 13473111 NR Description: hypothetical protein [Mesorhizobium loti]
  misc_feature (11)..(307): Homolog of NCBI NO: 23014406 NR Description: hypothetical protein [Magnetospirillum
  misc_feature (73)..(305): Homolog of NCBI NO: 15238168 NR Description: haloacid dehalogenase-like hydrolase family
  misc_feature (1)..(307): Homolog of NCBI NO: 19310550 NR Description: unknown protein [Arabidopsis thaliana]
MSSPPAPVFERLAGIRPLAESGRFKAWFLDQFGVLHDGKKPYPGAILALEKLAGNGAKMVIISNSSRRSSVTMEKLQSLGFDTSCFLGAITSGELTHQYLDKRDDPWFASLGRKCVHLTWGNRGAISLEGLGLQVVNNVDDAEFILAHGTEALGLPSGDPLSKSLEELEQILVLGIQKRLPMVVANPDYVTVEARNLRVMPGTLAAKYESLGGEVKWMGKPDKVIYTSAMSLAGVEAHECITVGDSLHHDIKGANGAGMASAFITGGIHAAELGLGEFGETAGDDAVSALCCKHSSYPSYVLPSFAW

SEQ ID NO: 66611 - protein, 249 aa, Triticum aestivum
  peptide (1)..(249): Ceres Seq. ID no. 14303054
  misc_feature (1)..(209): Pfam Name: haloacid dehalogenase-like hydrolase Pfam Description: haloacid dehalogenase-like hydrolase
  misc_feature (1)..(212): Homolog of NCBI NO: 22963159 NR Description: hypothetical protein [Rhodopseudomonas palustris]
  misc_feature (1)..(91): Homolog of NCBI NO: 15964548 NR Description: CONSERVED HYPOTHETICAL PROTEIN [Sinorhizobium
  misc_feature (70)..(248): Homolog of NCBI NO: 15964548 NR Description: CONSERVED HYPOTHETICAL PROTEIN [Sinorhizobium
  misc_feature (1)..(210): Homolog of NCBI NO: 15965982 NR Description: CONSERVED HYPOTHETICAL PROTEIN [Sinorhizobium
  misc_feature (1)..(214): Homolog of NCBI NO: 36958658 NR Description: HAD superfamily protein involved in
  misc_feature (1)..(249): Homolog of NCBI NO: 22968911 NR Description: hypothetical protein [Rhodospirillum rubrum]
  misc_feature (1)..(212): Homolog of NCBI NO: 13473111 NR Description: hypothetical protein [Mesorhizobium loti]
  misc_feature (1)..(249): Homolog of NCBI NO: 23014406 NR Description: hypothetical protein [Magnetospirillum
  misc_feature (15)..(247): Homolog of NCBI NO: 15238168 NR Description: haloacid dehalogenase-like hydrolase family
  misc_feature (1)..(249): Homolog of NCBI NO: 19310550 NR Description: unknown protein [Arabidopsis thaliana]
MVIISNSSRRSSVTMEKLQSLGFDTSCFLGAITSGELTHQYLDKRDDPWFASLGRKCVHLTWGNRGAISLEGLGLQVVNNVDDAEFILAHGTEALGLPSGDPLSKSLEELEQILVLGIQKRLPMVVANPDYVTVEARNLRVMPGTLAAKYESLGGEVKWMGKPDKVIYTSAMSLAGVEAHECITVGDSLHHDIKGANGAGMASAFITGGIHAAELGLGEFGETAGDDAVSALCCKHSSYPSYVLPSFAW

SEQ ID NO: 66612 - DNA, 1176 bp, Triticum aestivum
  misc_feature (1)..(1176): Ceres Seq. ID no. 13659066
aaagaaaacgcaatccaatcgagaccattcttggcgaggagaagggggagaagaaagcagatcggcgccggcgccggccgtggccgcactgatcgactcggactgtgggtgtggtcttccgcccgagcacccataaacatgggtccagaggcgcctgagcttcaaccaaaccccgtcaatcccgctggacgccttttgccagagcacagctcgatggcgatcgccgatgtcaacatgggtctacaggcgcctgaacttttgtcatatcacatcaatcgcgcacgacccttctatgatgaaaagtggaaaagtatgaatgtggggaagaagaagacgaagaagaagattttccgggttccgcagcatgagctggatgacatactttcctatcaggtgcccgcttggccgaaagtggataaacgctgtccttcagccgccatagagatggaaaagatgaaggaatacttcttggccgggcgggagaagatgaggcgagagtatgaggcccatggctatgctacttttgaagcagaggtcaccgatgatgaggaggaggaagacgcagcaatgactcctcctcacgaggagaaggatgttgtgcgagcgacatcttttcatgacaagaatgacgatgcagcagcgactcatcctcacgaggagaaggatgatgtgccagcgacatcttatcacgacaaaaatgacgaagcagcagcgacgactcctcacgaggagaaggatgatgtgccagccacatcttattatgacaagaatgacgatgcagcagcgacgactcctcacgaggagaaggatgatgtgccagccacatcttattatgacaagaatgacgatgcagcagcgactcctcctcacgaggagaaggatgatgtgccagccacatcttattatgacaagaatgacgatgcagcagcgatgtcttctccgtggattattccacgaggaagaggccgaagaagatttcgcccaggagttgtcaagcaagcaagcggtgttaagaaaataacttagatgtattagttgttttcagtgttagttttggctgttggattagttggttccagtttctgggactgtattgtgtcatctttatttataacttcttgtgtaaaacctacagctgataatttgtcagccgacttgatataatatgataaattt

SEQ ID NO: 66613 - protein, 341 aa, Triticum aestivum
  peptide (1)..(341): Ceres Seq. ID no. 13659067
  misc_feature (174)..(310): Homolog of NCBI NO: 23025007 NR Description: hypothetical protein
  misc_feature (176)..(317): Homolog of NCBI NO: 3851592 NR Description: surface antigen ariel1 [Entamoeba histolytica]
KENAIQSRPFLARRRGRRKQIGAGAGRGRTDRLGLWVWSSARAPINMGPEAPELQPNPVNPAGRLLPEHSSMAIADVNMGLQAPELLSYHINRARPFYDEKWKSMNVGKKKTKKKIFRVPQHELDDILSYQVPAWPKVDKRCPSAAIEMEKMKEYFLAGREKMRREYEAHGYATFEAEVTDDEEEEDAAMTPPHEEKDVVRATSFHDKNDDAAATHPHEEKDDVPATSYHDKNDEAAATTPHEEKDDVPATSYYDKNDDAAATTPHEEKDDVPATSYYDKNDDAAATPPHEEKDDVPATSYYDKNDDAAAMSSPWIIPRGRGRRRFRPGVVKQASGVKKIT

SEQ ID NO: 66614 - protein, 295 aa, Triticum aestivum
  peptide (1)..(295): Ceres Seq. ID no. 13659068
  misc_feature (128)..(264): Homolog of NCBI NO: 23025007 NR Description: hypothetical protein
  misc_feature (130)..(271): Homolog of NCBI NO: 3851592 NR Description: surface antigen ariel1 [Entamoeba histolytica]
MGPEAPELQPNPVNPAGRLLPEHSSMAIADVNMGLQAPELLSYHINRARPFYDEKWKSMNVGKKKTKKKIFRVPQHELDDILSYQVPAWPKVDKRCPSAAIEMEKMKEYFLAGREKMRREYEAHGYATFEAEVTDDEEEEDAAMTPPHEEKDVVRATSFHDKNDDAAATHPHEEKDDVPATSYHDKNDEAAATTPHEEKDDVPATSYYDKNDDAAATTPHEEKDDVPATSYYDKNDDAAATPPHEEKDDVPATSYYDKNDDAAAMSSPWIIPRGRGRRRFRPGVVKQASGVKKIT

SEQ ID NO: 66615 - protein, 270 aa, Triticum aestivum
  peptide (1)..(270): Ceres Seq. ID no. 13659069
  misc_feature (103)..(239): Homolog of NCBI NO: 23025007 NR Description: hypothetical protein
  misc_feature (105)..(246): Homolog of NCBI NO: 3851592 NR Description: surface antigen ariel1 [Entamoeba histolytica]
MAIADVNMGLQAPELLSYHINRARPFYDEKWKSMNVGKKKTKKKIFRVPQHELDDILSYQVPAWPKVDKRCPSAAIEMEKMKEYFLAGREKMRREYEAHGYATFEAEVTDDEEEEDAAMTPPHEEKDVVRATSFHDKNDDAAATHPHEEKDDVPATSYHDKNDEAAATTPHEEKDDVPATSYYDKNDDAAATTPHEEKDDVPATSYYDKNDDAAATPPHEEKDDVPATSYYDKNDDAAAMSSPWIIPRGRGRRRFRPGVVKQASGVKKIT

SEQ ID NO: 66616 - DNA, 944 bp, Triticum aestivum
  misc_feature (1)..(944): Ceres Seq. ID no. 13658653
ccactcacgctgccgcggcggccacccccgcccgccgctgcgctcgcattcgcgtctccaccggtccttcccgcgccacggccgcgcacccgacctgatcccccgcgccgctcgcgagccgccatccagcagagatgccggccctgaggccgccgccgccgcgcctcatgctcaacgccgtctcctgcatgcggaacgcgcagacggttctccgggacatcaacgtcagcgtccacgacggcacggcgctcgtcctcacgggcgccaacggctccggcaagaccaccttcctgcggatgctggccggcttctcgcgcccctcggccggggagatcctctggaacggccacgacgtcacctccccgggggtcttccagcagtacaagctgcagctcaactggatgtcgctcaaggacgccgtcaaggagaagctcaccgtgctggagaacgtccagtggttcgagctcctcgagggcaagcacggcaggtccgcccccgccatcgagctcatgggcctcggccggctcatgaacgacaaggccaggatgctctccatggggcagaggaagcgcctgcagctcgccaggctgctcgccatcgaccgcccgatctggctcctggacgagccctccgtcgcgctcgactccgagggtgtcaagctgctcgagtacatcatagcggagcaccgcaagaagggtgggatcgtcatcgtcgccacgcatttgcccattgagatcgaggattccatgaacctccggcttccgcagcggttccccaggaggaaaactctggttgatcttgtgcgttgattgattggagctcaaaatatgtagctgtatctttctaattcttctccagccatacaagttttgcgttggagcaacttctgatggtgcaattttgtgacactttcttctggaaaataagaacatatttgccatgcc

SEQ ID NO: 66617 - protein, 243 aa, Triticum aestivum
  peptide (1)..(243): Ceres Seq. ID no. 13658654
HSRCRGGHPRPPLRSHSRLHRSFPRHGRAPDLIPRAAREPPSSRDAGPEAAAAAPHAQRRLLHAERADGSPGHQRQRPRRHGARPHGRQRLRQDHLPADAGRLLAPLGRGDPLERPRRHLPGGLPAVQAAAQLDVAQGRRQGEAHRAGERPVVRAPRGQARQVRPRHRAHGPRPAHERQGQDALHGAEEAPAARQAARHRPPDLAPGRALRRARLRGCQAARVHHSGAPQEGWDRHRRHAFAH

SEQ ID NO: 66618 - protein, 224 aa, Triticum aestivum
  peptide (1)..(224): Ceres Seq. ID no. 13658655
  misc_feature (36)..(196): Pfam Name: ABC transporter Pfam Description: ABC transporter
  misc_feature (16)..(209): Homolog of NCBI NO: 27375578 NR Description: heme exporter protein A [Bradyrhizobium
  misc_feature (12)..(209): Homolog of NCBI NO: 26248584 NR Description: Heme exporter protein A [Escherichia coli CFT073]
  misc_feature (12)..(209): Homolog of NCBI NO: 24113587 NR Description: Heme exporter protein A (Cytochrome c-type
  misc_feature (11)..(209): Homolog of NCBI NO: 15802754 NR Description: ATP binding protein of heme exporter A
  misc_feature (12)..(209): Homolog of NCBI NO: 16130138 NR Description: ATP binding protein of heme exporter A
  misc_feature (12)..(209): Homolog of NCBI NO: 9911057 NR Description: HEME EXPORTER PROTEIN A (CYTOCHROME C-TYPE
  misc_feature (10)..(201): Homolog of NCBI NO: 22962200 NR Description: hypothetical protein [Rhodopseudomonas palustris]
  misc_feature (16)..(213): Homolog of NCBI NO: 23016499 NR Description: hypothetical protein [Magnetospirillum
  misc_feature (19)..(224): Homolog of NCBI NO: 39545846 NR Description: OSJNBb0060E08.17 [Oryza sativa (japonica
  misc_feature (1)..(223): Homolog of NCBI NO: 15221728 NR Description: ABC transporter family protein [Arabidopsis
MPALRPPPPRLMLNAVSCMRNAQTVLRDINVSVHDGTALVLTGANGSGKTTFLRMLAGFSRPSAGEILWNGHDVTSPGVFQQYKLQLNWMSLKDAVKEKLTVLENVQWFELLEGKHGRSAPAIELMGLGRLMNDKARMLSMGQRKRLQLARLLAIDRPIWLLDEPSVALDSEGVKLLEYIIAEHRKKGGIVIVATHLPIEIEDSMNLRLPQRFPRRKTLVDLVR

SEQ ID NO: 66619 - protein, 213 aa, Triticum aestivum
  peptide (1)..(213): Ceres Seq. ID no. 13658656
  misc_feature (25)..(185): Pfam Name: ABC transporter Pfam Description: ABC transporter
  misc_feature (5)..(198): Homolog of NCBI NO: 27375578 NR Description: heme exporter protein A [Bradyrhizobium
  misc_feature (1)..(198): Homolog of NCBI NO: 26248584 NR Description: Heme exporter protein A [Escherichia coli CFT073]
  misc_feature (1)..(198): Homolog of NCBI NO: 24113587 NR Description: Heme exporter protein A (Cytochrome c-type
  misc_feature (1)..(198): Homolog of NCBI NO: 15802754 NR Description: ATP binding protein of heme exporter A
  misc_feature (1)..(198): Homolog of NCBI NO: 16130138 NR Description: ATP binding protein of heme exporter A
  misc_feature (1)..(198): Homolog of NCBI NO: 9911057 NR Description: HEME EXPORTER PROTEIN A (CYTOCHROME C-TYPE
  misc_feature (1)..(190): Homolog of NCBI NO: 22962200 NR Description: hypothetical protein [Rhodopseudomonas palustris]
  misc_feature (5)..(202): Homolog of NCBI NO: 23016499 NR Description: hypothetical protein [Magnetospirillum
  misc_feature (8)..(213): Homolog of NCBI NO: 39545846 NR Description: OSJNBb0060E08.17 [Oryza sativa (japonica
  misc_feature (1)..(212): Homolog of NCBI NO: 15221728 NR Description: ABC transporter family protein [Arabidopsis
MLNAVSCMRNAQTVLRDINVSVHDGTALVLTGANGSGKTTFLRMLAGFSRPSAGEILWNGHDVTSPGVFQQYKLQLNWMSLKDAVKEKLTVLENVQWFELLEGKHGRSAPAIELMGLGRLMNDKARMLSMGQRKRLQLARLLAIDRPIWLLDEPSVALDSEGVKLLEYIIAEHRKKGGIVIVATHLPIEIEDSMNLRLPQRFPRRKTLVDLVR

SEQ ID NO: 66620 - DNA, 820 bp, Triticum aestivum
  misc_feature (1)..(820): Ceres Seq. ID no. 14301905
ttccccatctcaggcacacaagccctaaacccgtgcatggcattccccgcctctcgccgtctctccgccgccgccgctccgaaactctcctccctcttcacgcccggacccactcctaagcctcgcccgctgccgccggagtccggcgatgatcctaggcggcggaagccgaggccgagatcaaggcacccgtggggggaggatgcggcagcgcttctccggcggcttcacgaggggcgatacctgccgggaccctacctcccggatgcgccgcatgtagtatcccccgacgctgtcaaggccgccgccgagcggttcggcaacgatcaccaggtcgtcgccaaatggttgtcgggaagtgacttgaagaaggtagcattgtttggctgcccatctgttgagcgaagaacagtttttgcatcaaaaagattacgagctttcttcaacttgccagaagagaaagtatgcagctcttgcaagataagaagttcatgccagtttattaaccaggaggtgcctaggtatgataaagtgatcttgtcagatactatgaggatccttgctttgtttgtactggatgcatatcctgagccactacaggttactgctgaagtaaaagctagtgtccgcaaacttctcaaggacaccataaatctaagcatttaagtgctttgaggataattcgtaatcagtggaggtactatgtacatgtcaggtagatttaggttcattttcccactcttaattttcttttgtgcctcaagcattgtaacatgacctgaagcaactaatagagtgatggccacatttatttgatgtt

SEQ ID NO: 66621 - protein, 221 aa, Triticum aestivum
  peptide (1)..(221): Ceres Seq. ID no. 14301906
  misc_feature (98)..(220): Homolog of NCBI NO: 18405190 NR Description: expressed protein [Arabidopsis thaliana]
  misc_feature (98)..(220): Homolog of NCBI NO: 15293147 NR Description: unknown protein [Arabidopsis thaliana]
  misc_feature (99)..(220): Homolog of NCBI NO: 34393925 NR Description: unknown protein [Oryza sativa (japonica
  misc_feature (61)..(221): Homolog of NCBI NO: 18409643 NR Description: expressed protein [Arabidopsis thaliana]
  misc_feature (61)..(221): Homolog of NCBI NO: 25372841 NR Description: hypothetical protein F5A18.17 [imported] -
  misc_feature (61)..(221): Homolog of NCBI NO: 21593408 NR Description: unknown [Arabidopsis thaliana]
  misc_feature (20)..(218): Homolog of NCBI NO: 13324787 NR Description: hypothetical protein [Oryza sativa]
  misc_feature (99)..(220): Homolog of NCBI NO: 21536664 NR Description: unknown [Arabidopsis thaliana]
  misc_feature (99)..(220): Homolog of NCBI NO: 18404478 NR Description: expressed protein [Arabidopsis thaliana]
  misc_feature (13)..(200): Homolog of NCBI NO: 34903722 NR Description: P0489A05.27 [Oryza sativa (japonica
FPISGTQALNPCMAFPASRRLSAAAAPKLSSLFTPGPTPKPRPLPPESGDDPRRRKPRPRSRHPWGEDAAALLRRLHEGRYLPGPYLPDAPHVVSPDAVKAAAERFGNDHQVVAKWLSGSDLKKVALFGCPSVERRTVFASKRLRAFFNLPEEKVCSSCKIRSSCQFINQEVPRYDKVILSDTMRILALFVLDAYPEPLQVTAEVKASVRKLLKDTINLSI

SEQ ID NO: 66622 - protein, 209 aa, Triticum aestivum
  peptide (1)..(209): Ceres Seq. ID no. 14301907
  misc_feature (86)..(208): Homolog of NCBI NO: 18405190 NR Description: expressed protein [Arabidopsis thaliana]
  misc_feature (86)..(208): Homolog of NCBI NO: 15293147 NR Description: unknown protein [Arabidopsis thaliana]
  misc_feature (87)..(208): Homolog of NCBI NO: 34393925 NR Description: unknown protein [Oryza sativa (japonica
  misc_feature (49)..(209): Homolog of NCBI NO: 18409643 NR Description: expressed protein [Arabidopsis thaliana]
  misc_feature (49)..(209): Homolog of NCBI NO: 25372841 NR Description: hypothetical protein F5A18.17 [imported] -
  misc_feature (49)..(209): Homolog of NCBI NO: 21593408 NR Description: unknown [Arabidopsis thaliana]
  misc_feature (8)..(206): Homolog of NCBI NO: 13324787 NR Description: hypothetical protein [Oryza sativa]
  misc_feature (87)..(208): Homolog of NCBI NO: 21536664 NR Description: unknown [Arabidopsis thaliana]
  misc_feature (87)..(208): Homolog of NCBI NO: 18404478 NR Description: expressed protein [Arabidopsis thaliana]
  misc_feature (1)..(188): Homolog of NCBI NO: 34903722 NR Description: P0489A05.27 [Oryza sativa (japonica
MAFPASRRLSAAAAPKLSSLFTPGPTPKPRPLPPESGDDPRRRKPRPRSRHPWGEDAAALLRRLHEGRYLPGPYLPDAPHVVSPDAVKAAAERFGNDHQVVAKWLSGSDLKKVALFGCPSVERRTVFASKRLRAFFNLPEEKVCSSCKIRSSCQFINQEVPRYDKVILSDTMRILALFVLDAYPEPLQVTAEVKASVRKLLKDTINLSI

SEQ ID NO: 66623 - DNA, 990 bp, Triticum aestivum
  misc_feature (1)..(990): Ceres Seq. ID no. 15179852
tgtatccagccgcagccgttgccaactactcctcctctcgaatcgcggcaaggcaatcaaccggggccggcgggtcggttgaggaaggaggccgggggcgcggcatggactgcggcggtgaggagcaggcgaggcagaacggccatgccggcgacggcggcgacccggcggagtggaagaaggtggccgagctccgggccgtggtggaggcgcaggaccccgcagccaaggaggaggacgacttcatgctgcgccggttcctgcgcgcccgagaccacaacatcagcaaggcgtcggcgatgttcctcaagtacctgagttggaagcgcggcgccaagcctcgcggctccatcaccgaggccgaggtgcgcggcgagctcgtgcaggacaagctctacattcagggcttcgacaagacgggccgccccatgatctacctcttcggcaaccgccacttcgccgccaagcgagaccttgaggagttcaagcgatacgtcatctacatccttgacaacacctgcaccaagttgccggtagggcaggagaagtttgcgtcggtggtggatctcaaggggtgggggtacgcgaattgcgacatccgggcgaagctggcggcgttggagatcatgcagaactactacccggagcggctgggccgggtgttcttgatccacgtgccttacgtgttcatggcggcgtggaagatggtctaccccttcatcgacgacaacaccaagaagaagtttgtctttgttgcagacaaggaccttgacggcacgcttcgggacgccatcgacttgtcccagctgcccgagcagtacggcggcaagctcagactcgagggatacaagagctcgtcgacaacgctatagtcaacgtgtgactgatttggtttattaagggtgtccagttgtgtgaaagtatgctacattgccccgcttgataagcaagtaatactcatcctttcatctatgcagggccgtttaactc

SEQ ID NO: 66624 - protein, 289 aa, Triticum aestivum
  peptide (1)..(289): Ceres Seq. ID no. 15179853
  misc_feature (130)..(277): Pfam Name: CRAL/TRIO domain Pfam Description: CRAL/TRIO domain
  misc_feature (50)..(286): Homolog of NCBI NO: 2286121 NR Description: sec14 like protein [Oryza sativa]
  misc_feature (50)..(286): Homolog of NCBI NO: 34907052 NR Description: sec14 like protein [Oryza sativa (japonica
  misc_feature (41)..(279): Homolog of NCBI NO: 27573358 NR Description: putative phosphatidylinositol/phosphatidylcholine
YPAAAVANYSSSRIAARQSTGAGGSVEEGGRGRGMDCGGEEQARQNGHAGDGGDPAEWKKVAELRAVVEAQDPAAKEEDDFMLRRFLRARDHNISKASAMFLKYLSWKRGAKPRGSITEAEVRGELVQDKLYIQGFDKTGRPMIYLFGNRHFAAKRDLEEFKRYVIYILDNTCTKLPVGQEKFASVVDLKGWGYANCDIRAKLAALEIMQNYYPERLGRVFLIHVPYVFMAAWKMVYPFIDDNTKKKFVFVADKDLDGTLRDAIDLSQLPEQYGGKLRLEGYKSSSTTL

SEQ ID NO: 66625 - protein, 255 aa, Triticum aestivum
  peptide (1)..(255): Ceres Seq. ID no. 15179854
  misc_feature (96)..(243): Pfam Name: CRAL/TRIO domain Pfam Description: CRAL/TRIO domain
  misc_feature (16)..(252): Homolog of NCBI NO: 2286121 NR Description: sec14 like protein [Oryza sativa]
  misc_feature (16)..(252): Homolog of NCBI NO: 34907052 NR Description: sec14 like protein [Oryza sativa (japonica
  misc_feature (7)..(245): Homolog of NCBI NO: 27573358 NR Description: putative phosphatidylinositol/phosphatidylcholine
MDCGGEEQARQNGHAGDGGDPAEWKKVAELRAVVEAQDPAAKEEDDFMLRRFLRARDHNISKASAMFLKYLSWKRGAKPRGSITEAEVRGELVQDKLYIQGFDKTGRPMIYLFGNRHFAAKRDLEEFKRYVIYILDNTCTKLPVGQEKFASVVDLKGWGYANCDIRAKLAALEIMQNYYPERLGRVFLIHVPYVFMAAWKMVYPFIDDNTKKKFVFVADKDLDGTLRDAIDLSQLPEQYGGKLRLEGYKSSSTTL

SEQ ID NO: 66626 - protein, 208 aa, Triticum aestivum
  peptide (1)..(208): Ceres Seq. ID no. 15179855
  misc_feature (49)..(196): Pfam Name: CRAL/TRIO domain Pfam Description: CRAL/TRIO domain
  misc_feature (1)..(205): Homolog of NCBI NO: 2286121 NR Description: sec14 like protein [Oryza sativa]
  misc_feature (1)..(205): Homolog of NCBI NO: 34907052 NR Description: sec14 like protein [Oryza sativa (japonica
  misc_feature (1)..(198): Homolog of NCBI NO: 27573358 NR Description: putative phosphatidylinositol/phosphatidylcholine
MLRRFLRARDHNISKASAMFLKYLSWKRGAKPRGSITEAEVRGELVQDKLYIQGFDKTGRPMIYLFGNRHFAAKRDLEEFKRYVIYILDNTCTKLPVGQEKFASVVDLKGWGYANCDIRAKLAALEIMQNYYPERLGRVFLIHVPYVFMAAWKMVYPFIDDNTKKKFVFVADKDLDGTLRDAIDLSQLPEQYGGKLRLEGYKSSSTTL

SEQ ID NO: 66627 - DNA, 1248 bp, Triticum aestivum
  misc_feature (1)..(1248): Ceres Seq. ID no. 13658672
cccccctcccgaagcttctcgatccctccccccgcttccgtttccgtttcgtccccgccgtcgccccctcgccgcggcggcggagtcgcccgcactcgctgcgcgcaggaacgatgagccgacgtagtaacggccgcaccatctacgtgggcaacctccccgaggacatccgcgagagagagattgaggatctcttctacaagtatggtcctattgtcgatatcgatctgaaaattcctccaaggcctcctgtttatgcttttgtcgagttcgaagacccacgtgatgctgatgatgcaatttatggccgtgatggatatgactttgatggccacaaattgcgggtggagttagctcatggggggaaaggcccttattttattcgaccaagcagctatagtagttctggacgtcatggtgcagttaggcgttctgattaccgcgttattgttaccggattaccttcttcagcatcatggcaagatctcaaggatcatatgcggcgagctggtgatgtctgtttctctgatgtttatcctgaggctggagcaattactggaatagttgagtataccaactacgaagacatgaaacatgcgataagaaagcttgatgattcagagttccgtaatgcattttcacgagcatatatcagggtgagggagtacaatgctaggcgtagccgctcttactcgagaggtagaagccgaagctgctcttactcaagaagcagaagtcacagttatagcaggagcaagagtccaaggtctagacctgcttctcggtctccttcacctgttaaagcaaggtcatcatcaagatccctatcacctgccgctcctgcccatgacaagtctgcaagcaggagccccgtcaggagcagaagtttaccccgttctcagtctcctgtgaaatctgagtgaagccagatgcactcgaagtcagggaaaaaaaacatatcaggatttgttggattaggacaatataatatggattgtgggtgctctgtcccaagaagtaccattgctgttccttggaaggaaaaacgtcaactttgtggtttgagatcaatgtaggagtctggtgttgttttacttctgcactcagttgcgagaacgtaaaagcgtgaactcatggctttaactttagtatgctatagtttcgcgtcaaaaaacttcatgccacagcagagtaaaaaaaaaaaaaaaaaagcttatcgatamcgkcgacctcgagggggggsccggk

SEQ ID NO: 66628 - protein, 306 aa, Triticum aestivum
  peptide (1)..(306): Ceres Seq. ID no. 15219911
  misc_feature (47)..(115): Pfam Name: RNA recognition motif. (a.k.a. RRM, RBD, or RNP domain) Pfam Description: RNA recognition motif. (a.k.a. RRM, RBD, or RNP
  misc_feature (38)..(302): Homolog of NCBI NO: 5815236 NR Description: splicing factor SR1B [Arabidopsis thaliana]
  misc_feature (38)..(275): Homolog of NCBI NO: 4775271 NR Description: SF2/ASF-like splicing modulator Srp30, variant 1
  misc_feature (38)..(302): Homolog of NCBI NO: 30678395 NR Description: pre-mRNA splicing factor SF2 (SR1 protein)
  misc_feature (38)..(302): Homolog of NCBI NO: 2443473 NR Description: ASF/SF2 homolog [Arabidopsis thaliana]
  misc_feature (38)..(293): Homolog of NCBI NO: 34894608 NR Description: putative pre-mRNA splicing factor SF2
  misc_feature (38)..(306): Homolog of NCBI NO: 5815235 NR Description: splicing factor SR1 [Arabidopsis thaliana]
  misc_feature (38)..(291): Homolog of NCBI NO: 4775270 NR Description: SF2/ASF-like splicing modulator Srp30
  misc_feature (38)..(306): Homolog of NCBI NO: 22329428 NR Description: arginine/serine-rich splicing factor, atSRp30
  misc_feature (38)..(306): Homolog of NCBI NO: 30678391 NR Description: pre-mRNA splicing factor SF2 (SR1 protein)
  misc_feature (33)..(305): Homolog of NCBI NO: 33146854 NR Description: putative pre-mRNA splicing factor SF2
PLPKLLDPSPRFRFRFVPAVAPSPRRRSRPHSLRAGTMSRRSNGRTIYVGNLPEDIREREIEDLFYKYGPIVDIDLKIPPRPPVYAFVEFEDPRDADDAIYGRDGYDFDGHKLRVELAHGGKGPYFIRPSSYSSSGRHGAVRRSDYRVIVTGLPSSASWQDLKDHMRRAGDVCFSDVYPEAGAITGIVEYTNYEDMKHAIRKLDDSEFRNAFSRAYIRVREYNARRSRSYSRGRSRSCSYSRSRSHSYSRSKSPRSRPASRSPSPVKARSSSRSLSPAAPAHDKSASRSPVRSRSLPRSQSPVKSE

SEQ ID NO: 66629 - protein, 269 aa, Triticum aestivum
  peptide (1)..(269): Ceres Seq. ID no. 15219912
  misc_feature (10)..(78): Pfam Name: RNA recognition motif. (a.k.a. RRM, RBD, or RNP domain) Pfam Description: RNA recognition motif. (a.k.a. RRM, RBD, or RNP
  misc_feature (1)..(265): Homolog of NCBI NO: 5815236 NR Description: splicing factor SR1B [Arabidopsis thaliana]
  misc_feature (1)..(238): Homolog of NCBI NO: 4775271 NR Description: SF2/ASF-like splicing modulator Srp30, variant 1
  misc_feature (1)..(265): Homolog of NCBI NO: 30678395 NR Description: pre-mRNA splicing factor SF2 (SR1 protein)
  misc_feature (1)..(265): Homolog of NCBI NO: 2443473 NR Description: ASF/SF2 homolog [Arabidopsis thaliana]
  misc_feature (1)..(256): Homolog of NCBI NO: 34894608 NR Description: putative pre-mRNA splicing factor SF2
  misc_feature (1)..(269): Homolog of NCBI NO: 5815235 NR Description: splicing factor SR1 [Arabidopsis thaliana]
  misc_feature (1)..(254): Homolog of NCBI NO: 4775270 NR Description: SF2/ASF-like splicing modulator Srp30
  misc_feature (1)..(269): Homolog of NCBI NO: 22329428 NR Description: arginine/serine-rich splicing factor, atSRp30
  misc_feature (1)..(269): Homolog of NCBI NO: 30678391 NR Description: pre-mRNA splicing factor SF2 (SR1 protein)
  misc_feature (1)..(268): Homolog of NCBI NO: 33146854 NR Description: putative pre-mRNA splicing factor SF2
MSRRSNGRTIYVGNLPEDIREREIEDLFYKYGPIVDIDLKIPPRPPVYAFVEFEDPRDADDAIYGRDGYDFDGHKLRVELAHGGKGPYFIRPSSYSSSGRHGAVRRSDYRVIVTGLPSSASWQDLKDHMRRAGDVCFSDVYPEAGAITGIVEYTNYEDMKHAIRKLDDSEFRNAFSRAYIRVREYNARRSRSYSRGRSRSCSYSRSRSHSYSRSKSPRSRPASRSPSPVKARSSSRSLSPAAPAHDKSASRSPVRSRSLPRSQSPVKSE

SEQ ID NO: 66630 - DNA, 1013 bp, Triticum aestivum
  misc_feature (1)..(1013): Ceres Seq. ID no. 13658673
attgcataaatatgtgaaatcattatttcattaccagctgtgttaccagaggtgtaaagttaaaatggaatatatactaagctagagccgagaggtttcaaactatttgcattctaattccagcctttcaattttccaacagtatttcaatcaaatattaatgaccgtacttgacgtgctgggtgactccgatccatctactagggagattgctttgtctttaattgctgagatgctcaacaatcagaaagacgctatggaagaatctattgagattgttcttgaaaaacttctgcatgtgacgaaagatgtggtggcaaagatttcaaatgaagcgaacagatgcataaatgttttgttggcaaaatacgatcctttcagatgtcttgctgttgtagtacctcttttggtcagtgatgatgaaaagatgctcgttgtgtgtatcaactgtttgacaaagcttgtcgcgcaccttccccaagaggaattgatggatcagctgcctacatttttgccagcactgtttgatgcttttagtaaccaaagtccagatgttcgaaagagtgttgtattctgcttggtggacatctacatcatgctggggaaagcgtttgtgccgtacctggaagggctgagcagcacacagctgcgcttggtgaccatctacgcgaaccggatttcgcaggcaaggtccggcacggcgattgacagcgctaaccaatgaggtgtaacattcttctgttttatatggacattttgtttggtaggggagtgagatttttggggggtcccgtttgtttgtgtaggtttgtgtatagtatataagcaaacgattcccttgtatttgggtgtttcctggctttggttctttgtgtgattatgtattccttttaactttttctttttcttttggttagcatgtggagaggagtgttagcgagcttgtgttgtcttgggttgtacaactaggtgacaatgtacaaagaaaggaaatgtaacgtaatggagaaagt

SEQ ID NO: 66631 - protein, 187 aa, Triticum aestivum
  peptide (1)..(187): Ceres Seq. ID no. 13658674
  misc_feature (1)..(181): Homolog of NCBI NO: 13508539 NR Description: CLASP2 [Mus musculus]
  misc_feature (1)..(184): Homolog of NCBI NO: 28972317 NR Description: mKIAA0622 protein [Mus musculus]
  misc_feature (1)..(184): Homolog of NCBI NO: 34980884 NR Description: Unknown (protein for IMAGE:6824890) [Mus musculus]
  misc_feature (1)..(181): Homolog of NCBI NO: 6808437 NR Description: hypothetical protein [Homo sapiens]
  misc_feature (1)..(184): Homolog of NCBI NO: 13508653 NR Description: CLIP-associating protein CLASP1 [Mus musculus]
  misc_feature (1)..(184): Homolog of NCBI NO: 20259452 NR Description: unknown protein [Arabidopsis thaliana]
  misc_feature (1)..(184): Homolog of NCBI NO: 30680913 NR Description: expressed protein [Arabidopsis thaliana]
  misc_feature (1)..(184): Homolog of NCBI NO: 25411970 NR Description: hypothetical protein At2g20190 [imported] -
  misc_feature (1)..(177): Homolog of NCBI NO: 38567848 NR Description: OSJNBb0002J11.18 [Oryza sativa (japonica
  misc_feature (1)..(187): Homolog of NCBI NO: 38346560 NR Description: OSJNBa0043L24.9 [Oryza sativa (japonica
MTVLDVLGDSDPSTREIALSLIAEMLNNQKDAMEESIEIVLEKLLHVTKDVVAKISNEANRCINVLLAKYDPFRCLAVVVPLLVSDDEKMLVVCINCLTKLVAHLPQEELMDQLPTFLPALFDAFSNQSPDVRKSVVFCLVDIYIMLGKAFVPYLEGLSSTQLRLVTIYANRISQARSGTAIDSANQ

SEQ ID NO: 66632 - protein, 163 aa, Triticum aestivum
  peptide (1)..(163): Ceres Seq. ID no. 13658675
  misc_feature (1)..(157): Homolog of NCBI NO: 13508539 NR Description: CLASP2 [Mus musculus]
  misc_feature (1)..(160): Homolog of NCBI NO: 28972317 NR Description: mKIAA0622 protein [Mus musculus]
  misc_feature (1)..(160): Homolog of NCBI NO: 34980884 NR Description: Unknown (protein for IMAGE:6824890) [Mus musculus]
  misc_feature (1)..(157): Homolog of NCBI NO: 6808437 NR Description: hypothetical protein [Homo sapiens]
  misc_feature (1)..(160): Homolog of NCBI NO: 13508653 NR Description: CLIP-associating protein CLASP1 [Mus musculus]
  misc_feature (1)..(160): Homolog of NCBI NO: 20259452 NR Description: unknown protein [Arabidopsis thaliana]
  misc_feature (1)..(160): Homolog of NCBI NO: 30680913 NR Description: expressed protein [Arabidopsis thaliana]
  misc_feature (1)..(160): Homolog of NCBI NO: 25411970 NR Description: hypothetical protein At2g20190 [imported] -
  misc_feature (1)..(153): Homolog of NCBI NO: 38567848 NR Description: OSJNBb0002J11.18 [Oryza sativa (japonica
  misc_feature (1)..(163): Homolog of NCBI NO: 38346560 NR Description: OSJNBa0043L24.9 [Oryza sativa (japonica
MLNNQKDAMEESIEIVLEKLLHVTKDVVAKISNEANRCINVLLAKYDPFRCLAVVVPLLVSDDEKMLVVCINCLTKLVAHLPQEELMDQLPTFLPALFDAFSNQSPDVRKSVVFCLVDIYIMLGKAFVPYLEGLSSTQLRLVTIYANRISQARSGTAIDSANQ

SEQ ID NO: 66633 - protein, 155 aa, Triticum aestivum
  peptide (1)..(155): Ceres Seq. ID no. 13658676
  misc_feature (1)..(149): Homolog of NCBI NO: 13508539 NR Description: CLASP2 [Mus musculus]
  misc_feature (1)..(152): Homolog of NCBI NO: 28972317 NR Description: mKIAA0622 protein [Mus musculus]
  misc_feature (1)..(152): Homolog of NCBI NO: 34980884 NR Description: Unknown (protein for IMAGE:6824890) [Mus musculus]
  misc_feature (1)..(149): Homolog of NCBI NO: 6808437 NR Description: hypothetical protein [Homo sapiens]
  misc_feature (1)..(152): Homolog of NCBI NO: 13508653 NR Description: CLIP-associating protein CLASP1 [Mus musculus]
  misc_feature (1)..(152): Homolog of NCBI NO: 20259452 NR Description: unknown protein [Arabidopsis thaliana]
  misc_feature (1)..(152): Homolog of NCBI NO: 30680913 NR Description: expressed protein [Arabidopsis thaliana]
  misc_feature (1)..(152): Homolog of NCBI NO: 25411970 NR Description: hypothetical protein At2g20190 [imported] -
  misc_feature (1)..(145): Homolog of NCBI NO: 38567848 NR Description: OSJNBb0002J11.18 [Oryza sativa (japonica
  misc_feature (1)..(155): Homolog of NCBI NO: 38346560 NR Description: OSJNBa0043L24.9 [Oryza sativa (japonica
MEESIEIVLEKLLHVTKDVVAKISNEANRCINVLLAKYDPFRCLAVVVPLLVSDDEKMLVVCINCLTKLVAHLPQEELMDQLPTFLPALFDAFSNQSPDVRKSVVFCLVDIYIMLGKAFVPYLEGLSSTQLRLVTIYANRISQARSGTAIDSANQ

SEQ ID NO: 66634 - DNA, 676 bp, Triticum aestivum
  misc_feature (1)..(676): Ceres Seq. ID no. 13663146
cctaatcgaaaatttattcctgcaccaccggaagttgcaatgcgtatgttgagggagcagggtgggccaccacctttcgagccgaatgctggtccacgtcctaggaaagcaggaagggctggtggtcccccaatgggtggtccatcaccaatccttaatgctccacttcctataatgcatgatccacgtatgcaagatccacgcatgcaagatccccgtaaaatacgaagctatcaagatctggacgctcctggagatgaagtgacagttttggactaccggagcctgtagtcgtgtgctgtacggccttttaatcttcgaagccgtggacgataccaccaccgcaacgggaccttgctcatctccattagtttgaccgtggcggaggaacactgatgcggtgccccgtcccgtgagctatgttatactactcaatggtgcttctaaaactgaaccacatgaaatcaaagcaactggcgcactgaaagcacggttgtggagtgtgtatttccaacagaattttttagcttttcaaaatttccaccatctagagagagagagagtagaggtctctgctgccgtatccagaactccagaccagatattcctcaccgtgtatgcaatctgtaatttatatacaggaaaaaacggttggtagatggaaccctgattggtc

SEQ ID NO: 66635 - protein, 96 aa, Triticum aestivum
  peptide (1)..(96): Ceres Seq. ID no. 13663147
  misc_feature (1)..(96): Homolog of NCBI NO: 14486606 NR Description: C2H2 zinc-finger protein [Zea mays]
  misc_feature (1)..(96): Homolog of NCBI NO: 14486608 NR Description: C2H2 zinc-finger protein [Zea mays]
  misc_feature (1)..(96): Homolog of NCBI NO: 14486604 NR Description: C2H2 zinc-finger protein SERRATE [Saccharum
  misc_feature (1)..(96): Homolog of NCBI NO: 34905134 NR Description: putative C2H2 zinc-finger protein
PNRKFIPAPPEVAMRMLREQGGPPPFEPNAGPRPRKAGRAGGPPMGGPSPILNAPLPIMHDPRMQDPRMQDPRKIRSYQDLDAPGDEVTVLDYRSL

SEQ ID NO: 66636 - protein, 83 aa, Triticum aestivum
  peptide (1)..(83): Ceres Seq. ID no. 13663148
  misc_feature (1)..(83): Homolog of NCBI NO: 14486606 NR Description: C2H2 zinc-finger protein [Zea mays]
  misc_feature (1)..(83): Homolog of NCBI NO: 14486608 NR Description: C2H2 zinc-finger protein [Zea mays]
  misc_feature (1)..(83): Homolog of NCBI NO: 14486604 NR Description: C2H2 zinc-finger protein SERRATE [Saccharum
  misc_feature (1)..(83): Homolog of NCBI NO: 34905134 NR Description: putative C2H2 zinc-finger protein
MRMLREQGGPPPFEPNAGPRPRKAGRAGGPPMGGPSPILNAPLPIMHDPRMQDPRMQDPRKIRSYQDLDAPGDEVTVLDYRSL

SEQ ID NO: 66637 - protein, 81 aa, Triticum aestivum
  peptide (1)..(81): Ceres Seq. ID no. 13663149
  misc_feature (1)..(81): Homolog of NCBI NO: 14486606 NR Description: C2H2 zinc-finger protein [Zea mays]
  misc_feature (1)..(81): Homolog of NCBI NO: 14486608 NR Description: C2H2 zinc-finger protein [Zea mays]
  misc_feature (1)..(81): Homolog of NCBI NO: 14486604 NR Description: C2H2 zinc-finger protein SERRATE [Saccharum
  misc_feature (1)..(81): Homolog of NCBI NO: 34905134 NR Description: putative C2H2 zinc-finger protein
MLREQGGPPPFEPNAGPRPRKAGRAGGPPMGGPSPILNAPLPIMHDPRMQDPRMQDPRKIRSYQDLDAPGDEVTVLDYRSL

SEQ ID NO: 66638 - DNA, 719 bp, Triticum aestivum
  misc_feature (1)..(719): Ceres Seq. ID no. 13658677
acatggtaatggattttcaaaagaagaacaggaagcgaaagaccaaggtggaaacctcagacgacgagttatcacaggcgtcacttgatgaacaggcgccacttgatgaacggtcaccaaaagccaatgcggtaaccttaaatgagaagtatcacagacggtctttcctcctgttgtaaacaaaactggcatccagattgaacaggcgccacttggtgaacgagagaagtacattgttgagctggaaaggaagttgagtgaaagggatagagaattggaagctttgaagtttgatcataaaaaggcaggatcttcttgcagtgcagacgaaatagcttgcaaaagacagtgccatggagcgcgaagcgaggatgctcagggagaacacttactttgatgtggatctgtgcagcggcggacgatgctaccgcaagctgatggtgcctgggcttagtggaggatgtttgggaccttgtttgtgcgttttatcttcagctctgagcatcccctttctttcagactttattctctattgctggtgtcgtctgcttttcgccccataacaattgttttgatggtgagcattttctgtgggtttcaaaaaaaaaaaaaaaaaaaaaaaaaaaaaaaaaaaaaaaaaaaaaaaaaaaaaaaaaaaaaaaaggaaaaaaaaaaaaaaaaaggtttatcgataccgccaacctcaagggggggcccgg

SEQ ID NO: 66639 - protein, 86 aa, Triticum aestivum
  peptide (1)..(86): Ceres Seq. ID no. 13658678
  misc_feature (47)..(74): Homolog of NCBI NO: 16416102 NR Description: hypothetical protein [Neurospora crassa]
  misc_feature (47)..(74): Homolog of NCBI NO: 16416102 NR Description: hypothetical protein [Neurospora crassa]
  misc_feature (47)..(74): Homolog of NCBI NO: 16416102 NR Description: hypothetical protein [Neurospora crassa]
  misc_feature (47)..(74): Homolog of NCBI NO: 39595494 NR Description: Hypothetical protein CBG04159 [Caenorhabditis
  misc_feature (35)..(74): Homolog of NCBI NO: 37536950 NR Description: hypothetical protein [Oryza sativa (japonica
  misc_feature (47)..(79): Homolog of NCBI NO: 39597582 NR Description: Hypothetical protein CBG03276 [Caenorhabditis
  misc_feature (47)..(78): Homolog of NCBI NO: 39594135 NR Description: Hypothetical protein CBG16734 [Caenorhabditis
  misc_feature (45)..(74): Homolog of NCBI NO: 32416700 NR Description: predicted protein [Neurospora crassa]
  misc_feature (47)..(74): Homolog of NCBI NO: 16416102 NR Description: hypothetical protein [Neurospora crassa]
  misc_feature (45)..(74): Homolog of NCBI NO: 39597582 NR Description: Hypothetical protein CBG03276 [Caenorhabditis
MFGTLFVRFIFSSEHPLSFRLYSLLLVSSAFRPITIVLMVSIFCGFQKKKKKKKKKKKKKKKKKKKKKEKKKKKGLSIPPTSRGGP

SEQ ID NO: 66640 - protein, 69 aa, Triticum aestivum
  peptide (1)..(69): Ceres Seq. ID no. 13658679
MEREARMLRENTYFDVDLCSGGRCYRKLMVPGLSGGCLGPCLCVLSSALSIPFLSDFILYCWCRLLFAP

SEQ ID NO: 66641 - protein, 63 aa, Triticum aestivum
  peptide (1)..(63): Ceres Seq. ID no. 13658680
MLRENTYFDVDLCSGGRCYRKLMVPGLSGGCLGPCLCVLSSALSIPFLSDFILYCWCRLLFAP

SEQ ID NO: 66642 - DNA, 520 bp, Triticum aestivum
  misc_feature (1)..(520): Ceres Seq. ID no. 13658646
gtgagccgtccacatcctgtcgcgccgtcaagtaactgctacatggcctggtgcgccctgcgcagccgcctcctcccgctctccccctcctcctccgccgccgccgccgccgcgacgccccaccggctcctcctctgcctcctctccaccgcggccccgcgccactcccacggccaccaccaccgccgccgccactcgcccgccgcctacgccgccgcggccgaggagtcgccgcgccccatgccgcccatcggtcgcgccacgcgccaccccgcgggggccacccccatcgcgcgcttctacgccgacgccaactcccagcggcccaaggagtactgggactacgaggcgctcgacatcgagtggggggagcaggatgggtacgaggtgctgcggaaggtgggcnagggcaagtacagcgaggtgttcgagggattgcggaccgggagcgaagagaggtgcgtcatcaagatcctcaagcccgtgaggaagaagaagatwaagagggaaatamagatac

SEQ ID NO: 66643 - protein, 173 aa, Triticum aestivum
  peptide (1)..(173): Ceres Seq. ID no. 13658647
  misc_feature (98)..(172): Homolog of NCBI NO: 33357307 NR Description: Chain A, Crystal Structure Of
  misc_feature (98)..(172): Homolog of NCBI NO: 12697577 NR Description: casein kinase II alpha subunit
  misc_feature (98)..(172): Homolog of NCBI NO: 7766821 NR Description: Chain A, Crystal Structure Of A Binary Complex Of
  misc_feature (98)..(172): Homolog of NCBI NO: 14317906 NR Description: casein kinase II alpha [Triticum aestivum]
  misc_feature (98)..(172): Homolog of NCBI NO: 12697575 NR Description: casein kinase II alpha subunit
  misc_feature (98)..(172): Homolog of NCBI NO: 3821795 NR Description: protein kinase CK2, alpha subunit [Zea mays]
  misc_feature (98)..(172): Homolog of NCBI NO: 125271 NR Description: Casein kinase II, alpha chain (CK II) (CK2-alpha)
  misc_feature (98)..(172): Homolog of NCBI NO: 26006492 NR Description: Putative casein kinase II alpha subunit
  misc_feature (49)..(172): Homolog of NCBI NO: 15227778 NR Description: casein kinase II alpha chain, putative
  misc_feature (15)..(172): Homolog of NCBI NO: 17027272 NR Description: putative casein kinase alpha subunit
  misc_feature (136)..(136): Xaa is any aa, unknown or other
  misc_feature (167)..(167): Xaa is any aa, unknown or other
  misc_feature (172)..(172): Xaa is any aa, unknown or other
VSRPHPVAPSSNCYMAWCALRSRLLPLSPSSSAAAAAATPHRLLLCLLSTAAPRHSHGHHHRRRHSPAAYAAAAEESPRPMPPIGRATRHPAGATPIARFYADANSQRPKEYWDYEALDIEWGEQDGYEVLRKVGXGKYSEVFEGLRTGSEERCVIKILKPVRKKKXKREIXI

SEQ ID NO: 66644 - protein, 159 aa, Triticum aestivum
  peptide (1)..(159): Ceres Seq. ID no. 13658648
  misc_feature (84)..(158): Homolog of NCBI NO: 33357307 NR Description: Chain A, Crystal Structure Of
  misc_feature (84)..(158): Homolog of NCBI NO: 14317906 NR Description: casein kinase II alpha [Triticum aestivum]
  misc_feature (84)..(158): Homolog of NCBI NO: 12697575 NR Description: casein kinase II alpha subunit
  misc_feature (84)..(158): Homolog of NCBI NO: 12697577 NR Description: casein kinase II alpha subunit
  misc_feature (84)..(158): Homolog of NCBI NO: 7766821 NR Description: Chain A, Crystal Structure Of A Binary Complex Of
  misc_feature (84)..(158): Homolog of NCBI NO: 3821795 NR Description: protein kinase CK2, alpha subunit [Zea mays]
  misc_feature (84)..(158): Homolog of NCBI NO: 125271 NR Description: Casein kinase II, alpha chain (CK II) (CK2-alpha)
  misc_feature (84)..(158): Homolog of NCBI NO: 26006492 NR Description: Putative casein kinase II alpha subunit
  misc_feature (35)..(158): Homolog of NCBI NO: 15227778 NR Description: casein kinase II alpha chain, putative
  misc_feature (1)..(158): Homolog of NCBI NO: 17027272 NR Description: putative casein kinase alpha subunit
  misc_feature (122)..(122): Xaa is any aa, unknown or other
  misc_feature (153)..(153): Xaa is any aa, unknown or other
  misc_feature (158)..(158): Xaa is any aa, unknown or other
MAWCALRSRLLPLSPSSSAAAAAATPHRLLLCLLSTAAPRHSHGHHHRRRHSPAAYAAAAEESPRPMPPIGRATRHPAGATPIARFYADANSQRPKEYWDYEALDIEWGEQDGYEVLRKVGXGKYSEVFEGLRTGSEERCVIKILKPVRKKKXKREIXI

SEQ ID NO: 66645 - protein, 93 aa, Triticum aestivum
  peptide (1)..(93): Ceres Seq. ID no. 13658649
  misc_feature (18)..(92): Homolog of NCBI NO: 33357307 NR Description: Chain A, Crystal Structure Of
  misc_feature (18)..(92): Homolog of NCBI NO: 14317906 NR Description: casein kinase II alpha [Triticum aestivum]
  misc_feature (18)..(92): Homolog of NCBI NO: 12697575 NR Description: casein kinase II alpha subunit
  misc_feature (18)..(92): Homolog of NCBI NO: 12697577 NR Description: casein kinase II alpha subunit
  misc_feature (18)..(92): Homolog of NCBI NO: 7766821 NR Description: Chain A, Crystal Structure Of A Binary Complex Of
  misc_feature (18)..(92): Homolog of NCBI NO: 3821795 NR Description: protein kinase CK2, alpha subunit [Zea mays]
  misc_feature (18)..(92): Homolog of NCBI NO: 125271 NR Description: Casein kinase II, alpha chain (CK II) (CK2-alpha)
  misc_feature (18)..(92): Homolog of NCBI NO: 26006492 NR Description: Putative casein kinase II alpha subunit
  misc_feature (1)..(92): Homolog of NCBI NO: 15227778 NR Description: casein kinase II alpha chain, putative
  misc_feature (1)..(92): Homolog of NCBI NO: 17027272 NR Description: putative casein kinase alpha subunit
  misc_feature (56)..(56): Xaa is any aa, unknown or other
  misc_feature (87)..(87): Xaa is any aa, unknown or other
  misc_feature (92)..(92): Xaa is any aa, unknown or other
MPPIGRATRHPAGATPIARFYADANSQRPKEYWDYEALDIEWGEQDGYEVLRKVGXGKYSEVFEGLRTGSEERCVIKILKPVRKKKXKREIXI

SEQ ID NO: 66646 - DNA, 1916 bp, Triticum aestivum
  misc_feature (1)..(1916): Ceres Seq. ID no. 14302746
ctcgctcctcctccgtccatccacaactcaattgctgccaaatcttagcgctgcacccaccgcctccgtttggttccctggattcttctccgcgcccgcgagaaatctgggtgatgagatgatgaggacggcggcggtgctgttcctctgctttttcgccttcgccggcagcggctggggcggagcgcgggtcgcggccgtatgggcggagggggtcagacagacggcggcggtggtggtggaccctgcctggcgcttccctagcccgcggctgcgggacgcgtacgtcgcgctgcagacatggaagcagcaggccatcttctccgaccccaagaacctcaccggcgactgggtgggtcccgcggtctgcggctacaccggcgtgttctgcgcgcctgctccgtcgtcgggcgagctcgccgtcgccggcatcgacctcaaccacggcgacatcgcgggctacctcccgtcggagctcggcctcctctgcgacctcgcgctgctccacctcaactccaaccgcttctgcggcctcgtgcccgacaccttccgccggctcgtcctcctccacgagctcgacctcagcaacaaccgcttcgtgggcgcgttcccgaccgtcgtgctcgacctcccgtccctcaggttcctcgacctccgcttcaacgacttcgagggcggcgtgccgcgggagctcttcgaccgcccgttcgacgccatcttcctcaaccacaatcgcctccgcttccagctccccgacaacttcggcaattcgcccgtgtccgtcatcgtcctcgccaacaaccacttcggcggctgcctcccggcgagcctcggcaacatgtccgacacgctcaacgagatcctcctcatcaacaacggcctcacctcgtgcctcccggcggaggtcgggatgctccgggaggtgacggtgttcgacgtcagcttcaacgccctcgcagggccgctgccgccggaggtggccgggatgcaaaaggtggagcagctcgacatcgcgcacaacctgctgtcggggaccgtgccggaggccgtgtgcgacctcccacggctcaagaacttcaccttctcctacaacttcttcaccggcgagccgccgtcctgcgcgcgcgtcgtgcctgccgacggcgaccgccggaactgcctccccaaccgccccgcccagcgcatgccgcagcagtgcgccgctttctatgcccgcccgcccgtcgactgcgcagctttccagtgcaagccgtttgtcccacctcggccacccccaccgccagcataccccggcccgttgccgccagtgtaccccatgccatacgcgtcgccgccgccgcctccacgttaccgatgattctttgacaacagaagcattgccagtttcactttcccttgccgcaccccttgccgccggtgtggaagagccagcggagctcgccgtcacaaaagtacgtggtcattgttgttcgtggattaccagttcttgattgatagctaccggcgtaaagaagaacgtggtgcatatatccttttcttgtttttttgcattggttggtgtctgttttccgcatcgtcgtcttcgatcatccgtttgcgcggtggcgatggcgaaaaggattggagcatggtgataaggaaatttgaaaggtgggagcaaattgggcttggattgatggctaattgggttgtgaataataaactggctgagagagacaggttaagctgagattgagaaatccatggaaaagttgtgatgcgggatgtatagaatgatacttttagttcggtaaagctctagttgagggtcagagataagtttctacatcaagagatttgtcctactgaattcctcttgtgtcacagctgcttactgttattcgattattattattaagatgtttagttgggcttct

SEQ ID NO: 66647 - protein, 451 aa, Triticum aestivum
  peptide (1)..(451): Ceres Seq. ID no. 14302747
  misc_feature (378)..(449): Pfam Name: Glycoprotein GG/GX Pfam Description: Glycoprotein GG/GX
  misc_feature (421)..(450): Homolog of NCBI NO: 15220780 NR Description: leucine-rich repeat extensin family [Arabidopsis
  misc_feature (421)..(450): Homolog of NCBI NO: 7484956 NR Description: extensin homolog F24O1.18 - Arabidopsis thaliana
  misc_feature (78)..(448): Homolog of NCBI NO: 15220780 NR Description: leucine-rich repeat extensin family [Arabidopsis
  misc_feature (78)..(448): Homolog of NCBI NO: 7484956 NR Description: extensin homolog F24O1.18 - Arabidopsis thaliana
  misc_feature (78)..(448): Homolog of NCBI NO: 15233976 NR Description: leucine-rich repeat extensin family [Arabidopsis
  misc_feature (78)..(447): Homolog of NCBI NO: 34912294 NR Description: putative extensin-like protein
  misc_feature (78)..(448): Homolog of NCBI NO: 15230120 NR Description: leucine-rich repeat extensin family [Arabidopsis
  misc_feature (70)..(447): Homolog of NCBI NO: 15235668 NR Description: leucine-rich repeat extensin family [Arabidopsis
  misc_feature (406)..(448): Homolog of NCBI NO: 34906174 NR Description: putative extensin-like protein
  misc_feature (41)..(447): Homolog of NCBI NO: 34906174 NR Description: putative extensin-like protein
SLLLRPSTTQLLPNLSAAPTASVWFPGFFSAPARNLGDEMMRTAAVLFLCFFAFAGSGWGGARVAAVWAEGVRQTAAVVVDPAWRFPSPRLRDAYVALQTWKQQAIFSDPKNLTGDWVGPAVCGYTGVFCAPAPSSGELAVAGIDLNHGDIAGYLPSELGLLCDLALLHLNSNRFCGLVPDTFRRLVLLHELDLSNNRFVGAFPTVVLDLPSLRFLDLRFNDFEGGVPRELFDRPFDAIFLNHNRLRFQLPDNFGNSPVSVIVLANNHFGGCLPASLGNMSDTLNEILLINNGLTSCLPAEVGMLREVTVFDVSFNALAGPLPPEVAGMQKVEQLDIAHNLLSGTVPEAVCDLPRLKNFTFSYNFFTGEPPSCARVVPADGDRRNCLPNRPAQRMPQQCAAFYARPPVDCAAFQCKPFVPPRPPPPPAYPGPLPPVYPMPYASPPPPPRYR

SEQ ID NO: 66648 - protein, 412 aa, Triticum aestivum
  peptide (1)..(412): Ceres Seq. ID no. 14302748
  misc_feature (339)..(410): Pfam Name: Glycoprotein GG/GX Pfam Description: Glycoprotein GG/GX
  misc_feature (382)..(411): Homolog of NCBI NO: 15220780 NR Description: leucine-rich repeat extensin family [Arabidopsis
  misc_feature (382)..(411): Homolog of NCBI NO: 7484956 NR Description: extensin homolog F24O1.18 - Arabidopsis thaliana
  misc_feature (39)..(409): Homolog of NCBI NO: 15220780 NR Description: leucine-rich repeat extensin family [Arabidopsis
  misc_feature (39)..(409): Homolog of NCBI NO: 7484956 NR Description: extensin homolog F24O1.18 - Arabidopsis thaliana
  misc_feature (39)..(409): Homolog of NCBI NO: 15233976 NR Description: leucine-rich repeat extensin family [Arabidopsis
  misc_feature (39)..(408): Homolog of NCBI NO: 34912294 NR Description: putative extensin-like protein
  misc_feature (39)..(409): Homolog of NCBI NO: 15230120 NR Description: leucine-rich repeat extensin family [Arabidopsis
  misc_feature (31)..(408): Homolog of NCBI NO: 15235668 NR Description: leucine-rich repeat extensin family [Arabidopsis
  misc_feature (367)..(409): Homolog of NCBI NO: 34906174 NR Description: putative extensin-like protein
  misc_feature (2)..(408): Homolog of NCBI NO: 34906174 NR Description: putative extensin-like protein
MMRTAAVLFLCFFAFAGSGWGGARVAAVWAEGVRQTAAVVVDPAWRFPSPRLRDAYVALQTWKQQAIFSDPKNLTGDWVGPAVCGYTGVFCAPAPSSGELAVAGIDLNHGDIAGYLPSELGLLCDLALLHLNSNRFCGLVPDTFRRLVLLHELDLSNNRFVGAFPTVVLDLPSLRFLDLRFNDFEGGVPRELFDRPFDAIFLNHNRLRFQLPDNFGNSPVSVIVLANNHFGGCLPASLGNMSDTLNEILLINNGLTSCLPAEVGMLREVTVFDVSFNALAGPLPPEVAGMQKVEQLDIAHNLLSGTVPEAVCDLPRLKNFTFSYNFFTGEPPSCARVVPADGDRRNCLPNRPAQRMPQQCAAFYARPPVDCAAFQCKPFVPPRPPPPPAYPGPLPPVYPMPYASPPPPPRYR

SEQ ID NO: 66649 - protein, 411 aa, Triticum aestivum
  peptide (1)..(411): Ceres Seq. ID no. 14302749
  misc_feature (338)..(409): Pfam Name: Glycoprotein GG/GX Pfam Description: Glycoprotein GG/GX
  misc_feature (381)..(410): Homolog of NCBI NO: 15220780 NR Description: leucine-rich repeat extensin family [Arabidopsis
  misc_feature (381)..(410): Homolog of NCBI NO: 7484956 NR Description: extensin homolog F24O1.18 - Arabidopsis thaliana
  misc_feature (38)..(408): Homolog of NCBI NO: 15220780 NR Description: leucine-rich repeat extensin family [Arabidopsis
  misc_feature (38)..(408): Homolog of NCBI NO: 7484956 NR Description: extensin homolog F24O1.18 - Arabidopsis thaliana
  misc_feature (38)..(408): Homolog of NCBI NO: 15233976 NR Description: leucine-rich repeat extensin family [Arabidopsis
  misc_feature (38)..(407): Homolog of NCBI NO: 34912294 NR Description: putative extensin-like protein
  misc_feature (38)..(408): Homolog of NCBI NO: 15230120 NR Description: leucine-rich repeat extensin family [Arabidopsis
  misc_feature (30)..(407): Homolog of NCBI NO: 15235668 NR Description: leucine-rich repeat extensin family [Arabidopsis
  misc_feature (366)..(408): Homolog of NCBI NO: 34906174 NR Description: putative extensin-like protein
  misc_feature (1)..(407): Homolog of NCBI NO: 34906174 NR Description: putative extensin-like protein
MRTAAVLFLCFFAFAGSGWGGARVAAVWAEGVRQTAAVVVDPAWRFPSPRLRDAYVALQTWKQQAIFSDPKNLTGDWVGPAVCGYTGVFCAPAPSSGELAVAGIDLNHGDIAGYLPSELGLLCDLALLHLNSNRFCGLVPDTFRRLVLLHELDLSNNRFVGAFPTVVLDLPSLRFLDLRFNDFEGGVPRELFDRPFDAIFLNHNRLRFQLPDNFGNSPVSVIVLANNHFGGCLPASLGNMSDTLNEILLINNGLTSCLPAEVGMLREVTVFDVSFNALAGPLPPEVAGMQKVEQLDIAHNLLSGTVPEAVCDLPRLKNFTFSYNFFTGEPPSCARVVPADGDRRNCLPNRPAQRMPQQCAAFYARPPVDCAAFQCKPFVPPRPPPPPAYPGPLPPVYPMPYASPPPPPRYR

SEQ ID NO: 66650 - DNA, 576 bp, Triticum aestivum
  misc_feature (1)..(576): Ceres Seq. ID no. 13658253
accaccaattaagttcgcgccaaattaggcaagctagcgcgcactgcacgtacgcgtgggcgcgctctgtctgctgccaaaaggcgtgcaaaccaaagcttgattagtagcggaggccggcgatgaggccacggccgccggctctcgtgagcagcctcctcctcctcctcctactattcgcggtgccgaggcatgccgccgcggcgggaggggacggcggtggcatggtgcgggtggacggcacgcggttcgtggcgggggacggcgaccggacggtgtacctcagcgggttcaacgcctactggctcatggagatggcctccgacccgtcccggcggggcggggtggtgtcggcgttccggcaggcggccgcgcacggcctcaacctcgcgcgcacctgggccttcagcgacggcggcgaccgaccgctgcagtcctcgccgggcgtctaccacgaggacatgttccagggcctggacttcgtcatcgccgaggcgaggcggcacgggatatacctcctcctctgcctcaccaacaacttcgacgacttcggcggcaagcgccagtacgtccagt

SEQ ID NO: 66651 - protein, 151 aa, Triticum aestivum
  peptide (1)..(151): Ceres Seq. ID no. 13658254
  misc_feature (41)..(150): Pfam Name: Cellulase (glycosyl hydrolase family 5) Pfam Description: Cellulase (glycosyl hydrolase family 5)
  misc_feature (12)..(150): Homolog of NCBI NO: 10129675 NR Description: (1-4)-beta-mannan endohydrolase [Coffea arabica]
  misc_feature (33)..(150): Homolog of NCBI NO: 15239973 NR Description: glycosyl hydrolase family 5/cellulase
  misc_feature (7)..(150): Homolog of NCBI NO: 22382040 NR Description: inactive endo-beta-mannanase [Lycopersicon
  misc_feature (7)..(150): Homolog of NCBI NO: 21307619 NR Description: mannan endo-1,4-beta-mannosidase [Lycopersicon
  misc_feature (7)..(150): Homolog of NCBI NO: 15529113 NR Description: endo-beta-mannanase [Lycopersicon esculentum]
  misc_feature (50)..(150): Homolog of NCBI NO: 29786430 NR Description: endo-beta-1,4-mannanase [Lactuca sativa]
  misc_feature (11)..(150): Homolog of NCBI NO: 10178872 NR Description: (1-4)-beta-mannan endohydrolase [Coffea arabica]
  misc_feature (10)..(150): Homolog of NCBI NO: 34912090 NR Description: putative mannan endo-1,4-beta-mannosidase
  misc_feature (35)..(150): Homolog of NCBI NO: 34897314 NR Description: putative endohydrolase [Oryza sativa]
  misc_feature (1)..(150): Homolog of NCBI NO: 34897316 NR Description: putative endohydrolase [Oryza sativa]
MRPRPPALVSSLLLLLLLFAVPRHAAAAGGDGGGMVRVDGTRFVAGDGDRTVYLSGFNAYWLMEMASDPSRRGGVVSAFRQAAAHGLNLARTWAFSDGGDRPLQSSPGVYHEDMFQGLDFVIAEARRHGIYLLLCLTNNFDDFGGKRQYVQ

SEQ ID NO: 66652 - protein, 128 aa, Triticum aestivum
  peptide (1)..(128): Ceres Seq. ID no. 13658255
  misc_feature (45)..(127): Pfam Name: Cupin Pfam Description: Cupin
MPPRREGTAVAWCGWTARGSWRGTATGRCTSAGSTPTGSWRWPPTRPGGAGWCRRSGRRPRTASTSRAPGPSATAATDRCSPRRASTTRTCSRAWTSSSPRRGGTGYTSSSASPTTSTTSAASASTSS

SEQ ID NO: 66653 - protein, 117 aa, Triticum aestivum
  peptide (1)..(117): Ceres Seq. ID no. 13658256
  misc_feature (7)..(116): Pfam Name: Cellulase (glycosyl hydrolase family 5) Pfam Description: Cellulase (glycosyl hydrolase family 5)
  misc_feature (1)..(116): Homolog of NCBI NO: 10129675 NR Description: (1-4)-beta-mannan endohydrolase [Coffea arabica]
  misc_feature (1)..(116): Homolog of NCBI NO: 15239973 NR Description: glycosyl hydrolase family 5/cellulase
  misc_feature (1)..(116): Homolog of NCBI NO: 22382040 NR Description: inactive endo-beta-mannanase [Lycopersicon
  misc_feature (1)..(116): Homolog of NCBI NO: 21307619 NR Description: mannan endo-1,4-beta-mannosidase [Lycopersicon
  misc_feature (1)..(116): Homolog of NCBI NO: 15529113 NR Description: endo-beta-mannanase [Lycopersicon esculentum]
  misc_feature (16)..(116): Homolog of NCBI NO: 29786430 NR Description: endo-beta-1,4-mannanase [Lactuca sativa]
  misc_feature (1)..(116): Homolog of NCBI NO: 10178872 NR Description: (1-4)-beta-mannan endohydrolase [Coffea arabica]
  misc_feature (1)..(116): Homolog of NCBI NO: 34912090 NR Description: putative mannan endo-1,4-beta-mannosidase
  misc_feature (1)..(116): Homolog of NCBI NO: 34897314 NR Description: putative endohydrolase [Oryza sativa]
  misc_feature (1)..(116): Homolog of NCBI NO: 34897316 NR Description: putative endohydrolase [Oryza sativa]
MVRVDGTRFVAGDGDRTVYLSGFNAYWLMEMASDPSRRGGVVSAFRQAAAHGLNLARTWAFSDGGDRPLQSSPGVYHEDMFQGLDFVIAEARRHGIYLLLCLTNNFDDFGGKRQYVQ

SEQ ID NO: 66654 - DNA, 1440 bp, Triticum aestivum
  misc_feature (1)..(1440): Ceres Seq. ID no. 13658257
gccggacgcagaagcagaagcagcagcgcagccagcagcaaagaatcacgaggagatggcggcggcgacggcgacggcgacggtgcaagcgcagccaggactcgacgcgcgcgagtgggacgaggcggcgtaccggcggggcatcctgcgggagcgcgacctctcctgccgcaccctcttccgcgccgtcttctacgaccagcgcgacgaacccgacccggacgtcctcctcgccgccgcctccagcgacggatccctcgcgtccttctcgctgtcctcctgcatcgcctcctccgcctccgcccacgccgccccacagttggctgccgccgcgctggtcgaccccgtctgcatcgtccaagcgcacagcggccccgtctacgacgccaagttctacaacgatccgattcagccgctgctcttcagctgcggggatgacggccacatccggggttggagatggcacgagatgcagagctgccttctgccactctctctgcaaggggatcatgttgaaccaatacttgacttggttaaccctcagcatgaaggcccttggggtgcacggtctccaataccagaaaataatgccattgcaattagcaaacaggatggatctcttttcgcggcagcgggtgatgcatgtgcttattgctgggatgtggaaagtggaaagtgtaaaatgacctttaaggggcatactgactatttgcatagtatcgcagttcgtgaggcaaaccaccaggtggtaactggatcagaggatgggacagcccgtatctgggattgcagaagtgggaagtgtacgcagacgatacgtccagtacagaacaagaaatttgagggctcgtgggtcggttgcattgccattgatgcgagtgaaagttggctggcttgtggtacttcttgtggtatatcagtttggagtcttctttcaaatgagtgcatcttcaacgcagattgtggtgctcctgttcaagatttgttgtttgacaaaaatcaaattttagcggttggcgctgaacctgcgctctcccgtttcacgatcaacggggttgttgtttcgcaaataaagtgcgctcctccgtcggcattttccgtctccatgcattcatctgggatggcagctgttgctgggcatggaggtctggtggatgtcatctctggattcgggagccatctttgcgcgtttcgttgccgtggcctggataggtaatcagttaccgagtgctgatgaagcgttactgtgcaatttccatttgccactcccacattagtcagtggagcgcgaaactgtatttcttttcccccctcactgttgtaatacttgtttcagttcagtctgcggaatgatttcctgacaaggatagattctttgtaaatgtccttgttctagatattctgttggaggtttcaatacaatccgtctcaatctgtttc

SEQ ID NO: 66655 - protein, 404 aa, Triticum aestivum
  peptide (1)..(404): Ceres Seq. ID no. 13658258
  misc_feature (197)..(331): Homolog of NCBI NO: 17225208 NR Description: beta transducin-like protein HET-E2C*40
  misc_feature (197)..(331): Homolog of NCBI NO: 17225204 NR Description: beta transducin-like protein HET-E2C [Podospora
  misc_feature (194)..(347): Homolog of NCBI NO: 37520744 NR Description: WD-repeat protein [Gloeobacter violaceus]
  misc_feature (186)..(390): Homolog of NCBI NO: 31212983 NR Description: ENSANGP00000014160 [Anopheles gambiae]
  misc_feature (192)..(390): Homolog of NCBI NO: 21358289 NR Description: CG5632-PA [Drosophila melanogaster]
  misc_feature (85)..(348): Homolog of NCBI NO: 22761350 NR Description: unnamed protein product [Homo sapiens]
  misc_feature (85)..(391): Homolog of NCBI NO: 31543164 NR Description: hypothetical protein MGC2655 [Homo sapiens]
  misc_feature (85)..(391): Homolog of NCBI NO: 13111899 NR Description: MGC2655 protein [Homo sapiens]
  misc_feature (35)..(339): Homolog of NCBI NO: 7486245 NR Description: probable WD-40 repeat protein [imported] -
  misc_feature (35)..(402): Homolog of NCBI NO: 30680669 NR Description: transducin / WD-40 repeat protein family
PDAEAEAAAQPAAKNHEEMAAATATATVQAQPGLDAREWDEAAYRRGILRERDLSCRTLFRAVFYDQRDEPDPDVLLAAASSDGSLASFSLSSCIASSASAHAAPQLAAAALVDPVCIVQAHSGPVYDAKFYNDPIQPLLFSCGDDGHIRGWRWHEMQSCLLPLSLQGDHVEPILDLVNPQHEGPWGARSPIPENNAIAISKQDGSLFAAAGDACAYCWDVESGKCKMTFKGHTDYLHSIAVREANHQVVTGSEDGTARIWDCRSGKCTQTIRPVQNKKFEGSWVGCIAIDASESWLACGTSCGISVWSLLSNECIFNADCGAPVQDLLFDKNQILAVGAEPALSRFTINGVVVSQIKCAPPSAFSVSMHSSGMAAVAGHGGLVDVISGFGSHLCAFRCRGLDR

SEQ ID NO: 66656 - protein, 386 aa, Triticum aestivum
  peptide (1)..(386): Ceres Seq. ID no. 13658259
  misc_feature (179)..(313): Homolog of NCBI NO: 17225206 NR Description: beta transducin-like protein HET-E2C*4 [Podospora
  misc_feature (179)..(313): Homolog of NCBI NO: 17225204 NR Description: beta transducin-like protein HET-E2C [Podospora
  misc_feature (176)..(329): Homolog of NCBI NO: 37520744 NR Description: WD-repeat protein [Gloeobacter violaceus]
  misc_feature (168)..(372): Homolog of NCBI NO: 31212983 NR Description: ENSANGP00000014160 [Anopheles gambiae]
  misc_feature (174)..(372): Homolog of NCBI NO: 21358289 NR Description: CG5632-PA [Drosophila melanogaster]
  misc_feature (67)..(330): Homolog of NCBI NO: 22761350 NR Description: unnamed protein product [Homo sapiens]
  misc_feature (67)..(373): Homolog of NCBI NO: 31543164 NR Description: hypothetical protein MGC2655 [Homo sapiens]
  misc_feature (67)..(373): Homolog of NCBI NO: 13111899 NR Description: MGC2655 protein [Homo sapiens]
  misc_feature (17)..(321): Homolog of NCBI NO: 7486245 NR Description: probable WD-40 repeat protein [imported] -
  misc_feature (17)..(384): Homolog of NCBI NO: 30680669 NR Description: transducin / WD-40 repeat protein family
MAAATATATVQAQPGLDAREWDEAAYRRGILRERDLSCRTLFRAVFYDQRDEPDPDVLLAAASSDGSLASFSLSSCIASSASAHAAPQLAAAALVDPVCIVQAHSGPVYDAKFYNDPIQPLLFSCGDDGHIRGWRWHEMQSCLLPLSLQGDHVEPILDLVNPQHEGPWGARSPIPENNAIAISKQDGSLFAAAGDACAYCWDVESGKCKMTFKGHTDYLHSIAVREANHQVVTGSEDGTARIWDCRSGKCTQTIRPVQNKKFEGSWVGCIAIDASESWLACGTSCGISVWSLLSNECIFNADCGAPVQDLLFDKNQILAVGAEPALSRFTINGVVVSQIKCAPPSAFSVSMHSSGMAAVAGHGGLVDVISGFGSHLCAFRCRGLDR

SEQ ID NO: 66657 - protein, 248 aa, Triticum aestivum
  peptide (1)..(248): Ceres Seq. ID no. 13658260
  misc_feature (41)..(175): Homolog of NCBI NO: 17225208 NR Description: beta transducin-like protein HET-E2C*40
  misc_feature (41)..(175): Homolog of NCBI NO: 17225204 NR Description: beta transducin-like protein HET-E2C [Podospora
  misc_feature (38)..(191): Homolog of NCBI NO: 37520744 NR Description: WD-repeat protein [Gloeobacter violaceus]
  misc_feature (30)..(234): Homolog of NCBI NO: 31212983 NR Description: ENSANGP00000014160 [Anopheles gambiae]
  misc_feature (36)..(234): Homolog of NCBI NO: 21358289 NR Description: CG5632-PA [Drosophila melanogaster]
  misc_feature (1)..(192): Homolog of NCBI NO: 22761350 NR Description: unnamed protein product [Homo sapiens]
  misc_feature (1)..(235): Homolog of NCBI NO: 31543164 NR Description: hypothetical protein MGC2655 [Homo sapiens]
  misc_feature (1)..(235): Homolog of NCBI NO: 13111899 NR Description: MGC2655 protein [Homo sapiens]
  misc_feature (1)..(183): Homolog of NCBI NO: 7486245 NR Description: probable WD-40 repeat protein [imported] -
  misc_feature (1)..(246): Homolog of NCBI NO: 30680669 NR Description: transducin / WD-40 repeat protein family
MQSCLLPLSLQGDHVEPILDLVNPQHEGPWGARSPIPENNAIAISKQDGSLFAAAGDACAYCWDVESGKCKMTFKGHTDYLHSIAVREANHQVVTGSEDGTARIWDCRSGKCTQTIRPVQNKKFEGSWVGCIAIDASESWLACGTSCGISVWSLLSNECIFNADCGAPVQDLLFDKNQILAVGAEPALSRFTINGVVVSQIKCAPPSAFSVSMHSSGMAAVAGHGGLVDVISGFGSHLCAFRCRGLDR

SEQ ID NO: 66658 - DNA, 674 bp, Triticum aestivum
  misc_feature (1)..(674): Ceres Seq. ID no. 12620586
aagcgaatccacggacgacgcaagcggagagattgcttgcgcacccgaccatcgacgtagcgtagccaggcgaagggagccaggcaggcggccatgaggggcgaggcgaggatgctgtgcgcgctgggcctggtgctactctgcctcgcggcgcacctccagggcgcgcactgccgcggcggcggcggcgggggacacggcggaggtggaggtggaggccatggagggggcgggggcggaggtcgtggaggcggaggctccgggagagggcgctcaggcgggagggcccgtccgatcatcgcaggcgcgggtgcgggagccctcgctggggccggcgcgggcgcgctcgccggcagggccgcgtcggggtcgcacggccgcagcgctgcgggcgagccgcgcgtcgcctggagggcctccggcgccgccgccgccctcgcggccgccgcgctcgttcggtggctctgagcggcgtgaatctcggtacacacgggtgaatttactgaattactagtagcagttagctgtgctagattggtgggtgtaatccaggcttcgaagaggatgtaatccagactgacggtcgtgaattagtggtttggtagtactagtgctgatgcacgtgtaattatggcgaatttacggcacccttgaacagagctttgcgaggatcc

SEQ ID NO: 66659 - protein, 124 aa, Triticum aestivum
  peptide (1)..(124): Ceres Seq. ID no. 12620587
  misc_feature (34)..(101): Pfam Name: Bindin Pfam Description: Bindin
  misc_feature (24)..(100): Homolog of NCBI NO: 81623 NR Description: glycine-rich protein 1 - Arabidopsis thaliana
  misc_feature (30)..(118): Homolog of NCBI NO: 322647 NR Description: glycine-rich protein GRP22 - rape
  misc_feature (30)..(100): Homolog of NCBI NO: 81623 NR Description: glycine-rich protein 1 - Arabidopsis thaliana
  misc_feature (27)..(117): Homolog of NCBI NO: 9453857 NR Description: EBNA-1 [Cynomolgus Epstein-Barr Virus TsB-B6]
  misc_feature (30)..(100): Homolog of NCBI NO: 15227583 NR Description: unknown protein; protein id: At2g36120.1
  misc_feature (24)..(100): Homolog of NCBI NO: 81623 NR Description: glycine-rich protein 1 - Arabidopsis thaliana
  misc_feature (21)..(100): Homolog of NCBI NO: 15227583 NR Description: unknown protein; protein id: At2g36120.1
  misc_feature (24)..(100): Homolog of NCBI NO: 7488554 NR Description: glycine-rich protein - wild cabbage (fragment)
  misc_feature (22)..(100): Homolog of NCBI NO: 421936 NR Description: glycine-rich protein - common tobacco
  misc_feature (30)..(100): Homolog of NCBI NO: 322647 NR Description: glycine-rich protein GRP22 - rape
MRGEARMLCALGLVLLCLAAHLQGAHCRGGGGGGHGGGGGGGHGGGGGGGRGGGGSGRGRSGGRARPIIAGAGAGALAGAGAGALAGRAASGSHGRSAAGEPRVAWRASGAAAALAAAALVRWL

SEQ ID NO: 66660 - protein, 118 aa, Triticum aestivum
  peptide (1)..(118): Ceres Seq. ID no. 12620588
  misc_feature (28)..(95): Pfam Name: Bindin Pfam Description: Bindin
  misc_feature (18)..(94): Homolog of NCBI NO: 81623 NR Description: glycine-rich protein 1 - Arabidopsis thaliana
  misc_feature (24)..(112): Homolog of NCBI NO: 322647 NR Description: glycine-rich protein GRP22 - rape
  misc_feature (24)..(94): Homolog of NCBI NO: 81623 NR Description: glycine-rich protein 1 - Arabidopsis thaliana
  misc_feature (21)..(111): Homolog of NCBI NO: 9453857 NR Description: EBNA-1 [Cynomolgus Epstein-Barr Virus TsB-B6]
  misc_feature (24)..(94): Homolog of NCBI NO: 15227583 NR Description: unknown protein; protein id: At2g36120.1
  misc_feature (18)..(94): Homolog of NCBI NO: 81623 NR Description: glycine-rich protein 1 - Arabidopsis thaliana
  misc_feature (15)..(94): Homolog of NCBI NO: 15227583 NR Description: unknown protein; protein id: At2g36120.1
  misc_feature (18)..(94): Homolog of NCBI NO: 7488554 NR Description: glycine-rich protein - wild cabbage (fragment)
  misc_feature (16)..(94): Homolog of NCBI NO: 421936 NR Description: glycine-rich protein - common tobacco
  misc_feature (24)..(94): Homolog of NCBI NO: 322647 NR Description: glycine-rich protein GRP22 - rape
MLCALGLVLLCLAAHLQGAHCRGGGGGGHGGGGGGGHGGGGGGGRGGGGSGRGRSGGRARPIIAGAGAGALAGAGAGALAGRAASGSHGRSAAGEPRVAWRASGAAAALAAAALVRWL

SEQ ID NO: 66661 - protein, 97 aa, Triticum aestivum
  peptide (1)..(97): Ceres Seq. ID no. 12620589
MEGAGAEVVEAEAPGEGAQAGGPVRSSQARVREPSLGPARARSPAGPRRGRTAAALRASRASPGGPPAPPPPSRPPRSFGGSERRESRYTRVNLLNY

SEQ ID NO: 66662 - DNA, 1818 bp, Triticum aestivum
  misc_feature (1)..(1818): Ceres Seq. ID no. 13659025
accgatagaattttagaatgggttgggtgaggactgacgctggtgtttcgagggttggcctccgagatgcttcgtctcctccacctcctttcctttgggtcccctcatcaattccagtccactagcacagctcgtcttgtcccatcggccgcttgcaggtttcacctgctttgccaagaagactctgcgcctgctcatcgccttcttcttccccgtcgtcttccagccaagacaagattcgagccgtccgtggtgaccgatcgtcagtccagagacgccgccgggaacggaacaccgtcgcgacgccgccagattaaatcgccgcctccagactagcattcaacatgccgaacagcagcggcgtgaccgtgttcgacgacctgcccgagtggcttgtcgttgacgagatccttgtccggctgccggccaaggatgtacttcggtagcgtgccgtccgccagtcgtggcgcagcggcacttccaccaacgcgttcatcctcaaccaccaccaccgccagccctcgctccccatcatcaaaaacatagagggcatctaccgccatgccggatcccctagtgatcaaaagatacagcgtgtcctccggaacgcagatccctttaaaaacgagatgactctatgtcatgccgcttgtgatggcttcctcatcctggagaagcaatccaatttctacatctgcaaccctaccacccgcaagtgtgcttccctgccacatcctccacgacggccaggcttcagcgccttcggcgtagtcggcttctactggctccacacatctggagaacaccgggttctctgggcgtcatacttgaaccaaatgccgtacttggtactcattggggctgccgtcccaactgagttgcctgattacttcgtactcacagttggatcggaccagccaagatgcatccaatggctgacaatttgaaaatatgggtttcctaccctgtccttcaatactccaccagtccacaatcgtgctcgcctgcactgggcaacatgggcaacaggcctcaacataacggtatttgacaccgtagccgagacattctggcagatgagccgcccagcacagttgggtgataaggtgacattgttggatatgtgcggctcccttgccttgtgctgcaccaccaatgactgtgtcaatttagatgtttgggtgttgcaggactatgatgctgaaacctggggctttcagtaccggtttaacttgtcagcaatggaggcattgccaccatttaagtttgacctcaatgctctccctaggatggctgtgatcaatgagcgtgagctgttgatcgagcagtgtgttggccgtctgttgcattgtgacattgatggtgtgtttttaggatatgtgcgagccaaggagcctgggaaccactttatgctaactatgcagcgcctccaagagagcatgatttcagtcccattgtttgaggcgcaggaagaagatgctgtgaacaaggagtctccattcgtcatggtgctataagatgccaggctccatcttaatgatttcgactagctgtttgttgtgcccttgggagtatctatcctgtatgaaccttgctttctgttctgtcttcttactttttagtactagtagaaccgaacactttgtatgtctgaagtagcgcctcatcacttggtgcttgttatgctatcttgagcatcatgttgatgttgtaaaaaattgtgtgtctatgctattgctatgtagaactgctataatgttcatgttcacccctgttgactttcagtttgcgttgttattaaggcatggttgcagtttg

SEQ ID NO: 66663 - protein, 146 aa, Triticum aestivum
  peptide (1)..(146): Ceres Seq. ID no. 15219941
  misc_feature (1)..(143): Homolog of NCBI NO: 38346044 NR Description: OSJNBa0059D20.16 [Oryza sativa (japonica
  misc_feature (1)..(53): Homolog of NCBI NO: 38344215 NR Description: OSJNBb0026E15.3 [Oryza sativa (japonica
  misc_feature (1)..(143): Homolog of NCBI NO: 38346045 NR Description: OSJNBa0059D20.17 [Oryza sativa (japonica
  misc_feature (1)..(53): Homolog of NCBI NO: 38346536 NR Description: OSJNBa0040D17.11 [Oryza sativa (japonica
  misc_feature (1)..(129): Homolog of NCBI NO: 37533944 NR Description: hypothetical protein [Oryza sativa (japonica
  misc_feature (1)..(143): Homolog of NCBI NO: 38346527 NR Description: OSJNBa0040D17.2 [Oryza sativa (japonica
  misc_feature (1)..(129): Homolog of NCBI NO: 37530720 NR Description: unknown protein [Oryza sativa (japonica
MSRPAQLGDKVTLLDMCGSLALCCTTNDCVNLDVWVLQDYDAETWGFQYRFNLSAMEALPPFKFDLNALPRMAVINERELLIEQCVGRLLHCDIDGVFLGYVRAKEPGNHFMLTMQRLQESMISVPLFEAQEEDAVNKESPFVMVL

SEQ ID NO: 66664 - protein, 131 aa, Triticum aestivum
  peptide (1)..(131): Ceres Seq. ID no. 15219942
  misc_feature (1)..(128): Homolog of NCBI NO: 38346044 NR Description: OSJNBa0059D20.16 [Oryza sativa (japonica
  misc_feature (1)..(38): Homolog of NCBI NO: 38344215 NR Description: OSJNBb0026E15.3 [Oryza sativa (japonica
  misc_feature (1)..(128): Homolog of NCBI NO: 38346045 NR Description: OSJNBa0059D20.17 [Oryza sativa (japonica
  misc_feature (1)..(38): Homolog of NCBI NO: 38346536 NR Description: OSJNBa0040D17.11 [Oryza sativa (japonica
  misc_feature (1)..(114): Homolog of NCBI NO: 37533944 NR Description: hypothetical protein [Oryza sativa (japonica
  misc_feature (1)..(128): Homolog of NCBI NO: 38346527 NR Description: OSJNBa0040D17.2 [Oryza sativa (japonica
  misc_feature (1)..(114): Homolog of NCBI NO: 37530720 NR Description: unknown protein [Oryza sativa (japonica
MCGSLALCCTTNDCVNLDVWVLQDYDAETWGFQYRFNLSAMEALPPFKFDLNALPRMAVINERELLIEQCVGRLLHCDIDGVFLGYVRAKEPGNHFMLTMQRLQESMISVPLFEAQEEDAVNKESPFVMVL

SEQ ID NO: 66665 - protein, 105 aa, Triticum aestivum
  peptide (1)..(105): Ceres Seq. ID no. 15219943
  misc_feature (47)..(105): Homolog of NCBI NO: 38346044 NR Description: OSJNBa0059D20.16 [Oryza sativa (japonica
  misc_feature (1)..(105): Homolog of NCBI NO: 38344215 NR Description: OSJNBb0026E15.3 [Oryza sativa (japonica
  misc_feature (1)..(105): Homolog of NCBI NO: 38346045 NR Description: OSJNBa0059D20.17 [Oryza sativa (japonica
  misc_feature (1)..(105): Homolog of NCBI NO: 38346536 NR Description: OSJNBa0040D17.11 [Oryza sativa (japonica
  misc_feature (1)..(105): Homolog of NCBI NO: 37533944 NR Description: hypothetical protein [Oryza sativa (japonica
  misc_feature (1)..(105): Homolog of NCBI NO: 38346527 NR Description: OSJNBa0040D17.2 [Oryza sativa (japonica
  misc_feature (1)..(105): Homolog of NCBI NO: 37530720 NR Description: unknown protein [Oryza sativa (japonica
MTLCHAACDGFLILEKQSNFYICNPTTRKCASLPHPPRRPGFSAFGVVGFYWLHTSGEHRVLWASYLNQMPYLVLIGAAVPTELPDYFVLTVGSDQPRCIQWLTI

SEQ ID NO: 66666 - DNA, 753 bp, Triticum aestivum
  misc_feature (1)..(753): Ceres Seq. ID no. 12626339
accagctcgatccccccttctattgctcgcagcctccttcctctctcagacgcacaatccatcgcagcctcctccctcctccgctgaagccgtgccgcggctacgacgagctcgtccgactggccggccggagagtccctcgtcgcatagtctaaccatcggaggaagtggtccgtcagttggtctgagcttctcatacgatccctgtgcctacaaggatggagaggagagcggcgaggggcacctctgatcaccgtaggcgaatgcagatgccgccggcgccggtggggcagaagcagcagcagccgcagcgccgcggggggccgaagagctgccagagaacgccgccgccgccgggctgcttcaccatccagctgctcatggtgttcctctgggtggccgcgtcgctcgccttcctgcccctcgtgctcccgccgctgcccccgccgccgctctcgctgctgctcgtgcccgtctgcctgctcgccgtcctcgccgcgctggccttcgtcccgctcgacgcccacaacaacgtcgtcgtcggcggctcgtcttgtttgtagggaggctgcatttttttttcttttccgtgtcggtcagagctggctgttaccagatctagcctgtagtacaaactgtgaacctttttttaagattagaattattaggattaattaagagaggactactttttgactttgtaatcacttgaactccggcaatgtcaattgagacctcacggtatttatgctc

SEQ ID NO: 66667 - protein, 114 aa, Triticum aestivum
  peptide (1)..(114): Ceres Seq. ID no. 12626340
  misc_feature (55)..(110): Homolog of NCBI NO: 20161874 NR Description: B1139B11.15 [Oryza sativa (japonica
  misc_feature (11)..(112): Homolog of NCBI NO: 30689607 NR Description: expressed protein [Arabidopsis thaliana]
  misc_feature (11)..(112): Homolog of NCBI NO: 7486480 NR Description: hypothetical protein At2g44080 [imported] -
  misc_feature (11)..(105): Homolog of NCBI NO: 30695081 NR Description: expressed protein [Arabidopsis thaliana]
  misc_feature (11)..(105): Homolog of NCBI NO: 11282356 NR Description: hypothetical protein F24G16.170 - Arabidopsis
  misc_feature (1)..(114): Homolog of NCBI NO: 34907496 NR Description: B1099D03.18 [Oryza sativa (japonica
MERRAARGTSDHRRRMQMPPAPVGQKQQQPQRRGGPKSCQRTPPPPGCFTIQLLMVFLWVAASLAFLPLVLPPLPPPPLSLLLVPVCLLAVLAALAFVPLDAHNNVVVGGSSCL

SEQ ID NO: 66668 - protein, 99 aa, Triticum aestivum
  peptide (1)..(99): Ceres Seq. ID no. 12626341
  misc_feature (40)..(95): Homolog of NCBI NO: 20161874 NR Description: B1139B11.15 [Oryza sativa (japonica
  misc_feature (1)..(97): Homolog of NCBI NO: 30689607 NR Description: expressed protein [Arabidopsis thaliana]
  misc_feature (1)..(97): Homolog of NCBI NO: 7486480 NR Description: hypothetical protein At2g44080 [imported] -
  misc_feature (1)..(90): Homolog of NCBI NO: 30695081 NR Description: expressed protein [Arabidopsis thaliana]
  misc_feature (1)..(90): Homolog of NCBI NO: 11282356 NR Description: hypothetical protein F24G16.170 - Arabidopsis
  misc_feature (1)..(99): Homolog of NCBI NO: 34907496 NR Description: B1099D03.18 [Oryza sativa (japonica
MQMPPAPVGQKQQQPQRRGGPKSCQRTPPPPGCFTIQLLMVFLWVAASLAFLPLVLPPLPPPPLSLLLVPVCLLAVLAALAFVPLDAHNNVVVGGSSCL

SEQ ID NO: 66669 - protein, 97 aa, Triticum aestivum
  peptide (1)..(97): Ceres Seq. ID no. 12626342
  misc_feature (38)..(93): Homolog of NCBI NO: 20161874 NR Description: B1139B11.15 [Oryza sativa (japonica
  misc_feature (1)..(95): Homolog of NCBI NO: 30689607 NR Description: expressed protein [Arabidopsis thaliana]
  misc_feature (1)..(95): Homolog of NCBI NO: 7486480 NR Description: hypothetical protein At2g44080 [imported] -
  misc_feature (1)..(88): Homolog of NCBI NO: 30695081 NR Description: expressed protein [Arabidopsis thaliana]
  misc_feature (1)..(88): Homolog of NCBI NO: 11282356 NR Description: hypothetical protein F24G16.170 - Arabidopsis
  misc_feature (1)..(97): Homolog of NCBI NO: 34907496 NR Description: B1099D03.18 [Oryza sativa (japonica
MPPAPVGQKQQQPQRRGGPKSCQRTPPPPGCFTIQLLMVFLWVAASLAFLPLVLPPLPPPPLSLLLVPVCLLAVLAALAFVPLDAHNNVVVGGSSCL

SEQ ID NO: 66670 - DNA, 1654 bp, Triticum aestivum
  misc_feature (1)..(1654): Ceres Seq. ID no. 12779833
ccagtttcccctcctccaaacccttcaccgctctcggcgccgactgccgattcctcagtttcccctccccaaacccttcaccgctctcgtctcctcagttccgccgccgccgccatggcttcgtccccctgcgacatcgccctcaaggcagccctcggcggccaactccgcctcctcaagagaatggccaagaaggtggatctccggcgagccaaggacgataaagggcaaaccgcacttcatttcgctgcggccaaggggtgcctggacagctgcaagttcctggtggaggaatcagggcttgatgtcgattccgccacgaaaacagatgtgacaccgatgttctacgccgcatttgggggaaatgtcgaggttatgaggtaccttctcgaccgcggcgcagacccatccacggccgatgacaggggctctgtgtcattgcacaatgcagcagaggaaggacactgcgaggctgtgaggctattgctgttgaaaggggttcatgtggatcctatggatcatcggggcacaccattacacttggcggttgcaaaggaccatgttgaggttgtgaaggttctgctggagcatggtgctaatcccaacagagtggctaatcacgtcttttcaccactcatgatggccgtctgtggaaaggccttgaaatgcatgaagctactgattgaggctggcgctgatgtgaatgttcatggttactctggaccaactcctttaacggaggcagttgatgatggcttaatggactttgtcatgattttactagaggctggagccgacgctaacatccctaaccagcatggcgcagttccaattgagctagcagcagctcgtggtcaacgtgagcttgttgaaattctgtttcctaagacaaaacccattccatctcagccagtttggagcgttaatgggataatgaatactgcaagatcaccacgtatcaagcatcaggacgcatcttctgtggaacaacggatagctgatttgaagtcacgaggaaaggaagcatttggaaaggaagactatattacagcgatgtacttctatggcctggtaatggatatagacccacttgatgccaccatgtttgctaaccggagcctctgctggctgcggatgcgagaaggggacagagctttggaagatgcacggcaatgcataatgatgcggccccattggtccaaggcatggtaccgtgagggcaaagctctcagtttcatgaagacgcgttcctgaaagcacaggaactggaccctaagagtgacgagatcaccaaagctctgagggaggctgtcagtgcgatggaggagctgcgcgtgtgatataagcagctgccagtgccgggtcgctcggagaggaggaagaagagaacgagacgggctggctttgattcattctcccatctctgtatcgaccctgctgtattttccttgcaccagatgctaccctagtagtagtactacactaggtattactgctcgtgtgtcagaaggtgttgcagctggctagctaaccagtccccaagctgtgctggatcaggggtctcgattttggtaggctacggcgatgttttgtgacagacggcatatgcctgatggtgtgctctgcaatgatatggtcgttaccgtttcttttc

SEQ ID NO: 66671 - protein, 417 aa, Triticum aestivum
  peptide (1)..(417): Ceres Seq. ID no. 12779834
  misc_feature (367)..(399): Pfam Name: TPR Domain Pfam Description: TPR Domain
  misc_feature (48)..(347): Homolog of NCBI NO: 34329680 NR Description: unknown [Nicotiana benthamiana]
  misc_feature (48)..(338): Homolog of NCBI NO: 24745936 NR Description: ankyrin-like protein [Solanum tuberosum]
  misc_feature (58)..(414): Homolog of NCBI NO: 13435247 NR Description: putative ankyrin [Oryza sativa]
  misc_feature (323)..(414): Homolog of NCBI NO: 13435243 NR Description: putative gag-pol polyprotein [Oryza sativa]
  misc_feature (48)..(357): Homolog of NCBI NO: 13435243 NR Description: putative gag-pol polyprotein [Oryza sativa]
  misc_feature (39)..(414): Homolog of NCBI NO: 34896852 NR Description: putative ankyrin [Oryza sativa]
  misc_feature (48)..(414): Homolog of NCBI NO: 27542768 NR Description: ankyrin-like protein-like protein [Sorghum
  misc_feature (331)..(414): Homolog of NCBI NO: 15229331 NR Description: ankyrin-like protein
  misc_feature (35)..(336): Homolog of NCBI NO: 15229331 NR Description: ankyrin-like protein
  misc_feature (50)..(414): Homolog of NCBI NO: 27542766 NR Description: ankyrin-like protein-like protein [Sorghum
PVSPPPNPSPLSAPTADSSVSPPQTLHRSRLLSSAAAAMASSPCDIALKAALGGQLRLLKRMAKKVDLRRAKDDKGQTALHFAAAKGCLDSCKFLVEESGLDVDSATKTDVTPMFYAAFGGNVEVMRYLLDRGADPSTADDRGSVSLHNAAEEGHCEAVRLLLLKGVHVDPMDHRGTPLHLAVAKDHVEVVKVLLEHGANPNRVANHVFSPLMMAVCGKALKCMKLLIEAGADVNVHGYSGPTPLTEAVDDGLMDFVMILLEAGADANIPNQHGAVPIELAAARGQRELVEILFPKTKPIPSQPVWSVNGIMNTARSPRIKHQDASSVEQRIADLKSRGKEAFGKEDYITAMYFYGLVMDIDPLDATMFANRSLCWLRMREGDRALEDARQCIMMRPHWSKAWYREGKALSFMKTRS

SEQ ID NO: 66672 - protein, 379 aa, Triticum aestivum
  peptide (1)..(379): Ceres Seq. ID no. 12779835
  misc_feature (329)..(361): Pfam Name: TPR Domain Pfam Description: TPR Domain
  misc_feature (10)..(309): Homolog of NCBI NO: 34329680 NR Description: unknown [Nicotiana benthamiana]
  misc_feature (10)..(300): Homolog of NCBI NO: 24745936 NR Description: ankyrin-like protein [Solanum tuberosum]
  misc_feature (20)..(376): Homolog of NCBI NO: 13435247 NR Description: putative ankyrin [Oryza sativa]
  misc_feature (285)..(376): Homolog of NCBI NO: 13435243 NR Description: putative gag-pol polyprotein [Oryza sativa]
  misc_feature (10)..(319): Homolog of NCBI NO: 13435243 NR Description: putative gag-pol polyprotein [Oryza sativa]
  misc_feature (1)..(376): Homolog of NCBI NO: 34896852 NR Description: putative ankyrin [Oryza sativa]
  misc_feature (10)..(376): Homolog of NCBI NO: 27542768 NR Description: ankyrin-like protein-like protein [Sorghum
  misc_feature (293)..(376): Homolog of NCBI NO: 15229331 NR Description: ankyrin-like protein
  misc_feature (1)..(298): Homolog of NCBI NO: 15229331 NR Description: ankyrin-like protein
  misc_feature (12)..(376): Homolog of NCBI NO: 27542766 NR Description: ankyrin-like protein-like protein [Sorghum
MASSPCDIALKAALGGQLRLLKRMAKKVDLRRAKDDKGQTALHFAAAKGCLDSCKFLVEESGLDVDSATKTDVTPMFYAAFGGNVEVMRYLLDRGADPSTADDRGSVSLHNAAEEGHCEAVRLLLLKGVHVDPMDHRGTPLHLAVAKDHVEVVKVLLEHGANPNRVANHVFSPLMMAVCGKALKCMKLLIEAGADVNVHGYSGPTPLTEAVDDGLMDFVMILLEAGADANIPNQHGAVPIELAAARGQRELVEILFPKTKPIPSQPVWSVNGIMNTARSPRIKHQDASSVEQRIADLKSRGKEAFGKEDYITAMYFYGLVMDIDPLDATMFANRSLCWLRMREGDRALEDARQCIMMRPHWSKAWYREGKALSFMKTRS

SEQ ID NO: 66673 - protein, 356 aa, Triticum aestivum
  peptide (1)..(356): Ceres Seq. ID no. 12779836
  misc_feature (306)..(338): Pfam Name: TPR Domain Pfam Description: TPR Domain
  misc_feature (1)..(286): Homolog of NCBI NO: 34329680 NR Description: unknown [Nicotiana benthamiana]
  misc_feature (1)..(277): Homolog of NCBI NO: 24745936 NR Description: ankyrin-like protein [Solanum tuberosum]
  misc_feature (1)..(353): Homolog of NCBI NO: 13435247 NR Description: putative ankyrin [Oryza sativa]
  misc_feature (262)..(353): Homolog of NCBI NO: 13435243 NR Description: putative gag-pol polyprotein [Oryza sativa]
  misc_feature (1)..(296): Homolog of NCBI NO: 13435243 NR Description: putative gag-pol polyprotein [Oryza sativa]
  misc_feature (1)..(353): Homolog of NCBI NO: 34896852 NR Description: putative ankyrin [Oryza sativa]
  misc_feature (1)..(353): Homolog of NCBI NO: 27542768 NR Description: ankyrin-like protein-like protein [Sorghum
  misc_feature (270)..(353): Homolog of NCBI NO: 15229331 NR Description: ankyrin-like protein
  misc_feature (1)..(275): Homolog of NCBI NO: 15229331 NR Description: ankyrin-like protein
  misc_feature (1)..(353): Homolog of NCBI NO: 27542766 NR Description: ankyrin-like protein-like protein [Sorghum
MAKKVDLRRAKDDKGQTALHFAAAKGCLDSCKFLVEESGLDVDSATKTDVTPMFYAAFGGNVEVMRYLLDRGADPSTADDRGSVSLHNAAEEGHCEAVRLLLLKGVHVDPMDHRGTPLHLAVAKDHVEVVKVLLEHGANPNRVANHVFSPLMMAVCGKALKCMKLLIEAGADVNVHGYSGPTPLTEAVDDGLMDFVMILLEAGADANIPNQHGAVPIELAAARGQRELVEILFPKTKPIPSQPVWSVNGIMNTARSPRIKHQDASSVEQRIADLKSRGKEAFGKEDYITAMYFYGLVMDIDPLDATMFANRSLCWLRMREGDRALEDARQCIMMRPHWSKAWYREGKALSFMKTRS

SEQ ID NO: 66674 - DNA, 1435 bp, Triticum aestivum
  misc_feature (1)..(1435): Ceres Seq. ID no. 13658847
gtgcccgccccgacctcaaactcccgtcgccacccgctctcctcccctctcccctcccctcccctcccctcgcgccggccacgatcgaggcatggcgacgatgacgaccacgaccaccacgacgaagacggcgctgcgccaccgcgggtgctgcgggcacgcgccggcgccggcggaggacggcggcgacctggtggcgctgtcgagcgcggcggcggaggggctcgggaaagaggccgccaggtgggccggcgggctgccgcggctgaagcggttcgaggagctgccggactacctccgcgacaacgagttcatccgcggcggctaccgctgcgagtggtccgtccgcgacgcgctccgcagcgtcttcgcctggcacaacgagacgctcaacgtctggacccatctggggggcttcttcctgttcctggggctcgccgtcgccggccagacggagtggcggccggccggagcagccgcggcgccggggttcatgacgatggtgatgacgtccgccaacgcgtcgtcgttggcgaccaacaacagttcgagcacggcgatccagagcgcgctggcgtcgggcatcggcggcgcggggcacgcggtggcgcggtggccgcggacggtgttcgtgttgggggccatgacgtgcctgtcggtgagcgctgcggcgcacctgctggcaagccactcgcgccgcttcaaccggctcttctggcagctcgactacgccggcatcgccgtcatgatcgtcgcctccttcttcccgccggtctactacaccttcctcggcagccccgtcgcacagctcgcctacctctccgccatcacgctgctcggcgtgctcgtcgtggcggcgctcctggtgccggcccgctcgtcgccgcggctgcggcacctccgcgccggcctgttcgtgtccatggggctctcgggcgtcgtgccggcgctgcacgcgctctggctcaactggggccacccggagtgctacctggcgctgtcgctggagctggccatggggctcgtgtacgccacgggcgccggcttctacgtcgcgcgcgtgccggagcggtggcgcccgggcatgttcgactgcgtcggccacagccaccagatcttccacgtgctggtgctcgtcggcgccgtcacgcactacgccgccaccgccatcctcatcggctggcgcgacgccctggccgcggccgcgtcggcgctcttgtgacgccgcgcgtaggatgcataggcgtagggtgtgccattgattcgttgattcgtgtaactagcttagatgattctttgaacgtgtatcagatcaagtttgtgctcctggctttcttactgtcggtctgcactctgtgtttctgtaatgttgaatggcgtacagcggctgaggtgcaaaaggaaaagggacgagcactgcaacttttttacttgc

SEQ ID NO: 66675 - protein, 478 aa, Triticum aestivum
  peptide (1)..(478): Ceres Seq. ID no. 13658848
  misc_feature (45)..(132): Pfam Name: Cupin Pfam Description: Cupin
  misc_feature (26)..(162): Homolog of NCBI NO: 29788817 NR Description: hypothetical protein [Oryza sativa (japonica
VPAPTSNSRRHPLSSPLPSPPLPSRRPRSRHGDDDDHDHHDEDGAAPPRVLRARAGAGGGRRRPGGAVERGGGGARERGRQVGRRAAAAEAVRGAAGLPPRQRVHPRRLPLRVVRPRRAPQRLRLAQRDAQRLDPSGGLLPVPGARRRRPDGVAAGRSSRGAGVHDDGDDVRQRVVVGDQQQFEHGDPERAGVGHRRRGARGGAVAADGVRVGGHDVPVGERCGAPAGKPLAPLQPALLAARLRRHRRHDRRLLLPAGLLHLPRQPRRTARLPLRHHAARRARRGGAPGAGPLVAAAAAPPRRPVRVHGALGRRAGAARALAQLGPPGVLPGAVAGAGHGARVRHGRRLLRRARAGAVAPGHVRLRRPQPPDLPRAGARRRRHALRRHRHPHRLARRPGRGRVGALVTPRVGCIGVGCAIDSLIRVTSLDDSLNVYQIKFVLLAFLLSVCTLCFCNVEWRTAAEVQKEKGRALQLFYL

SEQ ID NO: 66676 - protein, 406 aa, Triticum aestivum
  peptide (1)..(406): Ceres Seq. ID no. 13658849
  misc_feature (123)..(388): Pfam Name: Uncharacterised protein family (Hly-III / UPF0073) Pfam Description: Uncharacterised protein family (Hly-III /
  misc_feature (202)..(396): Homolog of NCBI NO: 15235657 NR Description: expressed protein [Arabidopsis thaliana]
  misc_feature (88)..(134): Homolog of NCBI NO: 25309925 NR Description: hypothetical protein At2g24150 [imported] -
  misc_feature (221)..(397): Homolog of NCBI NO: 25309925 NR Description: hypothetical protein At2g24150 [imported] -
  misc_feature (49)..(148): Homolog of NCBI NO: 15241302 NR Description: expressed protein [Arabidopsis thaliana]
  misc_feature (202)..(396): Homolog of NCBI NO: 15241302 NR Description: expressed protein [Arabidopsis thaliana]
  misc_feature (68)..(397): Homolog of NCBI NO: 25407688 NR Description: hypothetical protein AT4g30850 [imported] -
  misc_feature (68)..(402): Homolog of NCBI NO: 18377749 NR Description: unknown protein [Arabidopsis thaliana]
  misc_feature (68)..(402): Homolog of NCBI NO: 30688829 NR Description: expressed protein [Arabidopsis thaliana]
  misc_feature (88)..(397): Homolog of NCBI NO: 18400468 NR Description: expressed protein [Arabidopsis thaliana]
  misc_feature (88)..(397): Homolog of NCBI NO: 13272399 NR Description: hypothetical protein [Arabidopsis thaliana]
CPPRPQTPVATRSPPLSPPLPSPRAGHDRGMATMTTTTTTTKTALRHRGCCGHAPAPAEDGGDLVALSSAAAEGLGKEAARWAGGLPRLKRFEELPDYLRDNEFIRGGYRCEWSVRDALRSVFAWHNETLNVWTHLGGFFLFLGLAVAGQTEWRPAGAAAAPGFMTMVMTSANASSLATNNSSSTAIQSALASGIGGAGHAVARWPRTVFVLGAMTCLSVSAAAHLLASHSRRFNRLFWQLDYAGIAVMIVASFFPPVYYTFLGSPVAQLAYLSAITLLGVLVVAALLVPARSSPRLRHLRAGLFVSMGLSGVVPALHALWLNWGHPECYLALSLELAMGLVYATGAGFYVARVPERWRPGMFDCVGHSHQIFHVLVLVGAVTHYAATAILIGWRDALAAAASALL

SEQ ID NO: 66677 - protein, 376 aa, Triticum aestivum
  peptide (1)..(376): Ceres Seq. ID no. 13658850
  misc_feature (93)..(358): Pfam Name: Uncharacterised protein family (Hly-III / UPF0073) Pfam Description: Uncharacterised protein family (Hly-III /
  misc_feature (172)..(366): Homolog of NCBI NO: 15235657 NR Description: expressed protein [Arabidopsis thaliana]
  misc_feature (58)..(104): Homolog of NCBI NO: 25309925 NR Description: hypothetical protein At2g24150 [imported] -
  misc_feature (191)..(367): Homolog of NCBI NO: 25309925 NR Description: hypothetical protein At2g24150 [imported] -
  misc_feature (19)..(118): Homolog of NCBI NO: 15241302 NR Description: expressed protein [Arabidopsis thaliana]
  misc_feature (172)..(366): Homolog of NCBI NO: 15241302 NR Description: expressed protein [Arabidopsis thaliana]
  misc_feature (38)..(367): Homolog of NCBI NO: 25407688 NR Description: hypothetical protein AT4g30850 [imported] -
  misc_feature (38)..(372): Homolog of NCBI NO: 18377749 NR Description: unknown protein [Arabidopsis thaliana]
  misc_feature (38)..(372): Homolog of NCBI NO: 30688829 NR Description: expressed protein [Arabidopsis thaliana]
  misc_feature (58)..(367): Homolog of NCBI NO: 18400468 NR Description: expressed protein [Arabidopsis thaliana]
  misc_feature (58)..(367): Homolog of NCBI NO: 13272399 NR Description: hypothetical protein [Arabidopsis thaliana]
MATMTTTTTTTKTALRHRGCCGHAPAPAEDGGDLVALSSAAAEGLGKEAARWAGGLPRLKRFEELPDYLRDNEFIRGGYRCEWSVRDALRSVFAWHNETLNVWTHLGGFFLFLGLAVAGQTEWRPAGAAAAPGFMTMVMTSANASSLATNNSSSTAIQSALASGIGGAGHAVARWPRTVFVLGAMTCLSVSAAAHLLASHSRRFNRLFWQLDYAGIAVMIVASFFPPVYYTFLGSPVAQLAYLSAITLLGVLVVAALLVPARSSPRLRHLRAGLFVSMGLSGVVPALHALWLNWGHPECYLALSLELAMGLVYATGAGFYVARVPERWRPGMFDCVGHSHQIFHVLVLVGAVTHYAATAILIGWRDALAAAASALL

SEQ ID NO: 66678 - DNA, 1877 bp, Triticum aestivum
  misc_feature (1)..(1877): Ceres Seq. ID no. 13663328
cccactgtaggtgggcagtagtacttggtcatgtgccaccgtctcgtgcccctttgcatcttccaagctctctctgggctggagactctcacgcgtttgcttcaagcattgacccgagcataaatcttccagccacttgttcctggcctcttcttgatttctttctatcccctgcctgtcagtgtagtgctcagatttggtcatcatgaagccatgaacagagctggcgcctctggtgcaggatcctgacgacctgcgtctctgaagggggagaagggcttcttttctcagatcttcttgaagacttgtgaaaaatgaagccgcctttggaaaggaacccatccaggaagcgccattcatggtggtgggatagtcacattagccccaagaactcaaaatggcttgcagaaaacctcgaagaaatggataagcaagtgaaggaaatggtgcagcttattgaggaagatggcgactcctttgcaaagaaagctcaaatgtattatcagaggcgcccagtcctcgttacccatgtcgagaacttctaccggatgtaccgcgctttagctgagcgctacgacaatgttaccggtgaactgcgcaagaacatcccttcaaggatgcagtcccaaggatctttatccggttctgagttcggttcagagctgcaaaggtcgcccacaccatctcctgagccccagaagtcctggacaagggagcagagccctagagccgccggtttcaatttctttctgagtaacaagagcaatgactcaccgtcctcaaggaaggagcctgggtcagcttcacagtcagaatctgacatgaagtctgaagatggtgaggatgatggcattacctacacattgcaccagagagttctcgagctcgaggatgatctcaatgcggcaaaccggaagctgcttgacgcaaacgaaaagctcgaggttttcgaggagaggatcctgaggtgccattgcgattataaggaaaatggaaatggcgccgatcatgctaccaaaattagagacattgatggagagttcgtgtcaactaaggagaagctacaatcttcacaagtggagatcaacaatcttgaaaggaggctcgaagacgctgcaattttgtcagaagagcactccaggctgctggaacaaaacaagggactggaagctgaaattgtgagtctgaaggaagagatgacttcagctagacggcgtttcaacgacaaaatatccgagagtgatgccgagatcagccagtacaggcaagagcttgccaccgcgtccgagaagctgttgcaggagaagtccaccaacagcacagaggtaggaaagctgcaagaaatgaaccggatcaccagtctcaagctggagaaagtttctgaagagaagtctctagtggaggaccaggtgaaggagctggaggaggcgaacgccgaagccgaaaggcagaggcaggagctcgtccatgccgccgaaatgctgtcggaggacaagttcagacatgaagctgagatcctgacgatgcagcagagcatcgaggacctgaagccgaaacttgagagcatcgcaagagagaaatcgctgctgaaactctggttcgcggatctggagcgcgtcgtggagcgaggaaggagcgttgtcattcccccggaataacccggtttcgtctggaaattcagtagctagaatttagcaaactagcagtgctatctctttgtttttttggcctgagatgtaacatcatacggaactgtgaaaccctaccgtggacatcagcttttccttttcttggattatttcttgcactgtgaggtgatgggtggtggtcgtggtgtatgaaacatttgcactgaatgcatttcctttggcmcttct

SEQ ID NO: 66679 - protein, 447 aa, Triticum aestivum
  peptide (1)..(447): Ceres Seq. ID no. 15220219
  misc_feature (190)..(437): Pfam Name: Myosin tail Pfam Description: Myosin tail
  misc_feature (12)..(426): Homolog of NCBI NO: 37534452 NR Description: putative centromere protein
  misc_feature (8)..(438): Homolog of NCBI NO: 15218702 NR Description: expressed protein [Arabidopsis thaliana]
  misc_feature (2)..(422): Homolog of NCBI NO: 28416683 NR Description: At2g30500 [Arabidopsis thaliana]
  misc_feature (2)..(422): Homolog of NCBI NO: 15224515 NR Description: expressed protein [Arabidopsis thaliana]
  misc_feature (1)..(422): Homolog of NCBI NO: 8777333 NR Description: contains similarity to unknown
  misc_feature (1)..(422): Homolog of NCBI NO: 30697046 NR Description: contains similarity to unknown protein
  misc_feature (1)..(422): Homolog of NCBI NO: 30697043 NR Description: contains similarity to unknown protein
  misc_feature (11)..(433): Homolog of NCBI NO: 22002966 NR Description: putative CENP-E like kinetochore protein
  misc_feature (5)..(442): Homolog of NCBI NO: 34896156 NR Description: P0701D05.33 [Oryza sativa (japonica
  misc_feature (1)..(442): Homolog of NCBI NO: 34896152 NR Description: P0701D05.31 [Oryza sativa (japonica
MKPPLERNPSRKRHSWWWDSHISPKNSKWLAENLEEMDKQVKEMVQLIEEDGDSFAKKAQMYYQRRPVLVTHVENFYRMYRALAERYDNVTGELRKNIPSRMQSQGSLSGSEFGSELQRSPTPSPEPQKSWTREQSPRAAGFNFFLSNKSNDSPSSRKEPGSASQSESDMKSEDGEDDGITYTLHQRVLELEDDLNAANRKLLDANEKLEVFEERILRCHCDYKENGNGADHATKIRDIDGEFVSTKEKLQSSQVEINNLERRLEDAAILSEEHSRLLEQNKGLEAEIVSLKEEMTSARRRFNDKISESDAEISQYRQELATASEKLLQEKSTNSTEVGKLQEMNRITSLKLEKVSEEKSLVEDQVKELEEANAEAERQRQELVHAAEMLSEDKFRHEAEILTMQQSIEDLKPKLESIAREKSLLKLWFADLERVVERGRSVVIPPE

SEQ ID NO: 66680 - protein, 411 aa, Triticum aestivum
  peptide (1)..(411): Ceres Seq. ID no. 15220220
  misc_feature (154)..(401): Pfam Name: Myosin tail Pfam Description: Myosin tail
  misc_feature (1)..(390): Homolog of NCBI NO: 37534452 NR Description: putative centromere protein
  misc_feature (1)..(402): Homolog of NCBI NO: 15218702 NR Description: expressed protein [Arabidopsis thaliana]
  misc_feature (1)..(386): Homolog of NCBI NO: 28416683 NR Description: At2g30500 [Arabidopsis thaliana]
  misc_feature (1)..(386): Homolog of NCBI NO: 15224515 NR Description: expressed protein [Arabidopsis thaliana]
  misc_feature (1)..(386): Homolog of NCBI NO: 8777333 NR Description: contains similarity to unknown
  misc_feature (1)..(386): Homolog of NCBI NO: 30697046 NR Description: contains similarity to unknown protein
  misc_feature (1)..(386): Homolog of NCBI NO: 30697043 NR Description: contains similarity to unknown protein
  misc_feature (1)..(397): Homolog of NCBI NO: 22002966 NR Description: putative CENP-E like kinetochore protein
  misc_feature (1)..(406): Homolog of NCBI NO: 34896156 NR Description: P0701D05.33 [Oryza sativa (japonica
  misc_feature (1)..(406): Homolog of NCBI NO: 34896152 NR Description: P0701D05.31 [Oryza sativa (japonica
MDKQVKEMVQLIEEDGDSFAKKAQMYYQRRPVLVTHVENFYRMYRALAERYDNVTGELRKNIPSRMQSQGSLSGSEFGSELQRSPTPSPEPQKSWTREQSPRAAGFNFFLSNKSNDSPSSRKEPGSASQSESDMKSEDGEDDGITYTLHQRVLELEDDLNAANRKLLDANEKLEVFEERILRCHCDYKENGNGADHATKIRDIDGEFVSTKEKLQSSQVEINNLERRLEDAAILSEEHSRLLEQNKGLEAEIVSLKEEMTSARRRFNDKISESDAEISQYRQELATASEKLLQEKSTNSTEVGKLQEMNRITSLKLEKVSEEKSLVEDQVKELEEANAEAERQRQELVHAAEMLSEDKFRHEAEILTMQQSIEDLKPKLESIAREKSLLKLWFADLERVVERGRSVVIPPE

SEQ ID NO: 66681 - protein, 404 aa, Triticum aestivum
  peptide (1)..(404): Ceres Seq. ID no. 15220221
  misc_feature (147)..(394): Pfam Name: Myosin tail Pfam Description: Myosin tail
  misc_feature (1)..(383): Homolog of NCBI NO: 37534452 NR Description: putative centromere protein
  misc_feature (1)..(395): Homolog of NCBI NO: 15218702 NR Description: expressed protein [Arabidopsis thaliana]
  misc_feature (1)..(379): Homolog of NCBI NO: 28416683 NR Description: At2g30500 [Arabidopsis thaliana]
  misc_feature (1)..(379): Homolog of NCBI NO: 15224515 NR Description: expressed protein [Arabidopsis thaliana]
  misc_feature (1)..(379): Homolog of NCBI NO: 8777333 NR Description: contains similarity to unknown
  misc_feature (1)..(379): Homolog of NCBI NO: 30697046 NR Description: contains similarity to unknown protein
  misc_feature (1)..(379): Homolog of NCBI NO: 30697043 NR Description: contains similarity to unknown protein
  misc_feature (1)..(390): Homolog of NCBI NO: 22002966 NR Description: putative CENP-E like kinetochore protein
  misc_feature (1)..(399): Homolog of NCBI NO: 34896156 NR Description: P0701D05.33 [Oryza sativa (japonica
  misc_feature (1)..(399): Homolog of NCBI NO: 34896152 NR Description: P0701D05.31 [Oryza sativa (japonica
MVQLIEEDGDSFAKKAQMYYQRRPVLVTHVENFYRMYRALAERYDNVTGELRKNIPSRMQSQGSLSGSEFGSELQRSPTPSPEPQKSWTREQSPRAAGFNFFLSNKSNDSPSSRKEPGSASQSESDMKSEDGEDDGITYTLHQRVLELEDDLNAANRKLLDANEKLEVFEERILRCHCDYKENGNGADHATKIRDIDGEFVSTKEKLQSSQVEINNLERRLEDAAILSEEHSRLLEQNKGLEAEIVSLKEEMTSARRRFNDKISESDAEISQYRQELATASEKLLQEKSTNSTEVGKLQEMNRITSLKLEKVSEEKSLVEDQVKELEEANAEAERQRQELVHAAEMLSEDKFRHEAEILTMQQSIEDLKPKLESIAREKSLLKLWFADLERVVERGRSVVIPPE

SEQ ID NO: 66682 - DNA, 846 bp, Triticum aestivum
  misc_feature (1)..(846): Ceres Seq. ID no. 13658113
gagacttcatcggggaaatggaggaggaggagataaatctggccggcgccggcggaggggaggtgaagcaggaggtgggggaggaggaggagatcgagttcgagccgacggaggacgagctggtgctgcacttcctgcggccgcagctgcgcgggttcgcgccgcgcgtggcgggcgcggtggtggaggcggacccgtgcgcgtcgcccccctgggagctgctggcgcggcacggcctgctgcggcgcgggcacggctacttcttcgcggcgcggcggcgcgggaaggtgcggcgcaccccggagggcggcggcggcgcgtggatgcacagcggcaacaaggaggaccgccggtccgtgacggagctgggcgtggtggcgcgctggaccatgacgcggtactgcttctacctccgcggcggcgacggggcgcagcaggggcggcggagcaccgggtgggtgatgtccgagtacgagatcacggacccgcggtgctaccgccgcgccgacgacggcgaggaggaccagtactgggtgctctgccacgtccgccgcagcatcagggagaacgtcaagccgcgctcccgcaggcggtagcgggtcagtattactcagcaggctgccgcgcctcggctcggtcgccggccggcgcaagcccgtgtcagttcgtcctcgtcgttcgtcgctaagtcgccatgtgtgtgatctgatctgccatgtccgtctgtcggtgcgcggcacactgtctgtatttaagcagaatttggtcccttggattttgctggcttttgccagagtgtactgctctgccgtttgcaagtctaaaaatatgtcaaattttttcccc

SEQ ID NO: 66683 - protein, 228 aa, Triticum aestivum
  peptide (1)..(228): Ceres Seq. ID no. 13658114
  misc_feature (4)..(211): Homolog of NCBI NO: 38636722 NR Description: hypothetical protein [Oryza sativa (japonica
  misc_feature (2)..(127): Homolog of NCBI NO: 19071647 NR Description: hypothetical protein [Oryza sativa (japonica
  misc_feature (4)..(146): Homolog of NCBI NO: 22960558 NR Description: hypothetical protein [Rhodobacter sphaeroides]
  misc_feature (4)..(135): Homolog of NCBI NO: 27378597 NR Description: blr3486 [Bradyrhizobium japonicum]
  misc_feature (15)..(190): Homolog of NCBI NO: 37535678 NR Description: hypothetical protein [Oryza sativa (japonica
  misc_feature (5)..(114): Homolog of NCBI NO: 929566 NR Description: fibrillarin [Drosophila melanogaster]
  misc_feature (6)..(98): Homolog of NCBI NO: 7511785 NR Description: fibroin - Chinese oak silkmoth
  misc_feature (7)..(127): Homolog of NCBI NO: 32407921 NR Description: predicted protein [Neurospora crassa]
  misc_feature (8)..(84): Homolog of NCBI NO: 15077406 NR Description: fibroin [Antheraea yamamai]
RLHRGNGGGGDKSGRRRRRGGEAGGGGGGGDRVRADGGRAGAALPAAAAARVRAARGGRGGGGGPVRVAPLGAAGAARPAAARARLLLRGAAAREGAAHPGGRRRRVDAQRQQGGPPVRDGAGRGGALDHDAVLLLPPRRRRGAAGAAEHRVGDVRVRDHGPAVLPPRRRRRGGPVLGALPRPPQHQGERQAALPQAVAGQYYSAGCRASARSPAGASPCQFVLVVRR

SEQ ID NO: 66684 - protein, 197 aa, Triticum aestivum
  peptide (1)..(197): Ceres Seq. ID no. 13658115
  misc_feature (31)..(160): Pfam Name: No apical meristem (NAM) protein Pfam Description: No apical meristem (NAM) protein
  misc_feature (31)..(162): Homolog of NCBI NO: 34900712 NR Description: hypothetical protein~predicted by FGENESH etc.
  misc_feature (31)..(162): Homolog of NCBI NO: 28411932 NR Description: OSJNBa0027N13.16 [Oryza sativa (japonica
  misc_feature (31)..(162): Homolog of NCBI NO: 28411934 NR Description: OSJNBa0027N13.18 [Oryza sativa (japonica
  misc_feature (32)..(162): Homolog of NCBI NO: 38637203 NR Description: hypothetical protein [Oryza sativa (japonica
  misc_feature (31)..(162): Homolog of NCBI NO: 34393893 NR Description: hypothetical protein [Oryza sativa (japonica
  misc_feature (31)..(162): Homolog of NCBI NO: 34394072 NR Description: hypothetical protein [Oryza sativa (japonica
  misc_feature (14)..(162): Homolog of NCBI NO: 34394541 NR Description: hypothetical protein [Oryza sativa (japonica
  misc_feature (31)..(162): Homolog of NCBI NO: 34393886 NR Description: hypothetical protein [Oryza sativa (japonica
  misc_feature (35)..(197): Homolog of NCBI NO: 34914866 NR Description: P0416G11.18 [Oryza sativa (japonica
  misc_feature (31)..(197): Homolog of NCBI NO: 34906602 NR Description: hypothetical protein [Oryza sativa (japonica
DFIGEMEEEEINLAGAGGGEVKQEVGEEEEIEFEPTEDELVLHFLRPQLRGFAPRVAGAVVEADPCASPPWELLARHGLLRRGHGYFFAARRRGKVRRTPEGGGGAWMHSGNKEDRRSVTELGVVARWTMTRYCFYLRGGDGAQQGRRSTGWVMSEYEITDPRCYRRADDGEEDQYWVLCHVRRSIRENVKPRSRRR

SEQ ID NO: 66685 - protein, 192 aa, Triticum aestivum
  peptide (1)..(192): Ceres Seq. ID no. 13658116
  misc_feature (26)..(155): Pfam Name: No apical meristem (NAM) protein Pfam Description: No apical meristem (NAM) protein
  misc_feature (26)..(157): Homolog of NCBI NO: 34900712 NR Description: hypothetical protein~predicted by FGENESH etc.
  misc_feature (26)..(157): Homolog of NCBI NO: 28411932 NR Description: OSJNBa0027N13.16 [Oryza sativa (japonica
  misc_feature (26)..(157): Homolog of NCBI NO: 28411934 NR Description: OSJNBa0027N13.18 [Oryza sativa (japonica
  misc_feature (27)..(157): Homolog of NCBI NO: 38637203 NR Description: hypothetical protein [Oryza sativa (japonica
  misc_feature (26)..(157): Homolog of NCBI NO: 34393893 NR Description: hypothetical protein [Oryza sativa (japonica
  misc_feature (26)..(157): Homolog of NCBI NO: 34394072 NR Description: hypothetical protein [Oryza sativa (japonica
  misc_feature (9)..(157): Homolog of NCBI NO: 34394541 NR Description: hypothetical protein [Oryza sativa (japonica
  misc_feature (26)..(157): Homolog of NCBI NO: 34393886 NR Description: hypothetical protein [Oryza sativa (japonica
  misc_feature (30)..(192): Homolog of NCBI NO: 34914866 NR Description: P0416G11.18 [Oryza sativa (japonica
  misc_feature (26)..(192): Homolog of NCBI NO: 34906602 NR Description: hypothetical protein [Oryza sativa (japonica
MEEEEINLAGAGGGEVKQEVGEEEEIEFEPTEDELVLHFLRPQLRGFAPRVAGAVVEADPCASPPWELLARHGLLRRGHGYFFAARRRGKVRRTPEGGGGAWMHSGNKEDRRSVTELGVVARWTMTRYCFYLRGGDGAQQGRRSTGWVMSEYEITDPRCYRRADDGEEDQYWVLCHVRRSIRENVKPRSRRR

SEQ ID NO: 66686 - DNA, 389 bp, Triticum aestivum
  misc_feature (1)..(389): Ceres Seq. ID no. 12620877
gttttaaccgcacgctgctcaatccaatccaatcagtcccttgcttggatccatccatcccctccccaccaaataccgtcgatctctattcacctctcccaaagtcttcgtctggtcttctccacctcgacgcagacatggccgccgccgccgcgycggatctggagagcaaggccaaggaggccttcgtcgacgacgacttcgagctggccgccgagctctacacccaggccattgaggcggggccggccaccgcggaactctacgccgaccgagcccaggcgcacatcaagctgggcagttacactgaggctgtagctgatgccaacaaagcaattgaacttgatccttcgatgcataaagcataccttcggaagggctctgcttgc

SEQ ID NO: 66687 - protein, 129 aa, Triticum aestivum
  peptide (1)..(129): Ceres Seq. ID no. 13658637
  misc_feature (85)..(118): Pfam Name: TPR Domain Pfam Description: TPR Domain
  misc_feature (70)..(128): Homolog of NCBI NO: 22212722 NR Description: SGT1-like protein [Nicotiana benthamiana]
  misc_feature (51)..(128): Homolog of NCBI NO: 40974915 NR Description: SGT1-like protein [Brassica oleracea]
  misc_feature (51)..(128): Homolog of NCBI NO: 15237122 NR Description: putative protein
  misc_feature (51)..(128): Homolog of NCBI NO: 40974917 NR Description: SGT1-like protein [Brassica oleracea]
  misc_feature (51)..(128): Homolog of NCBI NO: 17017308 NR Description: SGT1a [Arabidopsis thaliana]
  misc_feature (51)..(128): Homolog of NCBI NO: 15236528 NR Description: phosphatase like protein
  misc_feature (51)..(128): Homolog of NCBI NO: 29468339 NR Description: SGT1 [Nicotiana benthamiana]
  misc_feature (46)..(128): Homolog of NCBI NO: 34912836 NR Description: Sgt1 [Oryza sativa (japonica cultivar-group)]
  misc_feature (46)..(128): Homolog of NCBI NO: 6581058 NR Description: Sgt1 [Oryza sativa]
  misc_feature (46)..(128): Homolog of NCBI NO: 17017306 NR Description: SGT1 [Hordeum vulgare]
  misc_feature (52)..(52): Xaa is any aa, unknown or other
FNRTLLNPIQSVPCLDPSIPSPPNTVDLYSPLPKSSSGLLHLDADMAAAAAXDLESKAKEAFVDDDFELAAELYTQAIEAGPATAELYADRAQAHIKLGSYTEAVADANKAIELDPSMHKAYLRKGSAC

SEQ ID NO: 66688 - protein, 105 aa, Triticum aestivum
  peptide (1)..(105): Ceres Seq. ID no. 13658638
  misc_feature (52)..(52): Xaa is any aa, unknown or other
VLTARCSIQSNQSLAWIHPSPPHQIPSISIHLSQSLRLVFSTSTQTWPPPPXRIWRARPRRPSSTTTSSWPPSSTPRPLRRGRPPRNSTPTEPRRTSSWAVTLRL

SEQ ID NO: 66689 - protein, 84 aa, Triticum aestivum
  peptide (1)..(84): Ceres Seq. ID no. 13658639
  misc_feature (40)..(73): Pfam Name: TPR Domain Pfam Description: TPR Domain
  misc_feature (25)..(83): Homolog of NCBI NO: 22212722 NR Description: SGT1-like protein [Nicotiana benthamiana]
  misc_feature (6)..(83): Homolog of NCBI NO: 40974915 NR Description: SGT1-like protein [Brassica oleracea]
  misc_feature (6)..(83): Homolog of NCBI NO: 15237122 NR Description: putative protein
  misc_feature (6)..(83): Homolog of NCBI NO: 40974917 NR Description: SGT1-like protein [Brassica oleracea]
  misc_feature (6)..(83): Homolog of NCBI NO: 17017308 NR Description: SGT1a [Arabidopsis thaliana]
  misc_feature (6)..(83): Homolog of NCBI NO: 15236528 NR Description: phosphatase like protein
  misc_feature (6)..(83): Homolog of NCBI NO: 29468339 NR Description: SGT1 [Nicotiana benthamiana]
  misc_feature (1)..(83): Homolog of NCBI NO: 34912836 NR Description: Sgt1 [Oryza sativa (japonica cultivar-group)]
  misc_feature (1)..(83): Homolog of NCBI NO: 6581058 NR Description: Sgt1 [Oryza sativa]
  misc_feature (1)..(83): Homolog of NCBI NO: 17017306 NR Description: SGT1 [Hordeum vulgare]
  misc_feature (7)..(7): Xaa is any aa, unknown or other
MAAAAAXDLESKAKEAFVDDDFELAAELYTQAIEAGPATAELYADRAQAHIKLGSYTEAVADANKAIELDPSMHKAYLRKGSAC

SEQ ID NO: 66690 - DNA, 2432 bp, Triticum aestivum
  misc_feature (1)..(2432): Ceres Seq. ID no. 14302351
ctctctcttcttcctcttcctctccccttcaccggcctcctccttcctccgcttcctcctcacgcccccaccccacccgctacctcgaaagcccgaaccctaaacccacgcagaagcggcggcggcgcggcctccgcctgtcgcatgcccgctgcctcctagcagcctgggccgccggcgatcgccggagtcggggagggcggcgagctcccgtgcgtcggagagagatgggggcgggcgggaagggctggccggagacggcgagccgcggggtgaggacggcctggttcatggtggtcatggtggcgtcgctgctcgtcgcgtcggcgcccgtcgtggtggccgccggcgacgtggccgtcacgctctggctcgaggcgcgcctcggctgcccgcgctgccgcggcctccgggaccacctccgggggtacgccttccggagctcgctcgtggacataccgctcctctccgtccttcgctccttcgccatcacctgcgtatacctcgtgtgtgatacttctggtctctctcacggcccgtaccttggaaccacaaccttctgttccttggcttcgctgctcatcttgctcatgaaggcctgcgtttacagtccagctcaggacattgggcctgagctctcgccgtcattggcggaccacaggctaaatatgaagaagctatggggaatgcctgcgcttttcctgtcatccttgatctttgctctcggccattttgttgtcgcttacagaacgagctgcagggctcgacgaaagctgctcatccatcgcattgaccctgaatcgattctggcttacaagaatgcctttcctggatgctacaaggttcctcggtcgcccactccgcacagtgcgaaactttattcaaggagcgagagcgagacaaagagaaaaactcttgtgcacgatgacagggatattccaatcagttttcttgctgatagtgatagcatgttcactgcttgccaggggatcactgtacactacaaaatgtctgatccatcaagttgcatacctccagctcctgaattgtttccagaaactaatcatgatgctgtttcgtcaagcatttctcctagaagacagaggcatgagagcccaccaacagcttcctcgagtacccgtcgtcttttgcataggagctttagtcatcagtaccaccaaacatcgttatatgcaccattgttggtagaaccgctgacctctccaacggtgtcagatggcatcccctttctcagtctcgacgacgacagcttacaggtgtgttcgagacctatgggctttgatctcgaggctggagagcacgggaaatttgctgttgttttggtccatgggtttggagggggagtatttgcatggagacatgttagtaatttgcttgctcgacaagtgggttgcactgtgctggcctttgatcgccctggatgggggttaacatctcgacctcgcagaaaggactgggaagacaagaatttgccaaacccgtacgagcttgagtcacaggttgatcttctgatttcattttgcttagacatgggcttgggctcggtcattttagttggtcatgatgatggcggcttgctggcactgaggaccgcagaaaagttacgtgcttctggagattctaggaaggttgaagtgaagggagttgttcttataggcgtaagcttatcaagagaagtgattcctgcatttgctcgtatactcctgcatactcctctgaggaaaaagcacatggtgcgcccacttctacgtactgaaatcactcaggtgatcaatcgacgagcatggtttgatgctaccaagttgacaacagatgttcttaatctttacaaggctccactatatgtcgagggctgggacgaagcactccatgaagtaggccgtctttcattttccaccgtcctatcatcaaaaagagcaacggaactactaagatcggtggaagacctccctgttttggtggtagcaggctctgaggatgctcttgtttctctgaagtcagcacaaactatggcttcagaacttgtaaattctaggctagtaactatatcaggatgtggtcatctgccacacgaagaatgtgccaatgcattgctctcagctctttctccgttcatctcaaaattggtatcatcagatgattcattgcaaagattgtagcatacacctgtccatcttcccttttgaattttgctctcttctgtgccctctacattgagtagatgacctctagctgttgcgagttggtgtgagcccatgttagttgcaaagtagtggagcctgacccaaaatctcaagggtcctagagctcccctaatttattttttggtcatatgtatttctgttcctgatctgttcaattgagcaagttgaatctgtacagcccatgcctgcagtgttccagttcacgtc

SEQ ID NO: 66691 - protein, 725 aa, Triticum aestivum
  peptide (1)..(725): Ceres Seq. ID no. 14302352
  misc_feature (471)..(710): Pfam Name: alpha/beta hydrolase fold Pfam Description: alpha/beta hydrolase fold
  misc_feature (442)..(535): Homolog of NCBI NO: 6630546 NR Description: putative alpha/beta hydrolase [Arabidopsis
  misc_feature (552)..(712): Homolog of NCBI NO: 6630546 NR Description: putative alpha/beta hydrolase [Arabidopsis
  misc_feature (89)..(268): Homolog of NCBI NO: 30694336 NR Description: expressed protein [Arabidopsis thaliana]
  misc_feature (89)..(281): Homolog of NCBI NO: 30694339 NR Description: expressed protein [Arabidopsis thaliana]
  misc_feature (73)..(281): Homolog of NCBI NO: 30688139 NR Description: expressed protein [Arabidopsis thaliana]
  misc_feature (188)..(716): Homolog of NCBI NO: 22330208 NR Description: hydrolase, alpha/beta fold family [Arabidopsis
  misc_feature (95)..(716): Homolog of NCBI NO: 25405595 NR Description: unknown protein, 18223-15857 [imported] -
  misc_feature (80)..(720): Homolog of NCBI NO: 15220097 NR Description: hydrolase, alpha/beta fold family [Arabidopsis
  misc_feature (81)..(720): Homolog of NCBI NO: 15218212 NR Description: hydrolase, alpha/beta fold family [Arabidopsis
  misc_feature (97)..(725): Homolog of NCBI NO: 34911750 NR Description: P0038D11.18 [Oryza sativa (japonica
LSSSSSSPLHRPPPSSASSSRPHPTRYLESPNPKPTQKRRRRGLRLSHARCLLAAWAAGDRRSRGGRRAPVRRREMGAGGKGWPETASRGVRTAWFMVVMVASLLVASAPVVVAAGDVAVTLWLEARLGCPRCRGLRDHLRGYAFRSSLVDIPLLSVLRSFAITCVYLVCDTSGLSHGPYLGTTTFCSLASLLILLMKACVYSPAQDIGPELSPSLADHRLNMKKLWGMPALFLSSLIFALGHFVVAYRTSCRARRKLLIHRIDPESILAYKNAFPGCYKVPRSPTPHSAKLYSRSESETKRKTLVHDDRDIPISFLADSDSMFTACQGITVHYKMSDPSSCIPPAPELFPETNHDAVSSSISPRRQRHESPPTASSSTRRLLHRSFSHQYHQTSLYAPLLVEPLTSPTVSDGIPFLSLDDDSLQVCSRPMGFDLEAGEHGKFAVVLVHGFGGGVFAWRHVSNLLARQVGCTVLAFDRPGWGLTSRPRRKDWEDKNLPNPYELESQVDLLISFCLDMGLGSVILVGHDDGGLLALRTAEKLRASGDSRKVEVKGVVLIGVSLSREVIPAFARILLHTPLRKKHMVRPLLRTEITQVINRRAWFDATKLTTDVLNLYKAPLYVEGWDEALHEVGRLSFSTVLSSKRATELLRSVEDLPVLVVAGSEDALVSLKSAQTMASELVNSRLVTISGCGHLPHEECANALLSALSPFISKLVSSDDSLQRL

SEQ ID NO: 66692 - protein, 650 aa, Triticum aestivum
  peptide (1)..(650): Ceres Seq. ID no. 14302353
  misc_feature (396)..(635): Pfam Name: alpha/beta hydrolase fold Pfam Description: alpha/beta hydrolase fold
  misc_feature (367)..(460): Homolog of NCBI NO: 6630546 NR Description: putative alpha/beta hydrolase [Arabidopsis
  misc_feature (477)..(637): Homolog of NCBI NO: 6630546 NR Description: putative alpha/beta hydrolase [Arabidopsis
  misc_feature (14)..(193): Homolog of NCBI NO: 30694336 NR Description: expressed protein [Arabidopsis thaliana]
  misc_feature (14)..(206): Homolog of NCBI NO: 30694339 NR Description: expressed protein [Arabidopsis thaliana]
  misc_feature (1)..(206): Homolog of NCBI NO: 30688139 NR Description: expressed protein [Arabidopsis thaliana]
  misc_feature (113)..(641): Homolog of NCBI NO: 22330208 NR Description: hydrolase, alpha/beta fold family [Arabidopsis
  misc_feature (20)..(641): Homolog of NCBI NO: 25405595 NR Description: unknown protein, 18223-15857 [imported] -
  misc_feature (5)..(645): Homolog of NCBI NO: 15220097 NR Description: hydrolase, alpha/beta fold family [Arabidopsis
  misc_feature (6)..(645): Homolog of NCBI NO: 15218212 NR Description: hydrolase, alpha/beta fold family [Arabidopsis
  misc_feature (22)..(650): Homolog of NCBI NO: 34911750 NR Description: P0038D11.18 [Oryza sativa (japonica
MGAGGKGWPETASRGVRTAWFMVVMVASLLVASAPVVVAAGDVAVTLWLEARLGCPRCRGLRDHLRGYAFRSSLVDIPLLSVLRSFAITCVYLVCDTSGLSHGPYLGTTTFCSLASLLILLMKACVYSPAQDIGPELSPSLADHRLNMKKLWGMPALFLSSLIFALGHFVVAYRTSCRARRKLLIHRIDPESILAYKNAFPGCYKVPRSPTPHSAKLYSRSESETKRKTLVHDDRDIPISFLADSDSMFTACQGITVHYKMSDPSSCIPPAPELFPETNHDAVSSSISPRRQRHESPPTASSSTRRLLHRSFSHQYHQTSLYAPLLVEPLTSPTVSDGIPFLSLDDDSLQVCSRPMGFDLEAGEHGKFAVVLVHGFGGGVFAWRHVSNLLARQVGCTVLAFDRPGWGLTSRPRRKDWEDKNLPNPYELESQVDLLISFCLDMGLGSVILVGHDDGGLLALRTAEKLRASGDSRKVEVKGVVLIGVSLSREVIPAFARILLHTPLRKKHMVRPLLRTEITQVINRRAWFDATKLTTDVLNLYKAPLYVEGWDEALHEVGRLSFSTVLSSKRATELLRSVEDLPVLVVAGSEDALVSLKSAQTMASELVNSRLVTISGCGHLPHEECANALLSALSPFISKLVSSDDSLQRL

SEQ ID NO: 66693 - protein, 629 aa, Triticum aestivum
  peptide (1)..(629): Ceres Seq. ID no. 14302354
  misc_feature (375)..(614): Pfam Name: alpha/beta hydrolase fold Pfam Description: alpha/beta hydrolase fold
  misc_feature (346)..(439): Homolog of NCBI NO: 6630546 NR Description: putative alpha/beta hydrolase [Arabidopsis
  misc_feature (456)..(616): Homolog of NCBI NO: 6630546 NR Description: putative alpha/beta hydrolase [Arabidopsis
  misc_feature (1)..(172): Homolog of NCBI NO: 30694336 NR Description: expressed protein [Arabidopsis thaliana]
  misc_feature (1)..(185): Homolog of NCBI NO: 30694339 NR Description: expressed protein [Arabidopsis thaliana]
  misc_feature (1)..(185): Homolog of NCBI NO: 30688139 NR Description: expressed protein [Arabidopsis thaliana]
  misc_feature (92)..(620): Homolog of NCBI NO: 22330208 NR Description: hydrolase, alpha/beta fold family [Arabidopsis
  misc_feature (1)..(620): Homolog of NCBI NO: 25405595 NR Description: unknown protein, 18223-15857 [imported] -
  misc_feature (1)..(624): Homolog of NCBI NO: 15220097 NR Description: hydrolase, alpha/beta fold family [Arabidopsis
  misc_feature (1)..(624): Homolog of NCBI NO: 15218212 NR Description: hydrolase, alpha/beta fold family [Arabidopsis
  misc_feature (1)..(629): Homolog of NCBI NO: 34911750 NR Description: P0038D11.18 [Oryza sativa (japonica
MVVMVASLLVASAPVVVAAGDVAVTLWLEARLGCPRCRGLRDHLRGYAFRSSLVDIPLLSVLRSFAITCVYLVCDTSGLSHGPYLGTTTFCSLASLLILLMKACVYSPAQDIGPELSPSLADHRLNMKKLWGMPALFLSSLIFALGHFVVAYRTSCRARRKLLIHRIDPESILAYKNAFPGCYKVPRSPTPHSAKLYSRSESETKRKTLVHDDRDIPISFLADSDSMFTACQGITVHYKMSDPSSCIPPAPELFPETNHDAVSSSISPRRQRHESPPTASSSTRRLLHRSFSHQYHQTSLYAPLLVEPLTSPTVSDGIPFLSLDDDSLQVCSRPMGFDLEAGEHGKFAVVLVHGFGGGVFAWRHVSNLLARQVGCTVLAFDRPGWGLTSRPRRKDWEDKNLPNPYELESQVDLLISFCLDMGLGSVILVGHDDGGLLALRTAEKLRASGDSRKVEVKGVVLIGVSLSREVIPAFARILLHTPLRKKHMVRPLLRTEITQVINRRAWFDATKLTTDVLNLYKAPLYVEGWDEALHEVGRLSFSTVLSSKRATELLRSVEDLPVLVVAGSEDALVSLKSAQTMASELVNSRLVTISGCGHLPHEECANALLSALSPFISKLVSSDDSLQRL

SEQ ID NO: 66694 - DNA, 480 bp, Triticum aestivum
  misc_feature (1)..(480): Ceres Seq. ID no. 13658214
gctgggtctgcccaccttcttcctccgcctccgtccgtttctcttctctacgaacgcagcacgcaacgtggtcgagactacacaacctagaaaaaatcccatcgatctgctccagctttgcggcgcggcagccagccagccagcacccatggcggtggaagggataaccgagggcgtgaggggcctcaaggtggaggacggcgagggggcggcgggcgccgcggccgacgcgccggccgccgccgccgccggcggggaggggcagaggcggggcgccagcgccagcagcaaccgcatccaggtgtccaacacgamsaagcccctcttcttctacgtcaacctcgccaagaggtatatgcagcagcacggcgacntcgagctctcggcgctcgggatggccattgcgactgttgtaactgtggcggagattctgaagaacaacggcctcgctgttgagaagaagattagaacatccacggt

SEQ ID NO: 66695 - protein, 159 aa, Triticum aestivum
  peptide (1)..(159): Ceres Seq. ID no. 13658215
  misc_feature (97)..(158): Homolog of NCBI NO: 15229322 NR Description: expressed protein [Arabidopsis thaliana]
  misc_feature (97)..(158): Homolog of NCBI NO: 18397011 NR Description: expressed protein [Arabidopsis thaliana]
  misc_feature (93)..(158): Homolog of NCBI NO: 18403464 NR Description: expressed protein [Arabidopsis thaliana]
  misc_feature (50)..(158): Homolog of NCBI NO: 34910240 NR Description: OSJNBa0089K24.4 [Oryza sativa (japonica
  misc_feature (105)..(105): Xaa is any aa, unknown or other
  misc_feature (125)..(125): Xaa is any aa, unknown or other
LGLPTFFLRLRPFLFSTNAARNVVETTQPRKNPIDLLQLCGAAASQPAPMAVEGITEGVRGLKVEDGEGAAGAAADAPAAAAAGGEGQRRGASASSNRIQVSNTXKPLFFYVNLAKRYMQQHGDXELSALGMAIATVVTVAEILKNNGLAVEKKIRTST

SEQ ID NO: 66696 - protein, 110 aa, Triticum aestivum
  peptide (1)..(110): Ceres Seq. ID no. 13658216
  misc_feature (48)..(109): Homolog of NCBI NO: 15229322 NR Description: expressed protein [Arabidopsis thaliana]
  misc_feature (48)..(109): Homolog of NCBI NO: 18397011 NR Description: expressed protein [Arabidopsis thaliana]
  misc_feature (44)..(109): Homolog of NCBI NO: 18403464 NR Description: expressed protein [Arabidopsis thaliana]
  misc_feature (1)..(109): Homolog of NCBI NO: 34910240 NR Description: OSJNBa0089K24.4 [Oryza sativa (japonica
  misc_feature (56)..(56): Xaa is any aa, unknown or other
  misc_feature (76)..(76): Xaa is any aa, unknown or other
MAVEGITEGVRGLKVEDGEGAAGAAADAPAAAAAGGEGQRRGASASSNRIQVSNTXKPLFFYVNLAKRYMQQHGDXELSALGMAIATVVTVAEILKNNGLAVEKKIRTST

SEQ ID NO: 66697 - DNA, 761 bp, Triticum aestivum
  misc_feature (1)..(761): Ceres Seq. ID no. 13658261
aggctgataatagcttaaagtttgtagcaaggtaccaggttcatgaaacaaacatcaattccccatcgcataggcatctctaataaagtagtagtaataacaatagataatccccaatgaaatgccaaaatagcagcactcctcggtggatcaaggctcggggtcagcaccttactcctccgtggggggcggagcagtcaccgacgaaccctccgactcttcaccgctcggttccgcgggggtctctggagctgcggcggcggcagcggcgcgcgacttggcgagctcgaggaggcggcggctgacctccttggagtaggcctggaggacctcgatcccgtcctccagggaggcgggggaggcggcggcggactccgaggcggcggcgaaggcctcggcctcgacggcggctgcggcgacctcggcctcgggctcggggatggcgccgtagcgctgagagaggacgctgggcgcggacagggtctgcacgacgcgccggacaacggcgtcgcgtgtgcgctgcgacggcggccagatgctgagcgacgggagcagcgtctccgacgaggacttctctgccgacgccgaaggggcagctgcgtcggcgaaggattcagtgggcgcggggtggatgtcctcagcgccggcgttgggggcgtcctcggccatggcgtggagagcggagagcaagggggagggggcggagagggagagatctgtggcgtggagtgggaggagagcgaggtgtgcttctgtgggtt

SEQ ID NO: 66698 - protein, 75 aa, Triticum aestivum
  peptide (1)..(75): Ceres Seq. ID no. 13658262
MLSDGSSVSDEDFSADAEGAAASAKDSVGAGWMSSAPALGASSAMAWRAESKGEGAERERSVAWSGRRARCASVG

SEQ ID NO: 66699 - protein, 62 aa, Triticum aestivum
  peptide (1)..(62): Ceres Seq. ID no. 13658263
  misc_feature (6)..(62): Homolog of NCBI NO: 19923466 NR Description: splicing coactivator subunit SRm300
  misc_feature (6)..(62): Homolog of NCBI NO: 6649242 NR Description: splicing coactivator subunit SRm300 [Homo sapiens]
  misc_feature (6)..(62): Homolog of NCBI NO: 5821143 NR Description: RNA binding protein [Homo sapiens]
  misc_feature (6)..(62): Homolog of NCBI NO: 5821145 NR Description: RNA binding protein [Homo sapiens]
MKCQNSSTPRWIKARGQHLTPPWGAEQSPTNPPTLHRSVPRGSLELRRRQRRATWRARGGGG

SEQ ID NO: 66700 - protein, 43 aa, Triticum aestivum
  peptide (1)..(43): Ceres Seq. ID no. 13658264
MSSAPALGASSAMAWRAESKGEGAERERSVAWSGRRARCASVG

SEQ ID NO: 66701 - DNA, 922 bp, Triticum aestivum
  misc_feature (1)..(922): Ceres Seq. ID no. 13658282
atcgcctcgccacacaaactccagaagaaaatggcggcttgtgctgcgcccccttgcgtccgcatctcctgctccacaccttcaccgaccgctctccgccggccacgccgccggcgcgtcgcctccgcccgatgctccctcgccgcagcccccggtctccgggcgccgccggagctcgtcgactccatcctctccaaggtgaaggggactgaccggggcgtgctgctgccggaggaaggccaccaggaggtcgccgacgtcgcgcagcagctggggaagtactgcatcgacgagcccgtcaagtccccgcttatattcggagactgggacgtggtgtattgctcggtgccgacatcccccggagggatttaccgcacccctctcggacggctggtgttcaagaccgacgacatggttcaggtggtggaagcccccgacatcgtcaggaacaaggtctccttctccatctttggcctcgatggcgcggtgtctctgacaggcaagctgaatgtattggacagtaagtggattcaggtcatatttgagcccccggaactgaaggtaggctccttgggtttccgatatggtggcgagagtgaggtcaagctggaaatcacctatgtcgatgagaagatcaggctcgggaaaggatcccgaggctcgcttttcgtcttcctgagacaagattagaagggtaggttgcatattttgcatgtgctcgacgccacaagggatatcggccatatgggcgtctacgcaactgcttgcagatgtaaattcagagataaagcccacaaagtagttttttatgatattcatttctaccttaagcagattgccttgttgtgagcgaaaatgtttgcggtactcatgctgatcttgtttctggatgtacttatgataatactggggtttgagcagg

SEQ ID NO: 66702 - protein, 229 aa, Triticum aestivum
  peptide (1)..(229): Ceres Seq. ID no. 13658283
  misc_feature (58)..(225): Pfam Name: PAP_fibrillin Pfam Description: PAP_fibrillin
  misc_feature (29)..(228): Homolog of NCBI NO: 15241221 NR Description: expressed protein [Arabidopsis thaliana]
  misc_feature (11)..(228): Homolog of NCBI NO: 38346556 NR Description: OSJNBa0035M09.17 [Oryza sativa (japonica
IASPHKLQKKMAACAAPPCVRISCSTPSPTALRRPRRRRVASARCSLAAAPGLRAPPELVDSILSKVKGTDRGVLLPEEGHQEVADVAQQLGKYCIDEPVKSPLIFGDWDVVYCSVPTSPGGIYRTPLGRLVFKTDDMVQVVEAPDIVRNKVSFSIFGLDGAVSLTGKLNVLDSKWIQVIFEPPELKVGSLGFRYGGESEVKLEITYVDEKIRLGKGSRGSLFVFLRQD

SEQ ID NO: 66703 - protein, 219 aa, Triticum aestivum
  peptide (1)..(219): Ceres Seq. ID no. 13658284
  misc_feature (48)..(215): Pfam Name: PAP_fibrillin Pfam Description: PAP_fibrillin
  misc_feature (19)..(218): Homolog of NCBI NO: 15241221 NR Description: expressed protein [Arabidopsis thaliana]
  misc_feature (1)..(218): Homolog of NCBI NO: 38346556 NR Description: OSJNBa0035M09.17 [Oryza sativa (japonica
MAACAAPPCVRISCSTPSPTALRRPRRRRVASARCSLAAAPGLRAPPELVDSILSKVKGTDRGVLLPEEGHQEVADVAQQLGKYCIDEPVKSPLIFGDWDVVYCSVPTSPGGIYRTPLGRLVFKTDDMVQVVEAPDIVRNKVSFSIFGLDGAVSLTGKLNVLDSKWIQVIFEPPELKVGSLGFRYGGESEVKLEITYVDEKIRLGKGSRGSLFVFLRQD

SEQ ID NO: 66704 - DNA, 1741 bp, Triticum aestivum
  misc_feature (1)..(1741): Ceres Seq. ID no. 13663345
aaaagaaacaaacacgcacacgccacctcacgccgccccgcgcacactgcggccgcgccactcgcacacggccaccacctgctaggctgcgagcggcgagcggcgagatcggcggcgggcggaggaatggtggcgccggcgggaggagggtcgccgtcgcggtggccgtcggatgaggagcttgacattgtgcggaagaatgtggtcgagattagtggaagagatgcgagagaggttagggtggttgcttgcccctacaggatttgtcctttgggggcccacattgatcatcagggcggaatagtgactgctatgacaatcaattatggagtacttcttggctttgtgccctctgatgatgctgaggttgtactccagtctggtcaatttaaaggcattactcgattcagagttgatgacttgcaaaagcctattgagaaccgaggaaacataacttgggaaagctatgcaagaggtgcagtttatgccctgcaaaatagtggatatgatctcagaaagggtataataggttatatttctggagtgaatggacttgacagttcagggcttagttcgtctgcagctgttggcatcgcctatttgctggctttagaaaatgtaaatgatctggttttatcaccagttgataacattcagttggacaagtccattgaaaatagatatttgggtcttgaaaatggcattctagatccatcagccattttattgtctcgatatggctacctcaccttcatggattgcaagactgcctcaccttcctacgtctacttctcggaactaagtaaaagccagcaacctcaaggtcggccgccattcaagattttgttggcattttcaggtttgcaacataacctacccaagtcgcgtgggtataatatgcgagtcttcgagtgcaaagaggctgcacgtgctcttttatgtgcgtcaggctctgaagatgcaccaatactccgtaaagttgatccaggtgtatatgaggcccaaaagtgtatattagatgaaaatcttgccaagagagctgagcactatttctctgaaatgaagcgagttgttaagggaagagaggcatgggctcgtggagacctacaagaattgggacagctgatctctgcatctggccgcagctccatagtcaactacgaatgcgggagcaaagagatgatacagctgtacgagatcctcctgaaggcgccaggggtcctcggcgcgcggttcagcggcgctggcttcagaggctgctgcctcgccatcgtcgaaagcgaccgtgccgaggaggcggcggcgtacgttggcgccgagtacgagaggtcccagccagagctggtgagcaagatccccgcggatcgtcgcgtgctggtctgcgagcccggggactccgcgcaggtcatcttgcagtcatgagcgtcctgttagtcgggactttgtgaaggtgagaacacgtgcaaaattcgtacgtcctcgtccatctggaactccaccccctaaattctactccctccgtcccataatataggacgttttttgacactagtgtagcgtcaaaaaacatcttacattatgggatgaagggagtagacatttagtccaagataagactagcgttgttgtgtatgaactgtactcagtcgagctcccagatagctcatctgtgtatgtgtggaaccatttgattcattcatttccacgtaagcaataatcagtaatgcaaaggttctctttc

SEQ ID NO: 66705 - protein, 473 aa, Triticum aestivum
  peptide (1)..(473): Ceres Seq. ID no. 13663346
  misc_feature (85)..(442): Homolog of NCBI NO: 15903710 NR Description: Galactokinase [Streptococcus pneumoniae R6]
  misc_feature (361)..(471): Homolog of NCBI NO: 12322772 NR Description: putative galactokinase, 5' partial; 97-568
  misc_feature (62)..(441): Homolog of NCBI NO: 23003215 NR Description: hypothetical protein [Lactobacillus gasseri]
  misc_feature (85)..(441): Homolog of NCBI NO: 120900 NR Description: Galactokinase (Galactose kinase)
  misc_feature (304)..(471): Homolog of NCBI NO: 6630560 NR Description: galactokinase-like protein [Arabidopsis thaliana]
  misc_feature (55)..(144): Homolog of NCBI NO: 6630560 NR Description: galactokinase-like protein [Arabidopsis thaliana]
  misc_feature (144)..(324): Homolog of NCBI NO: 6630560 NR Description: galactokinase-like protein [Arabidopsis thaliana]
  misc_feature (55)..(471): Homolog of NCBI NO: 22330971 NR Description: GHMP kinase family [Arabidopsis thaliana]
  misc_feature (336)..(452): Homolog of NCBI NO: 38567889 NR Description: OSJNBa0060N03.9 [Oryza sativa (japonica
  misc_feature (43)..(269): Homolog of NCBI NO: 38567889 NR Description: OSJNBa0060N03.9 [Oryza sativa (japonica
KRNKHAHATSRRPAHTAAAPLAHGHHLLGCERRAARSAAGGGMVAPAGGGSPSRWPSDEELDIVRKNVVEISGRDAREVRVVACPYRICPLGAHIDHQGGIVTAMTINYGVLLGFVPSDDAEVVLQSGQFKGITRFRVDDLQKPIENRGNITWESYARGAVYALQNSGYDLRKGIIGYISGVNGLDSSGLSSSAAVGIAYLLALENVNDLVLSPVDNIQLDKSIENRYLGLENGILDPSAILLSRYGYLTFMDCKTASPSYVYFSELSKSQQPQGRPPFKILLAFSGLQHNLPKSRGYNMRVFECKEAARALLCASGSEDAPILRKVDPGVYEAQKCILDENLAKRAEHYFSEMKRVVKGREAWARGDLQELGQLISASGRSSIVNYECGSKEMIQLYEILLKAPGVLGARFSGAGFRGCCLAIVESDRAEEAAAYVGAEYERSQPELVSKIPADRRVLVCEPGDSAQVILQS

SEQ ID NO: 66706 - protein, 431 aa, Triticum aestivum
  peptide (1)..(431): Ceres Seq. ID no. 13663347
  misc_feature (43)..(400): Homolog of NCBI NO: 15903710 NR Description: Galactokinase [Streptococcus pneumoniae R6]
  misc_feature (319)..(429): Homolog of NCBI NO: 12322772 NR Description: putative galactokinase, 5' partial; 97-568
  misc_feature (20)..(399): Homolog of NCBI NO: 23003215 NR Description: hypothetical protein [Lactobacillus gasseri]
  misc_feature (43)..(399): Homolog of NCBI NO: 120900 NR Description: Galactokinase (Galactose kinase)
  misc_feature (262)..(429): Homolog of NCBI NO: 6630560 NR Description: galactokinase-like protein [Arabidopsis thaliana]
  misc_feature (13)..(102): Homolog of NCBI NO: 6630560 NR Description: galactokinase-like protein [Arabidopsis thaliana]
  misc_feature (102)..(282): Homolog of NCBI NO: 6630560 NR Description: galactokinase-like protein [Arabidopsis thaliana]
  misc_feature (13)..(429): Homolog of NCBI NO: 22330971 NR Description: GHMP kinase family [Arabidopsis thaliana]
  misc_feature (294)..(410): Homolog of NCBI NO: 38567889 NR Description: OSJNBa0060N03.9 [Oryza sativa (japonica
  misc_feature (1)..(227): Homolog of NCBI NO: 38567889 NR Description: OSJNBa0060N03.9 [Oryza sativa (japonica
MVAPAGGGSPSRWPSDEELDIVRKNVVEISGRDAREVRVVACPYRICPLGAHIDHQGGIVTAMTINYGVLLGFVPSDDAEVVLQSGQFKGITRFRVDDLQKPIENRGNITWESYARGAVYALQNSGYDLRKGIIGYISGVNGLDSSGLSSSAAVGIAYLLALENVNDLVLSPVDNIQLDKSIENRYLGLENGILDPSAILLSRYGYLTFMDCKTASPSYVYFSELSKSQQPQGRPPFKILLAFSGLQHNLPKSRGYNMRVFECKEAARALLCASGSEDAPILRKVDPGVYEAQKCILDENLAKRAEHYFSEMKRVVKGREAWARGDLQELGQLISASGRSSIVNYECGSKEMIQLYEILLKAPGVLGARFSGAGFRGCCLAIVESDRAEEAAAYVGAEYERSQPELVSKIPADRRVLVCEPGDSAQVILQS

SEQ ID NO: 66707 - protein, 369 aa, Triticum aestivum
  peptide (1)..(369): Ceres Seq. ID no. 13663348
  misc_feature (1)..(338): Homolog of NCBI NO: 15903710 NR Description: Galactokinase [Streptococcus pneumoniae R6]
  misc_feature (257)..(367): Homolog of NCBI NO: 12322772 NR Description: putative galactokinase, 5' partial; 97-568
  misc_feature (1)..(337): Homolog of NCBI NO: 23003215 NR Description: hypothetical protein [Lactobacillus gasseri]
  misc_feature (1)..(337): Homolog of NCBI NO: 120900 NR Description: Galactokinase (Galactose kinase)
  misc_feature (200)..(367): Homolog of NCBI NO: 6630560 NR Description: galactokinase-like protein [Arabidopsis thaliana]
  misc_feature (1)..(40): Homolog of NCBI NO: 6630560 NR Description: galactokinase-like protein [Arabidopsis thaliana]
  misc_feature (40)..(220): Homolog of NCBI NO: 6630560 NR Description: galactokinase-like protein [Arabidopsis thaliana]
  misc_feature (1)..(367): Homolog of NCBI NO: 22330971 NR Description: GHMP kinase family [Arabidopsis thaliana]
  misc_feature (232)..(348): Homolog of NCBI NO: 38567889 NR Description: OSJNBa0060N03.9 [Oryza sativa (japonica
  misc_feature (1)..(165): Homolog of NCBI NO: 38567889 NR Description: OSJNBa0060N03.9 [Oryza sativa (japonica
MTINYGVLLGFVPSDDAEVVLQSGQFKGITRFRVDDLQKPIENRGNITWESYARGAVYALQNSGYDLRKGIIGYISGVNGLDSSGLSSSAAVGIAYLLALENVNDLVLSPVDNIQLDKSIENRYLGLENGILDPSAILLSRYGYLTFMDCKTASPSYVYFSELSKSQQPQGRPPFKILLAFSGLQHNLPKSRGYNMRVFECKEAARALLCASGSEDAPILRKVDPGVYEAQKCILDENLAKRAEHYFSEMKRVVKGREAWARGDLQELGQLISASGRSSIVNYECGSKEMIQLYEILLKAPGVLGARFSGAGFRGCCLAIVESDRAEEAAAYVGAEYERSQPELVSKIPADRRVLVCEPGDSAQVILQS

SEQ ID NO: 66708 - DNA, 1693 bp, Triticum aestivum
  misc_feature (1)..(1693): Ceres Seq. ID no. 15169615
agatctacatcctccctccaccccgtctcgccggccgcccggccgccccccaatcgtgcgtcggacgaggccacggcgatggatctcctctcggacgcccagccccagtggctcctcgccggcgccgcgctgctgctcgccaccgtcgccttcctcagggtcctcctcggctccggcggccgcggcaagcgggcgccgccgacgatcccgggggcgcccgtcgtgggcgggctcctgcgcttcctgcggggccccatcccgctcatccgggccgagtacgcccgcctcggccccgtcttcaccgtccccatcctcacccgccggatcaccttcctcatcggccccgacgtctcggcgcacttcttcaagagcaacgagtccgacatgagccagcaggaggtctaccgcttcaacgtccccaccttcggccccggggtcgtcttcgacgtcgactaccaggtcaggcaggagcagttcaggttcttcaccgaggcgctcagggccaacaagctccgcagctacgtcgaccagatggttgccgaggccgaggagtacttctcaaagtggggagaaagcggcactgtggatctgaagtatgaactggagcacctcatcatactgactgctagccgatgcttgttgggaagggaagtgcgagaaaaattgtttgatgatgtttctgctctcttccatgatcttgacaatgggatgcagccaatcagtgtcatctttccctacctcccaatccctgcacaccgtcgccgtgaccaggcacggacacgtttggcggagatctttgccacgatcatcaagtcccgcaaggcctctggacagtccgaggaagacatgctgcagtgcttcattgattccaagtacaagaatggccgccagaccacagaaagtgaggtgactgggctacttattgcagccctgtttgctggacagcacactagctcgatcacctcaacctggactggggcctacctgcttaagttccagcagtactttgcagaggctgttgaggagcagaaggaggtcatgaagaggcatggtgacaagatcgatcacgacatattggcagagatggatgtcctctaccggtgcatcaaggaggcgctccggctccacccgccgctgatcatgctgcttcgccaatcacactctgacttcagcgtgaccacgagggaaggcaaagagtttgatatccccaagggccacatcgtcgcaacatctcctgctttcgctaacaggctcccccatatcttcaagaacccggactcgtatgaccctgaccggtttgcagctgggagggaggaggacaaggttgcgggtgccttctcgtacatctcctttgggggtggcaggcacgggtgcctgggtgagcccttcgcgtacctgcagatcaaggcgatatggacacacctcctgaggaactttgagtttgagctggtctcaccgttcccagagaacgactggaatgcgatggtcgtcggcatcaagggcgaggtgatggtcagctacaagcggcggaagcttgtcgtcgacaactagagagcgggtggtcccatagggggtgtttgcttctgtatttgttccatttaagttttttctattcgcacgccaacctgtagggtatctatcttgccattgttttagggtactttgatttgcttccagtgattatttagacgtg

SEQ ID NO: 66709 - protein, 516 aa, Triticum aestivum
  peptide (1)..(516): Ceres Seq. ID no. 15169616
  misc_feature (19)..(510): Homolog of NCBI NO: 21618866 NR Description: cytochrome P450, 51 [Mus musculus]
  misc_feature (38)..(510): Homolog of NCBI NO: 15227817 NR Description: obtusifoliol 14-alpha demethylase, putative
  misc_feature (204)..(516): Homolog of NCBI NO: 7489685 NR Description: probable obtusifoliol 14-alpha-demethylase CYP51
  misc_feature (63)..(512): Homolog of NCBI NO: 27461067 NR Description: obtusifoliol-14-demethylase [Nicotiana tabacum]
  misc_feature (38)..(512): Homolog of NCBI NO: 15221075 NR Description: obtusifoliol 14-demethylase (CYP51) [Arabidopsis
  misc_feature (38)..(512): Homolog of NCBI NO: 18000074 NR Description: obtusifoliol-14-demethylase [Nicotiana tabacum]
  misc_feature (90)..(516): Homolog of NCBI NO: 4586676 NR Description: sterol 14-demethylase [Oryza sativa (japonica
  misc_feature (27)..(516): Homolog of NCBI NO: 5921924 NR Description: Cytochrome P450 51 (CYPL1) (P450-L1A1)
  misc_feature (27)..(516): Homolog of NCBI NO: 27542762 NR Description: cytochrome P450-like protein [Sorghum bicolor]
  misc_feature (64)..(516): Homolog of NCBI NO: 6166036 NR Description: Cytochrome P450 51 (CYPL1) (P450-L1A1)
RSTSSLHPVSPAARPPPNRASDEATAMDLLSDAQPQWLLAGAALLLATVAFLRVLLGSGGRGKRAPPTIPGAPVVGGLLRFLRGPIPLIRAEYARLGPVFTVPILTRRITFLIGPDVSAHFFKSNESDMSQQEVYRFNVPTFGPGVVFDVDYQVRQEQFRFFTEALRANKLRSYVDQMVAEAEEYFSKWGESGTVDLKYELEHLIILTASRCLLGREVREKLFDDVSALFHDLDNGMQPISVIFPYLPIPAHRRRDQARTRLAEIFATIIKSRKASGQSEEDMLQCFIDSKYKNGRQTTESEVTGLLIAALFAGQHTSSITSTWTGAYLLKFQQYFAEAVEEQKEVMKRHGDKIDHDILAEMDVLYRCIKEALRLHPPLIMLLRQSHSDFSVTTREGKEFDIPKGHIVATSPAFANRLPHIFKNPDSYDPDRFAAGREEDKVAGAFSYISFGGGRHGCLGEPFAYLQIKAIWTHLLRNFEFELVSPFPENDWNAMVVGIKGEVMVSYKRRKLVVDN

SEQ ID NO: 66710 - protein, 490 aa, Triticum aestivum
  peptide (1)..(490): Ceres Seq. ID no. 15169617
  misc_feature (1)..(484): Homolog of NCBI NO: 21618866 NR Description: cytochrome P450, 51 [Mus musculus]
  misc_feature (12)..(484): Homolog of NCBI NO: 15227817 NR Description: obtusifoliol 14-alpha demethylase, putative
  misc_feature (178)..(490): Homolog of NCBI NO: 7489685 NR Description: probable obtusifoliol 14-alpha-demethylase CYP51
  misc_feature (37)..(486): Homolog of NCBI NO: 27461067 NR Description: obtusifoliol-14-demethylase [Nicotiana tabacum]
  misc_feature (12)..(486): Homolog of NCBI NO: 15221075 NR Description: obtusifoliol 14-demethylase (CYP51) [Arabidopsis
  misc_feature (12)..(486): Homolog of NCBI NO: 18000074 NR Description: obtusifoliol-14-demethylase [Nicotiana tabacum]
  misc_feature (64)..(490): Homolog of NCBI NO: 4586676 NR Description: sterol 14-demethylase [Oryza sativa (japonica
  misc_feature (1)..(490): Homolog of NCBI NO: 5921924 NR Description: Cytochrome P450 51 (CYPL1) (P450-L1A1)
  misc_feature (1)..(490): Homolog of NCBI NO: 27542762 NR Description: cytochrome P450-like protein [Sorghum bicolor]
  misc_feature (38)..(490): Homolog of NCBI NO: 6166036 NR Description: Cytochrome P450 51 (CYPL1) (P450-L1A1)
MDLLSDAQPQWLLAGAALLLATVAFLRVLLGSGGRGKRAPPTIPGAPVVGGLLRFLRGPIPLIRAEYARLGPVFTVPILTRRITFLIGPDVSAHFFKSNESDMSQQEVYRFNVPTFGPGVVFDVDYQVRQEQFRFFTEALRANKLRSYVDQMVAEAEEYFSKWGESGTVDLKYELEHLIILTASRCLLGREVREKLFDDVSALFHDLDNGMQPISVIFPYLPIPAHRRRDQARTRLAEIFATIIKSRKASGQSEEDMLQCFIDSKYKNGRQTTESEVTGLLIAALFAGQHTSSITSTWTGAYLLKFQQYFAEAVEEQKEVMKRHGDKIDHDILAEMDVLYRCIKEALRLHPPLIMLLRQSHSDFSVTTREGKEFDIPKGHIVATSPAFANRLPHIFKNPDSYDPDRFAAGREEDKVAGAFSYISFGGGRHGCLGEPFAYLQIKAIWTHLLRNFEFELVSPFPENDWNAMVVGIKGEVMVSYKRRKLVVDN

SEQ ID NO: 66711 - protein, 388 aa, Triticum aestivum
  peptide (1)..(388): Ceres Seq. ID no. 15169618
  misc_feature (1)..(382): Homolog of NCBI NO: 21618866 NR Description: cytochrome P450, 51 [Mus musculus]
  misc_feature (1)..(382): Homolog of NCBI NO: 15227817 NR Description: obtusifoliol 14-alpha demethylase, putative
  misc_feature (76)..(388): Homolog of NCBI NO: 7489685 NR Description: probable obtusifoliol 14-alpha-demethylase CYP51
  misc_feature (1)..(384): Homolog of NCBI NO: 27461067 NR Description: obtusifoliol-14-demethylase [Nicotiana tabacum]
  misc_feature (1)..(384): Homolog of NCBI NO: 15221075 NR Description: obtusifoliol 14-demethylase (CYP51) [Arabidopsis
  misc_feature (1)..(384): Homolog of NCBI NO: 18000074 NR Description: obtusifoliol-14-demethylase [Nicotiana tabacum]
  misc_feature (1)..(388): Homolog of NCBI NO: 4586676 NR Description: sterol 14-demethylase [Oryza sativa (japonica
  misc_feature (1)..(388): Homolog of NCBI NO: 5921924 NR Description: Cytochrome P450 51 (CYPL1) (P450-L1A1)
  misc_feature (1)..(388): Homolog of NCBI NO: 27542762 NR Description: cytochrome P450-like protein [Sorghum bicolor]
  misc_feature (1)..(388): Homolog of NCBI NO: 6166036 NR Description: Cytochrome P450 51 (CYPL1) (P450-L1A1)
MSQQEVYRFNVPTFGPGVVFDVDYQVRQEQFRFFTEALRANKLRSYVDQMVAEAEEYFSKWGESGTVDLKYELEHLIILTASRCLLGREVREKLFDDVSALFHDLDNGMQPISVIFPYLPIPAHRRRDQARTRLAEIFATIIKSRKASGQSEEDMLQCFIDSKYKNGRQTTESEVTGLLIAALFAGQHTSSITSTWTGAYLLKFQQYFAEAVEEQKEVMKRHGDKIDHDILAEMDVLYRCIKEALRLHPPLIMLLRQSHSDFSVTTREGKEFDIPKGHIVATSPAFANRLPHIFKNPDSYDPDRFAAGREEDKVAGAFSYISFGGGRHGCLGEPFAYLQIKAIWTHLLRNFEFELVSPFPENDWNAMVVGIKGEVMVSYKRRKLVVDN

SEQ ID NO: 66712 - DNA, 1083 bp, Triticum aestivum
  misc_feature (1)..(1083): Ceres Seq. ID no. 13659098
agcccacacccccctcgtcgctctcaccccctcccgaatcaccctgtatccctctcatcctcgtccacccatgaaaccctagcccccttctcctaatcgccactgccgccttctccctcccagatccaatcctgctcgcgtcggccacctccctccagcggagctcgacccccaccccccgccgctgctccaccctctcccatgagggtctctgaggcccgcgcgcgcacaacctccgtcccctgttgctccaatccggccagcgctccctccacctcgtctctcccgatcccaccggtcggcggtgaccttcaccctagcagtcatactccaccctagcagtcgatcccgaccatcgctgcttcaccagcctcctcatctggcatctccccgagggcggccgatgccagacaggccgtcgacgcgccggacctcaaggccggtcgtgctgctccttctgcctgcgtcccctcgaccgctgtctgcaagatctccctcctcaaggagatgcagcatcggaacatcatcaggctgcaggacgtggtgcataacgagaagagggagggcgccatggcgaagaaggagggaccttgcggccattgcggagtcacaagtgtattgttcctgtacccgagtggctacatcagggaagacccacttggagtccccaacaacctgagccctatgtgcagcaagtcgttgtcgggaggcgcctgcgctgacggtttatgggaccgaatacaacaccaaggatggaataggggtggtgaaattatggtacagaataccagaaattcttctgggtgcgaggcagtattctacccttgttggtgaagtgcgaatccatgttcgaagttttgaagcatatcgacaaagagtagcatattatgtgttgtaattgtaggcagtagtaggcatatctgagttgtaatatactataacgattgtaatagattaatgtagtattggttttggaccaatttcatttgctctttggtctgttcgaaagaatgttgtgcatgtgatttgaatacccatgaaatggaaacctgacaagtgggtcaaggttataatggttgtttg

SEQ ID NO: 66713 - protein, 108 aa, Triticum aestivum
  peptide (1)..(108): Ceres Seq. ID no. 13659099
  misc_feature (1)..(17): Homolog of NCBI NO: 231707 NR Description: CELL DIVISION CONTROL PROTEIN 2 HOMOLOG 2
  misc_feature (1)..(18): Homolog of NCBI NO: 115924 NR Description: CELL DIVISION CONTROL PROTEIN 2 HOMOLOG 1
  misc_feature (1)..(18): Homolog of NCBI NO: 2117788 NR Description: protein kinase (EC 2.7.1.37) cdc2 homolog - cowpea
  misc_feature (1)..(18): Homolog of NCBI NO: 3608177 NR Description: cdc2 [Pisum sativum]
  misc_feature (1)..(18): Homolog of NCBI NO: 24636266 NR Description: Cell division control protein 2 homolog (p34cdc2)
  misc_feature (1)..(18): Homolog of NCBI NO: 1705676 NR Description: Cell division control protein 2 homolog (p34cdc2)
  misc_feature (1)..(18): Homolog of NCBI NO: 461702 NR Description: CELL DIVISION CONTROL PROTEIN 2 HOMOLOG 2
  misc_feature (1)..(18): Homolog of NCBI NO: 2289782 NR Description: cdc2 kinase [Allium cepa]
  misc_feature (1)..(18): Homolog of NCBI NO: 22077127 NR Description: putative cyclin dependent kinase [Coffea arabica]
  misc_feature (1)..(17): Homolog of NCBI NO: 4096105 NR Description: p34cdc2 [Triticum aestivum]
MQHRNIIRLQDVVHNEKREGAMAKKEGPCGHCGVTSVLFLYPSGYIREDPLGVPNNLSPMCSKSLSGGACADGLWDRIQHQGWNRGGEIMVQNTRNSSGCEAVFYPCW

SEQ ID NO: 66714 - protein, 91 aa, Triticum aestivum
  peptide (1)..(91): Ceres Seq. ID no. 13659100
  misc_feature (1)..(43): Homolog of NCBI NO: 37538336 NR Description: KIAA1856 protein [Homo sapiens]
  misc_feature (1)..(43): Homolog of NCBI NO: 14017929 NR Description: KIAA1856 protein [Homo sapiens]
  misc_feature (1)..(13): Homolog of NCBI NO: 15230108 NR Description: protein kinase -related [Arabidopsis thaliana]
  misc_feature (1)..(33): Homolog of NCBI NO: 15230108 NR Description: protein kinase -related [Arabidopsis thaliana]
MPDRPSTRRTSRPVVLLLLPASPRPLSARSPSSRRCSIGTSSGCRTWCITRRGRAPWRRRRDLAAIAESQVYCSCTRVATSGKTHLESPTT

SEQ ID NO: 66715 - protein, 87 aa, Triticum aestivum
  peptide (1)..(87): Ceres Seq. ID no. 13659101
MAKKEGPCGHCGVTSVLFLYPSGYIREDPLGVPNNLSPMCSKSLSGGACADGLWDRIQHQGWNRGGEIMVQNTRNSSGCEAVFYPCW

SEQ ID NO: 66716 - DNA, 1563 bp, Triticum aestivum
  misc_feature (1)..(1563): Ceres Seq. ID no. 15179860
acagatttcctcccaccttccttttccctccccccctctccggccggcgaagaatctcaccgccgccgccccctcctcgccggcccgccatggcgctgtaccgccgcgcggcctccgcgatccggcggcgcggggccctgcccctgctcccggcgcgggcgatggcgtcgctcttcggccacgtcgagccggcgcccaaggaccccatcctcggcgtcaccgaggccttcctcgccgacccctcccccgacaaagtcaacgtcggcgtcggcgcctaccgggacgacaacggcaagcccgtggtgctcgactgcgtgcgcgaggcggagcgccggatcgccggcaacctcaacatggagtaccttccaatgggagggagtatgcacatgattgaggagtcactaaagctggcgtacggcgaggactccgagttcatcaaagataaaagaattgcagcggtgcaggcactttcaggaactggcgcatgccgtctcttcgctgatttccagaagcgtttcttgccggattcgcagatctacatacctacaccaacgtggtccaaccatcataatatttggagggatgctcaagtgccacagaggacattctcatattaccatccggaatcgagagggcttgactttgcaggattgatggatgatatcaagaatgctccaaatggttcgttctttttgcttcatgcatgtgcccataatcctactggagtagatcctactgaggaacaatggcgagaaatatcctatcagttcaagttgaagaatcatttcccattttttgacatggcataccaaggatttgctagcggtgatccagagagagatgccaaggcaatccgtatattccttgaagatggacaccaaattggatgtgctcagtcatatgcaaagaacatgggtctttatggccagagagcgggatgtctgagtatcctctgcgaggatgagatgcaagcagttgctgttaagagccaattgcaacagattgcgagaccaatgtacagcaacccacctgttcatggtgcgctggttgtttcaattatccttagtgatccagaattgaagaatgtatggttgggagaggtcaagggtatggctgatcgtatcattggaatgcggaaggcacttagggagaatcttgaaaagttaggttcaccttcatcatgggagcatgtcaccaatcagattggaatgttttgctacagtggaatgacaccggaacaagttgaccgcttgactagtgaataccatatctacatgacacgcaacgggagaataagcatggccggcgtaacgacgggcaacgtcgcctacttggctaacgccattcatgatgttaccaagtgaaattgaggaccatcttcagcgaatggagggagagcgttttccctttgtttgtagggctattcgctttatactctcacatgctagagaaataaataagttctaggaagtaaacctgttgcggctgtccaacaacggaaaattctacctgtatgtatggaggagcagagacgtcctgacttattttttgcgagattatcct

SEQ ID NO: 66717 - protein, 453 aa, Triticum aestivum
  peptide (1)..(453): Ceres Seq. ID no. 15179861
  misc_feature (135)..(452): Pfam Name: Aminotransferase class I and II Pfam Description: Aminotransferase class I and II
  misc_feature (56)..(453): Homolog of NCBI NO: 39585804 NR Description: Hypothetical protein CBG05011 [Caenorhabditis
  misc_feature (51)..(453): Homolog of NCBI NO: 6754036 NR Description: glutamate oxaloacetate transaminase 2,
  misc_feature (51)..(453): Homolog of NCBI NO: 27807377 NR Description: glutamic-oxaloacetic transaminase 2,
  misc_feature (51)..(453): Homolog of NCBI NO: 2690302 NR Description: aspartate aminotransferase precursor [Mus
  misc_feature (51)..(453): Homolog of NCBI NO: 6980972 NR Description: glutamate oxaloacetate transaminase 2
  misc_feature (30)..(453): Homolog of NCBI NO: 1362046 NR Description: aspartate transaminase (EC 2.6.1.1) precursor -
  misc_feature (30)..(453): Homolog of NCBI NO: 15224592 NR Description: aspartate aminotransferase, mitochondrial
  misc_feature (30)..(453): Homolog of NCBI NO: 2130067 NR Description: aspartate transaminase (EC 2.6.1.1) precursor,
  misc_feature (30)..(453): Homolog of NCBI NO: 100726 NR Description: aspartate transaminase (EC 2.6.1.1) AAT1
  misc_feature (30)..(453): Homolog of NCBI NO: 100728 NR Description: aspartate transaminase (EC 2.6.1.1) AAT3
RFPPTFLFPPPLSGRRRISPPPPPPRRPAMALYRRAASAIRRRGALPLLPARAMASLFGHVEPAPKDPILGVTEAFLADPSPDKVNVGVGAYRDDNGKPVVLDCVREAERRIAGNLNMEYLPMGGSMHMIEESLKLAYGEDSEFIKDKRIAAVQALSGTGACRLFADFQKRFLPDSQIYIPTPTWSNHHNIWRDAQVPQRTFSYYHPESRGLDFAGLMDDIKNAPNGSFFLLHACAHNPTGVDPTEEQWREISYQFKLKNHFPFFDMAYQGFASGDPERDAKAIRIFLEDGHQIGCAQSYAKNMGLYGQRAGCLSILCEDEMQAVAVKSQLQQIARPMYSNPPVHGALVVSIILSDPELKNVWLGEVKGMADRIIGMRKALRENLEKLGSPSSWEHVTNQIGMFCYSGMTPEQVDRLTSEYHIYMTRNGRISMAGVTTGNVAYLANAIHDVTK

SEQ ID NO: 66718 - protein, 424 aa, Triticum aestivum
  peptide (1)..(424): Ceres Seq. ID no. 15179862
  misc_feature (106)..(423): Pfam Name: Aminotransferase class I and II Pfam Description: Aminotransferase class I and II
  misc_feature (27)..(424): Homolog of NCBI NO: 39585804 NR Description: Hypothetical protein CBG05011 [Caenorhabditis
  misc_feature (22)..(424): Homolog of NCBI NO: 6754036 NR Description: glutamate oxaloacetate transaminase 2,
  misc_feature (22)..(424): Homolog of NCBI NO: 27807377 NR Description: glutamic-oxaloacetic transaminase 2,
  misc_feature (22)..(424): Homolog of NCBI NO: 2690302 NR Description: aspartate aminotransferase precursor [Mus
  misc_feature (22)..(424): Homolog of NCBI NO: 6980972 NR Description: glutamate oxaloacetate transaminase 2
  misc_feature (1)..(424): Homolog of NCBI NO: 1362046 NR Description: aspartate transaminase (EC 2.6.1.1) precursor -
  misc_feature (1)..(424): Homolog of NCBI NO: 15224592 NR Description: aspartate aminotransferase, mitochondrial
  misc_feature (1)..(424): Homolog of NCBI NO: 2130067 NR Description: aspartate transaminase (EC 2.6.1.1) precursor,
  misc_feature (1)..(424): Homolog of NCBI NO: 100726 NR Description: aspartate transaminase (EC 2.6.1.1) AAT1
  misc_feature (1)..(424): Homolog of NCBI NO: 100728 NR Description: aspartate transaminase (EC 2.6.1.1) AAT3
MALYRRAASAIRRRGALPLLPARAMASLFGHVEPAPKDPILGVTEAFLADPSPDKVNVGVGAYRDDNGKPVVLDCVREAERRIAGNLNMEYLPMGGSMHMIEESLKLAYGEDSEFIKDKRIAAVQALSGTGACRLFADFQKRFLPDSQIYIPTPTWSNHHNIWRDAQVPQRTFSYYHPESRGLDFAGLMDDIKNAPNGSFFLLHACAHNPTGVDPTEEQWREISYQFKLKNHFPFFDMAYQGFASGDPERDAKAIRIFLEDGHQIGCAQSYAKNMGLYGQRAGCLSILCEDEMQAVAVKSQLQQIARPMYSNPPVHGALVVSIILSDPELKNVWLGEVKGMADRIIGMRKALRENLEKLGSPSSWEHVTNQIGMFCYSGMTPEQVDRLTSEYHIYMTRNGRISMAGVTTGNVAYLANAIHDVTK

SEQ ID NO: 66719 - protein, 400 aa, Triticum aestivum
  peptide (1)..(400): Ceres Seq. ID no. 15179863
  misc_feature (82)..(399): Pfam Name: Aminotransferase class I and II Pfam Description: Aminotransferase class I and II
  misc_feature (3)..(400): Homolog of NCBI NO: 39585804 NR Description: Hypothetical protein CBG05011 [Caenorhabditis
  misc_feature (1)..(400): Homolog of NCBI NO: 27807377 NR Description: glutamic-oxaloacetic transaminase 2,
  misc_feature (1)..(400): Homolog of NCBI NO: 6754036 NR Description: glutamate oxaloacetate transaminase 2,
  misc_feature (1)..(400): Homolog of NCBI NO: 2690302 NR Description: aspartate aminotransferase precursor [Mus
  misc_feature (1)..(400): Homolog of NCBI NO: 6980972 NR Description: glutamate oxaloacetate transaminase 2
  misc_feature (1)..(400): Homolog of NCBI NO: 1362046 NR Description: aspartate transaminase (EC 2.6.1.1) precursor -
  misc_feature (1)..(400): Homolog of NCBI NO: 15224592 NR Description: aspartate aminotransferase, mitochondrial
  misc_feature (1)..(400): Homolog of NCBI NO: 2130067 NR Description: aspartate transaminase (EC 2.6.1.1) precursor,
  misc_feature (1)..(400): Homolog of NCBI NO: 100726 NR Description: aspartate transaminase (EC 2.6.1.1) AAT1
  misc_feature (1)..(400): Homolog of NCBI NO: 100728 NR Description: aspartate transaminase (EC 2.6.1.1) AAT3
MASLFGHVEPAPKDPILGVTEAFLADPSPDKVNVGVGAYRDDNGKPVVLDCVREAERRIAGNLNMEYLPMGGSMHMIEESLKLAYGEDSEFIKDKRIAAVQALSGTGACRLFADFQKRFLPDSQIYIPTPTWSNHHNIWRDAQVPQRTFSYYHPESRGLDFAGLMDDIKNAPNGSFFLLHACAHNPTGVDPTEEQWREISYQFKLKNHFPFFDMAYQGFASGDPERDAKAIRIFLEDGHQIGCAQSYAKNMGLYGQRAGCLSILCEDEMQAVAVKSQLQQIARPMYSNPPVHGALVVSIILSDPELKNVWLGEVKGMADRIIGMRKALRENLEKLGSPSSWEHVTNQIGMFCYSGMTPEQVDRLTSEYHIYMTRNGRISMAGVTTGNVAYLANAIHDVTK

SEQ ID NO: 66720 - DNA, 991 bp, Triticum aestivum
  misc_feature (1)..(991): Ceres Seq. ID no. 12620986
cctccctcccctttctcctccccctgcccccgaggaaagaaagaaagaagaacagagtccacacggcagaggccagcggcggagaagcgggatgccgatcctgtacgcggtggtggcgcggggcgcgacggtgctggcggagcacagcgcggcggcgaccaacgcgggcgccgtcgcgcgccaggtcctcgagcgcctccccggcggcggcgccgacagccacgtctcctacacccaggaccgctacgtcttccacgccaagcgcaccgacggcatcaccgccctctgcatggccgacgacgccgccggacggcgtatcccatttgctttcctcgaggatatccatggaaagtttgttaagacatatggccgtgctgcactgacagctcttgcttatgcaatgaacgacgaattctcaagggttctcagtcagcaaatggactactattcaaatgaccctagtgcagatcaaatcaacctaatgaggggcgaaatcagtcaggttaggagtgttatgattgataatattgataaagtccttgaaagaggtgaccgtttagacctattggtggacaagactacaactatgcaaggaaatacggttcgattcaaaagacaagctcgccgctacagaagcacaacttggtggagaaatgtcaaactcacggccgcgttgatactcctcctgcttgtaatagtatacatcgccctcttcttcgtgtgccacggcttcaccttgccgacttgcatcaggtgaggggggccaggggcatataaattcgcctcgtggtgtgcttgtgtccatggcttgcctgtctcccagcccaggagagcgaccgttgcagcaccagtgcaaccagtcgcattgcaaaattattttttgtgtgtagagaggaaggggagggacctgagcctgctatttattctgtaattgtgacgccttggattgtgaagactccttttggaacgtaatcgagtgccttgctcattc

SEQ ID NO: 66721 - protein, 251 aa, Triticum aestivum
  peptide (1)..(251): Ceres Seq. ID no. 12620987
  misc_feature (154)..(242): Pfam Name: Synaptobrevin Pfam Description: Synaptobrevin
  misc_feature (31)..(251): Homolog of NCBI NO: 5032137 NR Description: synaptobrevin-like 1 [Homo sapiens]
  misc_feature (31)..(251): Homolog of NCBI NO: 33468929 NR Description: synaptobrevin like 1 [Mus musculus]
  misc_feature (31)..(251): Homolog of NCBI NO: 16758296 NR Description: synaptobrevin-like 1 [Rattus norvegicus]
  misc_feature (31)..(244): Homolog of NCBI NO: 28828593 NR Description: similar to Arabidopsis thaliana (Mouse-ear
  misc_feature (31)..(249): Homolog of NCBI NO: 37531190 NR Description: putative synaptobrevin-like protein
  misc_feature (31)..(249): Homolog of NCBI NO: 15242224 NR Description: synaptobrevin-like protein; protein id:
  misc_feature (31)..(250): Homolog of NCBI NO: 15224711 NR Description: putative synaptobrevin; protein id: At2g25340.1
  misc_feature (31)..(251): Homolog of NCBI NO: 15238971 NR Description: putative protein
  misc_feature (31)..(250): Homolog of NCBI NO: 15236687 NR Description: synaptobrevin-like protein
  misc_feature (31)..(251): Homolog of NCBI NO: 34898442 NR Description: ESTs AU082579(S2069),D40238(S2069) correspond to region of the predicted gene.~Similar to Arabidopsis thaliana
LPPLSPPPAPEERKKEEQSPHGRGQRRRSGMPILYAVVARGATVLAEHSAAATNAGAVARQVLERLPGGGADSHVSYTQDRYVFHAKRTDGITALCMADDAAGRRIPFAFLEDIHGKFVKTYGRAALTALAYAMNDEFSRVLSQQMDYYSNDPSADQINLMRGEISQVRSVMIDNIDKVLERGDRLDLLVDKTTTMQGNTVRFKRQARRYRSTTWWRNVKLTAALILLLLVIVYIALFFVCHGFTLPTCIR

SEQ ID NO: 66722 - protein, 221 aa, Triticum aestivum
  peptide (1)..(221): Ceres Seq. ID no. 12620988
  misc_feature (124)..(212): Pfam Name: Synaptobrevin Pfam Description: Synaptobrevin
  misc_feature (1)..(221): Homolog of NCBI NO: 5032137 NR Description: synaptobrevin-like 1 [Homo sapiens]
  misc_feature (1)..(221): Homolog of NCBI NO: 33468929 NR Description: synaptobrevin like 1 [Mus musculus]
  misc_feature (1)..(221): Homolog of NCBI NO: 16758296 NR Description: synaptobrevin-like 1 [Rattus norvegicus]
  misc_feature (1)..(214): Homolog of NCBI NO: 28828593 NR Description: similar to Arabidopsis thaliana (Mouse-ear
  misc_feature (1)..(219): Homolog of NCBI NO: 37531190 NR Description: putative synaptobrevin-like protein
  misc_feature (1)..(219): Homolog of NCBI NO: 15242224 NR Description: synaptobrevin-like protein; protein id:
  misc_feature (1)..(220): Homolog of NCBI NO: 15224711 NR Description: putative synaptobrevin; protein id: At2g25340.1
  misc_feature (1)..(221): Homolog of NCBI NO: 15238971 NR Description: putative protein
  misc_feature (1)..(220): Homolog of NCBI NO: 15236687 NR Description: synaptobrevin-like protein
  misc_feature (1)..(221): Homolog of NCBI NO: 34898442 NR Description: ESTs AU082579(S2069),D40238(S2069) correspond to region of the predicted gene.~Similar to Arabidopsis thaliana
MPILYAVVARGATVLAEHSAAATNAGAVARQVLERLPGGGADSHVSYTQDRYVFHAKRTDGITALCMADDAAGRRIPFAFLEDIHGKFVKTYGRAALTALAYAMNDEFSRVLSQQMDYYSNDPSADQINLMRGEISQVRSVMIDNIDKVLERGDRLDLLVDKTTTMQGNTVRFKRQARRYRSTTWWRNVKLTAALILLLLVIVYIALFFVCHGFTLPTCIR

SEQ ID NO: 66723 - protein, 155 aa, Triticum aestivum
  peptide (1)..(155): Ceres Seq. ID no. 12620989
  misc_feature (58)..(146): Pfam Name: Synaptobrevin Pfam Description: Synaptobrevin
  misc_feature (1)..(155): Homolog of NCBI NO: 5032137 NR Description: synaptobrevin-like 1 [Homo sapiens]
  misc_feature (1)..(155): Homolog of NCBI NO: 33468929 NR Description: synaptobrevin like 1 [Mus musculus]
  misc_feature (1)..(155): Homolog of NCBI NO: 16758296 NR Description: synaptobrevin-like 1 [Rattus norvegicus]
  misc_feature (1)..(148): Homolog of NCBI NO: 28828593 NR Description: similar to Arabidopsis thaliana (Mouse-ear
  misc_feature (1)..(153): Homolog of NCBI NO: 37531190 NR Description: putative synaptobrevin-like protein
  misc_feature (1)..(153): Homolog of NCBI NO: 15242224 NR Description: synaptobrevin-like protein; protein id:
  misc_feature (1)..(154): Homolog of NCBI NO: 15224711 NR Description: putative synaptobrevin; protein id: At2g25340.1
  misc_feature (1)..(155): Homolog of NCBI NO: 15238971 NR Description: putative protein
  misc_feature (1)..(154): Homolog of NCBI NO: 15236687 NR Description: synaptobrevin-like protein
  misc_feature (1)..(155): Homolog of NCBI NO: 34898442 NR Description: ESTs AU082579(S2069),D40238(S2069) correspond to region of the predicted gene.~Similar to Arabidopsis thaliana
MADDAAGRRIPFAFLEDIHGKFVKTYGRAALTALAYAMNDEFSRVLSQQMDYYSNDPSADQINLMRGEISQVRSVMIDNIDKVLERGDRLDLLVDKTTTMQGNTVRFKRQARRYRSTTWWRNVKLTAALILLLLVIVYIALFFVCHGFTLPTCIR

SEQ ID NO: 66724 - DNA, 837 bp, Triticum aestivum
  misc_feature (1)..(837): Ceres Seq. ID no. 12621257
cattgccctccacgagccacaggttgacgctggcccggattctgttcggtggcgcctagagccgtcgggacaattctccaccaagttcctctaccgggctatcgccccctcctccgccccacctcccctcacggcggtttggcatgtccgccttcccctgaagatctgaatcttcatgtggcaatggatccgcggacggattccgtctggcgtagaggtccgcaagcgcaatggccccggtaccggcctttacccgctttgtggcgtccctgaagactcgaatcacatcttcttcacttgcttttccgcccaatttctttggggctgttttcgtgaggtggttggtggcaactggtgccacaccaatttccccgacatgttcgctgaactccaggcctcctccccgcattctcgccacattaggtggttggagattgggactcttgcttggaccctctggacgatccgcaatagatttgtgatctagcgcattccgcttcagcgtgctactgacgctctcttcaaactgtctggttacttgcagctctggcagccgcttagccgccccaggatcgggacgccatctctgccttcatcgccgacctccgctcgatggtcgtccacttatcgccgccgctccctccgccacctcccgagccggattaggggtcgggtccctccccggccccattttgtgtttattttgggcttgttgaggtgtgccctcagcaaaaccttttgtactctgtcttgtgagacttgtgtgtgtgtggtgtgaaccttcttgtgtactggtgctatgtggcggtttgctttatttataaagcagggcgaaag

SEQ ID NO: 66725 - protein, 103 aa, Triticum aestivum
  peptide (1)..(103): Ceres Seq. ID no. 12621258
  misc_feature (1)..(29): Homolog of NCBI NO: 27573364 NR Description: hypothetical protein [Oryza sativa (japonica
  misc_feature (1)..(103): Homolog of NCBI NO: 39546220 NR Description: OSJNBa0029L02.10 [Oryza sativa (japonica
  misc_feature (1)..(103): Homolog of NCBI NO: 34904884 NR Description: similar to reverse transcriptase
  misc_feature (1)..(102): Homolog of NCBI NO: 37531298 NR Description: putative retroelement [Oryza sativa (japonica
  misc_feature (1)..(103): Homolog of NCBI NO: 8096424 NR Description: Similar to Arabidopsis thaliana chromosome2 BAC
MWQWIRGRIPSGVEVRKRNGPGTGLYPLCGVPEDSNHIFFTCFSAQFLWGCFREVVGGNWCHTNFPDMFAELQASSPHSRHIRWLEIGTLAWTLWTIRNRFVI

SEQ ID NO: 66726 - protein, 83 aa, Triticum aestivum
  peptide (1)..(83): Ceres Seq. ID no. 12621259
MAPVPAFTRFVASLKTRITSSSLAFPPNFFGAVFVRWLVATGATPISPTCSLNSRPPPRILATLGGWRLGLLLGPSGRSAIDL

SEQ ID NO: 66727 - protein, 55 aa, Triticum aestivum
  peptide (1)..(55): Ceres Seq. ID no. 12621260
  misc_feature (7)..(55): Homolog of NCBI NO: 27573364 NR Description: hypothetical protein [Oryza sativa (japonica
  misc_feature (9)..(55): Homolog of NCBI NO: 39546220 NR Description: OSJNBa0029L02.10 [Oryza sativa (japonica
  misc_feature (7)..(55): Homolog of NCBI NO: 34904884 NR Description: similar to reverse transcriptase
  misc_feature (13)..(55): Homolog of NCBI NO: 37531298 NR Description: putative retroelement [Oryza sativa (japonica
  misc_feature (3)..(55): Homolog of NCBI NO: 8096424 NR Description: Similar to Arabidopsis thaliana chromosome2 BAC
IALHEPQVDAGPDSVRWRLEPSGQFSTKFLYRAIAPSSAPPPLTAVWHVRLPLKI

SEQ ID NO: 66728 - DNA, 1881 bp, Triticum aestivum
  misc_feature (1)..(1881): Ceres Seq. ID no. 15176077
accattcgaaagatccaccgaagatttttctcctcactctcctcgacctcacagctctcctctgccagcagcgcagatttatagacacaagctagcacacagcaagctcagagcacctcgctggtctaagtgatccttctcaaggatcatttggatggcctcttcctcctcctcctgtgcatcctcatttctgcggccatcgtgtcctacgcccaccacgtaatccggcggcaacgccagggctgcgctcatggccgccatgagcaagccgccctcaagctgccccctggctccatgggcctgccttacatcggcgagaccctccagctctactcccaggaccccagcgtcttcctctcctccaagcagaagcggtacggcgagatcttcaagacgcacctcctcggctgcccgtgcgtgatgctggcgagcccggaggcggcgcggttcgtgctggtgtcgcgggcaaacctgttcaagccgacgtacccgcggagcaaggagcgcctcatcggcccgtcggcgctcttcttccaccagggcgactaccacctccgtctccgcaggctcgtccagggcccgctcggccccgaggccctgcgcaagctcgtgccggacatcgaggccgccgtgcgggcaaccctcgcggcctgggcggacggcgacgtcgccagcaccttccacgccatgaagaggctctcgttcgacgtcggcatcgtgacgatcttcggcgggcggctggacgagcggcggaaggaggagctccggcggaactacgccgtcgtggagaaaggctacaactccttccccaacagcttccccgggacgctatactacaaggcgatccaggcgaggcggcggctgaacggcgtgctgagcgacatcctgcacgagaggagggagcggggcgagcccggcgacgacctgctcggctgcctcatgcggtcgcgggccggcggcgacgacggcgacgagggcgcgctgttgacggacgagcaggtcgccgacaacgtcatcggcgtgctgttcgcggcgcaggacacgacggccagcgtgctcacctggatcgtcaagtacctccacgaccggccgaagctgctggaggccgtgagggcggagcacgccgcgatccacgaggccaacgacggcgggaggcggccgctgacatgggcgcagacgaggagcatgacgctgacgcacagggtgattttggagagcctgaggatggcgagcatcatctccttcacgttcagggaggccgtggccgacgtggagtacaaagggtttcttatccccaaggggtggaaggtgatgccgctcttcaggaacatccatcacagcccggactacttccaggatccacagaagttcgacccttcgagattcaaggtggcgccgcggccgagcaccttcacgccgttcgggagcggggtgcacgcgtgccccgggaacgagctggccaagctcgagatgctggtgctcatccaccacctggtcaccggctacaggtgggaggttgttggatcgagcgacgacgtcgagtacagcccattccctgttccccagaacggcctgctcgccaggttacggcgggatgacagcgtctgcgtgggtaggaaggggtgcccgactgatgacaactacgacgacgaagacgaagtgatagtgtgattagtcaacgtagatagctagagggctcttctctccctttttgttgttattgttgttgttgttgttgtggcattcttctctaggaaaatcattagagaagaaacaacagaacgactttttaggatgacgatgatcatgtaccgtagtggttatgttgtcaatgatgtattgtcattgatacacgcataaaatgacgcttcctttttccgg

SEQ ID NO: 66729 - protein, 458 aa, Triticum aestivum
  peptide (1)..(458): Ceres Seq. ID no. 15176078
  misc_feature (1)..(429): Pfam Name: Cytochrome P450 Pfam Description: Cytochrome P450
  misc_feature (1)..(419): Homolog of NCBI NO: 9587211 NR Description: cytochrome P450 [Vigna radiata]
  misc_feature (1)..(433): Homolog of NCBI NO: 13022042 NR Description: ent-kaurenoic acid oxidase [Hordeum vulgare]
  misc_feature (1)..(419): Homolog of NCBI NO: 15239203 NR Description: cytochrome p450 90A1 [Arabidopsis thaliana]
  misc_feature (1)..(420): Homolog of NCBI NO: 30694744 NR Description: cytochrome P450 family [Arabidopsis thaliana]
  misc_feature (1)..(405): Homolog of NCBI NO: 7430728 NR Description: cytochrome P450 - Arabidopsis thaliana
  misc_feature (1)..(431): Homolog of NCBI NO: 15227033 NR Description: cytochrome p450 family [Arabidopsis thaliana]
  misc_feature (1)..(433): Homolog of NCBI NO: 30694740 NR Description: cytochrome P450 family [Arabidopsis thaliana]
  misc_feature (1)..(437): Homolog of NCBI NO: 18415271 NR Description: cytochrome P450 family [Arabidopsis thaliana]
  misc_feature (1)..(406): Homolog of NCBI NO: 9294629 NR Description: cytochrome P450 [Arabidopsis thaliana]
  misc_feature (1)..(433): Homolog of NCBI NO: 18402179 NR Description: cytochrome P450, putative [Arabidopsis thaliana]
MGLPYIGETLQLYSQDPSVFLSSKQKRYGEIFKTHLLGCPCVMLASPEAARFVLVSRANLFKPTYPRSKERLIGPSALFFHQGDYHLRLRRLVQGPLGPEALRKLVPDIEAAVRATLAAWADGDVASTFHAMKRLSFDVGIVTIFGGRLDERRKEELRRNYAVVEKGYNSFPNSFPGTLYYKAIQARRRLNGVLSDILHERRERGEPGDDLLGCLMRSRAGGDDGDEGALLTDEQVADNVIGVLFAAQDTTASVLTWIVKYLHDRPKLLEAVRAEHAAIHEANDGGRRPLTWAQTRSMTLTHRVILESLRMASIISFTFREAVADVEYKGFLIPKGWKVMPLFRNIHHSPDYFQDPQKFDPSRFKVAPRPSTFTPFGSGVHACPGNELAKLEMLVLIHHLVTGYRWEVVGSSDDVEYSPFPVPQNGLLARLRRDDSVCVGRKGCPTDDNYDDEDEVIV

SEQ ID NO: 66730 - protein, 416 aa, Triticum aestivum
  peptide (1)..(416): Ceres Seq. ID no. 15176079
  misc_feature (1)..(387): Pfam Name: Cytochrome P450 Pfam Description: Cytochrome P450
  misc_feature (1)..(377): Homolog of NCBI NO: 9587211 NR Description: cytochrome P450 [Vigna radiata]
  misc_feature (1)..(391): Homolog of NCBI NO: 13022042 NR Description: ent-kaurenoic acid oxidase [Hordeum vulgare]
  misc_feature (1)..(377): Homolog of NCBI NO: 15239203 NR Description: cytochrome p450 90A1 [Arabidopsis thaliana]
  misc_feature (1)..(378): Homolog of NCBI NO: 30694744 NR Description: cytochrome P450 family [Arabidopsis thaliana]
  misc_feature (1)..(363): Homolog of NCBI NO: 7430728 NR Description: cytochrome P450 - Arabidopsis thaliana
  misc_feature (1)..(389): Homolog of NCBI NO: 15227033 NR Description: cytochrome p450 family [Arabidopsis thaliana]
  misc_feature (1)..(391): Homolog of NCBI NO: 30694740 NR Description: cytochrome P450 family [Arabidopsis thaliana]
  misc_feature (1)..(395): Homolog of NCBI NO: 18415271 NR Description: cytochrome P450 family [Arabidopsis thaliana]
  misc_feature (1)..(364): Homolog of NCBI NO: 9294629 NR Description: cytochrome P450 [Arabidopsis thaliana]
  misc_feature (1)..(391): Homolog of NCBI NO: 18402179 NR Description: cytochrome P450, putative [Arabidopsis thaliana]
MLASPEAARFVLVSRANLFKPTYPRSKERLIGPSALFFHQGDYHLRLRRLVQGPLGPEALRKLVPDIEAAVRATLAAWADGDVASTFHAMKRLSFDVGIVTIFGGRLDERRKEELRRNYAVVEKGYNSFPNSFPGTLYYKAIQARRRLNGVLSDILHERRERGEPGDDLLGCLMRSRAGGDDGDEGALLTDEQVADNVIGVLFAAQDTTASVLTWIVKYLHDRPKLLEAVRAEHAAIHEANDGGRRPLTWAQTRSMTLTHRVILESLRMASIISFTFREAVADVEYKGFLIPKGWKVMPLFRNIHHSPDYFQDPQKFDPSRFKVAPRPSTFTPFGSGVHACPGNELAKLEMLVLIHHLVTGYRWEVVGSSDDVEYSPFPVPQNGLLARLRRDDSVCVGRKGCPTDDNYDDEDEVIV

SEQ ID NO: 66731 - protein, 327 aa, Triticum aestivum
  peptide (1)..(327): Ceres Seq. ID no. 15176080
  misc_feature (1)..(298): Pfam Name: Cytochrome P450 Pfam Description: Cytochrome P450
  misc_feature (1)..(288): Homolog of NCBI NO: 9587211 NR Description: cytochrome P450 [Vigna radiata]
  misc_feature (1)..(302): Homolog of NCBI NO: 13022042 NR Description: ent-kaurenoic acid oxidase [Hordeum vulgare]
  misc_feature (1)..(288): Homolog of NCBI NO: 15239203 NR Description: cytochrome p450 90A1 [Arabidopsis thaliana]
  misc_feature (1)..(289): Homolog of NCBI NO: 30694744 NR Description: cytochrome P450 family [Arabidopsis thaliana]
  misc_feature (1)..(274): Homolog of NCBI NO: 7430728 NR Description: cytochrome P450 - Arabidopsis thaliana
  misc_feature (1)..(300): Homolog of NCBI NO: 15227033 NR Description: cytochrome p450 family [Arabidopsis thaliana]
  misc_feature (1)..(302): Homolog of NCBI NO: 30694740 NR Description: cytochrome P450 family [Arabidopsis thaliana]
  misc_feature (1)..(306): Homolog of NCBI NO: 18415271 NR Description: cytochrome P450 family [Arabidopsis thaliana]
  misc_feature (1)..(275): Homolog of NCBI NO: 9294629 NR Description: cytochrome P450 [Arabidopsis thaliana]
  misc_feature (1)..(302): Homolog of NCBI NO: 18402179 NR Description: cytochrome P450, putative [Arabidopsis thaliana]
MKRLSFDVGIVTIFGGRLDERRKEELRRNYAVVEKGYNSFPNSFPGTLYYKAIQARRRLNGVLSDILHERRERGEPGDDLLGCLMRSRAGGDDGDEGALLTDEQVADNVIGVLFAAQDTTASVLTWIVKYLHDRPKLLEAVRAEHAAIHEANDGGRRPLTWAQTRSMTLTHRVILESLRMASIISFTFREAVADVEYKGFLIPKGWKVMPLFRNIHHSPDYFQDPQKFDPSRFKVAPRPSTFTPFGSGVHACPGNELAKLEMLVLIHHLVTGYRWEVVGSSDDVEYSPFPVPQNGLLARLRRDDSVCVGRKGCPTDDNYDDEDEVIV

SEQ ID NO: 66732 - DNA, 1667 bp, Triticum aestivum
  misc_feature (1)..(1667): Ceres Seq. ID no. 13658768
ccatatccccaaaccgaatccttcgctcccagatcaagaaagaatccttcgccccccaaagagctttttacgcgtctccgccaacgccgcagccgacgaaaccctagcatcgcgatgttgtcgtcgaaggagcccctgggtcctggacatgcctttcccggcgactgctatcccagccatctgcccagcttcgaaatccccacagatctttttggtccctttccccggcatgttcatgagactcgcgaggaggcccccatcgatgtgtttagattcgaaatcgccccagatctattcggttctacccaccatcgtctccttgatgcgttcgaggaggaggaggaggaggaggtggtggtggtgttggcggagaagaaagagagagggttcctcgagagcgaatcagagtctgaatctgagttgcctagctgggacgacattctcgtgggcgctggtgttgaacctgttgatggcgtcaacttgtccgacttgatggattacgatccgctggcagtggatgccgacaacgaggagacaaactgcccagggaagaaatttcccgaggcaacagcagcgaaagtagacgatatatggagtaggatttacaccagacgcaacatcgagtaccagaagaagtgtgaggagattgaagcaagtgaagatgagaatgccacatttccttcttatcctctcaaaatactccctgaggcaacaggtctatgtgtcttgaggggcttttgccaccaccgtgaatataaaacccatgatacttccactactagatcaagtcttgggctacgtgatccaagactgatgctacagatctttgcgatgcatttatcaatctccgaatcctattcctaccccgttagcgtctatggaattgttgctgttcgggatgccttggagccactacggaatcttgtgtttaaccgtccctgcagagatgatgcttttacggttgaccaggattccttaaccttgcctctttgtagtcctcgtcgaggaatgtatatagtaagggacagagcattactagaagttgatctttgggtaaaggaggaaggagatgggtcatctgacaaacagttgctttctttgtatgctgagtttgaggggatgtacgagttagatgaaatgctagatggagaggttagtagtgaccttggcagcttggtcattgactatctcttgcttgatgagagtgttgaggctgtaatacaagtctctgcaaagattgactgccctcatcatatgagattcactgcattcactagtggctttgatggtgagattgtgctgtttgatgataagttctctgggaatggaaaactgttccagtatgttgtcgcggtgaaggctgaggggaaattggatatttgcttaaaaatggaggaatcattgttttggtggactttccaggaaggagctgttggagctgttaggttccctgatgactcagttttaaattacgggcagtttgaggtgacggtgctttttgctcctaagaaatttaccatggatgactgaaacctgatctgtaatatcggtgtttttttatcttctatacttcctctgtaacttaatatacattgatcattactnccaaaaaaaaaaaaaaaaaagcttatcgataccgtcsacctcccragggggrgrrcccggst

SEQ ID NO: 66733 - protein, 509 aa, Triticum aestivum
  peptide (1)..(509): Ceres Seq. ID no. 15219916
  misc_feature (272)..(409): Homolog of NCBI NO: 5257262 NR Description: hypothetical protein [Oryza sativa (japonica
  misc_feature (272)..(464): Homolog of NCBI NO: 38347098 NR Description: OSJNBa0006M15.13 [Oryza sativa (japonica
  misc_feature (272)..(464): Homolog of NCBI NO: 34395317 NR Description: unknown protein [Oryza sativa (japonica
  misc_feature (272)..(475): Homolog of NCBI NO: 33146497 NR Description: unknown protein [Oryza sativa (japonica
  misc_feature (266)..(460): Homolog of NCBI NO: 20303623 NR Description: hypothetical protein [Oryza sativa (japonica
  misc_feature (176)..(323): Homolog of NCBI NO: 34912232 NR Description: P0415C01.18 [Oryza sativa (japonica
  misc_feature (395)..(478): Homolog of NCBI NO: 34912236 NR Description: P0415C01.20 [Oryza sativa (japonica
  misc_feature (176)..(323): Homolog of NCBI NO: 34912236 NR Description: P0415C01.20 [Oryza sativa (japonica
  misc_feature (198)..(323): Homolog of NCBI NO: 34912244 NR Description: P0710A02.2 [Oryza sativa (japonica
  misc_feature (330)..(488): Homolog of NCBI NO: 34912244 NR Description: P0710A02.2 [Oryza sativa (japonica
PYPQTESFAPRSRKNPSPPKELFTRLRQRRSRRNPSIAMLSSKEPLGPGHAFPGDCYPSHLPSFEIPTDLFGPFPRHVHETREEAPIDVFRFEIAPDLFGSTHHRLLDAFEEEEEEEVVVVLAEKKERGFLESESESESELPSWDDILVGAGVEPVDGVNLSDLMDYDPLAVDADNEETNCPGKKFPEATAAKVDDIWSRIYTRRNIEYQKKCEEIEASEDENATFPSYPLKILPEATGLCVLRGFCHHREYKTHDTSTTRSSLGLRDPRLMLQIFAMHLSISESYSYPVSVYGIVAVRDALEPLRNLVFNRPCRDDAFTVDQDSLTLPLCSPRRGMYIVRDRALLEVDLWVKEEGDGSSDKQLLSLYAEFEGMYELDEMLDGEVSSDLGSLVIDYLLLDESVEAVIQVSAKIDCPHHMRFTAFTSGFDGEIVLFDDKFSGNGKLFQYVVAVKAEGKLDICLKMEESLFWWTFQEGAVGAVRFPDDSVLNYGQFEVTVLFAPKKFTMDD

SEQ ID NO: 66734 - protein, 471 aa, Triticum aestivum
  peptide (1)..(471): Ceres Seq. ID no. 15219917
  misc_feature (234)..(371): Homolog of NCBI NO: 5257262 NR Description: hypothetical protein [Oryza sativa (japonica
  misc_feature (234)..(426): Homolog of NCBI NO: 38347098 NR Description: OSJNBa0006M15.13 [Oryza sativa (japonica
  misc_feature (234)..(426): Homolog of NCBI NO: 34395317 NR Description: unknown protein [Oryza sativa (japonica
  misc_feature (234)..(437): Homolog of NCBI NO: 33146497 NR Description: unknown protein [Oryza sativa (japonica
  misc_feature (228)..(422): Homolog of NCBI NO: 20303623 NR Description: hypothetical protein [Oryza sativa (japonica
  misc_feature (138)..(285): Homolog of NCBI NO: 34912232 NR Description: P0415C01.18 [Oryza sativa (japonica
  misc_feature (357)..(440): Homolog of NCBI NO: 34912236 NR Description: P0415C01.20 [Oryza sativa (japonica
  misc_feature (138)..(285): Homolog of NCBI NO: 34912236 NR Description: P0415C01.20 [Oryza sativa (japonica
  misc_feature (160)..(285): Homolog of NCBI NO: 34912244 NR Description: P0710A02.2 [Oryza sativa (japonica
  misc_feature (292)..(450): Homolog of NCBI NO: 34912244 NR Description: P0710A02.2 [Oryza sativa (japonica
MLSSKEPLGPGHAFPGDCYPSHLPSFEIPTDLFGPFPRHVHETREEAPIDVFRFEIAPDLFGSTHHRLLDAFEEEEEEEVVVVLAEKKERGFLESESESESELPSWDDILVGAGVEPVDGVNLSDLMDYDPLAVDADNEETNCPGKKFPEATAAKVDDIWSRIYTRRNIEYQKKCEEIEASEDENATFPSYPLKILPEATGLCVLRGFCHHREYKTHDTSTTRSSLGLRDPRLMLQIFAMHLSISESYSYPVSVYGIVAVRDALEPLRNLVFNRPCRDDAFTVDQDSLTLPLCSPRRGMYIVRDRALLEVDLWVKEEGDGSSDKQLLSLYAEFEGMYELDEMLDGEVSSDLGSLVIDYLLLDESVEAVIQVSAKIDCPHHMRFTAFTSGFDGEIVLFDDKFSGNGKLFQYVVAVKAEGKLDICLKMEESLFWWTFQEGAVGAVRFPDDSVLNYGQFEVTVLFAPKKFTMDD

SEQ ID NO: 66735 - protein, 345 aa, Triticum aestivum
  peptide (1)..(345): Ceres Seq. ID no. 15219918
  misc_feature (108)..(245): Homolog of NCBI NO: 5257262 NR Description: hypothetical protein [Oryza sativa (japonica
  misc_feature (108)..(300): Homolog of NCBI NO: 38347098 NR Description: OSJNBa0006M15.13 [Oryza sativa (japonica
  misc_feature (108)..(300): Homolog of NCBI NO: 34395317 NR Description: unknown protein [Oryza sativa (japonica
  misc_feature (108)..(311): Homolog of NCBI NO: 33146497 NR Description: unknown protein [Oryza sativa (japonica
  misc_feature (102)..(296): Homolog of NCBI NO: 20303623 NR Description: hypothetical protein [Oryza sativa (japonica
  misc_feature (12)..(159): Homolog of NCBI NO: 34912232 NR Description: P0415C01.18 [Oryza sativa (japonica
  misc_feature (231)..(314): Homolog of NCBI NO: 34912236 NR Description: P0415C01.20 [Oryza sativa (japonica
  misc_feature (12)..(159): Homolog of NCBI NO: 34912236 NR Description: P0415C01.20 [Oryza sativa (japonica
  misc_feature (34)..(159): Homolog of NCBI NO: 34912244 NR Description: P0710A02.2 [Oryza sativa (japonica
  misc_feature (166)..(324): Homolog of NCBI NO: 34912244 NR Description: P0710A02.2 [Oryza sativa (japonica
MDYDPLAVDADNEETNCPGKKFPEATAAKVDDIWSRIYTRRNIEYQKKCEEIEASEDENATFPSYPLKILPEATGLCVLRGFCHHREYKTHDTSTTRSSLGLRDPRLMLQIFAMHLSISESYSYPVSVYGIVAVRDALEPLRNLVFNRPCRDDAFTVDQDSLTLPLCSPRRGMYIVRDRALLEVDLWVKEEGDGSSDKQLLSLYAEFEGMYELDEMLDGEVSSDLGSLVIDYLLLDESVEAVIQVSAKIDCPHHMRFTAFTSGFDGEIVLFDDKFSGNGKLFQYVVAVKAEGKLDICLKMEESLFWWTFQEGAVGAVRFPDDSVLNYGQFEVTVLFAPKKFTMDD

SEQ ID NO: 66736 - DNA, 1238 bp, Triticum aestivum
  misc_feature (1)..(1238): Ceres Seq. ID no. 14303696
tttgctacattgtaaatctcaaagtatttgcactgtaatatcttgttgagttttacagtgatttacattgtaattctcgtagtggatttacagtgtaattctcaaagtattttcactgtaatatcttttagtgtttctctcacggtatttgtagtggatttttcgcactgtaattatcttgtttgattatagtgtaattctcatagtatttacactgtaatttttcgcactgtaattacagtgtaattctcatagtatttacactgaatttttttagtgtaaatctcaaatgattttacactgtaattgtcttgtttgatctagtgtaattatcttgttttgatagagtaaatctcaaattatttatactgtcttagtggatttacagtgtaattctcatttttggatttacactataattattttgtttttttgcatttttactgtgtaactatcattggatttacactgtaactatttactggttttgttagtgggttttacaccgcaattcttagtggttttacttgtaaatctgagaaccatttgtactagtatccatttgctttgctctaatgatatagtcttattttcttcattgtaacaagcactttaattctaccgatagcactttattttctttctaacatgaaaaggattaacttcgaagagtttcatgtgttgtacccagctgtccctaagcaagataatcggtatttaagtttttctgccttttcatgttcttgtttaatttttatacagatttgtatgaaagctttatttttcttatttgtgttcttttttatcttttcagccatgaatgtggtgtcttcacatttaagtatatggagatattcacaccaagaactcagatggcaaactttttctctagtgcagacattccaaatcttaggatcagatatgcgaatgacatgtttttcagccccatgaacagttgcgacaagtctttcgtaactgatttctatcatgatggagaggcaatgccgggtgaggttaaacatgtgcgcggtcctagcacaaatggtggctgagttcttttttcagtagcatgtaatctggacaaagtagcatgcaatctgagcatatcagtatttttgatttagtagtggtttgtatgttttttcattttgattgtaatgtcatgtctttatgcctgtaactctgcagtacgtatttcgagcagctttttgattctatatcaagggcccttttttgtt

SEQ ID NO: 66737 - protein, 104 aa, Triticum aestivum
  peptide (1)..(104): Ceres Seq. ID no. 14303697
  misc_feature (28)..(86): Homolog of NCBI NO: 39546274 NR Description: OSJNBa0083D01.7 [Oryza sativa (japonica
  misc_feature (28)..(86): Homolog of NCBI NO: 38346808 NR Description: OSJNBa0088A01.15 [Oryza sativa (japonica
MFLFNFYTDLYESFIFLICVLFYLFSHECGVFTFKYMEIFTPRTQMANFFSSADIPNLRIRYANDMFFSPMNSCDKSFVTDFYHDGEAMPGEVKHVRGPSTNGG

SEQ ID NO: 66738 - protein, 100 aa, Triticum aestivum
  peptide (1)..(100): Ceres Seq. ID no. 14303698
MKRINFEEFHVLYPAVPKQDNRYLSFSAFSCSCLIFIQICMKALFFLFVFFFIFSAMNVVSSHLSIWRYSHQELRWQTFSLVQTFQILGSDMRMTCFSAP

SEQ ID NO: 66739 - protein, 68 aa, Triticum aestivum
  peptide (1)..(68): Ceres Seq. ID no. 14303699
  misc_feature (1)..(50): Homolog of NCBI NO: 39546274 NR Description: OSJNBa0083D01.7 [Oryza sativa (japonica
  misc_feature (1)..(50): Homolog of NCBI NO: 38346808 NR Description: OSJNBa0088A01.15 [Oryza sativa (japonica
MEIFTPRTQMANFFSSADIPNLRIRYANDMFFSPMNSCDKSFVTDFYHDGEAMPGEVKHVRGPSTNGG

SEQ ID NO: 66740 - DNA, 722 bp, Triticum aestivum
  misc_feature (1)..(722): Ceres Seq. ID no. 12621078
atcgatagcagagcaattctcttgcaacttgataagatcgagatacttccagacacacgcgcacacatagggccggagatagaagaatagttatggcttcatcggcggtgagccacagccacggcgggcagcaccagcagcacctgccggcggcggcagggagcatgatggcgcgggtggaccggctggacctggtggtggggtacctggaggagatgcgccaccacagcggcggcagcggcaggtcgtccaccaccgcgaccaggacgctgtcatcgtcatccccgaccacgcctaggtcttcccggcctcatgggtgccggccggcggaggagctgctgcgggaggccaaggccaaggggagcctggtggagcgcatagcgttcctggaggaccgggtgctccggatggaggaggagcgcatggatctgtcgtccagcatggatacggcggagcagaccacgccgacctcgtcggggaggaggacgatgaggatgatgatgagcggcagcggcggggccggggatgagcatgggagtggcgggagcgggaagaaagggaagaaggggctcaagagcttggtcaagtcatgcgttcgagcaggcgccaagctcaaggccaaggaatagtctagtctttcttttgtttctttattaatagtcgtgtgtgtacgtgcatatgttcacgtgtacgtacaccatgtacagtaaacgtatgtgtaa

SEQ ID NO: 66741 - protein, 178 aa, Triticum aestivum
  peptide (1)..(178): Ceres Seq. ID no. 12621079
  misc_feature (1)..(116): Homolog of NCBI NO: 40737035 NR Description: hypothetical protein [Oryza sativa (japonica
MASSAVSHSHGGQHQQHLPAAAGSMMARVDRLDLVVGYLEEMRHHSGGSGRSSTTATRTLSSSSPTTPRSSRPHGCRPAEELLREAKAKGSLVERIAFLEDRVLRMEEERMDLSSSMDTAEQTTPTSSGRRTMRMMMSGSGGAGDEHGSGGSGKKGKKGLKSLVKSCVRAGAKLKAKE

SEQ ID NO: 66742 - protein, 154 aa, Triticum aestivum
  peptide (1)..(154): Ceres Seq. ID no. 12621080
  misc_feature (1)..(92): Homolog of NCBI NO: 40737035 NR Description: hypothetical protein [Oryza sativa (japonica
MMARVDRLDLVVGYLEEMRHHSGGSGRSSTTATRTLSSSSPTTPRSSRPHGCRPAEELLREAKAKGSLVERIAFLEDRVLRMEEERMDLSSSMDTAEQTTPTSSGRRTMRMMMSGSGGAGDEHGSGGSGKKGKKGLKSLVKSCVRAGAKLKAKE

SEQ ID NO: 66743 - protein, 153 aa, Triticum aestivum
  peptide (1)..(153): Ceres Seq. ID no. 12621081
  misc_feature (1)..(91): Homolog of NCBI NO: 40737035 NR Description: hypothetical protein [Oryza sativa (japonica
MARVDRLDLVVGYLEEMRHHSGGSGRSSTTATRTLSSSSPTTPRSSRPHGCRPAEELLREAKAKGSLVERIAFLEDRVLRMEEERMDLSSSMDTAEQTTPTSSGRRTMRMMMSGSGGAGDEHGSGGSGKKGKKGLKSLVKSCVRAGAKLKAKE

SEQ ID NO: 66744 - DNA, 1360 bp, Triticum aestivum
  misc_feature (1)..(1360): Ceres Seq. ID no. 14301568
aacccgattccattccgccccactcccactcgtcgccctcccgattcggtttgaaaagagacaaaagggatgctcgaccggtccctccggccggcggaggccggcgccggcgcggccggccccggcgaggtccgcgggaacgtggatcgggtcctcttcaaggacctggtcgacatggtgccgctcgtcgagtccctcatggatcggaggacgaacccgtcgtactcgcggcgcgcctcgctggtgtacacgccggcgccggccaagaagggtggtgatttgaaaagcgcaaagacaccacaaaccttgtcggcaaaaaagcggagggatcctggagacacaggaaataaaagcacacctgattcaaatggagagaacggctccgttgccccgatgactcaatcgggagcagaaaataaacccaaagacaaggatgagattggcttgctgcgtgagcaggtcgatgagctccaaaagcaacttgtcgaaaaagaggaggcattgaggtctgccgagagtactgtgagtgagatgaatgcggtgtattcgacagttgatgggttgaaacgccaagttgctgagaaagaagctttgatcaaatatgctaattctcagttacaaaatgcaaagattatgcttgcagacaagcaagcatccttagaaaaattggaatgggaggtaaagacctcaaataagaaggtggaagatcttcaaggggacgtctccatatggagtttgagataagttcattcgtgacattattcgagaaaatctcggagaatgtttcagatgattgtcacgatggtagcataccatcttatgatctagaggcacttcaatcagtgagtgaaatcgacaagattgaagtggacaagatagagcaggaaagagttacatatgctgaagctcttgctgctgcaagagcaaaccctaacgaagaacagttgagttcagttgcggaggcgcggtcaaggctgcaggtccttgttgtacaataatgcacgaggtgccagttgtagtgtatgtacgatgatgcacgggggtgccaattgtagtgtatgtacgataattttaagtcactgatgtaattataattgtgggcttgagctggttcatgtgtgtgaccggtgtgactgtaaccaatcgagcacttgaaactggacaattgttttagttttcggatcacatttacctggttctgtgctctccgttgtggattatattagaaggaaaactttggctgttgttttgatgatgagcactgggcagtgctgctatctagtgtgattttagtgtttttagacttggttgaatgtccgggcacagattgctgctaagttttatgatgttggaatttttg

SEQ ID NO: 66745 - protein, 224 aa, Triticum aestivum
  peptide (1)..(224): Ceres Seq. ID no. 14301569
  misc_feature (120)..(215): Homolog of NCBI NO: 1732515 NR Description: myosin heavy chain-like protein [Arabidopsis
  misc_feature (3)..(215): Homolog of NCBI NO: 15241531 NR Description: myosin heavy chain-related protein [Arabidopsis
  misc_feature (24)..(220): Homolog of NCBI NO: 19716176 NR Description: TMV-MP30 binding protein 2C [Nicotiana tabacum]
MLDRSLRPAEAGAGAAGPGEVRGNVDRVLFKDLVDMVPLVESLMDRRTNPSYSRRASLVYTPAPAKKGGDLKSAKTPQTLSAKKRRDPGDTGNKSTPDSNGENGSVAPMTQSGAENKPKDKDEIGLLREQVDELQKQLVEKEEALRSAESTVSEMNAVYSTVDGLKRQVAEKEALIKYANSQLQNAKIMLADKQASLEKLEWEVKTSNKKVEDLQGDVSIWSLR

SEQ ID NO: 66746 - protein, 189 aa, Triticum aestivum
  peptide (1)..(189): Ceres Seq. ID no. 14301570
  misc_feature (85)..(180): Homolog of NCBI NO: 1732515 NR Description: myosin heavy chain-like protein [Arabidopsis
  misc_feature (1)..(180): Homolog of NCBI NO: 15241531 NR Description: myosin heavy chain-related protein [Arabidopsis
  misc_feature (1)..(185): Homolog of NCBI NO: 19716176 NR Description: TMV-MP30 binding protein 2C [Nicotiana tabacum]
MVPLVESLMDRRTNPSYSRRASLVYTPAPAKKGGDLKSAKTPQTLSAKKRRDPGDTGNKSTPDSNGENGSVAPMTQSGAENKPKDKDEIGLLREQVDELQKQLVEKEEALRSAESTVSEMNAVYSTVDGLKRQVAEKEALIKYANSQLQNAKIMLADKQASLEKLEWEVKTSNKKVEDLQGDVSIWSLR

SEQ ID NO: 66747 - protein, 181 aa, Triticum aestivum
  peptide (1)..(181): Ceres Seq. ID no. 14301571
  misc_feature (77)..(172): Homolog of NCBI NO: 1732515 NR Description: myosin heavy chain-like protein [Arabidopsis
  misc_feature (1)..(172): Homolog of NCBI NO: 15241531 NR Description: myosin heavy chain-related protein [Arabidopsis
  misc_feature (1)..(177): Homolog of NCBI NO: 19716176 NR Description: TMV-MP30 binding protein 2C [Nicotiana tabacum]
MDRRTNPSYSRRASLVYTPAPAKKGGDLKSAKTPQTLSAKKRRDPGDTGNKSTPDSNGENGSVAPMTQSGAENKPKDKDEIGLLREQVDELQKQLVEKEEALRSAESTVSEMNAVYSTVDGLKRQVAEKEALIKYANSQLQNAKIMLADKQASLEKLEWEVKTSNKKVEDLQGDVSIWSLR

SEQ ID NO: 66748 - DNA, 1492 bp, Triticum aestivum
  misc_feature (1)..(1492): Ceres Seq. ID no. 14302734
atcccttcccccccgcctccacccctcccactgcccccacgcagcagcccgcgcccccaacccacccaacgcgccgccgccgctagggtttctccccctccccccgccgccgcccgcgcagagccccgaatctccctacccgcggcagccatgagcgacggcaaggacaccctcgacctctccgccctcggcgccgccgtccccaacgccgcagagctcagcgccgaggacaaggccaacctcgtggagtcgattaagaacacgctgcagggattggcggcgcggcacacggacgtgctcgagagcctggagcccaaggtcaggaagcgcgtcgaggcgctcagggagatccagagccaacatgatgaatttgaggcaaagttttttgaggagagagctgcacttgaagctaaatatcagaagatgtatgaaccactgtactcaaagcgtcatgatgttgtcaatggtgtggttgaggcagaaggcgtaaccaaagattcaggtgaagccgctccagatgagaaagaggaaaagggtgtgccagatttctggttgaatgcaatgaagaaccatgaaatccttgctgaggagattcaagagagggatgaggaagctctcaagtacctcaaggatatcaagtggtacagaattactgagccaaagggtttcaagcttgagttccacttcaatactaatccattcttcaagaatgaagtgctttcaaaaacgtaccacatgatcgatgaagatgaaccaatcctagagaaggctattggaactgaaattgaatggtatcctggaaagagcttgacacaaaaggtgctaaagaagaagccaaagaaggggtcgaagaacactaaacctatcacgaaaatcgaaaattgcgagagcttctttaatttcttcagtccacctcaagttcctgatgatgatgaggaaattgatgaggatacagctgagcagttgcagaaccagatggagcaagattatgatatcggatctaccatcagagacaagattattccacatgctgtttcatggtttactggagaggccgctcaagatgaggactttgatggcatcatggatgatgatgaagatgacgacgaagatgacgaggaggatgaagatgaggatgaggacgacgaggaagatgaagacgatgacgatggtgataagaagaagggcgggcgagttcctgcaggggaaggtcaggcaggggagcggcccgcagagtgcaagcaacagtgagatccttcccagacgaagactatttttcttggctgaagaatgtttggttctgcttgatgctatgtctttgagtttggttccgaggagccagtgggggattgattgagttgggttttgtggaagaaccggtggggggtttctttgtgggggacatggtattatatactggtagcatttcaattgttgtattgggttgaaatactttgtccgctgctgcgagtgatcatcgatggtgcccgtt

SEQ ID NO: 66749 - protein, 416 aa, Triticum aestivum
  peptide (1)..(416): Ceres Seq. ID no. 14302735
  misc_feature (108)..(354): Pfam Name: Nucleosome assembly protein (NAP) Pfam Description: Nucleosome assembly protein (NAP)
  misc_feature (29)..(415): Homolog of NCBI NO: 28950350 NR Description: probable nucleosome assembly protein I
  misc_feature (51)..(416): Homolog of NCBI NO: 7488816 NR Description: nucleosome assembly protein 1 - garden pea
  misc_feature (51)..(416): Homolog of NCBI NO: 15236115 NR Description: nucleosome assembly protein I-related protein
  misc_feature (51)..(416): Homolog of NCBI NO: 549975 NR Description: nucleosome assembly protein I-like protein
  misc_feature (51)..(416): Homolog of NCBI NO: 8777435 NR Description: nucleosome assembly protein [Arabidopsis thaliana]
  misc_feature (51)..(416): Homolog of NCBI NO: 18423918 NR Description: nucleosome assembly protein [Arabidopsis
  misc_feature (51)..(411): Homolog of NCBI NO: 15224782 NR Description: nucleosome assembly protein -related [Arabidopsis
  misc_feature (73)..(416): Homolog of NCBI NO: 2129840 NR Description: nucleosome assembly protein 1 - soybean
  misc_feature (51)..(416): Homolog of NCBI NO: 29569109 NR Description: nucleosome/chromatin assembly factor group A [Zea
  misc_feature (51)..(416): Homolog of NCBI NO: 21898560 NR Description: nucleosome/chromatin assembly factor group A [Zea
IPSPPPPPLPLPPRSSPRPQPTQRAAAARVSPPPPAAARAEPRISLPAAAMSDGKDTLDLSALGAAVPNAAELSAEDKANLVESIKNTLQGLAARHTDVLESLEPKVRKRVEALREIQSQHDEFEAKFFEERAALEAKYQKMYEPLYSKRHDVVNGVVEAEGVTKDSGEAAPDEKEEKGVPDFWLNAMKNHEILAEEIQERDEEALKYLKDIKWYRITEPKGFKLEFHFNTNPFFKNEVLSKTYHMIDEDEPILEKAIGTEIEWYPGKSLTQKVLKKKPKKGSKNTKPITKIENCESFFNFFSPPQVPDDDEEIDEDTAEQLQNQMEQDYDIGSTIRDKIIPHAVSWFTGEAAQDEDFDGIMDDDEDDDEDDEEDEDEDEDDEEDEDDDDGDKKKGGRVPAGEGQAGERPAECKQQ

SEQ ID NO: 66750 - protein, 366 aa, Triticum aestivum
  peptide (1)..(366): Ceres Seq. ID no. 14302736
  misc_feature (58)..(304): Pfam Name: Nucleosome assembly protein (NAP) Pfam Description: Nucleosome assembly protein (NAP)
  misc_feature (1)..(365): Homolog of NCBI NO: 28950350 NR Description: probable nucleosome assembly protein I
  misc_feature (1)..(366): Homolog of NCBI NO: 7488816 NR Description: nucleosome assembly protein 1 - garden pea
  misc_feature (1)..(366): Homolog of NCBI NO: 15236115 NR Description: nucleosome assembly protein I-related protein
  misc_feature (1)..(366): Homolog of NCBI NO: 549975 NR Description: nucleosome assembly protein I-like protein
  misc_feature (1)..(366): Homolog of NCBI NO: 8777435 NR Description: nucleosome assembly protein [Arabidopsis thaliana]
  misc_feature (1)..(366): Homolog of NCBI NO: 18423918 NR Description: nucleosome assembly protein [Arabidopsis
  misc_feature (1)..(361): Homolog of NCBI NO: 15224782 NR Description: nucleosome assembly protein -related [Arabidopsis
  misc_feature (23)..(366): Homolog of NCBI NO: 2129840 NR Description: nucleosome assembly protein 1 - soybean
  misc_feature (1)..(366): Homolog of NCBI NO: 29569109 NR Description: nucleosome/chromatin assembly factor group A [Zea
  misc_feature (1)..(366): Homolog of NCBI NO: 21898560 NR Description: nucleosome/chromatin assembly factor group A [Zea
MSDGKDTLDLSALGAAVPNAAELSAEDKANLVESIKNTLQGLAARHTDVLESLEPKVRKRVEALREIQSQHDEFEAKFFEERAALEAKYQKMYEPLYSKRHDVVNGVVEAEGVTKDSGEAAPDEKEEKGVPDFWLNAMKNHEILAEEIQERDEEALKYLKDIKWYRITEPKGFKLEFHFNTNPFFKNEVLSKTYHMIDEDEPILEKAIGTEIEWYPGKSLTQKVLKKKPKKGSKNTKPITKIENCESFFNFFSPPQVPDDDEEIDEDTAEQLQNQMEQDYDIGSTIRDKIIPHAVSWFTGEAAQDEDFDGIMDDDEDDDEDDEEDEDEDEDDEEDEDDDDGDKKKGGRVPAGEGQAGERPAECKQQ

SEQ ID NO: 66751 - protein, 275 aa, Triticum aestivum
  peptide (1)..(275): Ceres Seq. ID no. 14302737
  misc_feature (1)..(213): Pfam Name: Nucleosome assembly protein (NAP) Pfam Description: Nucleosome assembly protein (NAP)
  misc_feature (1)..(274): Homolog of NCBI NO: 28950350 NR Description: probable nucleosome assembly protein I
  misc_feature (1)..(275): Homolog of NCBI NO: 7488816 NR Description: nucleosome assembly protein 1 - garden pea
  misc_feature (1)..(275): Homolog of NCBI NO: 15236115 NR Description: nucleosome assembly protein I-related protein
  misc_feature (1)..(275): Homolog of NCBI NO: 549975 NR Description: nucleosome assembly protein I-like protein
  misc_feature (1)..(275): Homolog of NCBI NO: 8777435 NR Description: nucleosome assembly protein [Arabidopsis thaliana]
  misc_feature (1)..(275): Homolog of NCBI NO: 18423918 NR Description: nucleosome assembly protein [Arabidopsis
  misc_feature (1)..(270): Homolog of NCBI NO: 15224782 NR Description: nucleosome assembly protein -related [Arabidopsis
  misc_feature (1)..(275): Homolog of NCBI NO: 2129840 NR Description: nucleosome assembly protein 1 - soybean
  misc_feature (1)..(275): Homolog of NCBI NO: 29569109 NR Description: nucleosome/chromatin assembly factor group A [Zea
  misc_feature (1)..(275): Homolog of NCBI NO: 21898560 NR Description: nucleosome/chromatin assembly factor group A [Zea
MYEPLYSKRHDVVNGVVEAEGVTKDSGEAAPDEKEEKGVPDFWLNAMKNHEILAEEIQERDEEALKYLKDIKWYRITEPKGFKLEFHFNTNPFFKNEVLSKTYHMIDEDEPILEKAIGTEIEWYPGKSLTQKVLKKKPKKGSKNTKPITKIENCESFFNFFSPPQVPDDDEEIDEDTAEQLQNQMEQDYDIGSTIRDKIIPHAVSWFTGEAAQDEDFDGIMDDDEDDDEDDEEDEDEDEDDEEDEDDDDGDKKKGGRVPAGEGQAGERPAECKQQ

SEQ ID NO: 66752 - DNA, 2130 bp, Triticum aestivum
  misc_feature (1)..(2130): Ceres Seq. ID no. 14302419
agctagcgcagatcccaccccgcaaatggcagctcgcctcctcctctagcccactcctctagcccactcccctccacccacccacctaccctcctccgcacgcaaccatgccggggctcgccgcagcggacgcgtcgccgccggccgcggcgccggcgccgcggcggctctcctcgccgctgccgaggcgggcgccgccgtcgccgtccccctcctccgcgtcccgcgccgtcgggaagccggcgcggaagtcgctcgggcagggccagcacccggaggcgacggacgaggcggcgctggacaacccggatctgggccccttcctgctcaagcaggcgcgggacgccatggtgtccggcgagggcgggggcgcggcgcgcgcgctcgagttcgccgagcgtgcggcccgcgcgctcgagcgccgcggcgagggcgccgagctcgagctcgccatgagcctccacgtcgccgccgcgatccactgcgggctcggccggcacgccgacgccgtgcccgtgctcgagcgcgccgtcgccgtcgtcaccccgccgcccgcgccggcccccgtggccgagggtgaggaggtgccgcagccggaggaggaggtggatgagcgcaagggggaggagtgggcgctcgccgccttctccggctggatgcagctcggcgacacccacgccatgctcggccgcatggacgagtccatcgcctgctacggcaagggcttcgagatccagatggccgcgctcggcgaccgcgacccccgcgtcgccgagacctgcaggtatctggcggaagcgcatgtgcaagctctgcagttcgatgaggcagagaaactgtgccgcaaagccctcgagatccaccgggagcacagtgcacctgcatccctcgaggaggcctccgatcgccggctgatggcccttatcctggacgccaagggtgactatgacggcgccctggagcaccttgtactggcttccatgaccatggttgccaatggacgcgacgtcgaggttgcgacgattgatgtcgcgataggcaacacttacctggcccttgctcgtttcgacgagtctgtcttctcataccagaaggctttgactgtactcaagtctgcccgtggcgacgaccacccttcagtggcatctgtcttcgtccgccttgctgatctctatcaccgcacagggaagctccgtgagtccaaatcctactgtgagaatgctctccgtgtctatgcaaagcccgcgcctggtgctgcccctgatgaggttgctggaggcctaatggagattgctgccatctatgaggcgcttggagaccttgatgaggccctaaagcttcttcaaagggcactgaagttgctcgaggactcaccagggcagtggagcactgttgctgggatcgaagcacaaatgggtgtgttgtactacatgatagggaggtatgccgattcaaggaactcgttcgagagcgcggtttccaaattgagggccagtggggaaaggaagtcggcatttttcggtgttctgctgaaccagatggggctagcttgcgtacagctgttcaagattgatgaggctgcacagctgtttgaagaagcacgggcagttctagagcaggagtgtggtgcctctcatcctgatactcttggcgtatacagcaacctggctgcgatctatgatgccatgggaagggtggaggacgcgattgagatcctggagcatgtgctgaaggtgcgggaggagaagctgggcacggcgaacccggacgtggaggatgagaagaagcggctggcggagctgctgaaggaggcggggcggtcccggaaccggaagcagaagtcgctggagaacctgttcgggtccggcggtgctgcgcggggcgccaagaaggacggctccgggggcaggcggtggaccaacttcgggttcaggagctgagctgagaagaaaacagtggtgtgggcctttgtaacataagaggagagagaaagagagaaaaggaagggaggagagagaagcatgtgtaaagaaagaaaggtgttgctggtagagtaggaaggaaggaagatgagatgattgtgattgcagtttgttttgagtttcttctacatgttctgcatctactctc

SEQ ID NO: 66753 - protein, 610 aa, Triticum aestivum
  peptide (1)..(610): Ceres Seq. ID no. 14302420
  misc_feature (346)..(379): Pfam Name: TPR Domain Pfam Description: TPR Domain
  misc_feature (95)..(586): Homolog of NCBI NO: 26450936 NR Description: unknown protein [Arabidopsis thaliana]
  misc_feature (95)..(586): Homolog of NCBI NO: 15223528 NR Description: kinesin light chain - related [Arabidopsis
  misc_feature (95)..(586): Homolog of NCBI NO: 9802538 NR Description: F17L21.29 [Arabidopsis thaliana]
  misc_feature (298)..(610): Homolog of NCBI NO: 32352172 NR Description: hypothetical protein [Oryza sativa (japonica
  misc_feature (1)..(144): Homolog of NCBI NO: 19387245 NR Description: putative kinesin light chain gene
  misc_feature (153)..(583): Homolog of NCBI NO: 19387245 NR Description: putative kinesin light chain gene
  misc_feature (28)..(144): Homolog of NCBI NO: 20152971 NR Description: similar to A. thaliana protein BAB01483 similar
  misc_feature (153)..(586): Homolog of NCBI NO: 20152971 NR Description: similar to A. thaliana protein BAB01483 similar
  misc_feature (1)..(609): Homolog of NCBI NO: 21554384 NR Description: putative kinesin light chain [Arabidopsis
  misc_feature (1)..(609): Homolog of NCBI NO: 15236944 NR Description: kinesin light chain - related [Arabidopsis
MPGLAAADASPPAAAPAPRRLSSPLPRRAPPSPSPSSASRAVGKPARKSLGQGQHPEATDEAALDNPDLGPFLLKQARDAMVSGEGGGAARALEFAERAARALERRGEGAELELAMSLHVAAAIHCGLGRHADAVPVLERAVAVVTPPPAPAPVAEGEEVPQPEEEVDERKGEEWALAAFSGWMQLGDTHAMLGRMDESIACYGKGFEIQMAALGDRDPRVAETCRYLAEAHVQALQFDEAEKLCRKALEIHREHSAPASLEEASDRRLMALILDAKGDYDGALEHLVLASMTMVANGRDVEVATIDVAIGNTYLALARFDESVFSYQKALTVLKSARGDDHPSVASVFVRLADLYHRTGKLRESKSYCENALRVYAKPAPGAAPDEVAGGLMEIAAIYEALGDLDEALKLLQRALKLLEDSPGQWSTVAGIEAQMGVLYYMIGRYADSRNSFESAVSKLRASGERKSAFFGVLLNQMGLACVQLFKIDEAAQLFEEARAVLEQECGASHPDTLGVYSNLAAIYDAMGRVEDAIEILEHVLKVREEKLGTANPDVEDEKKRLAELLKEAGRSRNRKQKSLENLFGSGGAARGAKKDGSGGRRWTNFGFRS

SEQ ID NO: 66754 - protein, 530 aa, Triticum aestivum
  peptide (1)..(530): Ceres Seq. ID no. 14302421
  misc_feature (266)..(299): Pfam Name: TPR Domain Pfam Description: TPR Domain
  misc_feature (15)..(506): Homolog of NCBI NO: 15223528 NR Description: kinesin light chain - related [Arabidopsis
  misc_feature (15)..(506): Homolog of NCBI NO: 26450936 NR Description: unknown protein [Arabidopsis thaliana]
  misc_feature (15)..(506): Homolog of NCBI NO: 9802538 NR Description: F17L21.29 [Arabidopsis thaliana]
  misc_feature (218)..(530): Homolog of NCBI NO: 32352172 NR Description: hypothetical protein [Oryza sativa (japonica
  misc_feature (1)..(64): Homolog of NCBI NO: 19387245 NR Description: putative kinesin light chain gene
  misc_feature (73)..(503): Homolog of NCBI NO: 19387245 NR Description: putative kinesin light chain gene
  misc_feature (1)..(64): Homolog of NCBI NO: 20152971 NR Description: similar to A. thaliana protein BAB01483 similar
  misc_feature (73)..(506): Homolog of NCBI NO: 20152971 NR Description: similar to A. thaliana protein BAB01483 similar
  misc_feature (1)..(529): Homolog of NCBI NO: 21554384 NR Description: putative kinesin light chain [Arabidopsis
  misc_feature (1)..(529): Homolog of NCBI NO: 15236944 NR Description: kinesin light chain - related [Arabidopsis
MVSGEGGGAARALEFAERAARALERRGEGAELELAMSLHVAAAIHCGLGRHADAVPVLERAVAVVTPPPAPAPVAEGEEVPQPEEEVDERKGEEWALAAFSGWMQLGDTHAMLGRMDESIACYGKGFEIQMAALGDRDPRVAETCRYLAEAHVQALQFDEAEKLCRKALEIHREHSAPASLEEASDRRLMALILDAKGDYDGALEHLVLASMTMVANGRDVEVATIDVAIGNTYLALARFDESVFSYQKALTVLKSARGDDHPSVASVFVRLADLYHRTGKLRESKSYCENALRVYAKPAPGAAPDEVAGGLMEIAAIYEALGDLDEALKLLQRALKLLEDSPGQWSTVAGIEAQMGVLYYMIGRYADSRNSFESAVSKLRASGERKSAFFGVLLNQMGLACVQLFKIDEAAQLFEEARAVLEQECGASHPDTLGVYSNLAAIYDAMGRVEDAIEILEHVLKVREEKLGTANPDVEDEKKRLAELLKEAGRSRNRKQKSLENLFGSGGAARGAKKDGSGGRRWTNFGFRS

SEQ ID NO: 66755 - protein, 495 aa, Triticum aestivum
  peptide (1)..(495): Ceres Seq. ID no. 14302422
  misc_feature (231)..(264): Pfam Name: TPR Domain Pfam Description: TPR Domain
  misc_feature (1)..(471): Homolog of NCBI NO: 15223528 NR Description: kinesin light chain - related [Arabidopsis
  misc_feature (1)..(471): Homolog of NCBI NO: 26450936 NR Description: unknown protein [Arabidopsis thaliana]
  misc_feature (1)..(471): Homolog of NCBI NO: 9802538 NR Description: F17L21.29 [Arabidopsis thaliana]
  misc_feature (183)..(495): Homolog of NCBI NO: 32352172 NR Description: hypothetical protein [Oryza sativa (japonica
  misc_feature (1)..(29): Homolog of NCBI NO: 19387245 NR Description: putative kinesin light chain gene
  misc_feature (38)..(468): Homolog of NCBI NO: 19387245 NR Description: putative kinesin light chain gene
  misc_feature (1)..(29): Homolog of NCBI NO: 20152971 NR Description: similar to A. thaliana protein BAB01483 similar
  misc_feature (38)..(471): Homolog of NCBI NO: 20152971 NR Description: similar to A. thaliana protein BAB01483 similar
  misc_feature (1)..(494): Homolog of NCBI NO: 21554384 NR Description: putative kinesin light chain [Arabidopsis
  misc_feature (1)..(494): Homolog of NCBI NO: 15236944 NR Description: kinesin light chain - related [Arabidopsis
MSLHVAAAIHCGLGRHADAVPVLERAVAVVTPPPAPAPVAEGEEVPQPEEEVDERKGEEWALAAFSGWMQLGDTHAMLGRMDESIACYGKGFEIQMAALGDRDPRVAETCRYLAEAHVQALQFDEAEKLCRKALEIHREHSAPASLEEASDRRLMALILDAKGDYDGALEHLVLASMTMVANGRDVEVATIDVAIGNTYLALARFDESVFSYQKALTVLKSARGDDHPSVASVFVRLADLYHRTGKLRESKSYCENALRVYAKPAPGAAPDEVAGGLMEIAAIYEALGDLDEALKLLQRALKLLEDSPGQWSTVAGIEAQMGVLYYMIGRYADSRNSFESAVSKLRASGERKSAFFGVLLNQMGLACVQLFKIDEAAQLFEEARAVLEQECGASHPDTLGVYSNLAAIYDAMGRVEDAIEILEHVLKVREEKLGTANPDVEDEKKRLAELLKEAGRSRNRKQKSLENLFGSGGAARGAKKDGSGGRRWTNFGFRS

SEQ ID NO: 66756 - DNA, 1187 bp, Triticum aestivum
  misc_feature (1)..(1187): Ceres Seq. ID no. 13659131
acttagaacatcctaatcgaaaactcatattcttcattcacagcagcattcttactatgcaccattgtctgcaagtggcgtatctattcctgttgagaccacatccatccccccagtaccaggttcttattatagctatccttccgtcactatggctgccactgaagtagcggttgaatcttctggatactatgcttcatcaacctctgccatttctagtggtgaattagataacaaaacaagcttggcctcccttgttgcaaatagtaatgtgaatactgtggagtctgataaagtgatatccaaggagcccacagttgcgtctttgagccaatcagtaggagcagtatcttcaggaccaacagtacatggaagttctactcaagcttctactagctccactaatcagactaaagttcctcgtactaagaagcgacctgttgctgttgcatcatcactgagatctaataagaaggtctcaagtctggtggataagtggaaagctgcaaaggaggagcttcgtgatgaagaggaagaggagcctgaagatgctttggagtacctagaaaggaaacgccggaaggaaatagatgggtggcgtaagcaacaaatagctagtggagaagccaaggaaaatgctaattttgttccccttggtggtgactggcgtgaccgtgtaaaacgcaaaagagctgaagcaaagaaggaagcaaagactgaacctattcgtgcagctgccgaacaacacaaaggggagcctgatctctcagagctctccaagggttttccttctgggtggcaggcatacatagacgagtctacgaagcaagtgtactatgggaacaacctcacttccgagacgacttgggatcggcctagcaaataaagattggattagttgaagatggtctagttttctctgtagatatccctgtacctcgatatatacgttgcctgtcttgaatggaacggatatgacagtcacgccctgagaagcaaccggtttctgatgttaccttggttttgaggctgtattgtttcttctattttccactgggagatcgtagtggggggaaggagagttcgttttggtatagaggcacccttgtaagagtggcaacttgagatcgaattactgaagcaaaatctactagttagttgctgaccaaggaaaaatgtgccttgtc

SEQ ID NO: 66757 - protein, 244 aa, Triticum aestivum
  peptide (1)..(244): Ceres Seq. ID no. 13659132
  misc_feature (213)..(242): Pfam Name: WW domain Pfam Description: WW domain
  misc_feature (88)..(180): Homolog of NCBI NO: 20521728 NR Description: KIAA1014 protein [Homo sapiens]
  misc_feature (88)..(180): Homolog of NCBI NO: 24308033 NR Description: formin binding protein 4 [Homo sapiens]
  misc_feature (88)..(180): Homolog of NCBI NO: 11360125 NR Description: hypothetical protein DKFZp434M2023.1 - human
  misc_feature (90)..(180): Homolog of NCBI NO: 34856516 NR Description: similar to formin binding protein 30 [Rattus
  misc_feature (88)..(180): Homolog of NCBI NO: 39104535 NR Description: mKIAA1014 protein [Mus musculus]
  misc_feature (88)..(180): Homolog of NCBI NO: 9055220 NR Description: formin binding protein 4; formin binding protein
  misc_feature (88)..(180): Homolog of NCBI NO: 26350923 NR Description: unnamed protein product [Mus musculus]
  misc_feature (88)..(180): Homolog of NCBI NO: 10434696 NR Description: unnamed protein product [Homo sapiens]
  misc_feature (1)..(243): Homolog of NCBI NO: 15229453 NR Description: hypothetical protein [Arabidopsis thaliana]
MAATEVAVESSGYYASSTSAISSGELDNKTSLASLVANSNVNTVESDKVISKEPTVASLSQSVGAVSSGPTVHGSSTQASTSSTNQTKVPRTKKRPVAVASSLRSNKKVSSLVDKWKAAKEELRDEEEEEPEDALEYLERKRRKEIDGWRKQQIASGEAKENANFVPLGGDWRDRVKRKRAEAKKEAKTEPIRAAAEQHKGEPDLSELSKGFPSGWQAYIDESTKQVYYGNNLTSETTWDRPSK

SEQ ID NO: 66758 - DNA, 947 bp, Triticum aestivum
  misc_feature (1)..(947): Ceres Seq. ID no. 13658132
aattggaaaaccaacaagctgccgtggtgactgtaagcgaagcacacgactgcctgtcctttccccaataatgcgcggcatcgcctccgccggaacgctccgccccgggccatccgcagctgtccgatcaaaatccaacgcgggagaccgccccaccctccaccgacgacccctcatccacctccggcgatcgccggaaccctctctgccgtccatccgccgcagccgccgcctcatgcctcctcttaccgcggcctcccgggccaccagcagcggcggcgacgccttcagcgagttggcctctgccgccgacttcgccggcatcgcctctcccgacggcctcatctccgtcatcggcttcggctcccttctttccgagcggagcgcgaggagcacgttcccggagctggaggggttccgtgtggcggcgctgcgagggttccggcgcgtcttcgcccacgccgcccccatcttcttcgagcgcggcatcgccattgaggccactaaggagttctcaagcttaagcgtggagcattgtgagggagaaatgatagttgtcactgtgtttgaaatcaaggaggaggaggtgccagccttcatcgagagggaactcgagttcagatttcttgctgtggtccctgaaggactggatggagtgccttttccaaatccagctgtaagggcctgtattttgggactgaatttctagcttaattttttgtttgatctgcctgcaatgcagttattattcatcttcatggaatttattggttcaggttgtctgtgcacgctatagcgatgaagagtatttccaagtgagatgcaaaggttgaatctatatgacactcaaatttctttcagtcctgcatttcactttaatgacttttctactgactttgtaatgttattgacattgggttatcagcatatcagttgtccgtttgact

SEQ ID NO: 66759 - protein, 235 aa, Triticum aestivum
  peptide (1)..(235): Ceres Seq. ID no. 13658133
  misc_feature (123)..(226): Homolog of NCBI NO: 26452147 NR Description: unknown protein [Arabidopsis thaliana]
  misc_feature (62)..(212): Homolog of NCBI NO: 7485175 NR Description: hypothetical protein - Arabidopsis thaliana
  misc_feature (98)..(226): Homolog of NCBI NO: 30683505 NR Description: expressed protein [Arabidopsis thaliana]
IGKPTSCRGDCKRSTRLPVLSPIMRGIASAGTLRPGPSAAVRSKSNAGDRPTLHRRPLIHLRRSPEPSLPSIRRSRRLMPPLTAASRATSSGGDAFSELASAADFAGIASPDGLISVIGFGSLLSERSARSTFPELEGFRVAALRGFRRVFAHAAPIFFERGIAIEATKEFSSLSVEHCEGEMIVVTVFEIKEEEVPAFIERELEFRFLAVVPEGLDGVPFPNPAVRACILGLNF

SEQ ID NO: 66760 - protein, 212 aa, Triticum aestivum
  peptide (1)..(212): Ceres Seq. ID no. 13658134
  misc_feature (100)..(203): Homolog of NCBI NO: 26452147 NR Description: unknown protein [Arabidopsis thaliana]
  misc_feature (39)..(189): Homolog of NCBI NO: 7485175 NR Description: hypothetical protein - Arabidopsis thaliana
  misc_feature (75)..(203): Homolog of NCBI NO: 30683505 NR Description: expressed protein [Arabidopsis thaliana]
MRGIASAGTLRPGPSAAVRSKSNAGDRPTLHRRPLIHLRRSPEPSLPSIRRSRRLMPPLTAASRATSSGGDAFSELASAADFAGIASPDGLISVIGFGSLLSERSARSTFPELEGFRVAALRGFRRVFAHAAPIFFERGIAIEATKEFSSLSVEHCEGEMIVVTVFEIKEEEVPAFIERELEFRFLAVVPEGLDGVPFPNPAVRACILGLNF

SEQ ID NO: 66761 - protein, 157 aa, Triticum aestivum
  peptide (1)..(157): Ceres Seq. ID no. 13658135
  misc_feature (45)..(148): Homolog of NCBI NO: 26452147 NR Description: unknown protein [Arabidopsis thaliana]
  misc_feature (1)..(134): Homolog of NCBI NO: 7485175 NR Description: hypothetical protein - Arabidopsis thaliana
  misc_feature (20)..(148): Homolog of NCBI NO: 30683505 NR Description: expressed protein [Arabidopsis thaliana]
MPPLTAASRATSSGGDAFSELASAADFAGIASPDGLISVIGFGSLLSERSARSTFPELEGFRVAALRGFRRVFAHAAPIFFERGIAIEATKEFSSLSVEHCEGEMIVVTVFEIKEEEVPAFIERELEFRFLAVVPEGLDGVPFPNPAVRACILGLNF

SEQ ID NO: 66762 - DNA, 1048 bp, Triticum aestivum
  misc_feature (1)..(1048): Ceres Seq. ID no. 13658590
atcttttgtcctcctcctccgttgcgcagttggctcgcttgcttgcttgctgtaggtgagtgctgctggagacgggagccgggccgaggcggatcggggagaaggtgggaggcgggcgggtggtagatccggcgggcgtggctcgcgagaaggttggtgcgaggttggtggaggaggggagagaaggaggggatggagcggaaggcggtggtggtgtgcgcgctcgtcggcttcctcggcgtcctctccgccgcgctaggcttcgccgccgagggcacccgcgcgcaaggcctcctacctccatgacctcgcccgcaagtatgcgtcggggatcctctccgacgacaacatcgttgccatggacgaccgctccctcgccgccatgctcaccatggtcaacggcatcggcgcctggagtgttcacatgttcatgatcttctccctagcgcgcccggatgtgctcccctccgcggatctcgggatccgcaagggcgtgcagatgctgtatgggctggaggatgtgccccggccgtcgcagatggagaagctctgcgagcgctggcgcccttaccgctccgtcgccgcgtggtacatgtggcgcctcatcgagtccaaggcggcgcagacggcaggggccatgcctgtagtgccacctgcaatgcctgcgcccagtgaggagttcatgctccagcagcaccagcagcagcaccaccatcagcatcagcagcaacagcaacaagctgccatccaaatgctcgatccggttcagatgcttccaggattggggtgaatttggtatatactcgctctgctcatttgttcttgatgtgaaatggatgtcttaaacctgaatttgtcacttcatttgtgtatcattgttctgtatcggttgagaagtgtagcattggacaggaggatctcgaggcaacttcattatcagttatagttggtgttgtgttgttcatttgtaaatttntgctattttagacattgttgccctagacatatttgtatccgacgaataaatttagaccnagctgttatgtcc

SEQ ID NO: 66763 - protein, 143 aa, Triticum aestivum
  peptide (1)..(143): Ceres Seq. ID no. 13658591
  misc_feature (1)..(84): Homolog of NCBI NO: 22982918 NR Description: hypothetical protein [Burkholderia fungorum]
  misc_feature (1)..(84): Homolog of NCBI NO: 37521587 NR Description: probable DNA-3-methyladenine glycosylase
  misc_feature (1)..(81): Homolog of NCBI NO: 22971879 NR Description: hypothetical protein [Chloroflexus aurantiacus]
  misc_feature (1)..(86): Homolog of NCBI NO: 15230333 NR Description: DNA-3-methyladenine glycosidase -related
  misc_feature (1)..(116): Homolog of NCBI NO: 25402893 NR Description: protein F18O14.25 [imported] - Arabidopsis
  misc_feature (1)..(116): Homolog of NCBI NO: 21593178 NR Description: unknown [Arabidopsis thaliana]
  misc_feature (1)..(116): Homolog of NCBI NO: 18394744 NR Description: expressed protein [Arabidopsis thaliana]
  misc_feature (1)..(143): Homolog of NCBI NO: 25406423 NR Description: hypothetical protein F22H5.5 [imported] -
  misc_feature (1)..(143): Homolog of NCBI NO: 18410802 NR Description: 3-methyladenine DNA glycosylase -related
  misc_feature (1)..(143): Homolog of NCBI NO: 5091600 NR Description: This gene is a member of PF|01332 Alkylbase DNA
MDDRSLAAMLTMVNGIGAWSVHMFMIFSLARPDVLPSADLGIRKGVQMLYGLEDVPRPSQMEKLCERWRPYRSVAAWYMWRLIESKAAQTAGAMPVVPPAMPAPSEEFMLQQHQQQHHHQHQQQQQQAAIQMLDPVQMLPGLG

SEQ ID NO: 66764 - protein, 135 aa, Triticum aestivum
  peptide (1)..(135): Ceres Seq. ID no. 13658592
  misc_feature (1)..(76): Homolog of NCBI NO: 22982918 NR Description: hypothetical protein [Burkholderia fungorum]
  misc_feature (1)..(76): Homolog of NCBI NO: 37521587 NR Description: probable DNA-3-methyladenine glycosylase
  misc_feature (1)..(73): Homolog of NCBI NO: 22971879 NR Description: hypothetical protein [Chloroflexus aurantiacus]
  misc_feature (1)..(78): Homolog of NCBI NO: 15230333 NR Description: DNA-3-methyladenine glycosidase -related
  misc_feature (1)..(108): Homolog of NCBI NO: 25402893 NR Description: protein F18O14.25 [imported] - Arabidopsis
  misc_feature (1)..(108): Homolog of NCBI NO: 21593178 NR Description: unknown [Arabidopsis thaliana]
  misc_feature (1)..(108): Homolog of NCBI NO: 18394744 NR Description: expressed protein [Arabidopsis thaliana]
  misc_feature (1)..(135): Homolog of NCBI NO: 25406423 NR Description: hypothetical protein F22H5.5 [imported] -
  misc_feature (1)..(135): Homolog of NCBI NO: 18410802 NR Description: 3-methyladenine DNA glycosylase -related
  misc_feature (1)..(135): Homolog of NCBI NO: 5091600 NR Description: This gene is a member of PF|01332 Alkylbase DNA
MLTMVNGIGAWSVHMFMIFSLARPDVLPSADLGIRKGVQMLYGLEDVPRPSQMEKLCERWRPYRSVAAWYMWRLIESKAAQTAGAMPVVPPAMPAPSEEFMLQQHQQQHHHQHQQQQQQAAIQMLDPVQMLPGLG

SEQ ID NO: 66765 - protein, 132 aa, Triticum aestivum
  peptide (1)..(132): Ceres Seq. ID no. 13658593
  misc_feature (1)..(73): Homolog of NCBI NO: 22982918 NR Description: hypothetical protein [Burkholderia fungorum]
  misc_feature (1)..(73): Homolog of NCBI NO: 37521587 NR Description: probable DNA-3-methyladenine glycosylase
  misc_feature (1)..(70): Homolog of NCBI NO: 22971879 NR Description: hypothetical protein [Chloroflexus aurantiacus]
  misc_feature (1)..(75): Homolog of NCBI NO: 15230333 NR Description: DNA-3-methyladenine glycosidase -related
  misc_feature (1)..(105): Homolog of NCBI NO: 25402893 NR Description: protein F18O14.25 [imported] - Arabidopsis
  misc_feature (1)..(105): Homolog of NCBI NO: 21593178 NR Description: unknown [Arabidopsis thaliana]
  misc_feature (1)..(105): Homolog of NCBI NO: 18394744 NR Description: expressed protein [Arabidopsis thaliana]
  misc_feature (1)..(132): Homolog of NCBI NO: 25406423 NR Description: hypothetical protein F22H5.5 [imported] -
  misc_feature (1)..(132): Homolog of NCBI NO: 18410802 NR Description: 3-methyladenine DNA glycosylase -related
  misc_feature (1)..(132): Homolog of NCBI NO: 5091600 NR Description: This gene is a member of PF|01332 Alkylbase DNA
MVNGIGAWSVHMFMIFSLARPDVLPSADLGIRKGVQMLYGLEDVPRPSQMEKLCERWRPYRSVAAWYMWRLIESKAAQTAGAMPVVPPAMPAPSEEFMLQQHQQQHHHQHQQQQQQAAIQMLDPVQMLPGLG

SEQ ID NO: 66766 - DNA, 1481 bp, Triticum aestivum
  misc_feature (1)..(1481): Ceres Seq. ID no. 14313362
actctatccgcgtcgactggtagctgaaactccaaaaagccgccaccactccggttcctgcgttcgtactccactcctgccagtccaagatccagctcaagatccaggcagggtcagccagccatgtgctgcggcgagtgcggctgctatgacgcactctgcgaccgctgctgcctctgcgtctccaccggcgcgcgcgacaccatcctctgctgcgcgtgctgcctcgccgtcctcgccggcgtcggcctcctcctcgtcctcctcgcggccttctgcttcatccgccacgccgaggtcgccgtcaccgacgcctccctcacgcgcctcgcgctggccgcgtcccccgccaccgccttcgcctacaacctctcgctcacgctcaccgtccggaacaagaactgggcaatgagcgtcaagaacacccagccgctcgaggccgactacagcttcgacggccagcgcttcgagcgggtcaggctcgccgacgagggctccacgcaccccgccggcaagacccaggtgtaccacctcgtctccggctccgacggcgcctacgtcgcgctcggcaacgccggcgtggccgagttcaaggaggagaacaagacgggggtgttccaggtggaggtggcgctgtcgggccaggtcaggtaccaggcgcacttcaccaagtgcaagttccaggccaattgcccgctcaagctgcagctcgcgccgcccggcacgccggccgtcgtcttccagaaggtcaagtgcaagctcgctccggcgagcaggtactgctagtgattggtacgattggtggctagtgatttctgtcggtagattgggaggactaagtatagttgccgggaacggggaacgatgccgcgtcccctgtaccgggaacatcgacccggatcgagggtcggggtcgacacagggaacgacgcgattcggtgacgggaacgcgacccggaaaggcaggttcgcagctccgtttcagtgatcgcaaatacactggatctcgacccaacttgccaatgaacgggaggccaaatggatagaatcgagacttacctgaagtccatggcatgagccttccgctgtcgaccaaaacgatgcgcgccggaggctagtgtgcatgtgcgaacgcggtgcccagcggcgccggcggctggtgtcgacgtgcagactgcggatgcgatgcccagcggcgccggcggctggtgtcgacgtgcagactgcggatgcggtgcccggcggcgctaacggctggtgtcgacgtgcagactatgcggtgctcggtggcggactgcggacgctgtgctagatggccggacggcggcggcggctgccgtggaccagcgaatgtggtgcccgcttcccactgcccatcctcttgattggaatttgggaatcatacggggcagatttcatggagtagattactttctgctgtcaaaactttccgcgggatatttgcacattttcccttcctc

SEQ ID NO: 66767 - protein, 220 aa, Triticum aestivum
  peptide (1)..(220): Ceres Seq. ID no. 14313363
  misc_feature (31)..(218): Homolog of NCBI NO: 40714673 NR Description: putative harpin inducing protein
  misc_feature (35)..(218): Homolog of NCBI NO: 40714669 NR Description: putative harpin inducing protein
  misc_feature (1)..(220): Homolog of NCBI NO: 34900798 NR Description: hypothetical protein~predicted by GENSCAN etc.
  misc_feature (7)..(220): Homolog of NCBI NO: 34900820 NR Description: hypothetical protein~predicted by FGENESH etc.
  misc_feature (2)..(220): Homolog of NCBI NO: 34900810 NR Description: hypothetical protein~predicted by FGENESH etc.
MCCGECGCYDALCDRCCLCVSTGARDTILCCACCLAVLAGVGLLLVLLAAFCFIRHAEVAVTDASLTRLALAASPATAFAYNLSLTLTVRNKNWAMSVKNTQPLEADYSFDGQRFERVRLADEGSTHPAGKTQVYHLVSGSDGAYVALGNAGVAEFKEENKTGVFQVEVALSGQVRYQAHFTKCKFQANCPLKLQLAPPGTPAVVFQKVKCKLAPASRYC

SEQ ID NO: 66768 - protein, 136 aa, Triticum aestivum
  peptide (1)..(136): Ceres Seq. ID no. 14313364
  misc_feature (43)..(136): Pfam Name: Equine herpesvirus glycoprotein gp2 Pfam Description: Equine herpesvirus glycoprotein gp2
  misc_feature (37)..(136): Homolog of NCBI NO: 32699068 NR Description: hypothetical protein FLJ35107 [Homo sapiens]
  misc_feature (39)..(136): Homolog of NCBI NO: 13592175 NR Description: ppg3 [Leishmania major]
  misc_feature (39)..(136): Homolog of NCBI NO: 13592175 NR Description: ppg3 [Leishmania major]
  misc_feature (3)..(136): Homolog of NCBI NO: 13592175 NR Description: ppg3 [Leishmania major]
  misc_feature (39)..(136): Homolog of NCBI NO: 5420387 NR Description: proteophosphoglycan [Leishmania major]
  misc_feature (27)..(136): Homolog of NCBI NO: 13592175 NR Description: ppg3 [Leishmania major]
  misc_feature (39)..(136): Homolog of NCBI NO: 32699068 NR Description: hypothetical protein FLJ35107 [Homo sapiens]
  misc_feature (27)..(136): Homolog of NCBI NO: 5420387 NR Description: proteophosphoglycan [Leishmania major]
  misc_feature (39)..(136): Homolog of NCBI NO: 11359723 NR Description: proteophosphoglycan, membrane-associated
  misc_feature (3)..(136): Homolog of NCBI NO: 13592175 NR Description: ppg3 [Leishmania major]
LYPRRLVAETPKSRHHSGSCVRTPLLPVQDPAQDPGRVSQPCAAASAAAMTHSATAAASASPPARATPSSAARAASPSSPASASSSSSSRPSASSATPRSPSPTPPSRASRWPRPPPPPSPTTSRSRSPSGTRTGQ

SEQ ID NO: 66769 - protein, 125 aa, Triticum aestivum
  peptide (1)..(125): Ceres Seq. ID no. 14313365
  misc_feature (1)..(123): Homolog of NCBI NO: 40714673 NR Description: putative harpin inducing protein
  misc_feature (1)..(123): Homolog of NCBI NO: 40714669 NR Description: putative harpin inducing protein
  misc_feature (1)..(125): Homolog of NCBI NO: 34900798 NR Description: hypothetical protein~predicted by GENSCAN etc.
  misc_feature (1)..(125): Homolog of NCBI NO: 34900820 NR Description: hypothetical protein~predicted by FGENESH etc.
  misc_feature (1)..(125): Homolog of NCBI NO: 34900810 NR Description: hypothetical protein~predicted by FGENESH etc.
MSVKNTQPLEADYSFDGQRFERVRLADEGSTHPAGKTQVYHLVSGSDGAYVALGNAGVAEFKEENKTGVFQVEVALSGQVRYQAHFTKCKFQANCPLKLQLAPPGTPAVVFQKVKCKLAPASRYC

SEQ ID NO: 66770 - DNA, 954 bp, Triticum aestivum
  misc_feature (1)..(954): Ceres Seq. ID no. 14301807
cccagttcatcgcgatctaagttctaaaataaataaaaagctcatcgcgatctccgtccaactcctcccccaaatcacactcgccggagtgctccgccgtgtaatctagtcccccccttcccaatccctcctgattcgagcgcgcggacgggaggattgcttcgatgcaccggcgtcggcgcgagcggtcgggcaggcggtggccggagctttgcgccggcggccgcctgagatggggaggaagatggaggccaggcgtcggcgtgtgccccttcttcccgcgcggtgcaccagcgatggccggaagggggtgggtggagcgggaggacggcggccagtcggaccatcatgagcatgatcacacccatgaccctggtgtttcctccgtaagcattttttgcgaaggggagatggatctctaaaagtaaaaagtgctgacatatgccggatgaagggactactctctatccagtggaatgtctcaatgctttgcctttcagatttgcacagatgggagaacaaattgctatgtgttctgctccgctctcgttatggaccacttccatgttatccatctgcaatgagtgtatatgacactttacatggatctcccaacagattgaatgtgccgcgcatgaacgagatcgtgcccatcagcagaaacctcaaccgggaagagcgggagccgggcttccaggattgcctgctgaaggaataggccagagacaccaagtttctctctctgcttctcctttttcgcggggtggatctccagctccatgattttgagctttgcggctgcatccagaacttgttcttcaaatgcttaggctcaactgtgcttgaactgacatgaagcgtacgcgaggtgtatgtatatcgacctggccgtttcattgttggaacctggccgtcgtgccgtccactgctgttctcatatgagtcaacaacttc

SEQ ID NO: 66771 - protein, 89 aa, Triticum aestivum
  peptide (1)..(89): Ceres Seq. ID no. 14301808
  misc_feature (47)..(87): Homolog of NCBI NO: 15218287 NR Description: PRLI-interacting factor L -related [Arabidopsis
  misc_feature (47)..(87): Homolog of NCBI NO: 11139268 NR Description: PRLI-interacting factor L [Arabidopsis thaliana]
  misc_feature (47)..(87): Homolog of NCBI NO: 15220146 NR Description: expressed protein [Arabidopsis thaliana]
MKGLLSIQWNVSMLCLSDLHRWENKLLCVLLRSRYGPLPCYPSAMSVYDTLHGSPNRLNVPRMNEIVPISRNLNREEREPGFQDCLLKE

SEQ ID NO: 66772 - protein, 85 aa, Triticum aestivum
  peptide (1)..(85): Ceres Seq. ID no. 14301809
  misc_feature (61)..(85): Homolog of NCBI NO: 15218287 NR Description: PRLI-interacting factor L -related [Arabidopsis
  misc_feature (61)..(85): Homolog of NCBI NO: 11139268 NR Description: PRLI-interacting factor L [Arabidopsis thaliana]
  misc_feature (55)..(85): Homolog of NCBI NO: 15220146 NR Description: expressed protein [Arabidopsis thaliana]
MHRRRRERSGRRWPELCAGGRLRWGGRWRPGVGVCPFFPRGAPAMAGRGWVEREDGGQSDHHEHDHTHDPGVSSVSIFCEGEMDL

SEQ ID NO: 66773 - protein, 77 aa, Triticum aestivum
  peptide (1)..(77): Ceres Seq. ID no. 14301810
  misc_feature (35)..(75): Homolog of NCBI NO: 15218287 NR Description: PRLI-interacting factor L -related [Arabidopsis
  misc_feature (35)..(75): Homolog of NCBI NO: 11139268 NR Description: PRLI-interacting factor L [Arabidopsis thaliana]
  misc_feature (35)..(75): Homolog of NCBI NO: 15220146 NR Description: expressed protein [Arabidopsis thaliana]
MLCLSDLHRWENKLLCVLLRSRYGPLPCYPSAMSVYDTLHGSPNRLNVPRMNEIVPISRNLNREEREPGFQDCLLKE

SEQ ID NO: 66774 - DNA, 1524 bp, Triticum aestivum
  misc_feature (1)..(1524): Ceres Seq. ID no. 12779935
acaatctttcaagtacacctccccagcttccatttaagaatggagatcactagaataggccaatggttaagtcttctgatatgtgtactactattactgcagacagaaggggttcctgtgggaatcacttttgttgaaaatgcagtggcaaaaggggctgtttgtttggatgggagtcctccagcttaccacttccacaagggatctggagcagggattaacaactggatagttcactttgagggaggaggatggtgcaacaacgttactacttgcctttcccgtagggacactcgattaggttcatctaagaaaatggatacatcactttccttttctgggtttttcagtaacagtaaaaagttcaatccagatttctatgattggaacagaatcaaggttaggtattgtgatgggtcatcatttactggtgatgttgaagctgttgatccgaaaaccaatttgcacttcagaggagcaagggtttttgctgtggtcgttgaggatttattagcaaaaggaatgaaaaatgctcaaaatgcaattatctccggatgttcagctggaggattggcttctattctaaattgcgatcgattcaaatcactactacctgcaacaactaaagtgaaatgccttgcagatgctggtttttttatcaatgtaaaggatgtctctggagcacagcgcattgaagagttctacagtcaagttgttcaaacacatggctcagcaaagaatttgcctacatcctgcacttcaagactcagaccagggctgtgctttttccctcaaaatgtcgtgtcccaaatcagtaccccaatcttctttgtaaatgcagcctatgactcatggcagatcaaaaacattttggcaccaggtgctgctgatccccgtggccaatggcgtgaatgcaagcttgatatcaaaaactgctcacctaatcaactcagtgtaatgcaaggattcaggacagatttcttaagggcatttagtgtggttggcaacgccgcatctaaagggcattttatagatggttgctatgcacactgccaaactggaatacaagagacatggctgagaaatgactccccagtggtggccaagacatcaattgcaaaggcagtgggtgattggttttatgatcgaaggcccttccgtgagatagattgtgcctacccttgcaaccctacttgccataatcgtatttttgatcagaatgagcgtccagacgtatagattcatttaaaagagtatgcttatttatttattactacaaactatactttattagttatctagtttttattgaacgagatgtgtcacttgcactcatggctttgtggtttgagatctcaaaccatcaaagtatgggttcgattgttgcatcaacaaaaaacaagctgtgattgatgatttaaaaggttccaaagtgtaagggtaggcaacctgataaaggatgataattgtctaccatgtaaacataacatttttattatcaataaagggtatatctgtaattct

SEQ ID NO: 66775 - protein, 412 aa, Triticum aestivum
  peptide (1)..(412): Ceres Seq. ID no. 12779936
  misc_feature (24)..(389): Pfam Name: Pectinacetylesterase Pfam Description: Pectinacetylesterase
  misc_feature (40)..(404): Homolog of NCBI NO: 30696158 NR Description: pectinacetylesterase, putative [Arabidopsis
  misc_feature (40)..(404): Homolog of NCBI NO: 25347293 NR Description: probable pectinacetylesterase precursor T8L23.6
  misc_feature (18)..(151): Homolog of NCBI NO: 7488140 NR Description: probable pectin acetylesterase (EC 3.1.1.-) -
  misc_feature (174)..(399): Homolog of NCBI NO: 7488140 NR Description: probable pectin acetylesterase (EC 3.1.1.-) -
  misc_feature (22)..(399): Homolog of NCBI NO: 15242357 NR Description: pectinacetylesterase, putative
  misc_feature (18)..(399): Homolog of NCBI NO: 18415308 NR Description: pectinacetylesterase, putative
  misc_feature (16)..(399): Homolog of NCBI NO: 21593445 NR Description: pectin acetylesterase [Arabidopsis thaliana]
  misc_feature (20)..(402): Homolog of NCBI NO: 38344147 NR Description: OSJNBa0041A02.14 [Oryza sativa (japonica
  misc_feature (18)..(412): Homolog of NCBI NO: 22328797 NR Description: pectinacetylesterase family; protein id:
  misc_feature (14)..(412): Homolog of NCBI NO: 7488883 NR Description: pectin acetylesterase (EC 3.1.1.-) precursor -
TIFQVHLPSFHLRMEITRIGQWLSLLICVLLLLQTEGVPVGITFVENAVAKGAVCLDGSPPAYHFHKGSGAGINNWIVHFEGGGWCNNVTTCLSRRDTRLGSSKKMDTSLSFSGFFSNSKKFNPDFYDWNRIKVRYCDGSSFTGDVEAVDPKTNLHFRGARVFAVVVEDLLAKGMKNAQNAIISGCSAGGLASILNCDRFKSLLPATTKVKCLADAGFFINVKDVSGAQRIEEFYSQVVQTHGSAKNLPTSCTSRLRPGLCFFPQNVVSQISTPIFFVNAAYDSWQIKNILAPGAADPRGQWRECKLDIKNCSPNQLSVMQGFRTDFLRAFSVVGNAASKGHFIDGCYAHCQTGIQETWLRNDSPVVAKTSIAKAVGDWFYDRRPFREIDCAYPCNPTCHNRIFDQNERPDV

SEQ ID NO: 66776 - protein, 399 aa, Triticum aestivum
  peptide (1)..(399): Ceres Seq. ID no. 12779937
  misc_feature (11)..(376): Pfam Name: Pectinacetylesterase Pfam Description: Pectinacetylesterase
  misc_feature (27)..(391): Homolog of NCBI NO: 30696158 NR Description: pectinacetylesterase, putative [Arabidopsis
  misc_feature (27)..(391): Homolog of NCBI NO: 25347293 NR Description: probable pectinacetylesterase precursor T8L23.6
  misc_feature (5)..(138): Homolog of NCBI NO: 7488140 NR Description: probable pectin acetylesterase (EC 3.1.1.-) -
  misc_feature (161)..(386): Homolog of NCBI NO: 7488140 NR Description: probable pectin acetylesterase (EC 3.1.1.-) -
  misc_feature (9)..(386): Homolog of NCBI NO: 15242357 NR Description: pectinacetylesterase, putative
  misc_feature (5)..(386): Homolog of NCBI NO: 18415308 NR Description: pectinacetylesterase, putative
  misc_feature (3)..(386): Homolog of NCBI NO: 21593445 NR Description: pectin acetylesterase [Arabidopsis thaliana]
  misc_feature (7)..(389): Homolog of NCBI NO: 38344147 NR Description: OSJNBa0041A02.14 [Oryza sativa (japonica
  misc_feature (5)..(399): Homolog of NCBI NO: 22328797 NR Description: pectinacetylesterase family; protein id:
  misc_feature (1)..(399): Homolog of NCBI NO: 7488883 NR Description: pectin acetylesterase (EC 3.1.1.-) precursor -
MEITRIGQWLSLLICVLLLLQTEGVPVGITFVENAVAKGAVCLDGSPPAYHFHKGSGAGINNWIVHFEGGGWCNNVTTCLSRRDTRLGSSKKMDTSLSFSGFFSNSKKFNPDFYDWNRIKVRYCDGSSFTGDVEAVDPKTNLHFRGARVFAVVVEDLLAKGMKNAQNAIISGCSAGGLASILNCDRFKSLLPATTKVKCLADAGFFINVKDVSGAQRIEEFYSQVVQTHGSAKNLPTSCTSRLRPGLCFFPQNVVSQISTPIFFVNAAYDSWQIKNILAPGAADPRGQWRECKLDIKNCSPNQLSVMQGFRTDFLRAFSVVGNAASKGHFIDGCYAHCQTGIQETWLRNDSPVVAKTSIAKAVGDWFYDRRPFREIDCAYPCNPTCHNRIFDQNERPDV

SEQ ID NO: 66777 - protein, 307 aa, Triticum aestivum
  peptide (1)..(307): Ceres Seq. ID no. 12779938
  misc_feature (1)..(284): Pfam Name: Pectinacetylesterase Pfam Description: Pectinacetylesterase
  misc_feature (1)..(299): Homolog of NCBI NO: 30696158 NR Description: pectinacetylesterase, putative [Arabidopsis
  misc_feature (1)..(299): Homolog of NCBI NO: 25347293 NR Description: probable pectinacetylesterase precursor T8L23.6
  misc_feature (1)..(46): Homolog of NCBI NO: 7488140 NR Description: probable pectin acetylesterase (EC 3.1.1.-) -
  misc_feature (69)..(294): Homolog of NCBI NO: 7488140 NR Description: probable pectin acetylesterase (EC 3.1.1.-) -
  misc_feature (1)..(294): Homolog of NCBI NO: 15242357 NR Description: pectinacetylesterase, putative
  misc_feature (1)..(294): Homolog of NCBI NO: 18415308 NR Description: pectinacetylesterase, putative
  misc_feature (1)..(294): Homolog of NCBI NO: 21593445 NR Description: pectin acetylesterase [Arabidopsis thaliana]
  misc_feature (1)..(297): Homolog of NCBI NO: 38344147 NR Description: OSJNBa0041A02.14 [Oryza sativa (japonica
  misc_feature (1)..(307): Homolog of NCBI NO: 22328797 NR Description: pectinacetylesterase family; protein id:
  misc_feature (1)..(307): Homolog of NCBI NO: 7488883 NR Description: pectin acetylesterase (EC 3.1.1.-) precursor -
MDTSLSFSGFFSNSKKFNPDFYDWNRIKVRYCDGSSFTGDVEAVDPKTNLHFRGARVFAVVVEDLLAKGMKNAQNAIISGCSAGGLASILNCDRFKSLLPATTKVKCLADAGFFINVKDVSGAQRIEEFYSQVVQTHGSAKNLPTSCTSRLRPGLCFFPQNVVSQISTPIFFVNAAYDSWQIKNILAPGAADPRGQWRECKLDIKNCSPNQLSVMQGFRTDFLRAFSVVGNAASKGHFIDGCYAHCQTGIQETWLRNDSPVVAKTSIAKAVGDWFYDRRPFREIDCAYPCNPTCHNRIFDQNERPDV

SEQ ID NO: 66778 - DNA, 971 bp, Triticum aestivum
  misc_feature (1)..(971): Ceres Seq. ID no. 12454684
attgtcaagtggttcaaggcttgaggcatccggaatttgagaccaaagcagtcttgtttctctgcagcagccgacgctgctgatgcccgagccccaccaaatccaccaacccccgcccccgcccccgcctccaaccgatccaaaccccgttgcctccacggctgcaaatgcccggcgcaatccggccccgctgccgctgccgttgcctttgccggatgcggcgtcggcttcagcgtcggcatcacgctcgccggtgtcggcgtcgggctgccacagcacggcatcatcgggaaccactaccacggtggaggttttgcaagcaatgtcccattcgaatcagcaagggttttacctcttgaccatgctaaaaggtatggcatgggatgccatcagttatgcgagcaacgtcgcagctatgaggaaagaatctcgacagaagcttttaagatgtcaggagaatcctcaagtttcaggaggagttgatctgcccaagctggggaaaggaatgtccagcagctttcgatcaacgatggagtgtatcaaggccttcacaaatcagcattggcctccataggcagcacccaagtaaactgaagattgataaaccgagctttgtgtgcaaaccacccaaccgggatcaaagcctgggtagtggtacccctttcactgagtgacaatcgggtagtcggatgcaggtggctcgtatggcgtccaccacagggttgacgtcccttttaatgaagaattaaggacttgtactttatgaataagaacccccatagcacatatttnttcatcatatgtttgtggcatgagcaagtttaaatttttatggttataaggggaaacaattccagctgaagaacatgntagcctgtaatctagctagtgatgaatcgatgtgtaactataacaatgatgttcatccatgcncttcgcagaatcttgtattgtgaaatgaaactccattc

SEQ ID NO: 66779 - protein, 163 aa, Triticum aestivum
  peptide (1)..(163): Ceres Seq. ID no. 12454685
  misc_feature (1)..(33): Homolog of NCBI NO: 34899622 NR Description: cadmium-induced protein-like
  misc_feature (89)..(163): Homolog of NCBI NO: 34899622 NR Description: cadmium-induced protein-like
MPEPHQIHQPPPPPPPPTDPNPVASTAANARRNPAPLPLPLPLPDAASASASASRSPVSASGCHSTASSGTTTTVEVLQAMSHSNQQGFYLLTMLKGMAWDAISYASNVAAMRKESRQKLLRCQENPQVSGGVDLPKLGKGMSSSFRSTMECIKAFTNQHWPP

SEQ ID NO: 66780 - protein, 83 aa, Triticum aestivum
  peptide (1)..(83): Ceres Seq. ID no. 12454686
  misc_feature (9)..(83): Homolog of NCBI NO: 34899622 NR Description: cadmium-induced protein-like
MSHSNQQGFYLLTMLKGMAWDAISYASNVAAMRKESRQKLLRCQENPQVSGGVDLPKLGKGMSSSFRSTMECIKAFTNQHWPP

SEQ ID NO: 66781 - DNA, 1030 bp, Triticum aestivum
  misc_feature (1)..(1030): Ceres Seq. ID no. 12784913
gtagttctcgtgctcactgcccacccagctcatctcgtctcaatctcacccgtctcttcctccaccgtctagaagcttctcgaaggcaggcgccatacacttctctcctctcgccatgggcaacgggctgtctccctgcgtgaacatgccggcggccgccgaggtgcccgccgcggcccggctggtgtactggggcgggcggacgagggcgctgccagtctacgaggacgaggagggtgatggcgagggcaacggcggtgtctcctgcacggcggcggacgtgacggccgagctgctcccggcggaccacgtggtctgcccggccgactccttcttcgtcggcctcccggtccccgtcgcgtcgccgggggagcggctgctgccgggccggacctacttcgtgctcccccgccgcctcctctcctccccctcccccggcggcaacggcaaggcggccgtgctcaccgcggccacgctcgcgtcgctgtcggccgcgccggggggcaggaagacggtgcagctcgccgggcccggccagtgcccgttcgagtacgtcaagggcggcgaggacggtgccgcggcgctcatccgggtcctgccgcagttcatcgagaaggtcatcacctgcgacggcggcaacggcaacggcgacgctgccggccggcgcgggtcgggcaaggtggctgcgtccgcgacggagctgtgcagcacgccggagctgaagcggcactacgcgcagctcgtgggcgccaagggccggccgtggtcgccggggctggagaccatctccgagcgcagcaagaggaggatcttcccgtcgccggccaggctgctgctctcttcgcaataatgtaattagctaatgagcgtagatcgttttcggattagagattaatcgagattaattaggtagggaacacagcgttcgattttacttgtacaatagttggaactgaaatacaaatgtataaatttgtcgaaaacatttacatatgtacctaggatttttggaagtgagatactacaagtc

SEQ ID NO: 66782 - protein, 244 aa, Triticum aestivum
  peptide (1)..(244): Ceres Seq. ID no. 12784914
  misc_feature (64)..(234): Homolog of NCBI NO: 18416841 NR Description: putative protein; protein id: At5g12340.1
  misc_feature (66)..(231): Homolog of NCBI NO: 34899084 NR Description: hypothetical protein~similar to Oryza sativa
  misc_feature (44)..(242): Homolog of NCBI NO: 34906632 NR Description: P0431G06.11 [Oryza sativa (japonica
MGNGLSPCVNMPAAAEVPAAARLVYWGGRTRALPVYEDEEGDGEGNGGVSCTAADVTAELLPADHVVCPADSFFVGLPVPVASPGERLLPGRTYFVLPRRLLSSPSPGGNGKAAVLTAATLASLSAAPGGRKTVQLAGPGQCPFEYVKGGEDGAAALIRVLPQFIEKVITCDGGNGNGDAAGRRGSGKVAASATELCSTPELKRHYAQLVGAKGRPWSPGLETISERSKRRIFPSPARLLLSSQ

SEQ ID NO: 66783 - protein, 234 aa, Triticum aestivum
  peptide (1)..(234): Ceres Seq. ID no. 12784915
  misc_feature (54)..(224): Homolog of NCBI NO: 18416841 NR Description: putative protein; protein id: At5g12340.1
  misc_feature (56)..(221): Homolog of NCBI NO: 34899084 NR Description: hypothetical protein~similar to Oryza sativa
  misc_feature (34)..(232): Homolog of NCBI NO: 34906632 NR Description: P0431G06.11 [Oryza sativa (japonica
MPAAAEVPAAARLVYWGGRTRALPVYEDEEGDGEGNGGVSCTAADVTAELLPADHVVCPADSFFVGLPVPVASPGERLLPGRTYFVLPRRLLSSPSPGGNGKAAVLTAATLASLSAAPGGRKTVQLAGPGQCPFEYVKGGEDGAAALIRVLPQFIEKVITCDGGNGNGDAAGRRGSGKVAASATELCSTPELKRHYAQLVGAKGRPWSPGLETISERSKRRIFPSPARLLLSSQ

SEQ ID NO: 66784 - DNA, 1333 bp, Triticum aestivum
  misc_feature (1)..(1333): Ceres Seq. ID no. 12784099
acaaaacaaaacgaccgcccctccgcccttctcccgccctcgcccctctccctctcctcctcccctccttccccggcaagactagggtttgcagccaccgggcctcaccatgtacaacggaggcgaccactacgacgggaacggcggcggcgccgccaacgccaacagcctcttcagcggcggcgggttcatgccctcgcagaccaccaacaccccggagggcagcggcggcatcaccaagactcgcggcgcgcagacgctgctcccgctcaccgtcaagcagattatggacgcgtcccagaccaacgacgacaagtccagtttcgctgtcaatggcaccgaggtgtccacggttaggcttgtaggacgcatgatgaataaggcagagcggatgacagatgtacaattcattcttgatgatggtacaggcaggatagaagtgaatcgctgggaaaatgagacatcggacactacagaaatgagtttagtcaaggatggtgactatgttattgtcaatggtggtctgaaaagctttcaagggaagcgtcacattgttgcttattccgtgcggcttgtaaccaactacaatgatataacacatcactttctgtactgcatttatgtgcatttggatcttgccaaggctaagaaatctgggacacagcctcaagtaactgctaatgcatcatggaaccaagctccaccccctaataatcaggccccaacactatctgcatctgggaatgctggtgggcaagatttaactgatatggtcatgaatgtttttcatgacccagtgcttgtaaacctggagcatggagttagtatcgaacaggttgcaagccgtcttaacatatcagatgcacttgccaggtcgactgttacacatcttattgatgttggcaacctctatccaactatcgatgacaaccattacaagtctacactgaatggttgatatggctgtgcccacgcgtgcaagcgttaggctcccctggagcgatcgaataatataagcactcttgcaagagttgtttttgcagagtggcttgctggtcctctagacagtcgcaaggagagcaacttaacggctaggttaagttgcatatctaagcacttgcgccttatgtgtaatggatatgagtaggttagatctctaggtgctttcgtttgtgtttgctactgcagtacctcgagaacatccatgcctgtgtgacctgcaattagtttgcgacttgtttgtggttatgactctgccctgcatattgtttctggattcagttaacgtttgccctaaaaatgcatatcatgcatctgattatttctggattcc

SEQ ID NO: 66785 - protein, 282 aa, Triticum aestivum
  peptide (1)..(282): Ceres Seq. ID no. 12784100
  misc_feature (82)..(154): Pfam Name: OB-fold nucleic acid binding domain Pfam Description: OB-fold nucleic acid binding domain
  misc_feature (42)..(280): Homolog of NCBI NO: 19075727 NR Description: replication factor-a protein 2
  misc_feature (1)..(273): Homolog of NCBI NO: 21627816 NR Description: possible replication factor-a protein
  misc_feature (8)..(280): Homolog of NCBI NO: 2498849 NR Description: Replication factor-A protein 2 (Single-stranded
  misc_feature (13)..(281): Homolog of NCBI NO: 6728969 NR Description: putative replication factor A [Arabidopsis
  misc_feature (13)..(281): Homolog of NCBI NO: 18396383 NR Description: putative replication factor A
  misc_feature (201)..(277): Homolog of NCBI NO: 25347925 NR Description: probable replication protein A1 [imported] -
  misc_feature (19)..(185): Homolog of NCBI NO: 25347925 NR Description: probable replication protein A1 [imported] -
  misc_feature (19)..(277): Homolog of NCBI NO: 18400560 NR Description: putative replication protein A1
  misc_feature (27)..(281): Homolog of NCBI NO: 9801268 NR Description: replication protein A2 [Oryza sativa]
  misc_feature (27)..(281): Homolog of NCBI NO: 13516746 NR Description: replication protein A 30kDa
MYNGGDHYDGNGGGAANANSLFSGGGFMPSQTTNTPEGSGGITKTRGAQTLLPLTVKQIMDASQTNDDKSSFAVNGTEVSTVRLVGRMMNKAERMTDVQFILDDGTGRIEVNRWENETSDTTEMSLVKDGDYVIVNGGLKSFQGKRHIVAYSVRLVTNYNDITHHFLYCIYVHLDLAKAKKSGTQPQVTANASWNQAPPPNNQAPTLSASGNAGGQDLTDMVMNVFHDPVLVNLEHGVSIEQVASRLNISDALARSTVTHLIDVGNLYPTIDDNHYKSTLNG

SEQ ID NO: 66786 - protein, 255 aa, Triticum aestivum
  peptide (1)..(255): Ceres Seq. ID no. 12784101
  misc_feature (55)..(127): Pfam Name: OB-fold nucleic acid binding domain Pfam Description: OB-fold nucleic acid binding domain
  misc_feature (15)..(253): Homolog of NCBI NO: 19075727 NR Description: replication factor-a protein 2
  misc_feature (1)..(246): Homolog of NCBI NO: 21627816 NR Description: possible replication factor-a protein
  misc_feature (1)..(253): Homolog of NCBI NO: 2498849 NR Description: Replication factor-A protein 2 (Single-stranded
  misc_feature (1)..(254): Homolog of NCBI NO: 6728969 NR Description: putative replication factor A [Arabidopsis
  misc_feature (1)..(254): Homolog of NCBI NO: 18396383 NR Description: putative replication factor A
  misc_feature (174)..(250): Homolog of NCBI NO: 25347925 NR Description: probable replication protein A1 [imported] -
  misc_feature (1)..(158): Homolog of NCBI NO: 25347925 NR Description: probable replication protein A1 [imported] -
  misc_feature (1)..(250): Homolog of NCBI NO: 18400560 NR Description: putative replication protein A1
  misc_feature (1)..(254): Homolog of NCBI NO: 9801268 NR Description: replication protein A2 [Oryza sativa]
  misc_feature (1)..(254): Homolog of NCBI NO: 13516746 NR Description: replication protein A 30kDa
MPSQTTNTPEGSGGITKTRGAQTLLPLTVKQIMDASQTNDDKSSFAVNGTEVSTVRLVGRMMNKAERMTDVQFILDDGTGRIEVNRWENETSDTTEMSLVKDGDYVIVNGGLKSFQGKRHIVAYSVRLVTNYNDITHHFLYCIYVHLDLAKAKKSGTQPQVTANASWNQAPPPNNQAPTLSASGNAGGQDLTDMVMNVFHDPVLVNLEHGVSIEQVASRLNISDALARSTVTHLIDVGNLYPTIDDNHYKSTLNG

SEQ ID NO: 66787 - protein, 223 aa, Triticum aestivum
  peptide (1)..(223): Ceres Seq. ID no. 12784102
  misc_feature (23)..(95): Pfam Name: OB-fold nucleic acid binding domain Pfam Description: OB-fold nucleic acid binding domain
  misc_feature (1)..(221): Homolog of NCBI NO: 19075727 NR Description: replication factor-a protein 2
  misc_feature (1)..(214): Homolog of NCBI NO: 21627816 NR Description: possible replication factor-a protein
  misc_feature (1)..(221): Homolog of NCBI NO: 2498849 NR Description: Replication factor-A protein 2 (Single-stranded
  misc_feature (1)..(222): Homolog of NCBI NO: 6728969 NR Description: putative replication factor A [Arabidopsis
  misc_feature (1)..(222): Homolog of NCBI NO: 18396383 NR Description: putative replication factor A
  misc_feature (142)..(218): Homolog of NCBI NO: 25347925 NR Description: probable replication protein A1 [imported] -
  misc_feature (1)..(126): Homolog of NCBI NO: 25347925 NR Description: probable replication protein A1 [imported] -
  misc_feature (1)..(218): Homolog of NCBI NO: 18400560 NR Description: putative replication protein A1
  misc_feature (1)..(222): Homolog of NCBI NO: 9801268 NR Description: replication protein A2 [Oryza sativa]
  misc_feature (1)..(222): Homolog of NCBI NO: 13516746 NR Description: replication protein A 30kDa
MDASQTNDDKSSFAVNGTEVSTVRLVGRMMNKAERMTDVQFILDDGTGRIEVNRWENETSDTTEMSLVKDGDYVIVNGGLKSFQGKRHIVAYSVRLVTNYNDITHHFLYCIYVHLDLAKAKKSGTQPQVTANASWNQAPPPNNQAPTLSASGNAGGQDLTDMVMNVFHDPVLVNLEHGVSIEQVASRLNISDALARSTVTHLIDVGNLYPTIDDNHYKSTLNG

SEQ ID NO: 66788 - DNA, 1237 bp, Triticum aestivum
  misc_feature (1)..(1237): Ceres Seq. ID no. 14301782
gtattctctctttgtgtttacttgctcttaaaaattatctcacctgctgtgttgttatcagcagtatatctacctacctgtatacagccatacacatcaccagaggtttttcactgttgttgctgcacctgaatctgcaatgggtaggtccccagggccaaggagggggagtgccctgcttctgcctctgtttctcacctgcttcttctcaggggcaacgaggcgggcggagtcggcccgggagttcacgctcatcaaccagtgcaagacggaggtgtggccggcggtgacgccgggcgagagcttcgggggcggcgggtatgcgctccgtgcaggcgagtcggtggtgttcaccgcccccgtggggtggtcgggccgcgtgtggggccgcaccggctgcacctttgactcggccggcaacggcacgtgcgagacgggcgggtgcggcacgtcgctgcagtgcgaatcggcgtcgggggccgctccggcgacgctggcggagttcacgctggcggcgactgactactacgacgtgagcctggtggacggcttcaacctccccgtggtggtgaccccgaccccgacgagcgccaactggacaggctgcgccccggcggggtgcgacggtgacctgcgccggggctgcccgtcggagctggccgtgaagggcgacggggggaaggtggtggcttgccggagcgcgtgcgacgtgttcgggaccgaccagtactgctgccgtggtcagtatgccaacccggtggcctgccagccgaccttctactcgaagaagttcaaggcggcatgcccggccgcctacagctacgcctacgacgacccctcctccatcttcacccgcgcccagtcgcccgactacaccatcaccttctgctccagcaacatgaagcaatcggtgtgttcgtaccgcgacagccggcttgtctgcagcggctccggcaggagcacctcctctggtctaatgctgctgctgctgctctccagcttcgtggcattgcaatttgcaaccccagtgtgactgattggttgattaaggcctaatcatccaagagcaagctgacctgaccctcttcttgatatagttctttttggatttgttttctactatgagaaacagagagtaggtgattcatggatcaaatttctgcactgtcagacagtcagtactcagtaccatttgaatgagagttatacagagatagcataagtgaatgtttcgttc

SEQ ID NO: 66789 - protein, 297 aa, Triticum aestivum
  peptide (1)..(297): Ceres Seq. ID no. 14301783
  misc_feature (40)..(251): Pfam Name: Thaumatin family Pfam Description: Thaumatin family
  misc_feature (8)..(278): Homolog of NCBI NO: 21592749 NR Description: putative thaumatin-like protein [Arabidopsis
  misc_feature (32)..(250): Homolog of NCBI NO: 15221033 NR Description: thaumatin-like protein [Arabidopsis thaliana]
  misc_feature (17)..(250): Homolog of NCBI NO: 2435406 NR Description: thaumatin-like protein [Arabidopsis thaliana]
  misc_feature (17)..(250): Homolog of NCBI NO: 15222088 NR Description: thaumatin-like protein [Arabidopsis thaliana]
  misc_feature (9)..(294): Homolog of NCBI NO: 37531042 NR Description: putative thaumatin-like protein
  misc_feature (17)..(251): Homolog of NCBI NO: 28973703 NR Description: putative pathogenesis-related protein 5 precursor
  misc_feature (17)..(251): Homolog of NCBI NO: 30686314 NR Description: thaumatin family [Arabidopsis thaliana]
  misc_feature (23)..(252): Homolog of NCBI NO: 15217445 NR Description: thaumatin family [Arabidopsis thaliana]
  misc_feature (9)..(294): Homolog of NCBI NO: 5777618 NR Description: CAA30376.1 protein [Oryza sativa]
  misc_feature (9)..(294): Homolog of NCBI NO: 38345519 NR Description: OSJNBa0039K24.22 [Oryza sativa (japonica
MGRSPGPRRGSALLLPLFLTCFFSGATRRAESAREFTLINQCKTEVWPAVTPGESFGGGGYALRAGESVVFTAPVGWSGRVWGRTGCTFDSAGNGTCETGGCGTSLQCESASGAAPATLAEFTLAATDYYDVSLVDGFNLPVVVTPTPTSANWTGCAPAGCDGDLRRGCPSELAVKGDGGKVVACRSACDVFGTDQYCCRGQYANPVACQPTFYSKKFKAACPAAYSYAYDDPSSIFTRAQSPDYTITFCSSNMKQSVCSYRDSRLVCSGSGRSTSSGLMLLLLLSSFVALQFATPV

SEQ ID NO: 66790 - DNA, 1096 bp, Triticum aestivum
  misc_feature (1)..(1096): Ceres Seq. ID no. 14301761
aacacaaagtcttgcttcagtctgcgcctagtcctagcaggtcgcgaatttcgccggttctattgtttctctaattatcttcgagcagatcactagcaggcaccgacggatttggagcagctctgatctttagcggccatggtcaagaaaggaatccagtatgtcgtggtggatgccttcacggcccagccgttcaagggcaacccggcggcggtgtgcttcctggaggacgacgcggccgcccccgcgggggacgggcggtggatgcagtccgtcgccgtcgagttcaacctctcccagacggccttcttctcccgtgactcgtcctgcgcagccgacgccaccacgccgcggttccacctccgctggttcacccccgtcaccgaggtcgcgctctgcggccacgcaacgctggccaccgcccacttcctcttcacgtctgtcctcgcggagcgccatggcgtggttgagttcgcgaccaagtccggggtcctgaccgccaagaaggttcctgcaccggaggctgaggagcaggggaagctgttcattgagctggacttccccatgagtgattatgtgggttgcgatcccgccgacgagctgccgtccatcccggagacgctcaacggcgcgcccgtcgtcagtgttcacaaatcagtggccaccaacgacttcattgttgaactttcatcaggaaaagaggtcgccgatgtccttcctaacatcgaagaaataagaaagtgtgccggcagaggtgtgattgttacagcaccggcgcctgctggatcgggttatgacttcttcacacgcttcttctgcccaaaatttgggattgatgaggatcccgtatgtggcagtgcacactgtgttttggcaccctactggggtggaaagctggggaagcaaaaactgatagcgtttcaggtatctccaaggagtggggcactatacctggagctggatgttgcgaatcagcgagtgcggattcagggagaagctgttactgtcatggctgggacactcttcgcttagctagcatattgaccatccattgacttgctctatgaacttgggagaaataaatatatttgctgcc

SEQ ID NO: 66791 - protein, 297 aa, Triticum aestivum
  peptide (1)..(297): Ceres Seq. ID no. 14301762
  misc_feature (11)..(123): Homolog of NCBI NO: 15597966 NR Description: hypothetical protein [Pseudomonas aeruginosa
  misc_feature (137)..(295): Homolog of NCBI NO: 15597966 NR Description: hypothetical protein [Pseudomonas aeruginosa
  misc_feature (10)..(297): Homolog of NCBI NO: 18202860 NR Description: Probable oxidoreductase 0610038K03Rik
  misc_feature (10)..(297): Homolog of NCBI NO: 31560132 NR Description: RIKEN cDNA 0610038K03 [Mus musculus]
  misc_feature (39)..(295): Homolog of NCBI NO: 29833535 NR Description: putative oxidoreductase [Streptomyces avermitilis
  misc_feature (6)..(295): Homolog of NCBI NO: 15236201 NR Description: hypothetical protein [Arabidopsis thaliana]
  misc_feature (3)..(293): Homolog of NCBI NO: 15218739 NR Description: expressed protein [Arabidopsis thaliana]
  misc_feature (3)..(293): Homolog of NCBI NO: 20466358 NR Description: putative protein [Arabidopsis thaliana]
  misc_feature (3)..(293): Homolog of NCBI NO: 15236203 NR Description: expressed protein [Arabidopsis thaliana]
  misc_feature (1)..(297): Homolog of NCBI NO: 34903112 NR Description: unnamed protein product [Oryza sativa (japonica
MVKKGIQYVVVDAFTAQPFKGNPAAVCFLEDDAAAPAGDGRWMQSVAVEFNLSQTAFFSRDSSCAADATTPRFHLRWFTPVTEVALCGHATLATAHFLFTSVLAERHGVVEFATKSGVLTAKKVPAPEAEEQGKLFIELDFPMSDYVGCDPADELPSIPETLNGAPVVSVHKSVATNDFIVELSSGKEVADVLPNIEEIRKCAGRGVIVTAPAPAGSGYDFFTRFFCPKFGIDEDPVCGSAHCVLAPYWGGKLGKQKLIAFQVSPRSGALYLELDVANQRVRIQGEAVTVMAGTLFA

SEQ ID NO: 66792 - protein, 255 aa, Triticum aestivum
  peptide (1)..(255): Ceres Seq. ID no. 14301763
  misc_feature (1)..(81): Homolog of NCBI NO: 15597966 NR Description: hypothetical protein [Pseudomonas aeruginosa
  misc_feature (95)..(253): Homolog of NCBI NO: 15597966 NR Description: hypothetical protein [Pseudomonas aeruginosa
  misc_feature (1)..(255): Homolog of NCBI NO: 18202860 NR Description: Probable oxidoreductase 0610038K03Rik
  misc_feature (1)..(255): Homolog of NCBI NO: 31560132 NR Description: RIKEN cDNA 0610038K03 [Mus musculus]
  misc_feature (1)..(253): Homolog of NCBI NO: 29833535 NR Description: putative oxidoreductase [Streptomyces avermitilis
  misc_feature (1)..(253): Homolog of NCBI NO: 15236201 NR Description: hypothetical protein [Arabidopsis thaliana]
  misc_feature (1)..(251): Homolog of NCBI NO: 15218739 NR Description: expressed protein [Arabidopsis thaliana]
  misc_feature (1)..(251): Homolog of NCBI NO: 20466358 NR Description: putative protein [Arabidopsis thaliana]
  misc_feature (1)..(251): Homolog of NCBI NO: 15236203 NR Description: expressed protein [Arabidopsis thaliana]
  misc_feature (1)..(255): Homolog of NCBI NO: 34903112 NR Description: unnamed protein product [Oryza sativa (japonica
MQSVAVEFNLSQTAFFSRDSSCAADATTPRFHLRWFTPVTEVALCGHATLATAHFLFTSVLAERHGVVEFATKSGVLTAKKVPAPEAEEQGKLFIELDFPMSDYVGCDPADELPSIPETLNGAPVVSVHKSVATNDFIVELSSGKEVADVLPNIEEIRKCAGRGVIVTAPAPAGSGYDFFTRFFCPKFGIDEDPVCGSAHCVLAPYWGGKLGKQKLIAFQVSPRSGALYLELDVANQRVRIQGEAVTVMAGTLFA

SEQ ID NO: 66793 - protein, 155 aa, Triticum aestivum
  peptide (1)..(155): Ceres Seq. ID no. 14301764
  misc_feature (1)..(40): Homolog of NCBI NO: 17542154 NR Description: mawd binding protein like (4N240) [Caenorhabditis
  misc_feature (1)..(153): Homolog of NCBI NO: 15597966 NR Description: hypothetical protein [Pseudomonas aeruginosa
  misc_feature (1)..(155): Homolog of NCBI NO: 18202860 NR Description: Probable oxidoreductase 0610038K03Rik
  misc_feature (1)..(155): Homolog of NCBI NO: 31560132 NR Description: RIKEN cDNA 0610038K03 [Mus musculus]
  misc_feature (1)..(153): Homolog of NCBI NO: 29833535 NR Description: putative oxidoreductase [Streptomyces avermitilis
  misc_feature (1)..(153): Homolog of NCBI NO: 15236201 NR Description: hypothetical protein [Arabidopsis thaliana]
  misc_feature (1)..(151): Homolog of NCBI NO: 15218739 NR Description: expressed protein [Arabidopsis thaliana]
  misc_feature (1)..(151): Homolog of NCBI NO: 20466358 NR Description: putative protein [Arabidopsis thaliana]
  misc_feature (1)..(151): Homolog of NCBI NO: 15236203 NR Description: expressed protein [Arabidopsis thaliana]
  misc_feature (1)..(155): Homolog of NCBI NO: 34903112 NR Description: unnamed protein product [Oryza sativa (japonica
MSDYVGCDPADELPSIPETLNGAPVVSVHKSVATNDFIVELSSGKEVADVLPNIEEIRKCAGRGVIVTAPAPAGSGYDFFTRFFCPKFGIDEDPVCGSAHCVLAPYWGGKLGKQKLIAFQVSPRSGALYLELDVANQRVRIQGEAVTVMAGTLFA

SEQ ID NO: 66794 - DNA, 1370 bp, Triticum aestivum
  misc_feature (1)..(1370): Ceres Seq. ID no. 14313268
aaagagagagaaaagcgcacgaaaagaaaacagagagaaatgaaactgccctgctgctgctgaggtcggcctcctggcgatgagcccccgccgccgtcccccgctgctcctcctcgccgccgtcgccgtcgcctgcgcctgcgccgccgcccgcccctgcgcggccctcgtccgcctcggtgccgcctccttcctcgacgcccccgcgcgcttcgggccccgggtgaccggcgacgggatatgcgggtcgctgcgcgccgcggagcccgccgacgcgtgcgcgcccgtccggggcgcccccggcgggagcggcgggatggcgttcgtgctcatcgcgcgcgggaactgcagcttcgagggcaaggtgcgggcggcgcagcgggccggcttcgacgccgcgctcgtccacgacgacgaggacaaggccagcctctactccatggttggcgatcctgagggcatacacatacctgcggtattcgtatccaaaatggctggggaaaccttgaagaagtttgccagaggtgaagatggggaatgctgtataaactcgtcgatggatgagactgcagggacagtgttggtgatgtcgttcgtatcacttgttgtcatcatatcagttgtagcttcatttcttttcgctcggaactgccgacttttacgcaatggagttgataatcgcccaccttacatcaagaagcatgtggtggaaaagcttccttctgtggtatataaagctccctgctcaagtggcaacaattgtgaagaagcctgtgccatttgtttagaagactatgataatggtgacatgcttagacttctcccatgcaaacatgagtttcatgtggagtgtattgatccctggctgacaaagtggggcacattttgcccggtatgcaaacttgaggtactcacaggtggataagcaggcaagctaggagtaagtctcaggtgaataagcaagcctccgttactgcatactcccttcgtccggaaatacttgtagaagaaatgggtaaaaatggatatatgtagaactaaaacacatccagatacatccattcccccgacaagtatttccggatggagggagtatatacaagtagtgctcggcggcatgacggttatatccaggcgtgctgaactggttgatctgttgttggctgggtttgcaagatagatcaatgccgaacattttatcatgaggatggggtatgggctgtgcggtctctgggactgggcccgtcttgatacccagtagaagattgaattgtgtcgttaacattgagatgaactgtttaattgaggtgtagtatgtggaagccatcttgtaattatatgtcagaagttcaattgcttctttcccatgc

SEQ ID NO: 66795 - protein, 281 aa, Triticum aestivum
  peptide (1)..(281): Ceres Seq. ID no. 14313269
  misc_feature (49)..(147): Pfam Name: PA domain Pfam Description: PA domain
  misc_feature (10)..(280): Homolog of NCBI NO: 15219670 NR Description: integral membrane protein -related [Arabidopsis
  misc_feature (37)..(281): Homolog of NCBI NO: 15233945 NR Description: expressed protein [Arabidopsis thaliana]
  misc_feature (47)..(280): Homolog of NCBI NO: 15219668 NR Description: integral membrane protein -related [Arabidopsis
  misc_feature (37)..(279): Homolog of NCBI NO: 15219930 NR Description: RING zinc finger protein -related [Arabidopsis
  misc_feature (9)..(279): Homolog of NCBI NO: 6942149 NR Description: ReMembR-H2 protein JR702 [Arabidopsis thaliana]
  misc_feature (4)..(280): Homolog of NCBI NO: 19071633 NR Description: putative integral membrane protein
  misc_feature (37)..(279): Homolog of NCBI NO: 25406132 NR Description: unknown protein F17M19.13 [imported] -
  misc_feature (6)..(279): Homolog of NCBI NO: 22330577 NR Description: expressed protein [Arabidopsis thaliana]
  misc_feature (8)..(280): Homolog of NCBI NO: 38637053 NR Description: putative ReMembR-H2 protein
  misc_feature (10)..(279): Homolog of NCBI NO: 15239276 NR Description: ReMembR-H2 protein JR700 (gb|AAF32325.1)
MSPRRRPPLLLLAAVAVACACAAARPCAALVRLGAASFLDAPARFGPRVTGDGICGSLRAAEPADACAPVRGAPGGSGGMAFVLIARGNCSFEGKVRAAQRAGFDAALVHDDEDKASLYSMVGDPEGIHIPAVFVSKMAGETLKKFARGEDGECCINSSMDETAGTVLVMSFVSLVVIISVVASFLFARNCRLLRNGVDNRPPYIKKHVVEKLPSVVYKAPCSSGNNCEEACAICLEDYDNGDMLRLLPCKHEFHVECIDPWLTKWGTFCPVCKLEVLTGG

SEQ ID NO: 66796 - protein, 202 aa, Triticum aestivum
  peptide (1)..(202): Ceres Seq. ID no. 14313270
  misc_feature (1)..(68): Pfam Name: PA domain Pfam Description: PA domain
  misc_feature (1)..(201): Homolog of NCBI NO: 15219670 NR Description: integral membrane protein -related [Arabidopsis
  misc_feature (1)..(202): Homolog of NCBI NO: 15233945 NR Description: expressed protein [Arabidopsis thaliana]
  misc_feature (1)..(201): Homolog of NCBI NO: 15219668 NR Description: integral membrane protein -related [Arabidopsis
  misc_feature (1)..(200): Homolog of NCBI NO: 15219930 NR Description: RING zinc finger protein -related [Arabidopsis
  misc_feature (1)..(200): Homolog of NCBI NO: 6942149 NR Description: ReMembR-H2 protein JR702 [Arabidopsis thaliana]
  misc_feature (1)..(201): Homolog of NCBI NO: 19071633 NR Description: putative integral membrane protein
  misc_feature (1)..(200): Homolog of NCBI NO: 25406132 NR Description: unknown protein F17M19.13 [imported] -
  misc_feature (1)..(200): Homolog of NCBI NO: 22330577 NR Description: expressed protein [Arabidopsis thaliana]
  misc_feature (1)..(201): Homolog of NCBI NO: 38637053 NR Description: putative ReMembR-H2 protein
  misc_feature (1)..(200): Homolog of NCBI NO: 15239276 NR Description: ReMembR-H2 protein JR700 (gb|AAF32325.1)
MAFVLIARGNCSFEGKVRAAQRAGFDAALVHDDEDKASLYSMVGDPEGIHIPAVFVSKMAGETLKKFARGEDGECCINSSMDETAGTVLVMSFVSLVVIISVVASFLFARNCRLLRNGVDNRPPYIKKHVVEKLPSVVYKAPCSSGNNCEEACAICLEDYDNGDMLRLLPCKHEFHVECIDPWLTKWGTFCPVCKLEVLTGG

SEQ ID NO: 66797 - protein, 161 aa, Triticum aestivum
  peptide (1)..(161): Ceres Seq. ID no. 14313271
  misc_feature (112)..(153): Pfam Name: Zinc finger, C3HC4 type (RING finger) Pfam Description: Zinc finger, C3HC4 type (RING finger)
  misc_feature (1)..(160): Homolog of NCBI NO: 15219670 NR Description: integral membrane protein -related [Arabidopsis
  misc_feature (1)..(161): Homolog of NCBI NO: 15233945 NR Description: expressed protein [Arabidopsis thaliana]
  misc_feature (1)..(160): Homolog of NCBI NO: 15219668 NR Description: integral membrane protein -related [Arabidopsis
  misc_feature (1)..(159): Homolog of NCBI NO: 15219930 NR Description: RING zinc finger protein -related [Arabidopsis
  misc_feature (1)..(159): Homolog of NCBI NO: 6942149 NR Description: ReMembR-H2 protein JR702 [Arabidopsis thaliana]
  misc_feature (1)..(160): Homolog of NCBI NO: 19071633 NR Description: putative integral membrane protein
  misc_feature (1)..(159): Homolog of NCBI NO: 25406132 NR Description: unknown protein F17M19.13 [imported] -
  misc_feature (1)..(159): Homolog of NCBI NO: 22330577 NR Description: expressed protein [Arabidopsis thaliana]
  misc_feature (1)..(160): Homolog of NCBI NO: 38637053 NR Description: putative ReMembR-H2 protein
  misc_feature (1)..(159): Homolog of NCBI NO: 15239276 NR Description: ReMembR-H2 protein JR700 (gb|AAF32325.1)
MVGDPEGIHIPAVFVSKMAGETLKKFARGEDGECCINSSMDETAGTVLVMSFVSLVVIISVVASFLFARNCRLLRNGVDNRPPYIKKHVVEKLPSVVYKAPCSSGNNCEEACAICLEDYDNGDMLRLLPCKHEFHVECIDPWLTKWGTFCPVCKLEVLTGG

SEQ ID NO: 66798 - DNA, 818 bp, Triticum aestivum
  misc_feature (1)..(818): Ceres Seq. ID no. 14302986
cccatccccaaactccagatcgatcgcaccgggagattgctgacgcccgcccgccgcgatggaggaggagaagaagatgaagctctgcttctccatcccctcgaaacccaaggtcaagcccgccacgcctcccgccgccttctccgtcgccgccgtggcccccggccccgccccgcggttcgtcaccgtgttcgatccctcggaaaccctcaccccagcgcccgccgcgcccgtcgtcattgcgccccttcccgactcgcgcaaaccctccccagctgctgccgcgccggccgcgcccgtcgtcatcgcgccccttcccaacacgcgcaagctcgccgaggcccccgccttcgtgctcggcgcctccgacagcccctcctccagcgcagcctacggcctcaccgtccgcaatacggattcgaagaggaagcttgatccccaggacgatgctgctagggagcagccgtcgcctccaggccccagcggcgaggacctgatgctgcggcggttcaaggaggacatggccgttctcccggaaatcgaaggtacggacgagtatgacgaggtgcctgtggaggggttcggtgctgctctcctcgctggctatggctggaaggaaggggattctattggaaagaaatacaagggcatgggcgctgtcaaggttcgtgagtacggccgccgccgctgcggcacgcagggtctaggctcgtagggttgccaggtcgtgacagtttctgtttcttgtttattttcttgatttcggttatctgtaactgtaagtatgtatggttcatcagactttgtctttgcctatc

SEQ ID NO: 66799 - protein, 218 aa, Triticum aestivum
  peptide (1)..(218): Ceres Seq. ID no. 14302987
  misc_feature (172)..(217): Pfam Name: G-patch domain Pfam Description: G-patch domain
  misc_feature (7)..(217): Homolog of NCBI NO: 15217576 NR Description: expressed protein [Arabidopsis thaliana]
MEEEKKMKLCFSIPSKPKVKPATPPAAFSVAAVAPGPAPRFVTVFDPSETLTPAPAAPVVIAPLPDSRKPSPAAAAPAAPVVIAPLPNTRKLAEAPAFVLGASDSPSSSAAYGLTVRNTDSKRKLDPQDDAAREQPSPPGPSGEDLMLRRFKEDMAVLPEIEGTDEYDEVPVEGFGAALLAGYGWKEGDSIGKKYKGMGAVKVREYGRRRCGTQGLGS

SEQ ID NO: 66800 - protein, 212 aa, Triticum aestivum
  peptide (1)..(212): Ceres Seq. ID no. 14302988
  misc_feature (166)..(211): Pfam Name: G-patch domain Pfam Description: G-patch domain
  misc_feature (1)..(211): Homolog of NCBI NO: 15217576 NR Description: expressed protein [Arabidopsis thaliana]
MKLCFSIPSKPKVKPATPPAAFSVAAVAPGPAPRFVTVFDPSETLTPAPAAPVVIAPLPDSRKPSPAAAAPAAPVVIAPLPNTRKLAEAPAFVLGASDSPSSSAAYGLTVRNTDSKRKLDPQDDAAREQPSPPGPSGEDLMLRRFKEDMAVLPEIEGTDEYDEVPVEGFGAALLAGYGWKEGDSIGKKYKGMGAVKVREYGRRRCGTQGLGS

SEQ ID NO: 66801 - protein, 144 aa, Triticum aestivum
  peptide (1)..(144): Ceres Seq. ID no. 14302989
PIPKLQIDRTGRLLTPARRDGGGEEDEALLLHPLETQGQARHASRRLLRRRRGPRPRPAVRHRVRSLGNPHPSARRARRHCAPSRLAQTLPSCCRAGRARRHRAPSQHAQARRGPRLRARRLRQPLLQRSLRPHRPQYGFEEEA

SEQ ID NO: 66802 - DNA, 1621 bp, Triticum aestivum
  misc_feature (1)..(1621): Ceres Seq. ID no. 14313244
gcagggaaaatcaaaaatgttccccggcgacgggaatcgaaagtgaggtaaccttaccggccccgaaacgctcgcccccacatgccaccacggcccgcactgcacgcgcctcctccctcctccccctcctaaccctagaatcttccagaatcagcgggaagcagggagggcgaggcgcgcgccgcgcttccggaagcttctagaagctctaggggggaaggagccgagatggggacgtcggatctggaccggcagatcgagcagctcaagcggtgcgagccgctggcggaggcggaggtcaaggcgctctgcctcaaggccatggagatcctcgtcgaggagagcaacgtccagcgcgtcgacgcccccgtcacgatatgtggagacattcatggacagttctacgacatgaaagaacttttcaaagttggaggtgactgcccaaagacaaactacctgttccttggggattttgtcgaccgaggattttattctgttgaaacatttttgcttcttttggccttaaaggttaggtacccagatcgtataactttaatacgaggaaatcatgagagcaggcagatcacacaagtttatggcttctatgatgagtgtcttcgtaaatatggctcggtgaatgtctggagatattgcacagaaatatttgactatttaagtttgtctgcacttattgagaacaaaatcttcagtgtccatggaggcctttcccctgctattacgacactggatcagatcagagtaatagatcgcaagcaagaagtgcctcatgatggtgccatgtgtgaccttctttggtctgatccagaggatgctgtagacggctggggattaagtcctcgaggtgcagggttcctctttggtggaaacgttgtctcttcatttaaccactcaaacaacatagattatatttgccgtgctcatcaactagtcatggaaggattcaagtggatgttcaataacaagattgttactgtatggtctgctcctaactattgctacaggtgtggcaatgttgctgcaatcctagagcttgatgagaacttgaataagcagttccgtgtatttgaagctgctccacatgaatcaagaggtgttcctgccaagaggcctgccccagattactttctttgagactgcacacatggcatgtgacacgctgtcttttcatgcccttgagcaccagcgggccgatagggggtattgaaggcgtgccatgttggcagatgggcgcgtgctttgcaagagattagccaggaggtgctttcgggatgtataaatcgattgttctgtgtccgtccaggtctattgtttgtaacaaagttgatgtcggtatccacttctccccaaaatagctccaatttgagctttgagaaaatgcctccgagaagggagtggtgtagatgaagccactctgggcccatgatgtaaaattttgatgccagtcccttcctcccctgggaatccgtacattttctagaatgtagaatggtatgcaaatgtgtgccttgagtttaccttttagttgcattgcaggcagctgtaggaaatcttgtagttttgatgttttgcatggaagtattctgaggaagcacacatcagc

SEQ ID NO: 66803 - protein, 307 aa, Triticum aestivum
  peptide (1)..(307): Ceres Seq. ID no. 14313245
  misc_feature (46)..(242): Pfam Name: Calcineurin-like phosphoesterase Pfam Description: Calcineurin-like phosphoesterase
  misc_feature (4)..(307): Homolog of NCBI NO: 17864424 NR Description: Protein phosphatase 19C CG32505-PA [Drosophila
  misc_feature (4)..(307): Homolog of NCBI NO: 31202749 NR Description: ENSANGP00000015846 [Anopheles gambiae]
  misc_feature (1)..(307): Homolog of NCBI NO: 4101701 NR Description: serine/threonine phosphatase [Takifugu rubripes]
  misc_feature (4)..(307): Homolog of NCBI NO: 346323 NR Description: phosphoprotein phosphatase (EC 3.1.3.16) X
  misc_feature (4)..(307): Homolog of NCBI NO: 130788 NR Description: SERINE/THREONINE PROTEIN PHOSPHATASE 4 (PP4)
  misc_feature (4)..(307): Homolog of NCBI NO: 4506027 NR Description: protein phosphatase 4 (formerly X), catalytic
  misc_feature (3)..(307): Homolog of NCBI NO: 5410609 NR Description: protein phosphatase 4 catalytic subunit
  misc_feature (4)..(307): Homolog of NCBI NO: 15236841 NR Description: phosphoprotein phosphatase (PPX-1) [Arabidopsis
  misc_feature (4)..(307): Homolog of NCBI NO: 629550 NR Description: phosphoprotein phosphatase (EC 3.1.3.16) X-2
  misc_feature (4)..(307): Homolog of NCBI NO: 15240488 NR Description: serine/threonine protein phosphatase [Arabidopsis
MGTSDLDRQIEQLKRCEPLAEAEVKALCLKAMEILVEESNVQRVDAPVTICGDIHGQFYDMKELFKVGGDCPKTNYLFLGDFVDRGFYSVETFLLLLALKVRYPDRITLIRGNHESRQITQVYGFYDECLRKYGSVNVWRYCTEIFDYLSLSALIENKIFSVHGGLSPAITTLDQIRVIDRKQEVPHDGAMCDLLWSDPEDAVDGWGLSPRGAGFLFGGNVVSSFNHSNNIDYICRAHQLVMEGFKWMFNNKIVTVWSAPNYCYRCGNVAAILELDENLNKQFRVFEAAPHESRGVPAKRPAPDYFL

SEQ ID NO: 66804 - protein, 276 aa, Triticum aestivum
  peptide (1)..(276): Ceres Seq. ID no. 14313246
  misc_feature (15)..(211): Pfam Name: Calcineurin-like phosphoesterase Pfam Description: Calcineurin-like phosphoesterase
  misc_feature (1)..(276): Homolog of NCBI NO: 17864424 NR Description: Protein phosphatase 19C CG32505-PA [Drosophila
  misc_feature (1)..(276): Homolog of NCBI NO: 31202749 NR Description: ENSANGP00000015846 [Anopheles gambiae]
  misc_feature (1)..(276): Homolog of NCBI NO: 4101701 NR Description: serine/threonine phosphatase [Takifugu rubripes]
  misc_feature (1)..(276): Homolog of NCBI NO: 346323 NR Description: phosphoprotein phosphatase (EC 3.1.3.16) X
  misc_feature (1)..(276): Homolog of NCBI NO: 130788 NR Description: SERINE/THREONINE PROTEIN PHOSPHATASE 4 (PP4)
  misc_feature (1)..(276): Homolog of NCBI NO: 4506027 NR Description: protein phosphatase 4 (formerly X), catalytic
  misc_feature (1)..(276): Homolog of NCBI NO: 5410609 NR Description: protein phosphatase 4 catalytic subunit
  misc_feature (1)..(276): Homolog of NCBI NO: 15236841 NR Description: phosphoprotein phosphatase (PPX-1) [Arabidopsis
  misc_feature (1)..(276): Homolog of NCBI NO: 629550 NR Description: phosphoprotein phosphatase (EC 3.1.3.16) X-2
  misc_feature (1)..(276): Homolog of NCBI NO: 15240488 NR Description: serine/threonine protein phosphatase [Arabidopsis
MEILVEESNVQRVDAPVTICGDIHGQFYDMKELFKVGGDCPKTNYLFLGDFVDRGFYSVETFLLLLALKVRYPDRITLIRGNHESRQITQVYGFYDECLRKYGSVNVWRYCTEIFDYLSLSALIENKIFSVHGGLSPAITTLDQIRVIDRKQEVPHDGAMCDLLWSDPEDAVDGWGLSPRGAGFLFGGNVVSSFNHSNNIDYICRAHQLVMEGFKWMFNNKIVTVWSAPNYCYRCGNVAAILELDENLNKQFRVFEAAPHESRGVPAKRPAPDYFL

SEQ ID NO: 66805 - protein, 247 aa, Triticum aestivum
  peptide (1)..(247): Ceres Seq. ID no. 14313247
  misc_feature (1)..(182): Pfam Name: Calcineurin-like phosphoesterase Pfam Description: Calcineurin-like phosphoesterase
  misc_feature (1)..(247): Homolog of NCBI NO: 17864424 NR Description: Protein phosphatase 19C CG32505-PA [Drosophila
  misc_feature (1)..(247): Homolog of NCBI NO: 31202749 NR Description: ENSANGP00000015846 [Anopheles gambiae]
  misc_feature (1)..(247): Homolog of NCBI NO: 4101701 NR Description: serine/threonine phosphatase [Takifugu rubripes]
  misc_feature (1)..(247): Homolog of NCBI NO: 346323 NR Description: phosphoprotein phosphatase (EC 3.1.3.16) X
  misc_feature (1)..(247): Homolog of NCBI NO: 130788 NR Description: SERINE/THREONINE PROTEIN PHOSPHATASE 4 (PP4)
  misc_feature (1)..(247): Homolog of NCBI NO: 4506027 NR Description: protein phosphatase 4 (formerly X), catalytic
  misc_feature (1)..(247): Homolog of NCBI NO: 5410609 NR Description: protein phosphatase 4 catalytic subunit
  misc_feature (1)..(247): Homolog of NCBI NO: 15236841 NR Description: phosphoprotein phosphatase (PPX-1) [Arabidopsis
  misc_feature (1)..(247): Homolog of NCBI NO: 629550 NR Description: phosphoprotein phosphatase (EC 3.1.3.16) X-2
  misc_feature (1)..(247): Homolog of NCBI NO: 15240488 NR Description: serine/threonine protein phosphatase [Arabidopsis
MKELFKVGGDCPKTNYLFLGDFVDRGFYSVETFLLLLALKVRYPDRITLIRGNHESRQITQVYGFYDECLRKYGSVNVWRYCTEIFDYLSLSALIENKIFSVHGGLSPAITTLDQIRVIDRKQEVPHDGAMCDLLWSDPEDAVDGWGLSPRGAGFLFGGNVVSSFNHSNNIDYICRAHQLVMEGFKWMFNNKIVTVWSAPNYCYRCGNVAAILELDENLNKQFRVFEAAPHESRGVPAKRPAPDYFL

SEQ ID NO: 66806 - DNA, 759 bp, Triticum aestivum
  misc_feature (1)..(759): Ceres Seq. ID no. 13659085
aaggttcagacgaagtgccgagcacgaacatagcggcgctgcaacctctccgccccctacgaagagagagaaaaccatggcggcggtcggcggcgcgggcaacggagccggcgaggaggcaggcggggcggagttctacctgcggtactacgtggggcacaagggcaagttcgggcacgagttcctcgagttcgagttccgccccgacggcaagctccgctacgccaacaactccaactacaagaacgacaccatgatccgcaaggaggtcttcgtctccccttccgtgctccgcgaggcgaggaggatcatccaggactcggagataatgaaggaggacgacagcaactggccggagcccgaccgcgtcggcaggcaggagctcgagattgtcatgggcaacgagcacatctccttcaccacctccaagatcggctccctcgttgacgtccagaccagcaaggacccggagggcctccgcatcttctactacctcgtccaggaccttaaatgtttcgtgttttcacttatcaacctccactttaagatcaagcctattcaactttgagctctgtttggttctcccggttgtgttgtggtactgcgagtgttagagaattctgtacttatgtaacatgcaatgagttgctcctggtgcgatttggtatgcgttgaagattccttttggcatcgcctgaggttgttggattgtgcaaactttgagtgcccattgatatttatatgcatgtttgttttgcg

SEQ ID NO: 66807 - protein, 188 aa, Triticum aestivum
  peptide (1)..(188): Ceres Seq. ID no. 13659086
  misc_feature (44)..(186): Pfam Name: Mago nashi protein Pfam Description: Mago nashi protein
  misc_feature (43)..(186): Homolog of NCBI NO: 25990444 NR Description: MAGO protein [Gallus gallus]
  misc_feature (43)..(186): Homolog of NCBI NO: 4505087 NR Description: mago-nashi homolog [Homo sapiens]
  misc_feature (40)..(186): Homolog of NCBI NO: 8922331 NR Description: hypothetical protein FLJ10292 [Homo sapiens]
  misc_feature (42)..(186): Homolog of NCBI NO: 6016563 NR Description: Mago nashi protein homolog (Xl-mago)
  misc_feature (42)..(186): Homolog of NCBI NO: 26354182 NR Description: unnamed protein product [Mus musculus]
  misc_feature (42)..(186): Homolog of NCBI NO: 13385002 NR Description: RIKEN cDNA 2010012C16 [Mus musculus]
  misc_feature (36)..(186): Homolog of NCBI NO: 15217623 NR Description: Mago Nashi-related protein [Arabidopsis thaliana]
  misc_feature (44)..(186): Homolog of NCBI NO: 13195558 NR Description: mago nashi [Marsilea vestita]
  misc_feature (44)..(186): Homolog of NCBI NO: 6016561 NR Description: Mago nashi protein homolog
  misc_feature (28)..(187): Homolog of NCBI NO: 12802873 NR Description: mago nashi-like protein [Oryza sativa]
RFRRSAEHEHSGAATSPPPTKREKTMAAVGGAGNGAGEEAGGAEFYLRYYVGHKGKFGHEFLEFEFRPDGKLRYANNSNYKNDTMIRKEVFVSPSVLREARRIIQDSEIMKEDDSNWPEPDRVGRQELEIVMGNEHISFTTSKIGSLVDVQTSKDPEGLRIFYYLVQDLKCFVFSLINLHFKIKPIQL

SEQ ID NO: 66808 - protein, 163 aa, Triticum aestivum
  peptide (1)..(163): Ceres Seq. ID no. 13659087
  misc_feature (19)..(161): Pfam Name: Mago nashi protein Pfam Description: Mago nashi protein
  misc_feature (18)..(161): Homolog of NCBI NO: 25990444 NR Description: MAGO protein [Gallus gallus]
  misc_feature (18)..(161): Homolog of NCBI NO: 4505087 NR Description: mago-nashi homolog [Homo sapiens]
  misc_feature (15)..(161): Homolog of NCBI NO: 8922331 NR Description: hypothetical protein FLJ10292 [Homo sapiens]
  misc_feature (17)..(161): Homolog of NCBI NO: 6016563 NR Description: Mago nashi protein homolog (Xl-mago)
  misc_feature (17)..(161): Homolog of NCBI NO: 26354182 NR Description: unnamed protein product [Mus musculus]
  misc_feature (17)..(161): Homolog of NCBI NO: 13385002 NR Description: RIKEN cDNA 2010012C16 [Mus musculus]
  misc_feature (11)..(161): Homolog of NCBI NO: 15217623 NR Description: Mago Nashi-related protein [Arabidopsis thaliana]
  misc_feature (19)..(161): Homolog of NCBI NO: 13195558 NR Description: mago nashi [Marsilea vestita]
  misc_feature (19)..(161): Homolog of NCBI NO: 6016561 NR Description: Mago nashi protein homolog
  misc_feature (3)..(162): Homolog of NCBI NO: 12802873 NR Description: mago nashi-like protein [Oryza sativa]
MAAVGGAGNGAGEEAGGAEFYLRYYVGHKGKFGHEFLEFEFRPDGKLRYANNSNYKNDTMIRKEVFVSPSVLREARRIIQDSEIMKEDDSNWPEPDRVGRQELEIVMGNEHISFTTSKIGSLVDVQTSKDPEGLRIFYYLVQDLKCFVFSLINLHFKIKPIQL

SEQ ID NO: 66809 - protein, 104 aa, Triticum aestivum
  peptide (1)..(104): Ceres Seq. ID no. 13659088
  misc_feature (1)..(102): Pfam Name: Mago nashi protein Pfam Description: Mago nashi protein
  misc_feature (1)..(102): Homolog of NCBI NO: 25990444 NR Description: MAGO protein [Gallus gallus]
  misc_feature (1)..(102): Homolog of NCBI NO: 4505087 NR Description: mago-nashi homolog [Homo sapiens]
  misc_feature (1)..(102): Homolog of NCBI NO: 8922331 NR Description: hypothetical protein FLJ10292 [Homo sapiens]
  misc_feature (1)..(102): Homolog of NCBI NO: 6016563 NR Description: Mago nashi protein homolog (Xl-mago)
  misc_feature (1)..(102): Homolog of NCBI NO: 26354182 NR Description: unnamed protein product [Mus musculus]
  misc_feature (1)..(102): Homolog of NCBI NO: 13385002 NR Description: RIKEN cDNA 2010012C16 [Mus musculus]
  misc_feature (1)..(102): Homolog of NCBI NO: 15217623 NR Description: Mago Nashi-related protein [Arabidopsis thaliana]
  misc_feature (1)..(102): Homolog of NCBI NO: 13195558 NR Description: mago nashi [Marsilea vestita]
  misc_feature (1)..(102): Homolog of NCBI NO: 6016561 NR Description: Mago nashi protein homolog
  misc_feature (1)..(103): Homolog of NCBI NO: 12802873 NR Description: mago nashi-like protein [Oryza sativa]
MIRKEVFVSPSVLREARRIIQDSEIMKEDDSNWPEPDRVGRQELEIVMGNEHISFTTSKIGSLVDVQTSKDPEGLRIFYYLVQDLKCFVFSLINLHFKIKPIQL

SEQ ID NO: 66810 - DNA, 1704 bp, Triticum aestivum
  misc_feature (1)..(1704): Ceres Seq. ID no. 14316045
agtacacagctacgcagaatcataagaggaccggactaaccaccacaggcccatggtagtacagtgtggtagtcccccatgagccccttcgtttgcactctactcttccccgatacaccccttctcccgcggaagcccgcgcctttcaaacgcgctacaaccatccgatgccgcgccgcgccgcccccgggagacgccgctctccgcgccttccgcgtgcaccacatcgctgggcacttcctcggcgccaaccccgccctgttgcccgccctcgcggcctgcgcgcggctgctgacggcggcggccgaagccgagcagatccacgccctcctcttcaagtccggcctccctagttccgtctccggcgtctacgcctccacctccctcgcccgtgtctactcgcggctcggccgcctgggtgacgcgcggaaggtgtttgatggaatgcctgagaggacgttggtttcttggaacgtgcttcttgacggccttgtcagagccagcgatttggatgccgcctgggaggtgtttgcggaaatgccggagcggaatgtgtcttcttggaatactgttatggctggtttcgttagtcatgggtgggctcaagaggcagtggagttgttttctgagatgacagaggtttatggtttgacgccggatgaggccacgatggttggctttgtatctgctgttcgcagtctcggtctacttggacttgggaggaccgcacatggttatgtaatccggcaggagttctcactggatggtgctcttggtgttgctctgatcaacatgtacacaaggtgtgggtgcatgggtgcggcataccaatgcttctcaagcgtcatcagcaagaatgtggagcactggacctctgtcatcgggggtttcgcagcacatggtcacccagagatggcactgaaattgtttgccgagatgaggcaattgggcgtcaagcctaatggtgtcaccttcgtggccgtcttgaatgcctgcagccatggtggtcttgttgatgaaggttttaggtacttcaacctaatgcgcaacatgggtatcaggccatcgatccagcactatggctgcttggtggatcttcttggtcgtgctgggttcttggaagaagccttcaacctcgctagcagtctaccagaagagcagggctttgtgatgtggagctcactactagctgcttgccaaacccatggcaatgtcgacatggcagaggttgctgcccagaagttggcagacacaaagccaagccatggcagctcatatattttgctatcaaacgcctatgcacgtgctggtcaatgggacgacttgaagaggacaagaagcaggatggaggagcatagggtggtgaagaagcctgggctcagctggatcgaggttgatggcagtttacattcctttgtcactgcagacaagttacacacagaatgcgaagatatttatcatatgttggaagacttgaaacttaatttgatatcagctggttccgaacctgaaacatttgatcttcctgaagtttgattcagtaagttactgttgtttatattgaatatatcgtttttcttttttggaagggttacattttttgttgttgatagaaatacatcacatgagaggtctgttcatgatcatgtgaacaatggggcatcggaatatatcatattgatttggtaaatttcaggttggttt

SEQ ID NO: 66811 - protein, 485 aa, Triticum aestivum
  peptide (1)..(485): Ceres Seq. ID no. 14316046
  misc_feature (332)..(366): Pfam Name: PPR repeat Pfam Description: PPR repeat
  misc_feature (134)..(485): Homolog of NCBI NO: 15234095 NR Description: pentatricopeptide (PPR) repeat-containing protein
  misc_feature (65)..(479): Homolog of NCBI NO: 15221249 NR Description: pentatricopeptide (PPR) repeat-containing protein
  misc_feature (39)..(479): Homolog of NCBI NO: 15239745 NR Description: pentatricopeptide (PPR) repeat-containing protein
  misc_feature (11)..(159): Homolog of NCBI NO: 34912348 NR Description: P0518F01.9 [Oryza sativa (japonica
  misc_feature (133)..(450): Homolog of NCBI NO: 34912348 NR Description: P0518F01.9 [Oryza sativa (japonica
  misc_feature (58)..(466): Homolog of NCBI NO: 15217517 NR Description: pentatricopeptide (PPR) repeat-containing protein
  misc_feature (58)..(478): Homolog of NCBI NO: 15239979 NR Description: pentatricopeptide (PPR) repeat-containing protein
  misc_feature (28)..(467): Homolog of NCBI NO: 38345581 NR Description: OSJNBa0027H06.17 [Oryza sativa (japonica
  misc_feature (60)..(478): Homolog of NCBI NO: 15228829 NR Description: pentatricopeptide (PPR) repeat-containing protein
  misc_feature (60)..(478): Homolog of NCBI NO: 9279687 NR Description: gb|AAC35225.1~gene_id:MWI23.6~strong similarity
MSPFVCTLLFPDTPLLPRKPAPFKRATTIRCRAAPPPGDAALRAFRVHHIAGHFLGANPALLPALAACARLLTAAAEAEQIHALLFKSGLPSSVSGVYASTSLARVYSRLGRLGDARKVFDGMPERTLVSWNVLLDGLVRASDLDAAWEVFAEMPERNVSSWNTVMAGFVSHGWAQEAVELFSEMTEVYGLTPDEATMVGFVSAVRSLGLLGLGRTAHGYVIRQEFSLDGALGVALINMYTRCGCMGAAYQCFSSVISKNVEHWTSVIGGFAAHGHPEMALKLFAEMRQLGVKPNGVTFVAVLNACSHGGLVDEGFRYFNLMRNMGIRPSIQHYGCLVDLLGRAGFLEEAFNLASSLPEEQGFVMWSSLLAACQTHGNVDMAEVAAQKLADTKPSHGSSYILLSNAYARAGQWDDLKRTRSRMEEHRVVKKPGLSWIEVDGSLHSFVTADKLHTECEDIYHMLEDLKLNLISAGSEPETFDLPEV

SEQ ID NO: 66812 - protein, 363 aa, Triticum aestivum
  peptide (1)..(363): Ceres Seq. ID no. 14316047
  misc_feature (210)..(244): Pfam Name: PPR repeat Pfam Description: PPR repeat
  misc_feature (12)..(363): Homolog of NCBI NO: 15234095 NR Description: pentatricopeptide (PPR) repeat-containing protein
  misc_feature (1)..(357): Homolog of NCBI NO: 15221249 NR Description: pentatricopeptide (PPR) repeat-containing protein
  misc_feature (1)..(357): Homolog of NCBI NO: 15239745 NR Description: pentatricopeptide (PPR) repeat-containing protein
  misc_feature (1)..(37): Homolog of NCBI NO: 34912348 NR Description: P0518F01.9 [Oryza sativa (japonica
  misc_feature (11)..(328): Homolog of NCBI NO: 34912348 NR Description: P0518F01.9 [Oryza sativa (japonica
  misc_feature (1)..(344): Homolog of NCBI NO: 15217517 NR Description: pentatricopeptide (PPR) repeat-containing protein
  misc_feature (1)..(356): Homolog of NCBI NO: 15239979 NR Description: pentatricopeptide (PPR) repeat-containing protein
  misc_feature (1)..(345): Homolog of NCBI NO: 38345581 NR Description: OSJNBa0027H06.17 [Oryza sativa (japonica
  misc_feature (1)..(356): Homolog of NCBI NO: 15228829 NR Description: pentatricopeptide (PPR) repeat-containing protein
  misc_feature (1)..(356): Homolog of NCBI NO: 9279687 NR Description: gb|AAC35225.1~gene_id:MWI23.6~strong similarity
MPERTLVSWNVLLDGLVRASDLDAAWEVFAEMPERNVSSWNTVMAGFVSHGWAQEAVELFSEMTEVYGLTPDEATMVGFVSAVRSLGLLGLGRTAHGYVIRQEFSLDGALGVALINMYTRCGCMGAAYQCFSSVISKNVEHWTSVIGGFAAHGHPEMALKLFAEMRQLGVKPNGVTFVAVLNACSHGGLVDEGFRYFNLMRNMGIRPSIQHYGCLVDLLGRAGFLEEAFNLASSLPEEQGFVMWSSLLAACQTHGNVDMAEVAAQKLADTKPSHGSSYILLSNAYARAGQWDDLKRTRSRMEEHRVVKKPGLSWIEVDGSLHSFVTADKLHTECEDIYHMLEDLKLNLISAGSEPETFDLPEV

SEQ ID NO: 66813 - protein, 332 aa, Triticum aestivum
  peptide (1)..(332): Ceres Seq. ID no. 14316048
  misc_feature (179)..(213): Pfam Name: PPR repeat Pfam Description: PPR repeat
  misc_feature (1)..(323): Homolog of NCBI NO: 34898014 NR Description: Similar to Arabidopsis thaliana chromosome II BAC
  misc_feature (1)..(332): Homolog of NCBI NO: 15234095 NR Description: pentatricopeptide (PPR) repeat-containing protein
  misc_feature (1)..(326): Homolog of NCBI NO: 15221249 NR Description: pentatricopeptide (PPR) repeat-containing protein
  misc_feature (1)..(326): Homolog of NCBI NO: 15239745 NR Description: pentatricopeptide (PPR) repeat-containing protein
  misc_feature (1)..(297): Homolog of NCBI NO: 34912348 NR Description: P0518F01.9 [Oryza sativa (japonica
  misc_feature (1)..(313): Homolog of NCBI NO: 15217517 NR Description: pentatricopeptide (PPR) repeat-containing protein
  misc_feature (1)..(325): Homolog of NCBI NO: 15239979 NR Description: pentatricopeptide (PPR) repeat-containing protein
  misc_feature (1)..(314): Homolog of NCBI NO: 38345581 NR Description: OSJNBa0027H06.17 [Oryza sativa (japonica
  misc_feature (1)..(325): Homolog of NCBI NO: 15228829 NR Description: pentatricopeptide (PPR) repeat-containing protein
  misc_feature (1)..(325): Homolog of NCBI NO: 9279687 NR Description: gb|AAC35225.1~gene_id:MWI23.6~strong similarity
MPERNVSSWNTVMAGFVSHGWAQEAVELFSEMTEVYGLTPDEATMVGFVSAVRSLGLLGLGRTAHGYVIRQEFSLDGALGVALINMYTRCGCMGAAYQCFSSVISKNVEHWTSVIGGFAAHGHPEMALKLFAEMRQLGVKPNGVTFVAVLNACSHGGLVDEGFRYFNLMRNMGIRPSIQHYGCLVDLLGRAGFLEEAFNLASSLPEEQGFVMWSSLLAACQTHGNVDMAEVAAQKLADTKPSHGSSYILLSNAYARAGQWDDLKRTRSRMEEHRVVKKPGLSWIEVDGSLHSFVTADKLHTECEDIYHMLEDLKLNLISAGSEPETFDLPEV

SEQ ID NO: 66814 - DNA, 772 bp, Triticum aestivum
  misc_feature (1)..(772): Ceres Seq. ID no. 14313260
aacccccgtgaagcatcatccatcttctctccttacgccgccttgcactgcattccagcctccatctccaacagcaacccatggccggcatgaaaaccatcgttctccttgccgtgatctcggccgccgccttgggcaccgcgtcagcggcgacccaccgcgtgggcgagccgggcggcgcgtgggacctcaccaccgattacggcagctgggcgtcctccagggagttccacccgggcgacgagctcatcttcaggcaccagccaggggcgcacaacgtgctcgaggtcagcgaggtcgactacgactcctgcaacgccaccagccccatcaccaccttgggctccggctttttcacctacgtcgcccttccggccgtcggcacccgctacttcatctgcggtttccctggccactgcaccaccaccggcaccggcggcatgaagctcaagatcgacgtcgtgccaggttccccctcgtcgtcgcccgccccggccatgccgccgccctcctccgccgcggcctctgccggggctacaataggatctggccttgtcgtcctgctggcggccggtctcatggcttgaaatgcatgtattcttcattagctgatgatgcccggtgcattcaaccgatgtaaagactgtagcctgtaggtttccccccttctaaaaaaacaaaaaaaaagttgagttgccgcagcagacacataccagcttatactatattgttaactggttattattgttgaatacatacaattaattttttg

SEQ ID NO: 66815 - protein, 212 aa, Triticum aestivum
  peptide (1)..(212): Ceres Seq. ID no. 14313261
TPVKHHPSSLLTPPCTAFQPPSPTATHGRHENHRSPCRDLGRRLGHRVSGDPPRGRAGRRVGPHHRLRQLGVLQGVPPGRRAHLQAPARGAQRARGQRGRLRLLQRHQPHHHLGLRLFHLRRPSGRRHPLLHLRFPWPLHHHRHRRHEAQDRRRARFPLVVARPGHAAALLRRGLCRGYNRIWPCRPAGGRSHGLKCMYSSLADDARCIQPM

SEQ ID NO: 66816 - protein, 168 aa, Triticum aestivum
  peptide (1)..(168): Ceres Seq. ID no. 14313262
  misc_feature (35)..(116): Pfam Name: Plastocyanin-like domain Pfam Description: Plastocyanin-like domain
  misc_feature (1)..(142): Homolog of NCBI NO: 34908748 NR Description: uclacyanin-like protein [Oryza sativa (japonica
  misc_feature (1)..(153): Homolog of NCBI NO: 38346158 NR Description: OSJNBa0079A21.5 [Oryza sativa (japonica
  misc_feature (7)..(155): Homolog of NCBI NO: 38636767 NR Description: putative blue copper binding protein
  misc_feature (2)..(150): Homolog of NCBI NO: 38636763 NR Description: putative blue copper binding protein
  misc_feature (2)..(167): Homolog of NCBI NO: 38636838 NR Description: putative blue copper binding protein
  misc_feature (8)..(150): Homolog of NCBI NO: 38636761 NR Description: putative blue copper binding protein
  misc_feature (8)..(150): Homolog of NCBI NO: 38636760 NR Description: putative blue copper binding protein
  misc_feature (2)..(167): Homolog of NCBI NO: 38636764 NR Description: putative blue copper binding protein
  misc_feature (1)..(168): Homolog of NCBI NO: 37651973 NR Description: blue copper binding protein [Hordeum vulgare
  misc_feature (1)..(168): Homolog of NCBI NO: 4104058 NR Description: blue copper-binding protein homolog [Triticum
MAGMKTIVLLAVISAAALGTASAATHRVGEPGGAWDLTTDYGSWASSREFHPGDELIFRHQPGAHNVLEVSEVDYDSCNATSPITTLGSGFFTYVALPAVGTRYFICGFPGHCTTTGTGGMKLKIDVVPGSPSSSPAPAMPPPSSAAASAGATIGSGLVVLLAAGLMA

SEQ ID NO: 66817 - protein, 165 aa, Triticum aestivum
  peptide (1)..(165): Ceres Seq. ID no. 14313263
  misc_feature (32)..(113): Pfam Name: Plastocyanin-like domain Pfam Description: Plastocyanin-like domain
  misc_feature (1)..(139): Homolog of NCBI NO: 34908748 NR Description: uclacyanin-like protein [Oryza sativa (japonica
  misc_feature (1)..(150): Homolog of NCBI NO: 38346158 NR Description: OSJNBa0079A21.5 [Oryza sativa (japonica
  misc_feature (4)..(152): Homolog of NCBI NO: 38636767 NR Description: putative blue copper binding protein
  misc_feature (1)..(147): Homolog of NCBI NO: 38636763 NR Description: putative blue copper binding protein
  misc_feature (1)..(164): Homolog of NCBI NO: 38636838 NR Description: putative blue copper binding protein
  misc_feature (5)..(147): Homolog of NCBI NO: 38636761 NR Description: putative blue copper binding protein
  misc_feature (5)..(147): Homolog of NCBI NO: 38636760 NR Description: putative blue copper binding protein
  misc_feature (1)..(164): Homolog of NCBI NO: 38636764 NR Description: putative blue copper binding protein
  misc_feature (1)..(165): Homolog of NCBI NO: 37651973 NR Description: blue copper binding protein [Hordeum vulgare
  misc_feature (1)..(165): Homolog of NCBI NO: 4104058 NR Description: blue copper-binding protein homolog [Triticum
MKTIVLLAVISAAALGTASAATHRVGEPGGAWDLTTDYGSWASSREFHPGDELIFRHQPGAHNVLEVSEVDYDSCNATSPITTLGSGFFTYVALPAVGTRYFICGFPGHCTTTGTGGMKLKIDVVPGSPSSSPAPAMPPPSSAAASAGATIGSGLVVLLAAGLMA

SEQ ID NO: 66818 - DNA, 690 bp, Triticum aestivum
  misc_feature (1)..(690): Ceres Seq. ID no. 12784095
gaccgaccattccaaaccctcgcatccaagccgcctccgcctccgcctccacctccccgcggatctcccatccatccatggccgccgccgccccggcccgcaggctcctcctgcgcctgcgtctcccactccccctctgcaacccaccgccgtcccccgtcccgctcctctcccacctgacgccgcacctccacccaccaccgccaccgcagccaacgctcccgggcgccccggccccggacccgaagctccgggacctcctcttcgccttccaccccgccgtgcacgtatatccgtccctcgtcgacgtcccgagaggagggctgggcgaccttgacgcgcgcgaggacggagggggggccaaggaggcggaggtgtgggcggacagcgtcaagaagaagcggaagcgcaagatgaacaagcacaagctccgcaagctccggaagcgcctccgccgccagacctgagctcatggatcccggcttgaggattgtgattgcaagaaggtcctccggtgccgctgccacaccggtttcaagctgatggtttcttccagttattttggtttggttataggagtagcagttctggtaccaacaacgcaattgctgcgactgggcacgtacctacaaacactgtaatgacaaggagccaggaacgggctgtttcatgtctggatttctggcaggc

SEQ ID NO: 66819 - protein, 154 aa, Triticum aestivum
  peptide (1)..(154): Ceres Seq. ID no. 12784096
  misc_feature (115)..(154): Homolog of NCBI NO: 18424673 NR Description: expressed protein
PTIPNPRIQAASASASTSPRISHPSMAAAAPARRLLLRLRLPLPLCNPPPSPVPLLSHLTPHLHPPPPPQPTLPGAPAPDPKLRDLLFAFHPAVHVYPSLVDVPRGGLGDLDAREDGGGAKEAEVWADSVKKKRKRKMNKHKLRKLRKRLRRQT

SEQ ID NO: 66820 - protein, 129 aa, Triticum aestivum
  peptide (1)..(129): Ceres Seq. ID no. 12784097
  misc_feature (90)..(129): Homolog of NCBI NO: 18424673 NR Description: expressed protein
MAAAAPARRLLLRLRLPLPLCNPPPSPVPLLSHLTPHLHPPPPPQPTLPGAPAPDPKLRDLLFAFHPAVHVYPSLVDVPRGGLGDLDAREDGGGAKEAEVWADSVKKKRKRKMNKHKLRKLRKRLRRQT

SEQ ID NO: 66821 - protein, 111 aa, Triticum aestivum
  peptide (1)..(111): Ceres Seq. ID no. 12784098
  misc_feature (3)..(111): Pfam Name: Atrophin-1 family Pfam Description: Atrophin-1 family
  misc_feature (19)..(111): Homolog of NCBI NO: 15145797 NR Description: basic proline-rich protein [Sus scrofa]
  misc_feature (31)..(91): Homolog of NCBI NO: 28569968 NR Description: pherophorin [Volvox carteri f. nagariensis]
  misc_feature (31)..(92): Homolog of NCBI NO: 21322711 NR Description: pherophorin-dz1 protein [Volvox carteri f.
  misc_feature (31)..(92): Homolog of NCBI NO: 21322711 NR Description: pherophorin-dz1 protein [Volvox carteri f.
  misc_feature (31)..(111): Homolog of NCBI NO: 7484420 NR Description: pherophorin-S - Volvox carteri
  misc_feature (19)..(111): Homolog of NCBI NO: 15145797 NR Description: basic proline-rich protein [Sus scrofa]
  misc_feature (28)..(111): Homolog of NCBI NO: 15145797 NR Description: basic proline-rich protein [Sus scrofa]
  misc_feature (31)..(92): Homolog of NCBI NO: 21322711 NR Description: pherophorin-dz1 protein [Volvox carteri f.
  misc_feature (31)..(111): Homolog of NCBI NO: 40747082 NR Description: hypothetical protein AN1120.2 [Aspergillus
  misc_feature (30)..(111): Homolog of NCBI NO: 15145797 NR Description: basic proline-rich protein [Sus scrofa]
TDHSKPSHPSRLRLRLHLPADLPSIHGRRRPGPQAPPAPASPTPPLQPTAVPRPAPLPPDAAPPPTTATAANAPGRPGPGPEAPGPPLRLPPRRARISVPRRRPERRAGRP

SEQ ID NO: 66822 - DNA, 1029 bp, Triticum aestivum
  misc_feature (1)..(1029): Ceres Seq. ID no. 13598045
aaaaaaataaacgcatcggcgccgtcaagtcccccagccgaggtcacacaagcccgcacccgcacccgcacccgcacccgcacaacagagacccagagcaggcgacacaccgcccaggcccagctccagctccggcgagatctccggcgacccttcgagatgagccgcggatcgggcgcgggctacgaccgccacatcaccatcttctcccccgagggccgcctctaccaagtcgagtacgcgttcaaggcggtcaagtcggcgggggtcacctcgatcggcgtccgcggcaaggactccgtctgcgtcgtcacccagaagaaagtcccggacaagttgctggatgacaccagcatcacgcacctcttctcgattaccaagtacaccggcttgcttgccaccggcctcacagctgatgcgaggtccttggtctcccaagcaagaaatgaagcagctgagttccgtaaaaaatggggatacgagatgcctgtggatgtattagcaaaatggatagcagacaaagcacaaatatacacgcagcatgcgtacatgagaccccttggtgtagttgccatggtcttgggttatgatgaagagaaaaatgctcagctcttcaagtgtgaccccgcaggtcacttctttggacacaaggcaactagtgccggactgaaggagcaggaagcaataaattttctggagaagaaaatgaaggatagcccgcagttcacatatgacgaaactgttcagattgcagtttctgcattgcaatctgttctgcaggaagatttcaaggctaccgagatcgaggtcggtgttgtgaggaaagaagaccgtgtcttccggtcgctcacgacagaggagattgatcagcacctaacagccattagcgagcgcgactgagctatgagactgtagctgtcaatgcaccataaactgttattttgtttcatagccagccaagaaacattcagtgaatcatttcatgtgtagcaagaaagacgggcatccactctgccatgtattagttgg

SEQ ID NO: 66823 - protein, 299 aa, Triticum aestivum
  peptide (1)..(299): Ceres Seq. ID no. 13598046
  misc_feature (85)..(273): Pfam Name: Proteasome A-type and B-type Pfam Description: Proteasome A-type and B-type
  misc_feature (54)..(299): Homolog of NCBI NO: 15238554 NR Description: 20S proteasome alpha subunit A1 (PAA1)
  misc_feature (54)..(299): Homolog of NCBI NO: 15224993 NR Description: 20S proteasome alpha subunit A2 (PAA2)
  misc_feature (54)..(299): Homolog of NCBI NO: 12229948 NR Description: Proteasome subunit alpha type 6 (20S proteasome
  misc_feature (54)..(299): Homolog of NCBI NO: 12229922 NR Description: Proteasome subunit alpha type 6 (20S proteasome
  misc_feature (54)..(299): Homolog of NCBI NO: 11967891 NR Description: maize 20S proteasome alpha subunit [Zea mays]
KKINASAPSSPPAEVTQARTRTRTRTRTTETQSRRHTAQAQLQLRRDLRRPFEMSRGSGAGYDRHITIFSPEGRLYQVEYAFKAVKSAGVTSIGVRGKDSVCVVTQKKVPDKLLDDTSITHLFSITKYTGLLATGLTADARSLVSQARNEAAEFRKKWGYEMPVDVLAKWIADKAQIYTQHAYMRPLGVVAMVLGYDEEKNAQLFKCDPAGHFFGHKATSAGLKEQEAINFLEKKMKDSPQFTYDETVQIAVSALQSVLQEDFKATEIEVGVVRKEDRVFRSLTTEEIDQHLTAISERD

SEQ ID NO: 66824 - protein, 246 aa, Triticum aestivum
  peptide (1)..(246): Ceres Seq. ID no. 13598047
  misc_feature (32)..(220): Pfam Name: Proteasome A-type and B-type Pfam Description: Proteasome A-type and B-type
  misc_feature (1)..(246): Homolog of NCBI NO: 15238554 NR Description: 20S proteasome alpha subunit A1 (PAA1)
  misc_feature (1)..(246): Homolog of NCBI NO: 15224993 NR Description: 20S proteasome alpha subunit A2 (PAA2)
  misc_feature (1)..(246): Homolog of NCBI NO: 12229948 NR Description: Proteasome subunit alpha type 6 (20S proteasome
  misc_feature (1)..(246): Homolog of NCBI NO: 12229922 NR Description: Proteasome subunit alpha type 6 (20S proteasome
  misc_feature (1)..(246): Homolog of NCBI NO: 11967891 NR Description: maize 20S proteasome alpha subunit [Zea mays]
MSRGSGAGYDRHITIFSPEGRLYQVEYAFKAVKSAGVTSIGVRGKDSVCVVTQKKVPDKLLDDTSITHLFSITKYTGLLATGLTADARSLVSQARNEAAEFRKKWGYEMPVDVLAKWIADKAQIYTQHAYMRPLGVVAMVLGYDEEKNAQLFKCDPAGHFFGHKATSAGLKEQEAINFLEKKMKDSPQFTYDETVQIAVSALQSVLQEDFKATEIEVGVVRKEDRVFRSLTTEEIDQHLTAISERD

SEQ ID NO: 66825 - DNA, 574 bp, Triticum aestivum
  misc_feature (1)..(574): Ceres Seq. ID no. 12779958
aatcactctcgcgtcagagaaaaaagagaggggcgcacatctccgtctccgccctcccctccccgtccccctctccctccgctcccgatccgctctgcgtcgcggccgcagcggcgacgacccccccatgatctgaccgcattgccgcgcgcggtaacccgatggaggcgctgaacgagctctgcgacctggtggccgcgcacccggatctcctcctcgccgacaagctcacctggctcacctcccgctgcgcgccgcccgcgtcccccgcgtcccccgcgcagcgcgcgacccgggcgcacctccactcgctcctcgccctcgcgcgcctcctccccgcgggcgccggcccgccggcggccccgctcctcgccttcctcgcctcccgcgccttcctcgcgccggccttctggccgcagtccttcgcgcccgcgcccttcctcgccaagctcctccctctcctcgccgccgcgcccgcctcccccgccctctcctccgcgctctccgccgtgctcctcgccttttatctcaactgggatccttgaccatatatgaaaataaatgcaaattagcc

SEQ ID NO: 66826 - protein, 127 aa, Triticum aestivum
  peptide (1)..(127): Ceres Seq. ID no. 12779959
  misc_feature (1)..(120): Homolog of NCBI NO: 13702810 NR Description: putative phosphatidylinositol kinase [Oryza
  misc_feature (1)..(120): Homolog of NCBI NO: 13324783 NR Description: putative phosphatidylinositol 4-kinase [Oryza
MEALNELCDLVAAHPDLLLADKLTWLTSRCAPPASPASPAQRATRAHLHSLLALARLLPAGAGPPAAPLLAFLASRAFLAPAFWPQSFAPAPFLAKLLPLLAAAPASPALSSALSAVLLAFYLNWDP

SEQ ID NO: 66827 - DNA, 698 bp, Triticum aestivum
  misc_feature (1)..(698): Ceres Seq. ID no. 12621228
tttttttcagcgtccacaccgttccctttgtccggtggagtgccgcggcgaggggctgtgggaggagatggccttcgcgtcgtggctagtggcgccgcctcctgccgcgagggcagggtggaggcccgcgagggcggcccctcgccggctcgtcctggcggcatccagccgaggcggcggcccggccccggccccgccgacgttcgacaggctgcgggagcagctcctccaactccacgccgaagccgacctcacccagtccaaagcaaacagtgctcgggtgaggcttatgcggttgaccgaggccgctgagaatcttaagaagagagccgtagtcagtgtccggatgggcagagagaatgaggcagtggaattacttgtgcagaagaagaagttgaccaatgctttggagaacataaaggagcgcattgagctgcttgacaagctttccgcaaagattagtgagctatggagaccgcttagcaagcggcgcgatcgggacgtcattgacaacatcatcacgggtctccgctcctcggcctcagcacttgctcctccgccaccaccaccccctcctgagcccgattagacgtacttttcttttctttggggcttgtcttgctgtgcccccagcgatgatttgagacttgtttgtactttgaacatgacttgttggatgcttggtgttggtgctttat

SEQ ID NO: 66828 - protein, 195 aa, Triticum aestivum
  peptide (1)..(195): Ceres Seq. ID no. 12621229
  misc_feature (69)..(155): Homolog of NCBI NO: 30679709 NR Description: expressed protein [Arabidopsis thaliana]
  misc_feature (69)..(155): Homolog of NCBI NO: 6692689 NR Description: F12K11.16 [Arabidopsis thaliana]
  misc_feature (23)..(155): Homolog of NCBI NO: 22535557 NR Description: OJ1116_H09.3 [Oryza sativa (japonica
FFQRPHRSLCPVECRGEGLWEEMAFASWLVAPPPAARAGWRPARAAPRRLVLAASSRGGGPAPAPPTFDRLREQLLQLHAEADLTQSKANSARVRLMRLTEAAENLKKRAVVSVRMGRENEAVELLVQKKKLTNALENIKERIELLDKLSAKISELWRPLSKRRDRDVIDNIITGLRSSASALAPPPPPPPPEPD

SEQ ID NO: 66829 - protein, 173 aa, Triticum aestivum
  peptide (1)..(173): Ceres Seq. ID no. 12621230
  misc_feature (47)..(133): Homolog of NCBI NO: 30679709 NR Description: expressed protein [Arabidopsis thaliana]
  misc_feature (47)..(133): Homolog of NCBI NO: 6692689 NR Description: F12K11.16 [Arabidopsis thaliana]
  misc_feature (1)..(133): Homolog of NCBI NO: 22535557 NR Description: OJ1116_H09.3 [Oryza sativa (japonica
MAFASWLVAPPPAARAGWRPARAAPRRLVLAASSRGGGPAPAPPTFDRLREQLLQLHAEADLTQSKANSARVRLMRLTEAAENLKKRAVVSVRMGRENEAVELLVQKKKLTNALENIKERIELLDKLSAKISELWRPLSKRRDRDVIDNIITGLRSSASALAPPPPPPPPEPD

SEQ ID NO: 66830 - protein, 103 aa, Triticum aestivum
  peptide (1)..(103): Ceres Seq. ID no. 12621231
FFSASTPFPLSGGVPRRGAVGGDGLRVVASGAASCREGRVEAREGGPSPARPGGIQPRRRPGPGPADVRQAAGAAPPTPRRSRPHPVQSKQCSGEAYAVDRGR

SEQ ID NO: 66831 - DNA, 825 bp, Triticum aestivum
  misc_feature (1)..(825): Ceres Seq. ID no. 13659221
actgtaatactcctgctcagtagcacaagcagtggtactactgctcagtgcacaccacccaactcacccacactttccccgcggcgatgggtcgcacgaagcacgcggtggcggcgacggcggcgacgacggagacgaagaagcggctccgcttcgagctctccccgcgctggaggccgccgccggcgctgcgccaggtaccgccggagccgcagccggagaagaagaagaagcgggcgtaccggttccggccgggcacggtagcgctgcgggaggtcaggaagtaccagaagtccaccgggccgctcatccccttcgcgcccttcgtccgcctggttaaggagatcaccgacgacttgacgaagggcgagatgaaccactggactcctcaggcgctcttctcgttgcaggaggctgcagagtatcacatagtcgatgtatttgaaaaggcaaatctatgtgccatccatgctaagcgtgttaccatcatgcaaaaggacatacagctcgcgaggcgtatcggggggagaaggccttggtgatactaatggaagatgttttctgcatcatagggagcaaagactggtgatttggtggtactaatggtagatgttttctgtattaggggtgcaatgcaaaggcgctgatggtagtggcccagtatgtttgtgagtgtatcgttaggaagtaatgtaggtgtattttcatttagttagcatgtcttcgaagttgatctggttcattgcatggttgggatcatctgacctccctgctttgctccatttgaattgatctaattcagacagcgtttctgcgaacatccgg

SEQ ID NO: 66832 - protein, 151 aa, Triticum aestivum
  peptide (1)..(151): Ceres Seq. ID no. 13659222
  misc_feature (46)..(149): Pfam Name: Core histone H2A/H2B/H3/H4 Pfam Description: Core histone H2A/H2B/H3/H4
  misc_feature (41)..(151): Homolog of NCBI NO: 33146142 NR Description: histone H3 like protein [Arabis gemmifera]
  misc_feature (41)..(151): Homolog of NCBI NO: 33146144 NR Description: histone H3 like protein [Arabis glabra]
  misc_feature (41)..(151): Homolog of NCBI NO: 33146140 NR Description: histone H3 like protein [Arabis gemmifera]
  misc_feature (41)..(151): Homolog of NCBI NO: 33146136 NR Description: histone H3 like protein [Arabis gemmifera]
  misc_feature (41)..(151): Homolog of NCBI NO: 18378832 NR Description: histone family [Arabidopsis thaliana]
  misc_feature (41)..(151): Homolog of NCBI NO: 21592479 NR Description: histone, putative [Arabidopsis thaliana]
  misc_feature (41)..(151): Homolog of NCBI NO: 19338706 NR Description: centromeric histone H3 HTR12 [Arabidopsis arenosa]
  misc_feature (41)..(151): Homolog of NCBI NO: 19338704 NR Description: centromeric histone H3 HTR12 [Arabidopsis arenosa]
  misc_feature (1)..(151): Homolog of NCBI NO: 21668094 NR Description: centromeric histone h3-like protein [Zea mays]
  misc_feature (1)..(151): Homolog of NCBI NO: 40365140 NR Description: centromeric histone 3 [Oryza sativa (japonica
MGRTKHAVAATAATTETKKRLRFELSPRWRPPPALRQVPPEPQPEKKKKRAYRFRPGTVALREVRKYQKSTGPLIPFAPFVRLVKEITDDLTKGEMNHWTPQALFSLQEAAEYHIVDVFEKANLCAIHAKRVTIMQKDIQLARRIGGRRPW

SEQ ID NO: 66833 - protein, 87 aa, Triticum aestivum
  peptide (1)..(87): Ceres Seq. ID no. 13659223
  misc_feature (32)..(87): Pfam Name: Protamine P1 Pfam Description: Protamine P1
TVILLLSSTSSGTTAQCTPPNSPTLSPRRWVARSTRWRRRRRRRRRRSGSASSSPRAGGRRRRCARYRRSRSRRRRRSGRTGSGRAR

SEQ ID NO: 66834 - DNA, 970 bp, Triticum aestivum
  misc_feature (1)..(970): Ceres Seq. ID no. 13664189
  misc_feature: Pfam Name: Pribosyltran Pfam Description: Phosphoribosyl transferase domain
aaaagaggcatgctcccttctcgcttcctgctcctcccgcactgccccaccgcgccggccccgactccgactccgacaccccccggcggcgcgcgctcgccgagctcggtcgcactgcggttcggatcccccggaggcgtgcggcttcgtcgcgggcgagggtcggcggcggtcgcgatggcatccgacgggcgcgtggagcggatcgcgtccagcatccgcgccatccccaacttccccaagccagggattttgtttcaggacatcacaaccttgcttctcgatccgcaggcattccgtgacaccactgacctctttgtcgagcggtacaaggacaaagacataactgtagttgctggtgttgaagccagaggattcatttttggtcctcccattgcattagccataggtgcaaagtttgttccaataaggaagccgaaaaaattacctggtgaggtgatatcggaagaatattctctggaatatggcactgacaaaatcgaaatgcacgtaggagctgtgcagcccaatgaccgagtccttattgtggatgatctaattgccacagggggaaccctttgtgccgctgccaaacttattgagcgtgttggagcaaaggtggttgagtgtgcctgtgttattgaactgccagagctgaagggccgggacaagttgggggacatgccagtttttgtcctagtgcaggcagacgaatcagtatgaaacaagttgtgactcttgagttgttccaatgatgttccccttctggaactatactggaagcagcaaagatatccgttacaatcttagctagttcctatctggagctgctcaataaaagtttcatttttaaatttgtccttctggaactgtttgggaatggagacttgattgttgttccctgtaatacgtggcttatttctgtcaaaaacagtgcaaattattcatgtcaatgaaggatgatagtctg

SEQ ID NO: 66835 - protein, 240 aa, Triticum aestivum
  peptide (1)..(240): Ceres Seq. ID no. 15220289
  misc_feature: Pfam Name: Pribosyltran Pfam Description: Phosphoribosyl transferase domain
  misc_feature (63)..(235): Homolog of NCBI NO: 21536749 NR Description: adenine phosphoribosyltransferase (EC
  misc_feature (63)..(235): Homolog of NCBI NO: 15235709 NR Description: adenine phosphoribosyltransferase (EC 2.4.2.7) -
  misc_feature (54)..(236): Homolog of NCBI NO: 33354190 NR Description: putative adenine phosphoribosyl transferase
  misc_feature (149)..(236): Homolog of NCBI NO: 25286872 NR Description: protein F17L21.24 [imported] - Arabidopsis
  misc_feature (63)..(150): Homolog of NCBI NO: 25286872 NR Description: protein F17L21.24 [imported] - Arabidopsis
  misc_feature (63)..(236): Homolog of NCBI NO: 30689934 NR Description: adenine phosphoribosyltransferase 1, APRT
  misc_feature (32)..(236): Homolog of NCBI NO: 18396344 NR Description: adenine phosphoribosyltransferase 1, APRT
  misc_feature (50)..(237): Homolog of NCBI NO: 32492063 NR Description: adenine phosphoribosyltransferase [Brassica napus]
  misc_feature (60)..(240): Homolog of NCBI NO: 9711921 NR Description: Adenine phosphoribosyltransferase [Hordeum
  misc_feature (60)..(240): Homolog of NCBI NO: 2499932 NR Description: Adenine phosphoribosyltransferase 1 (APRT)
KRGMLPSRFLLLPHCPTAPAPTPTPTPPGGARSPSSVALRFGSPGGVRLRRGRGSAAVAMASDGRVERIASSIRAIPNFPKPGILFQDITTLLLDPQAFRDTTDLFVERYKDKDITVVAGVEARGFIFGPPIALAIGAKFVPIRKPKKLPGEVISEEYSLEYGTDKIEMHVGAVQPNDRVLIVDDLIATGGTLCAAAKLIERVGAKVVECACVIELPELKGRDKLGDMPVFVLVQADESV

SEQ ID NO: 66836 - protein, 237 aa, Triticum aestivum
  peptide (1)..(237): Ceres Seq. ID no. 15220290
  misc_feature: Pfam Name: Pribosyltran Pfam Description: Phosphoribosyl transferase domain
  misc_feature (60)..(232): Homolog of NCBI NO: 21536749 NR Description: adenine phosphoribosyltransferase (EC
  misc_feature (60)..(232): Homolog of NCBI NO: 15235709 NR Description: adenine phosphoribosyltransferase (EC 2.4.2.7) -
  misc_feature (51)..(233): Homolog of NCBI NO: 33354190 NR Description: putative adenine phosphoribosyl transferase
  misc_feature (146)..(233): Homolog of NCBI NO: 25286872 NR Description: protein F17L21.24 [imported] - Arabidopsis
  misc_feature (60)..(147): Homolog of NCBI NO: 25286872 NR Description: protein F17L21.24 [imported] - Arabidopsis
  misc_feature (60)..(233): Homolog of NCBI NO: 30689934 NR Description: adenine phosphoribosyltransferase 1, APRT
  misc_feature (29)..(233): Homolog of NCBI NO: 18396344 NR Description: adenine phosphoribosyltransferase 1, APRT
  misc_feature (47)..(234): Homolog of NCBI NO: 32492063 NR Description: adenine phosphoribosyltransferase [Brassica napus]
  misc_feature (57)..(237): Homolog of NCBI NO: 9711921 NR Description: Adenine phosphoribosyltransferase [Hordeum
  misc_feature (57)..(237): Homolog of NCBI NO: 2499932 NR Description: Adenine phosphoribosyltransferase 1 (APRT)
MLPSRFLLLPHCPTAPAPTPTPTPPGGARSPSSVALRFGSPGGVRLRRGRGSAAVAMASDGRVERIASSIRAIPNFPKPGILFQDITTLLLDPQAFRDTTDLFVERYKDKDITVVAGVEARGFIFGPPIALAIGAKFVPIRKPKKLPGEVISEEYSLEYGTDKIEMHVGAVQPNDRVLIVDDLIATGGTLCAAAKLIERVGAKVVECACVIELPELKGRDKLGDMPVFVLVQADESV

SEQ ID NO: 66837 - protein, 181 aa, Triticum aestivum
  peptide (1)..(181): Ceres Seq. ID no. 15220291
  misc_feature: Pfam Name: Pribosyltran Pfam Description: Phosphoribosyl transferase domain
  misc_feature (4)..(176): Homolog of NCBI NO: 21536749 NR Description: adenine phosphoribosyltransferase (EC
  misc_feature (4)..(176): Homolog of NCBI NO: 15235709 NR Description: adenine phosphoribosyltransferase (EC 2.4.2.7) -
  misc_feature (1)..(177): Homolog of NCBI NO: 33354190 NR Description: putative adenine phosphoribosyl transferase
  misc_feature (90)..(177): Homolog of NCBI NO: 25286872 NR Description: protein F17L21.24 [imported] - Arabidopsis
  misc_feature (4)..(91): Homolog of NCBI NO: 25286872 NR Description: protein F17L21.24 [imported] - Arabidopsis
  misc_feature (4)..(177): Homolog of NCBI NO: 30689934 NR Description: adenine phosphoribosyltransferase 1, APRT
  misc_feature (1)..(177): Homolog of NCBI NO: 18396344 NR Description: adenine phosphoribosyltransferase 1, APRT
  misc_feature (1)..(178): Homolog of NCBI NO: 32492063 NR Description: adenine phosphoribosyltransferase [Brassica napus]
  misc_feature (1)..(181): Homolog of NCBI NO: 9711921 NR Description: Adenine phosphoribosyltransferase [Hordeum
  misc_feature (1)..(181): Homolog of NCBI NO: 2499932 NR Description: Adenine phosphoribosyltransferase 1 (APRT)
MASDGRVERIASSIRAIPNFPKPGILFQDITTLLLDPQAFRDTTDLFVERYKDKDITVVAGVEARGFIFGPPIALAIGAKFVPIRKPKKLPGEVISEEYSLEYGTDKIEMHVGAVQPNDRVLIVDDLIATGGTLCAAAKLIERVGAKVVECACVIELPELKGRDKLGDMPVFVLVQADESV

SEQ ID NO: 66838 - DNA, 932 bp, Triticum aestivum
  misc_feature (1)..(932): Ceres Seq. ID no. 13659177
gacttcctctcctctctgtgccccccaatcctcctcgccaactcattcccagagcaccaagaagatctggagaagagaggaggccattgctagctccccaccatccccttctccctctatctgcctagcgttcttgcttggtcgccatggccaccatcctggagaacatccagaaggcgcggttcctgccgacgaggccgctgagggacgacctgcccaccttccagggcggcaaggaggaggagagccacctcatgggcctgcggaagcgcctctccagcttctccggcaagatccagcccatctcctccgcgtccgccgagtgggcgttcaggcggacccggtcggcgccgtcgctcgccgccgagttcgcgggcggcccgctcaagcgctggtgggactggggcctcggctggctgctctccaagaagctcggcttcgccggcgacctggagatgaacgaggaggaggcggccgcgctcggccgccaaagcaggggcacctgggcccacgtcctctacaaggtgcgctccggggtccgccgcctcgtcgcgtccgaccactcgctgcccaccacgcaccaccgcaaggcctcgctgcccccgtcctcctccgcgcaccagcactgcaagcccgcgccgcagttcgcctacacccagagcttccagtacggccaagcaatggcgcactaagcagcttgctttgcatcttgttctggtggtgtccgcgagatccaaatagacacgacgacgggaaggaagctcgtgaagaaggagaagattcaggtctcaggtgagatcgatggggaagatggctcgctacacaattatatctgggaatttagagttgttagtttaccgtgctgctttcttttttgtgggtagatctaatgtctctacgtataatagataccgagtgtatgctggtggtcc

SEQ ID NO: 66839 - protein, 264 aa, Triticum aestivum
  peptide (1)..(264): Ceres Seq. ID no. 13659178
TSSPLCAPQSSSPTHSQSTKKIWRREEAIASSPPSPSPSICLAFLLGRHGHHPGEHPEGAVPADEAAEGRPAHLPGRQGGGEPPHGPAEAPLQLLRQDPAHLLRVRRVGVQADPVGAVARRRVRGRPAQALVGLGPRLAALQEARLRRRPGDERGGGGRARPPKQGHLGPRPLQGALRGPPPRRVRPLAAHHAPPQGLAAPVLLRAPALQARAAVRLHPELPVRPSNGALSSLLCILFWWCPRDPNRHDDGKEAREEGEDSGLR

SEQ ID NO: 66840 - protein, 181 aa, Triticum aestivum
  peptide (1)..(181): Ceres Seq. ID no. 13659179
  misc_feature (39)..(142): Homolog of NCBI NO: 15227807 NR Description: expressed protein [Arabidopsis thaliana]
  misc_feature (5)..(142): Homolog of NCBI NO: 7486016 NR Description: hypothetical protein F23E12.120 - Arabidopsis
  misc_feature (1)..(142): Homolog of NCBI NO: 18418660 NR Description: expressed protein [Arabidopsis thaliana]
  misc_feature (1)..(142): Homolog of NCBI NO: 21593793 NR Description: unknown [Arabidopsis thaliana]
  misc_feature (1)..(146): Homolog of NCBI NO: 28411879 NR Description: OSJNBa0016N23.32 [Oryza sativa (japonica
MATILENIQKARFLPTRPLRDDLPTFQGGKEEESHLMGLRKRLSSFSGKIQPISSASAEWAFRRTRSAPSLAAEFAGGPLKRWWDWGLGWLLSKKLGFAGDLEMNEEEAAALGRQSRGTWAHVLYKVRSGVRRLVASDHSLPTTHHRKASLPPSSSAHQHCKPAPQFAYTQSFQYGQAMAH

SEQ ID NO: 66841 - protein, 145 aa, Triticum aestivum
  peptide (1)..(145): Ceres Seq. ID no. 13659180
  misc_feature (3)..(106): Homolog of NCBI NO: 15227807 NR Description: expressed protein [Arabidopsis thaliana]
  misc_feature (1)..(106): Homolog of NCBI NO: 7486016 NR Description: hypothetical protein F23E12.120 - Arabidopsis
  misc_feature (1)..(106): Homolog of NCBI NO: 18418660 NR Description: expressed protein [Arabidopsis thaliana]
  misc_feature (1)..(106): Homolog of NCBI NO: 21593793 NR Description: unknown [Arabidopsis thaliana]
  misc_feature (1)..(110): Homolog of NCBI NO: 28411879 NR Description: OSJNBa0016N23.32 [Oryza sativa (japonica
MGLRKRLSSFSGKIQPISSASAEWAFRRTRSAPSLAAEFAGGPLKRWWDWGLGWLLSKKLGFAGDLEMNEEEAAALGRQSRGTWAHVLYKVRSGVRRLVASDHSLPTTHHRKASLPPSSSAHQHCKPAPQFAYTQSFQYGQAMAH

SEQ ID NO: 66842 - DNA, 659 bp, Triticum aestivum
  misc_feature (1)..(659): Ceres Seq. ID no. 13659133
caaatgctcaagattttcaaggaacatgtcagcaagacctcaattttggatgactttgcattttacgagaaccgacagaagttgatgcaagaaaagagagcaaagcaacaaccgcttcaggggcagggtgttgatgagaaggagaagagcgcagttaacgggaattccgctgcacagaagcagacaccgagcaaggagagcaccacccctgccgccggtgaagagccgaacgcttccaaacccaccacagctgaaagcggcggcgcgagtgccaactagcgtgatatatttcttacgctcgttgctgtaacatgcggtagtccattgcgcaaaactcggtcaggcttcggaatatgcgcggatcatacatgggaaactaaatttaggtcgtgtgacttggttctcatcgtttaggtctcttatatacttggtgacatcaggttcttatatggcccctttcctattcctatttttgtttcggagtcttgttggtttagtaatttcagctatttgttattgtttagactaaaggagccgattttcgatacttctagacaacatttaaggtactaagtttttatgagtgttgtagtgctggagaaagtaataagaacaaagaactcctggtttttctagtcaaaaaaaaaaaaagaaaaaaa

SEQ ID NO: 66843 - protein, 92 aa, Triticum aestivum
  peptide (1)..(92): Ceres Seq. ID no. 13659134
  misc_feature (1)..(92): Homolog of NCBI NO: 38636667 NR Description: putative Rubisco subunit binding-protein beta
  misc_feature (2)..(44): Homolog of NCBI NO: 17979477 NR Description: AT3g13060/MGH6_17 [Arabidopsis thaliana]
  misc_feature (1)..(85): Homolog of NCBI NO: 30682679 NR Description: expressed protein [Arabidopsis thaliana]
  misc_feature (1)..(85): Homolog of NCBI NO: 30682683 NR Description: expressed protein [Arabidopsis thaliana]
  misc_feature (1)..(53): Homolog of NCBI NO: 34395023 NR Description: high-glucose-regulated protein 8-like
  misc_feature (1)..(85): Homolog of NCBI NO: 25084169 NR Description: Unknown protein [Arabidopsis thaliana]
  misc_feature (1)..(89): Homolog of NCBI NO: 22773231 NR Description: Putative RNA-binding protein
  misc_feature (1)..(92): Homolog of NCBI NO: 18087662 NR Description: putative RNA-binding protein [Oryza sativa]
  misc_feature (1)..(73): Homolog of NCBI NO: 29725575 NR Description: putative RNA-binding protein [Avena sativa]
QMLKIFKEHVSKTSILDDFAFYENRQKLMQEKRAKQQPLQGQGVDEKEKSAVNGNSAAQKQTPSKESTTPAAGEEPNASKPTTAESGGASAN

SEQ ID NO: 66844 - protein, 91 aa, Triticum aestivum
  peptide (1)..(91): Ceres Seq. ID no. 13659135
  misc_feature (1)..(91): Homolog of NCBI NO: 38636667 NR Description: putative Rubisco subunit binding-protein beta
  misc_feature (1)..(43): Homolog of NCBI NO: 17979477 NR Description: AT3g13060/MGH6_17 [Arabidopsis thaliana]
  misc_feature (1)..(84): Homolog of NCBI NO: 30682679 NR Description: expressed protein [Arabidopsis thaliana]
  misc_feature (1)..(84): Homolog of NCBI NO: 30682683 NR Description: expressed protein [Arabidopsis thaliana]
  misc_feature (1)..(52): Homolog of NCBI NO: 34395023 NR Description: high-glucose-regulated protein 8-like
  misc_feature (1)..(84): Homolog of NCBI NO: 25084169 NR Description: Unknown protein [Arabidopsis thaliana]
  misc_feature (1)..(88): Homolog of NCBI NO: 22773231 NR Description: Putative RNA-binding protein
  misc_feature (1)..(91): Homolog of NCBI NO: 18087662 NR Description: putative RNA-binding protein [Oryza sativa]
  misc_feature (1)..(72): Homolog of NCBI NO: 29725575 NR Description: putative RNA-binding protein [Avena sativa]
MLKIFKEHVSKTSILDDFAFYENRQKLMQEKRAKQQPLQGQGVDEKEKSAVNGNSAAQKQTPSKESTTPAAGEEPNASKPTTAESGGASAN

SEQ ID NO: 66845 - protein, 64 aa, Triticum aestivum
  peptide (1)..(64): Ceres Seq. ID no. 13659136
  misc_feature (1)..(64): Homolog of NCBI NO: 38636667 NR Description: putative Rubisco subunit binding-protein beta
  misc_feature (1)..(16): Homolog of NCBI NO: 17979477 NR Description: AT3g13060/MGH6_17 [Arabidopsis thaliana]
  misc_feature (1)..(57): Homolog of NCBI NO: 30682679 NR Description: expressed protein [Arabidopsis thaliana]
  misc_feature (1)..(57): Homolog of NCBI NO: 30682683 NR Description: expressed protein [Arabidopsis thaliana]
  misc_feature (1)..(25): Homolog of NCBI NO: 34395023 NR Description: high-glucose-regulated protein 8-like
  misc_feature (1)..(57): Homolog of NCBI NO: 25084169 NR Description: Unknown protein [Arabidopsis thaliana]
  misc_feature (1)..(61): Homolog of NCBI NO: 22773231 NR Description: Putative RNA-binding protein
  misc_feature (1)..(64): Homolog of NCBI NO: 18087662 NR Description: putative RNA-binding protein [Oryza sativa]
  misc_feature (1)..(45): Homolog of NCBI NO: 29725575 NR Description: putative RNA-binding protein [Avena sativa]
MQEKRAKQQPLQGQGVDEKEKSAVNGNSAAQKQTPSKESTTPAAGEEPNASKPTTAESGGASAN

SEQ ID NO: 66846 - DNA, 1100 bp, Triticum aestivum
  misc_feature (1)..(1100): Ceres Seq. ID no. 15179873
aatgttttcacggacttttgacttcagcccaagtcaaggttcccaaaaggccgaagccgccagcccaccgcacactgcccctcccctcctcgcccaatccccccttcttcgtcccacgacagaccaatttcttcccaaatcgccaccgccaccgccatgatgtcgtcaccggcagataccgcgccgtcatcctcctccgcggcctcggccgctccgaatcagcatccacagccgccggcgcagcaggctgatacgaaggagcggcggatggagtcgctcgggtggctgacggagtccacggtgatgcccaagaagcacaaggccatcgagggcgtcggcgcggcatccatactcgacctcaaggcccagctctaccgcactcaggaggaagcccgcaattccaccgccgctgacgccgcctccagcgagttccgccgcgccaagaaacgctcgggccccgccgaccccctgggcgccaagaactcaggtgtagacgctcgtgcccacaaggataagctggagctgaaagctgtgaaagatggtactgcatgttattctgccctagaaaagaaggctgagctgtatgagaaattatccaggggtgagctacctgatgaagaagaccaggagaaatattgcgttgatttcttccagaaaagttttcatcaagtcagcgtgcgccggcagccagagactgctactgcccctgagcatgtagaacaagaaaatgagagtgtcgattctatgccaaatcccaagccaatgggccttggacgaactggtacaacagttgaccaagatgagcacaaacgctttgtcagggaggttcacgacgaagtaagtcaagcaaggcagaaggcttcaacgatgaaacaccggcgacaagagcaggagtcggctcgtagagagaaactcaggcaagctttcctcaagaagcgccttgacaagttgatggctgaaaagcaagcatcttcagcgagtgatgaccaaccaaatagctaatcgagattttgtatgtcttacacttgtgcccaggaagcagttgttgtagctcatgtggtaatggttcatgcaactgaaaatgagaaaacttgccctac

SEQ ID NO: 66847 - protein, 281 aa, Triticum aestivum
  peptide (1)..(281): Ceres Seq. ID no. 15179874
  misc_feature (50)..(199): Homolog of NCBI NO: 34857683 NR Description: similar to RIKEN cDNA C130022K22 gene [Rattus
  misc_feature (50)..(195): Homolog of NCBI NO: 29835270 NR Description: RIKEN cDNA C130022K22 gene [Mus musculus]
  misc_feature (50)..(195): Homolog of NCBI NO: 26333485 NR Description: unnamed protein product [Mus musculus]
  misc_feature (202)..(281): Homolog of NCBI NO: 34910918 NR Description: OSJNBb0063G05.4 [Oryza sativa (japonica
  misc_feature (2)..(151): Homolog of NCBI NO: 34910918 NR Description: OSJNBb0063G05.4 [Oryza sativa (japonica
  misc_feature (30)..(278): Homolog of NCBI NO: 26452652 NR Description: unknown protein [Arabidopsis thaliana]
  misc_feature (30)..(278): Homolog of NCBI NO: 15236824 NR Description: cytochrome b561-related [Arabidopsis thaliana]
MMSSPADTAPSSSSAASAAPNQHPQPPAQQADTKERRMESLGWLTESTVMPKKHKAIEGVGAASILDLKAQLYRTQEEARNSTAADAASSEFRRAKKRSGPADPLGAKNSGVDARAHKDKLELKAVKDGTACYSALEKKAELYEKLSRGELPDEEDQEKYCVDFFQKSFHQVSVRRQPETATAPEHVEQENESVDSMPNPKPMGLGRTGTTVDQDEHKRFVREVHDEVSQARQKASTMKHRRQEQESARREKLRQAFLKKRLDKLMAEKQASSASDDQPNS

SEQ ID NO: 66848 - protein, 280 aa, Triticum aestivum
  peptide (1)..(280): Ceres Seq. ID no. 15179875
  misc_feature (49)..(198): Homolog of NCBI NO: 34857683 NR Description: similar to RIKEN cDNA C130022K22 gene [Rattus
  misc_feature (49)..(194): Homolog of NCBI NO: 29835270 NR Description: RIKEN cDNA C130022K22 gene [Mus musculus]
  misc_feature (49)..(194): Homolog of NCBI NO: 26333485 NR Description: unnamed protein product [Mus musculus]
  misc_feature (201)..(280): Homolog of NCBI NO: 34910918 NR Description: OSJNBb0063G05.4 [Oryza sativa (japonica
  misc_feature (1)..(150): Homolog of NCBI NO: 34910918 NR Description: OSJNBb0063G05.4 [Oryza sativa (japonica
  misc_feature (29)..(277): Homolog of NCBI NO: 26452652 NR Description: unknown protein [Arabidopsis thaliana]
  misc_feature (29)..(277): Homolog of NCBI NO: 15236824 NR Description: cytochrome b561-related [Arabidopsis thaliana]
MSSPADTAPSSSSAASAAPNQHPQPPAQQADTKERRMESLGWLTESTVMPKKHKAIEGVGAASILDLKAQLYRTQEEARNSTAADAASSEFRRAKKRSGPADPLGAKNSGVDARAHKDKLELKAVKDGTACYSALEKKAELYEKLSRGELPDEEDQEKYCVDFFQKSFHQVSVRRQPETATAPEHVEQENESVDSMPNPKPMGLGRTGTTVDQDEHKRFVREVHDEVSQARQKASTMKHRRQEQESARREKLRQAFLKKRLDKLMAEKQASSASDDQPNS

SEQ ID NO: 66849 - protein, 244 aa, Triticum aestivum
  peptide (1)..(244): Ceres Seq. ID no. 15179876
  misc_feature (13)..(162): Homolog of NCBI NO: 34857683 NR Description: similar to RIKEN cDNA C130022K22 gene [Rattus
  misc_feature (13)..(158): Homolog of NCBI NO: 29835270 NR Description: RIKEN cDNA C130022K22 gene [Mus musculus]
  misc_feature (13)..(158): Homolog of NCBI NO: 26333485 NR Description: unnamed protein product [Mus musculus]
  misc_feature (165)..(244): Homolog of NCBI NO: 34910918 NR Description: OSJNBb0063G05.4 [Oryza sativa (japonica
  misc_feature (1)..(114): Homolog of NCBI NO: 34910918 NR Description: OSJNBb0063G05.4 [Oryza sativa (japonica
  misc_feature (1)..(241): Homolog of NCBI NO: 26452652 NR Description: unknown protein [Arabidopsis thaliana]
  misc_feature (1)..(241): Homolog of NCBI NO: 15236824 NR Description: cytochrome b561-related [Arabidopsis thaliana]
MESLGWLTESTVMPKKHKAIEGVGAASILDLKAQLYRTQEEARNSTAADAASSEFRRAKKRSGPADPLGAKNSGVDARAHKDKLELKAVKDGTACYSALEKKAELYEKLSRGELPDEEDQEKYCVDFFQKSFHQVSVRRQPETATAPEHVEQENESVDSMPNPKPMGLGRTGTTVDQDEHKRFVREVHDEVSQARQKASTMKHRRQEQESARREKLRQAFLKKRLDKLMAEKQASSASDDQPNS

SEQ ID NO: 66850 - DNA, 1162 bp, Triticum aestivum
  misc_feature (1)..(1162): Ceres Seq. ID no. 13663517
aacatcctaatcaaaaactaataaatcccccacccccggatcgacaaagcttcccattcctccgcatcggcaggcagcagcaaaacaacagcccaatcgagggtcactccacaccaccaccactctcttcccccaatcccctcctcctccccgaaaccctagctggaatggagcccaaatccaccacccctccgccgccgggccccgtgctgggcgcgcccgtcggctacccgccggccgccgtctacccggccgccccgccccccggctacccgcacgcgccggccctctacgcgccccagccgccccccgccgccgtcgccgccgcgtcgcagcagaccgccgcgcagcagcagcagcagctgcaggtgttctgggcggagcagtaccgcgagatcgaggccaccaccgacttcaagaaccacaacctgcccctcgcccgcatcaagaagatcatgaaggccgacgaggacgtccgcatgatcgccgccgaggcgcccgtcgtcttcgcccgggcctgcgagatgttcatcctcgagctcacccaccgcggctgggcgcacgccgaggagaacaagcgccgcacgctgcagaagtccgacatcgccgccgccatcgcccgcaccgaggtcttcgacttcctggtggacatcgtgccgcgggacgaggccaaggacgccgaggcggccgtcgccgccgggatgccccaccccgccgccggcatgcccgccgccgacatggggtactactacgtcccgcagcagtaacacctgcagtatgttacagcggatttaagttgcatctaagattgtgctgttgatttagtgctctcctatgtttgtttgttcaccgctgaataatttaagatgttgccattatttgaggggcctcctctatgttacaagtgattcgatccgagaagaacccggctaggttcttctgatcgaggcagtccgtatgatgctcatgcatgtctaactgannanaaaaaaaaaaaaaaaaaaaaaaaaaaaaaaaaaaaaaaaaaaaaaaaaaaaaaaaaaaaaaaaaaaaaaaataaaaaaaaaaaaaaaaaggttaatcaaaaccgccaaccccaaggggggccccggaaccaaattcccccaaaaaaaagccaaaaaacgcgcgccaacggcccgcc

SEQ ID NO: 66851 - protein, 254 aa, Triticum aestivum
  peptide (1)..(254): Ceres Seq. ID no. 13663518
  misc_feature (8)..(103): Pfam Name: Extensin-like region Pfam Description: Extensin-like region
  misc_feature (130)..(254): Homolog of NCBI NO: 2398533 NR Description: Transcription factor [Arabidopsis thaliana]
  misc_feature (98)..(252): Homolog of NCBI NO: 6289057 NR Description: heme activated protein [Arabidopsis thaliana]
  misc_feature (98)..(252): Homolog of NCBI NO: 25372763 NR Description: hypothetical protein [imported] - Arabidopsis
  misc_feature (98)..(252): Homolog of NCBI NO: 15223986 NR Description: transcription factor Hap5a, putative [Arabidopsis
  misc_feature (111)..(247): Homolog of NCBI NO: 15221912 NR Description: transcription factor Hap5a, putative [Arabidopsis
  misc_feature (91)..(254): Homolog of NCBI NO: 21554704 NR Description: transcription factor, putative [Arabidopsis
  misc_feature (77)..(252): Homolog of NCBI NO: 15242784 NR Description: transcription factor Hap5a, putative [Arabidopsis
  misc_feature (86)..(252): Homolog of NCBI NO: 15228405 NR Description: transcription factor Hap5a, putative [Arabidopsis
  misc_feature (91)..(254): Homolog of NCBI NO: 15223482 NR Description: transcription factor Hap5a, putative [Arabidopsis
  misc_feature (56)..(253): Homolog of NCBI NO: 5257260 NR Description: Similar to sequence of BAC F7G19 from Arabidopsis
HPNQKLINPPPPDRQSFPFLRIGRQQQNNSPIEGHSTPPPLSSPNPLLLPETLAGMEPKSTTPPPPGPVLGAPVGYPPAAVYPAAPPPGYPHAPALYAPQPPPAAVAAASQQTAAQQQQQLQVFWAEQYREIEATTDFKNHNLPLARIKKIMKADEDVRMIAAEAPVVFARACEMFILELTHRGWAHAEENKRRTLQKSDIAAAIARTEVFDFLVDIVPRDEAKDAEAAVAAGMPHPAAGMPAADMGYYYVPQQ

SEQ ID NO: 66852 - protein, 199 aa, Triticum aestivum
  peptide (1)..(199): Ceres Seq. ID no. 13663519
  misc_feature (1)..(55): Pfam Name: Extensin-like region Pfam Description: Extensin-like region
  misc_feature (75)..(199): Homolog of NCBI NO: 2398533 NR Description: Transcription factor [Arabidopsis thaliana]
  misc_feature (43)..(197): Homolog of NCBI NO: 6289057 NR Description: heme activated protein [Arabidopsis thaliana]
  misc_feature (43)..(197): Homolog of NCBI NO: 25372763 NR Description: hypothetical protein [imported] - Arabidopsis
  misc_feature (43)..(197): Homolog of NCBI NO: 15223986 NR Description: transcription factor Hap5a, putative [Arabidopsis
  misc_feature (56)..(192): Homolog of NCBI NO: 15221912 NR Description: transcription factor Hap5a, putative [Arabidopsis
  misc_feature (36)..(199): Homolog of NCBI NO: 21554704 NR Description: transcription factor, putative [Arabidopsis
  misc_feature (22)..(197): Homolog of NCBI NO: 15242784 NR Description: transcription factor Hap5a, putative [Arabidopsis
  misc_feature (31)..(197): Homolog of NCBI NO: 15228405 NR Description: transcription factor Hap5a, putative [Arabidopsis
  misc_feature (36)..(199): Homolog of NCBI NO: 15223482 NR Description: transcription factor Hap5a, putative [Arabidopsis
  misc_feature (1)..(198): Homolog of NCBI NO: 5257260 NR Description: Similar to sequence of BAC F7G19 from Arabidopsis
MEPKSTTPPPPGPVLGAPVGYPPAAVYPAAPPPGYPHAPALYAPQPPPAAVAAASQQTAAQQQQQLQVFWAEQYREIEATTDFKNHNLPLARIKKIMKADEDVRMIAAEAPVVFARACEMFILELTHRGWAHAEENKRRTLQKSDIAAAIARTEVFDFLVDIVPRDEAKDAEAAVAAGMPHPAAGMPAADMGYYYVPQQ

SEQ ID NO: 66853 - DNA, 898 bp, Triticum aestivum
  misc_feature (1)..(898): Ceres Seq. ID no. 13663563
aacacctcactccctctcctcactcctcactcgcaagcctcgctcctctccctccgctcgctctcctcgctcggccgcagcgacaagaagcatgggcctctcggtgatcgctccgccggccggcgactcggcgtccccggcgcaccgccgcgcgcgccgcgccttcctcgtgtccaactacatgatcctcggcgcggcgtccgggtgcggcttcctcacgctctcgctccgcctggtgccctccgtcgacggcttcctcctcatcctgctccacgcgctcaccgtggcggccgccgtggccgggtgcgccgtcatcgcggcgcccgacccgccgcggggccgcgtctacaccgcccacatgtccgccaccgtcgtcgtgtccatcctgcagggcgccgccgccgtgctcgccttctcccgcaccgccgagttcctcgcctacgggctccggtcctacgtccgcgaggaggacggcgccatcatcctgcgcatgatcgggggcctcggcatcgccatcttctgcctcgagtgggtcgccctcgcgctcgccttcgtcctcaggtactacgcctacgtcgacagggagtgcggcggcaaccccatgcgccgcagcgccaaggtcggcggcgaggacggcgccggcaactggccgtggccgttccaggtctgatctgatccgccacaaggatgatgatgcagcaagcaatttatgatgttggggccttgggggaggggtgtctcaagacgagaagagctgagaaccgatagttcttgggagaaaaactagtgtttggtgatattactattcgtttattgggttgtattgtgtggtgtggtatatgattatgttgtactgcggctgttgccacctctataatattatttgaaattcctgttc

SEQ ID NO: 66854 - protein, 224 aa, Triticum aestivum
  peptide (1)..(224): Ceres Seq. ID no. 15220232
  misc_feature (33)..(224): Homolog of NCBI NO: 29247944 NR Description: GLP_26_54603_52153 [Giardia lamblia ATCC 50803]
NTSLPLLTPHSQASLLSLRSLSSLGRSDKKHGPLGDRSAGRRLGVPGAPPRAPRLPRVQLHDPRRGVRVRLPHALAPPGALRRRLPPHPAPRAHRGGRRGRVRRHRGARPAAGPRLHRPHVRHRRRVHPAGRRRRARLLPHRRVPRLRAPVLRPRGGRRHHPAHDRGPRHRHLLPRVGRPRARLRPQVLRLRRQGVRRQPHAPQRQGRRRGRRRQLAVAVPGLI

SEQ ID NO: 66855 - protein, 222 aa, Triticum aestivum
  peptide (1)..(222): Ceres Seq. ID no. 15220233
  misc_feature (53)..(187): Homolog of NCBI NO: 34907616 NR Description: contains EST C27797(C52876)~unknown protein
  misc_feature (55)..(222): Homolog of NCBI NO: 15239407 NR Description: hypothetical protein [Arabidopsis thaliana]
  misc_feature (55)..(222): Homolog of NCBI NO: 15239379 NR Description: expressed protein [Arabidopsis thaliana]
  misc_feature (36)..(222): Homolog of NCBI NO: 18396262 NR Description: expressed protein [Arabidopsis thaliana]
  misc_feature (43)..(222): Homolog of NCBI NO: 21703131 NR Description: AT5g16250/T21H19_170 [Arabidopsis thaliana]
  misc_feature (43)..(222): Homolog of NCBI NO: 15237310 NR Description: expressed protein [Arabidopsis thaliana]
  misc_feature (31)..(222): Homolog of NCBI NO: 21553926 NR Description: unknown [Arabidopsis thaliana]
  misc_feature (32)..(222): Homolog of NCBI NO: 38345379 NR Description: OSJNBa0067K08.8 [Oryza sativa (japonica
TPHSLSSLLTRKPRSSPSARSPRSAAATRSMGLSVIAPPAGDSASPAHRRARRAFLVSNYMILGAASGCGFLTLSLRLVPSVDGFLLILLHALTVAAAVAGCAVIAAPDPPRGRVYTAHMSATVVVSILQGAAAVLAFSRTAEFLAYGLRSYVREEDGAIILRMIGGLGIAIFCLEWVALALAFVLRYYAYVDRECGGNPMRRSAKVGGEDGAGNWPWPFQV

SEQ ID NO: 66856 - protein, 192 aa, Triticum aestivum
  peptide (1)..(192): Ceres Seq. ID no. 15220234
  misc_feature (23)..(157): Homolog of NCBI NO: 34907616 NR Description: contains EST C27797(C52876)~unknown protein
  misc_feature (25)..(192): Homolog of NCBI NO: 15239407 NR Description: hypothetical protein [Arabidopsis thaliana]
  misc_feature (25)..(192): Homolog of NCBI NO: 15239379 NR Description: expressed protein [Arabidopsis thaliana]
  misc_feature (6)..(192): Homolog of NCBI NO: 18396262 NR Description: expressed protein [Arabidopsis thaliana]
  misc_feature (13)..(192): Homolog of NCBI NO: 21703131 NR Description: AT5g16250/T21H19_170 [Arabidopsis thaliana]
  misc_feature (13)..(192): Homolog of NCBI NO: 15237310 NR Description: expressed protein [Arabidopsis thaliana]
  misc_feature (1)..(192): Homolog of NCBI NO: 21553926 NR Description: unknown [Arabidopsis thaliana]
  misc_feature (2)..(192): Homolog of NCBI NO: 38345379 NR Description: OSJNBa0067K08.8 [Oryza sativa (japonica
MGLSVIAPPAGDSASPAHRRARRAFLVSNYMILGAASGCGFLTLSLRLVPSVDGFLLILLHALTVAAAVAGCAVIAAPDPPRGRVYTAHMSATVVVSILQGAAAVLAFSRTAEFLAYGLRSYVREEDGAIILRMIGGLGIAIFCLEWVALALAFVLRYYAYVDRECGGNPMRRSAKVGGEDGAGNWPWPFQV

SEQ ID NO: 66857 - DNA, 696 bp, Triticum aestivum
  misc_feature (1)..(696): Ceres Seq. ID no. 15179877
accagcaccagccctccttttcaaatcgctttcaaacaggaacacatcgccgcctcctcctccccttcctccgctccctcccccatccatccagtgatccatggccgccgcctcgcccgagttcttcaacccggcggacgccttctcgccgcgcatgcacctcctctccgccggcgctggagacggcggctgtggcgacggcgacgaatactaccgctgctgcaggacgcccacgggcgccgggatcggctgcctgggccaggcggccacctgcccgccggcgccgcggaagccgcgcgcgcagcccgacgcggcctgccggaagcgcctcttcgacgtccaggtcatcagcctccgcttcgacgacctcgacgccatcttccgcccctcgccgccgccgccctgccacgaccgcaacaacaagcagcagcagcggcggcagcggagccgccgcgtgctcggcaggctcgccgctggctccaccggccggcgcagccgcgccagcttaaattaagtgcctgccattagcagtcagtacccagtagttgagttgagttgacacttgtgtggatggatgattgagttatcagccatcttcaggtaaaaacagtagtggtagccacgacccatacttcgctttgcacacccatcctctgtaatcatccgtcataataatattattatttctactgtcat

SEQ ID NO: 66858 - protein, 175 aa, Triticum aestivum
  peptide (1)..(175): Ceres Seq. ID no. 15179878
TSTSPPFQIAFKQEHIAASSSPSSAPSPIHPVIHGRRLARVLQPGGRLLAAHAPPLRRRWRRRLWRRRRILPLLQDAHGRRDRLPGPGGHLPAGAAEAARAARRGLPEAPLRRPGHQPPLRRPRRHLPPLAAAALPRPQQQAAAAAAAEPPRARQARRWLHRPAQPRQLKLSACH

SEQ ID NO: 66859 - protein, 168 aa, Triticum aestivum
  peptide (1)..(168): Ceres Seq. ID no. 15179879
  misc_feature (39)..(168): Pfam Name: Equine herpesvirus glycoprotein gp2 Pfam Description: Equine herpesvirus glycoprotein gp2
  misc_feature (25)..(168): Homolog of NCBI NO: 13592175 NR Description: ppg3 [Leishmania major]
  misc_feature (25)..(168): Homolog of NCBI NO: 13592175 NR Description: ppg3 [Leishmania major]
  misc_feature (27)..(168): Homolog of NCBI NO: 2145054 NR Description: merozoite surface protein-1 [Plasmodium berghei]
  misc_feature (25)..(168): Homolog of NCBI NO: 5420387 NR Description: proteophosphoglycan [Leishmania major]
  misc_feature (23)..(156): Homolog of NCBI NO: 23510008 NR Description: hypothetical protein [Plasmodium falciparum 3D7]
  misc_feature (25)..(168): Homolog of NCBI NO: 13592175 NR Description: ppg3 [Leishmania major]
  misc_feature (41)..(168): Homolog of NCBI NO: 11360494 NR Description: antifreeze glycopeptide AFGP polyprotein
  misc_feature (25)..(168): Homolog of NCBI NO: 13592175 NR Description: ppg3 [Leishmania major]
  misc_feature (40)..(168): Homolog of NCBI NO: 11360494 NR Description: antifreeze glycopeptide AFGP polyprotein
  misc_feature (25)..(168): Homolog of NCBI NO: 11359723 NR Description: proteophosphoglycan, membrane-associated
QHQPSFSNRFQTGTHRRLLLPFLRSLPHPSSDPWPPPRPSSSTRRTPSRRACTSSPPALETAAVATATNTTAAAGRPRAPGSAAWARRPPARRRRGSRARSPTRPAGSASSTSRSSASASTTSTPSSAPRRRRPATTATTSSSSGGSGAAACSAGSPLAPPAGAAAPA

SEQ ID NO: 66860 - protein, 137 aa, Triticum aestivum
  peptide (1)..(137): Ceres Seq. ID no. 15179880
  misc_feature (1)..(119): Homolog of NCBI NO: 37536602 NR Description: unknown protein [Oryza sativa (japonica
MAAASPEFFNPADAFSPRMHLLSAGAGDGGCGDGDEYYRCCRTPTGAGIGCLGQAATCPPAPRKPRAQPDAACRKRLFDVQVISLRFDDLDAIFRPSPPPPCHDRNNKQQQRRQRSRRVLGRLAAGSTGRRSRASLN

SEQ ID NO: 66861 - DNA, 1176 bp, Triticum aestivum
  misc_feature (1)..(1176): Ceres Seq. ID no. 15179881
agatgccgcattagccaccaacgcactcccccgtctccccctccaatcttcaccaatccaagcctccctccggcggcggcgacggcggagagatcggcgagatttccctcttcctcccactctgtctctgtctgagctcgaggagagggagagagattgagagggcctccgtgcggattggctcggttcctctggttcttgctcccagcccggcccgcgcgccatgacggtggtcgacgccgagacccggttccacgtcctggcggtggacgacagcgtcatcgaccggaagctcatcgagatgctgctcaggacctcctcctaccaagtcaccacggtggactccgggagcaaggcgctggaggtcctgggacttagagacgagggggacgactcctcctcctcctcctcacccccttcctcctccgcccctgaccaccaccaggaggtgggcgtgaatttgatcatcactgactactgcatgcctggcatgacaggatacgatctgctgaggagggtcaaggggtcatcttcattgaaggacattccagtggtgatcatgtcgtctgagaatgtgcctgccaggatcagcaggtgcttggaggacggcgcggaggagttyttcctcaagcccgtgaagctcgctgacatgaagaagctcaagtcgcacctggtccggcggaagcagccccagctccagccgcagacacatgagaagccacagccgcaaccacagcagcagcaacagaaaccacagccagagcagcagctgaaggcagagcaagcgccagccgagccggcggcggaggaggaggcagtgacggccggcggaatcacgggtgactgcggcggcggcagcaggaagcggaaggcggcgatgatggagcaggacggggcgagcacgagcctctccagcggcagcagcggcctggcggtggagacctgaatcctgaagaaactcaacagagacacccccaaccaagaaacctcatgtttctcttggctcctgcaatttttttggggtttacttgctcatatgggagaatcatcatcgtcgtcatggctaatagtagctcctggggtggggtaaaatatttacttagttctaagtgaagaactagaaaaaacatactacttttacactagctgaattttggtgtagtgccctgttcgctc

SEQ ID NO: 66862 - protein, 240 aa, Triticum aestivum
  peptide (1)..(240): Ceres Seq. ID no. 15179882
  misc_feature (10)..(155): Pfam Name: Response regulator receiver domain Pfam Description: Response regulator receiver domain
  misc_feature (1)..(163): Homolog of NCBI NO: 15221927 NR Description: response regulator 7 [Arabidopsis thaliana]
  misc_feature (5)..(153): Homolog of NCBI NO: 13173408 NR Description: response regulator protein [Dianthus caryophyllus]
  misc_feature (4)..(200): Homolog of NCBI NO: 15218957 NR Description: response regulator 3 [Arabidopsis thaliana]
  misc_feature (10)..(146): Homolog of NCBI NO: 33330868 NR Description: type-A response regulator [Catharanthus roseus]
  misc_feature (1)..(161): Homolog of NCBI NO: 12060388 NR Description: response regulator 6 [Zea mays]
  misc_feature (6)..(154): Homolog of NCBI NO: 15230202 NR Description: responce reactor 4 [Arabidopsis thaliana]
  misc_feature (3)..(182): Homolog of NCBI NO: 15227325 NR Description: two-component response regulator 3 protein
  misc_feature (1)..(191): Homolog of NCBI NO: 12060384 NR Description: response regulator 4 [Zea mays]
  misc_feature (1)..(240): Homolog of NCBI NO: 12060386 NR Description: response regulator 5 [Zea mays]
  misc_feature (1)..(240): Homolog of NCBI NO: 34906626 NR Description: putative response regulator
  misc_feature (133)..(133): Xaa is any aa, unknown or other
MTVVDAETRFHVLAVDDSVIDRKLIEMLLRTSSYQVTTVDSGSKALEVLGLRDEGDDSSSSSSPPSSSAPDHHQEVGVNLIITDYCMPGMTGYDLLRRVKGSSSLKDIPVVIMSSENVPARISRCLEDGAEEXFLKPVKLADMKKLKSHLVRRKQPQLQPQTHEKPQPQPQQQQQKPQPEQQLKAEQAPAEPAAEEEAVTAGGITGDCGGGSRKRKAAMMEQDGASTSLSSGSSGLAVET

SEQ ID NO: 66863 - protein, 214 aa, Triticum aestivum
  peptide (1)..(214): Ceres Seq. ID no. 15179883
  misc_feature (1)..(129): Pfam Name: Response regulator receiver domain Pfam Description: Response regulator receiver domain
  misc_feature (1)..(137): Homolog of NCBI NO: 15221927 NR Description: response regulator 7 [Arabidopsis thaliana]
  misc_feature (1)..(127): Homolog of NCBI NO: 13173408 NR Description: response regulator protein [Dianthus caryophyllus]
  misc_feature (1)..(174): Homolog of NCBI NO: 15218957 NR Description: response regulator 3 [Arabidopsis thaliana]
  misc_feature (1)..(120): Homolog of NCBI NO: 33330868 NR Description: type-A response regulator [Catharanthus roseus]
  misc_feature (1)..(135): Homolog of NCBI NO: 12060388 NR Description: response regulator 6 [Zea mays]
  misc_feature (1)..(128): Homolog of NCBI NO: 15230202 NR Description: responce reactor 4 [Arabidopsis thaliana]
  misc_feature (1)..(156): Homolog of NCBI NO: 15227325 NR Description: two-component response regulator 3 protein
  misc_feature (1)..(165): Homolog of NCBI NO: 12060384 NR Description: response regulator 4 [Zea mays]
  misc_feature (1)..(214): Homolog of NCBI NO: 12060386 NR Description: response regulator 5 [Zea mays]
  misc_feature (1)..(214): Homolog of NCBI NO: 34906626 NR Description: putative response regulator
  misc_feature (107)..(107): Xaa is any aa, unknown or other
MLLRTSSYQVTTVDSGSKALEVLGLRDEGDDSSSSSSPPSSSAPDHHQEVGVNLIITDYCMPGMTGYDLLRRVKGSSSLKDIPVVIMSSENVPARISRCLEDGAEEXFLKPVKLADMKKLKSHLVRRKQPQLQPQTHEKPQPQPQQQQQKPQPEQQLKAEQAPAEPAAEEEAVTAGGITGDCGGGSRKRKAAMMEQDGASTSLSSGSSGLAVET

SEQ ID NO: 66864 - protein, 154 aa, Triticum aestivum
  peptide (1)..(154): Ceres Seq. ID no. 15179884
  misc_feature (1)..(69): Pfam Name: Response regulator receiver domain Pfam Description: Response regulator receiver domain
  misc_feature (1)..(77): Homolog of NCBI NO: 15221927 NR Description: response regulator 7 [Arabidopsis thaliana]
  misc_feature (1)..(67): Homolog of NCBI NO: 13173408 NR Description: response regulator protein [Dianthus caryophyllus]
  misc_feature (1)..(114): Homolog of NCBI NO: 15218957 NR Description: response regulator 3 [Arabidopsis thaliana]
  misc_feature (1)..(60): Homolog of NCBI NO: 33330868 NR Description: type-A response regulator [Catharanthus roseus]
  misc_feature (1)..(75): Homolog of NCBI NO: 12060388 NR Description: response regulator 6 [Zea mays]
  misc_feature (1)..(68): Homolog of NCBI NO: 15230202 NR Description: responce reactor 4 [Arabidopsis thaliana]
  misc_feature (1)..(96): Homolog of NCBI NO: 15227325 NR Description: two-component response regulator 3 protein
  misc_feature (1)..(105): Homolog of NCBI NO: 12060384 NR Description: response regulator 4 [Zea mays]
  misc_feature (1)..(154): Homolog of NCBI NO: 12060386 NR Description: response regulator 5 [Zea mays]
  misc_feature (1)..(154): Homolog of NCBI NO: 34906626 NR Description: putative response regulator
  misc_feature (47)..(47): Xaa is any aa, unknown or other
MPGMTGYDLLRRVKGSSSLKDIPVVIMSSENVPARISRCLEDGAEEXFLKPVKLADMKKLKSHLVRRKQPQLQPQTHEKPQPQPQQQQQKPQPEQQLKAEQAPAEPAAEEEAVTAGGITGDCGGGSRKRKAAMMEQDGASTSLSSGSSGLAVET

SEQ ID NO: 66865 - DNA, 898 bp, Triticum aestivum
  misc_feature (1)..(898): Ceres Seq. ID no. 15179885
agtctgctgtctgctctgtgcgccgacccacgcttgtctttctccccaatctccaaactctctctagtccccaccacaacccgctccccatggcgacggccgccgccaccgccgccaagccggcggcgaggacgacggtgaacgtggccggggccgtgtaccgcgtgcagctggccctcctcgacggcgcagcggcctccaacgagcccctcctccacgcggccgccgctatcctctcccgcgccgactacgacgacgtcgtcaccgagcgctccatcgccgaggcgtgcggccacccagcgtgcaccagctccctccccgaccccgccaaccccaaggcggcgccgcggttccacatctccctccgcgagcaccgcgtctacgacctcgaggaggcccgcaagttctgctccgagcgctgcctcgtcgcctccgcggccttcgccgcctcgctcccgcccgaccgccccttcgggatcccgcccaacaggctggacgccctggtcgcgctcttcgagggcagcggggacggtccggggctagggtttcggtcggacggtgggaagaaggaggacgaggggaggaaggtggagattgtggagaaggagacgcctgggcctggggaggtgacgctgcaggagtggattgggccgtcgggcgccatcgagggctatgtgccccgccatcaccccattcatgaaggtgattgtttcatactgaactctgttatttactttgacaattttgtagtctggatattcattcttgcatttgattatgttgccattggttgactggaggacactaggattgttgagaatagctgaggcattttactgtctttgtgtgctgggaattttatgtggattgatctgaataactgagaaattttatcgtc

SEQ ID NO: 66866 - protein, 263 aa, Triticum aestivum
  peptide (1)..(263): Ceres Seq. ID no. 15179886
  misc_feature (46)..(226): Pfam Name: Domain of Unknown Function (DUF408) Pfam Description: Domain of Unknown Function (DUF408)
  misc_feature (46)..(226): Homolog of NCBI NO: 7485248 NR Description: hypothetical protein A_IG002P16.20 - Arabidopsis
SAVCSVRRPTLVFLPNLQTLSSPHHNPLPMATAAATAAKPAARTTVNVAGAVYRVQLALLDGAAASNEPLLHAAAAILSRADYDDVVTERSIAEACGHPACTSSLPDPANPKAAPRFHISLREHRVYDLEEARKFCSERCLVASAAFAASLPPDRPFGIPPNRLDALVALFEGSGDGPGLGFRSDGGKKEDEGRKVEIVEKETPGPGEVTLQEWIGPSGAIEGYVPRHHPIHEGDCFILNSVIYFDNFVVWIFILAFDYVAIG

SEQ ID NO: 66867 - protein, 234 aa, Triticum aestivum
  peptide (1)..(234): Ceres Seq. ID no. 15179887
  misc_feature (17)..(197): Pfam Name: Domain of Unknown Function (DUF408) Pfam Description: Domain of Unknown Function (DUF408)
  misc_feature (17)..(197): Homolog of NCBI NO: 7485248 NR Description: hypothetical protein A_IG002P16.20 - Arabidopsis
MATAAATAAKPAARTTVNVAGAVYRVQLALLDGAAASNEPLLHAAAAILSRADYDDVVTERSIAEACGHPACTSSLPDPANPKAAPRFHISLREHRVYDLEEARKFCSERCLVASAAFAASLPPDRPFGIPPNRLDALVALFEGSGDGPGLGFRSDGGKKEDEGRKVEIVEKETPGPGEVTLQEWIGPSGAIEGYVPRHHPIHEGDCFILNSVIYFDNFVVWIFILAFDYVAIG

SEQ ID NO: 66868 - DNA, 1171 bp, Triticum aestivum
  misc_feature (1)..(1171): Ceres Seq. ID no. 13659286
cccccctcccgtaaaaacaccagttcttccccaaatcttgcaaaacctaaccctcagccccgaccacacggccgccgccgccaccaaccactcgaccgcagcgccggcttcctcccggaacacagtcgccgccgaccgcctagtcgtcgccgagcacccttctctaccaaggaaaccttcgccgcttcgtccccatcccccgcgcacctagcgcctgcttcctcccgaggaatgccgcagaccgccctccatccccaccacaacagcgacctcctccacaggtttcctccgccgagcaggcctcctcctcctcaagctttctccscccgaacagggcctcctcctccacgagcatccttccccgagcactaagttgggccgcatcctggttccctcacccgagcagcggaccttcctgtacggcccctctcctgagaagctccacctcctctacatcctcccccaggtgcagcgccacctccttgctcaccgagagcacttggctgtgtgcatcttgtttgtcctctccaccaagcagcatcggctactccatacaagcacataagcttatgctcttatgattatatatttaccaatgactattatggttgatagttttaaagtctttgcttctatctatgcagttgagaatgacttataagttcatggcaaaagcagcaacatgagtacgcaaccacaagcaagctgaggggttatttctagacaaaactttaggaaccgagttcactacaactcgaagtcttgtgcatggaggagaattgagatatttgcgcattctgtactggtcaaaaggttggcatcatggttggaagatcttctatgctactctctacatgatgtttcttctacatgatagcgcttgaagtctacatgatgtttcttgtattcatagctcaaaccatttgtttagcttagtttgaacaaaaaatattattgtcttacatgtaaataatgtttactaatgtagctggatgctactgaacgcatgtacgaaagtcaaaatactaaagtgttagtcattacgtgtttgacaaaaaaaaaaaaaaaaaaaaaaaaaaaaaaaaaaaaaaaaaaaaaaaaaaaaaaaaaaaaaaagaaaaaaaaaaaaaaaaargyttatcratmccgycaacctcaagggggggcccgg

SEQ ID NO: 66869 - protein, 123 aa, Triticum aestivum
  peptide (1)..(123): Ceres Seq. ID no. 15219960
  misc_feature (15)..(123): Pfam Name: Extensin-like region Pfam Description: Extensin-like region
  misc_feature (1)..(123): Homolog of NCBI NO: 119714 NR Description: Extensin precursor (Cell wall hydroxyproline-rich
  misc_feature (2)..(123): Homolog of NCBI NO: 34872074 NR Description: similar to Ser/Arg-related nuclear matrix protein
  misc_feature (16)..(123): Homolog of NCBI NO: 81286 NR Description: extensin - Volvox carteri (fragment)
  misc_feature (1)..(123): Homolog of NCBI NO: 23274133 NR Description: Similar to serine/arginine repetitive matrix 1
  misc_feature (1)..(123): Homolog of NCBI NO: 81286 NR Description: extensin - Volvox carteri (fragment)
  misc_feature (2)..(123): Homolog of NCBI NO: 7949115 NR Description: Ser/Arg-related nuclear matrix protein
  misc_feature (1)..(123): Homolog of NCBI NO: 7949115 NR Description: Ser/Arg-related nuclear matrix protein
  misc_feature (109)..(109): Xaa is any aa, unknown or other
PPSRKNTSSSPNLAKPNPQPRPHGRRRHQPLDRSAGFLPEHSRRRPPSRRRAPFSTKETFAASSPSPAHLAPASSRGMPQTALHPHHNSDLLHRFPPPSRPPPPQAFSXRTGPPPPRASFPEH

SEQ ID NO: 66870 - protein, 69 aa, Triticum aestivum
  peptide (1)..(69): Ceres Seq. ID no. 15219961
PPPVKTPVLPQILQNLTLSPDHTAAAATNHSTAAPASSRNTVAADRLVVAEHPSLPRKPSPLRPHPPRT

SEQ ID NO: 66871 - DNA, 1147 bp, Triticum aestivum
  misc_feature (1)..(1147): Ceres Seq. ID no. 14303047
gtcctcccggcaccgcacaccgcaacctctaagctcaaaccacaacgcgcacccacacaaagccgagagcgcgctctcgctcgctcgccggcggcgacagaggacaggcatggccgtgtacatccgcctggacgacgccgtgcgcgcgcgcctccgcggggacgggggtggcaccagcagcggcagcgaccacgacgcctccgcctgcctctccgacctcgtccaggccttcctcgagacggacgccgccggcaacggggacgacgcggccgggccggccccgaaaggacgtgacgggtacgactccgacgacgcggacggcgccgcggaggcggccgcgtccgtgcgggagctgctcgacccgccggccgcggaggaccccttccggatcaggctggcggccgccgtgtccgcggcgctggacgcggaggcgccgctgcgggggcacggcgcggcgttccggcgcgcggtgatgcggcggctgcgtgccgctgggtacgacgccggcgtgtgcaggtcgcgctgggagacgtgcggcaacctgacggccgggacgtacgagtacatcgacgtggtcgtgccggccgcggggaaggcggcgaggtacattgtggacgcggacttccgggcggggctggaggtggcgcgcgcgacggcggagtacgcggtcgtcgtggccgcggtgccggccaaggcggtggtcgcgcgggaggaggccgtggggcgcgccgtgcgcgtggccgccgacgccgcgcgccggtcgctccgggcgcacggcctgcacgtgccgccgtggcgcaagagccggtacatgctcgccaagtggctggggccctacaagcggtcgccgtcctcctcatcatcggcgtccggcgcaatgccggcgcccggcggccccgggatggacatcatcaagtgccgcgccgtcgggttcttcccgtcccagacggccgcgccggcggcgaggatcaagtaaaagctcctcggcaccgctaattctccgcgcgcgtctctggaagatgtcatagtctgataagtagatgtagagagatgatcgatgagttggagcgtgcctcgaattcgtttttgtacaaacatttttggtctacctagactatgaaaggagcaaattgttggtcaaaaaaac

SEQ ID NO: 66872 - protein, 324 aa, Triticum aestivum
  peptide (1)..(324): Ceres Seq. ID no. 14303048
  misc_feature (70)..(281): Pfam Name: Protein of unknown function (DUF506) Pfam Description: Protein of unknown function (DUF506)
  misc_feature (60)..(287): Homolog of NCBI NO: 7486102 NR Description: hypothetical protein F24O1.16 - Arabidopsis
  misc_feature (45)..(297): Homolog of NCBI NO: 15221175 NR Description: hypothetical protein [Arabidopsis thaliana]
  misc_feature (9)..(290): Homolog of NCBI NO: 34897230 NR Description: unknown protein [Oryza sativa (japonica
  misc_feature (43)..(311): Homolog of NCBI NO: 15230824 NR Description: hypothetical protein [Arabidopsis thaliana]
  misc_feature (50)..(295): Homolog of NCBI NO: 37534384 NR Description: unknown protein [Oryza sativa (japonica
  misc_feature (50)..(295): Homolog of NCBI NO: 20042978 NR Description: Hypothetical protein [Oryza sativa]
  misc_feature (28)..(300): Homolog of NCBI NO: 34902608 NR Description: Unknown protein [Oryza sativa (japonica
  misc_feature (43)..(311): Homolog of NCBI NO: 21554332 NR Description: unknown [Arabidopsis thaliana]
  misc_feature (43)..(311): Homolog of NCBI NO: 18397919 NR Description: expressed protein [Arabidopsis thaliana]
  misc_feature (37)..(324): Homolog of NCBI NO: 34906942 NR Description: similar to Arabidopsis thaliana chromosome 3,
SSRHRTPQPLSSNHNAHPHKAESALSLARRRRQRTGMAVYIRLDDAVRARLRGDGGGTSSGSDHDASACLSDLVQAFLETDAAGNGDDAAGPAPKGRDGYDSDDADGAAEAAASVRELLDPPAAEDPFRIRLAAAVSAALDAEAPLRGHGAAFRRAVMRRLRAAGYDAGVCRSRWETCGNLTAGTYEYIDVVVPAAGKAARYIVDADFRAGLEVARATAEYAVVVAAVPAKAVVAREEAVGRAVRVAADAARRSLRAHGLHVPPWRKSRYMLAKWLGPYKRSPSSSSSASGAMPAPGGPGMDIIKCRAVGFFPSQTAAPAARIK

SEQ ID NO: 66873 - protein, 288 aa, Triticum aestivum
  peptide (1)..(288): Ceres Seq. ID no. 14303049
  misc_feature (34)..(245): Pfam Name: Protein of unknown function (DUF506) Pfam Description: Protein of unknown function (DUF506)
  misc_feature (24)..(251): Homolog of NCBI NO: 7486102 NR Description: hypothetical protein F24O1.16 - Arabidopsis
  misc_feature (9)..(261): Homolog of NCBI NO: 15221175 NR Description: hypothetical protein [Arabidopsis thaliana]
  misc_feature (1)..(254): Homolog of NCBI NO: 34897230 NR Description: unknown protein [Oryza sativa (japonica
  misc_feature (7)..(275): Homolog of NCBI NO: 15230824 NR Description: hypothetical protein [Arabidopsis thaliana]
  misc_feature (14)..(259): Homolog of NCBI NO: 37534384 NR Description: unknown protein [Oryza sativa (japonica
  misc_feature (14)..(259): Homolog of NCBI NO: 20042978 NR Description: Hypothetical protein [Oryza sativa]
  misc_feature (1)..(264): Homolog of NCBI NO: 34902608 NR Description: Unknown protein [Oryza sativa (japonica
  misc_feature (7)..(275): Homolog of NCBI NO: 21554332 NR Description: unknown [Arabidopsis thaliana]
  misc_feature (7)..(275): Homolog of NCBI NO: 18397919 NR Description: expressed protein [Arabidopsis thaliana]
  misc_feature (1)..(288): Homolog of NCBI NO: 34906942 NR Description: similar to Arabidopsis thaliana chromosome 3,
MAVYIRLDDAVRARLRGDGGGTSSGSDHDASACLSDLVQAFLETDAAGNGDDAAGPAPKGRDGYDSDDADGAAEAAASVRELLDPPAAEDPFRIRLAAAVSAALDAEAPLRGHGAAFRRAVMRRLRAAGYDAGVCRSRWETCGNLTAGTYEYIDVVVPAAGKAARYIVDADFRAGLEVARATAEYAVVVAAVPAKAVVAREEAVGRAVRVAADAARRSLRAHGLHVPPWRKSRYMLAKWLGPYKRSPSSSSSASGAMPAPGGPGMDIIKCRAVGFFPSQTAAPAARIK

SEQ ID NO: 66874 - protein, 167 aa, Triticum aestivum
  peptide (1)..(167): Ceres Seq. ID no. 14303050
  misc_feature (1)..(124): Pfam Name: Protein of unknown function (DUF506) Pfam Description: Protein of unknown function (DUF506)
  misc_feature (1)..(130): Homolog of NCBI NO: 7486102 NR Description: hypothetical protein F24O1.16 - Arabidopsis
  misc_feature (1)..(140): Homolog of NCBI NO: 15221175 NR Description: hypothetical protein [Arabidopsis thaliana]
  misc_feature (1)..(133): Homolog of NCBI NO: 34897230 NR Description: unknown protein [Oryza sativa (japonica
  misc_feature (1)..(154): Homolog of NCBI NO: 15230824 NR Description: hypothetical protein [Arabidopsis thaliana]
  misc_feature (1)..(138): Homolog of NCBI NO: 37534384 NR Description: unknown protein [Oryza sativa (japonica
  misc_feature (1)..(138): Homolog of NCBI NO: 20042978 NR Description: Hypothetical protein [Oryza sativa]
  misc_feature (1)..(143): Homolog of NCBI NO: 34902608 NR Description: Unknown protein [Oryza sativa (japonica
  misc_feature (1)..(154): Homolog of NCBI NO: 21554332 NR Description: unknown [Arabidopsis thaliana]
  misc_feature (1)..(154): Homolog of NCBI NO: 18397919 NR Description: expressed protein [Arabidopsis thaliana]
  misc_feature (1)..(167): Homolog of NCBI NO: 34906942 NR Description: similar to Arabidopsis thaliana chromosome 3,
MRRLRAAGYDAGVCRSRWETCGNLTAGTYEYIDVVVPAAGKAARYIVDADFRAGLEVARATAEYAVVVAAVPAKAVVAREEAVGRAVRVAADAARRSLRAHGLHVPPWRKSRYMLAKWLGPYKRSPSSSSSASGAMPAPGGPGMDIIKCRAVGFFPSQTAAPAARIK

SEQ ID NO: 66875 - DNA, 1367 bp, Triticum aestivum
  misc_feature (1)..(1367): Ceres Seq. ID no. 13659338
catccatccacccgcccccaagttatctcgtgccgtcttctcttctcttctcttctcttctcccctcccgcatccggtagcagcaagcactctgcgtctctccctttatccccgcccgcatggctgctctcctccgcacggcggccgcccttgcgccccgcccttcgcctgcccgcgagtccccgcgccggccgtgcgctgcgtccctcgcctgctcccgccggccgccggtgcggtcgctccgcgcccagttgcttacgacccggcgcgctccgggccacgtcgcgagccggctgcggcgattgggggctaccgaggccgacgagtctgcgcagacggccacgcaggaggatacagaaactgaagttactgggggcactgttgccgatgatggttctgcaggcacagaagagactccctctgttctcatcacagcattgcaatcatacaaagaagctttgatgaatgatgatgaagcaaaaattgcggagatagagtcctttctacttactattgaggatgagaaaaattctctaatgggcaaaatcactgctttagatgcagaattgacaactgagagagatcgtatcgtgcggattagttctgactttgataactacaggaagaggacagaaagagagaagctttctttgatgacaaatgtgcaaggagaagttgttgagagcttgttgcctgttcttgacaactttgaaagagcaaaaacacagataaaggtggaaacagagcgtgaagctaaaataaatgacagctaccagagcatttataagcaacttgttgaaattctgaaatcactgggtgttgaagatgtggaaactgttggcaaaccttttgatcctatgcttcatgaggctattatgcgagaagaatcggtggaatatgaagatggggttgtcctccaggaattccgcaagggtttcaagcttggtgagagattactacgtccggcgatggtcaaggtgtctgcaggaccaggccctgaaaagtcgggagatgacgatactacaataggtgaagatagtgtagggcctcaagcgttcgacgacggtgaagacgatggttttgatgatgccgatgccgagtaattgtgctcggtttctaatttggaaacaagaaattccagaagttttgatgttttttctggagggtgccacatgatagagttagatattctgctcctcaaatgtgctggttctctcttcctgctcttgacatggaagtgttgataattgtgtcaaaagtttctatatcctcatggtacggtcattatcatggttaggaattattgttgggtcaagcaacaacaatgttatatatatacgaggtaaattgtgtttgatttgttggag

SEQ ID NO: 66876 - protein, 327 aa, Triticum aestivum
  peptide (1)..(327): Ceres Seq. ID no. 13659339
  misc_feature (129)..(289): Pfam Name: GrpE Pfam Description: GrpE
  misc_feature (68)..(289): Homolog of NCBI NO: 17229937 NR Description: heat shock protein [Nostoc sp. PCC 7120]
  misc_feature (76)..(307): Homolog of NCBI NO: 33239468 NR Description: Molecular chaperone GrpE, heat shock protein
  misc_feature (57)..(306): Homolog of NCBI NO: 22298857 NR Description: heat shock protein [Thermosynechococcus elongatus
  misc_feature (89)..(301): Homolog of NCBI NO: 32488078 NR Description: OSJNBa0084A10.6 [Oryza sativa (japonica
  misc_feature (89)..(299): Homolog of NCBI NO: 15384277 NR Description: co-chaperone CGE1 precursor isoform a
  misc_feature (44)..(299): Homolog of NCBI NO: 15384279 NR Description: co-chaperone CGE1 precursor isoform b
  misc_feature (105)..(296): Homolog of NCBI NO: 21593629 NR Description: putative heat shock protein [Arabidopsis thaliana]
  misc_feature (105)..(296): Homolog of NCBI NO: 18400095 NR Description: heat shock protein -related [Arabidopsis
  misc_feature (1)..(304): Homolog of NCBI NO: 30686476 NR Description: chloroplast GrpE protein [Arabidopsis thaliana]
  misc_feature (1)..(304): Homolog of NCBI NO: 18418410 NR Description: chloroplast GrpE protein [Arabidopsis thaliana]
MAALLRTAAALAPRPSPARESPRRPCAASLACSRRPPVRSLRAQLLTTRRAPGHVASRLRRLGATEADESAQTATQEDTETEVTGGTVADDGSAGTEETPSVLITALQSYKEALMNDDEAKIAEIESFLLTIEDEKNSLMGKITALDAELTTERDRIVRISSDFDNYRKRTEREKLSLMTNVQGEVVESLLPVLDNFERAKTQIKVETEREAKINDSYQSIYKQLVEILKSLGVEDVETVGKPFDPMLHEAIMREESVEYEDGVVLQEFRKGFKLGERLLRPAMVKVSAGPGPEKSGDDDTTIGEDSVGPQAFDDGEDDGFDDADAE

SEQ ID NO: 66877 - protein, 213 aa, Triticum aestivum
  peptide (1)..(213): Ceres Seq. ID no. 13659340
  misc_feature (15)..(175): Pfam Name: GrpE Pfam Description: GrpE
  misc_feature (1)..(175): Homolog of NCBI NO: 17229937 NR Description: heat shock protein [Nostoc sp. PCC 7120]
  misc_feature (1)..(193): Homolog of NCBI NO: 33239468 NR Description: Molecular chaperone GrpE, heat shock protein
  misc_feature (1)..(192): Homolog of NCBI NO: 22298857 NR Description: heat shock protein [Thermosynechococcus elongatus
  misc_feature (1)..(187): Homolog of NCBI NO: 32488078 NR Description: OSJNBa0084A10.6 [Oryza sativa (japonica
  misc_feature (1)..(185): Homolog of NCBI NO: 15384277 NR Description: co-chaperone CGE1 precursor isoform a
  misc_feature (1)..(185): Homolog of NCBI NO: 15384279 NR Description: co-chaperone CGE1 precursor isoform b
  misc_feature (1)..(182): Homolog of NCBI NO: 21593629 NR Description: putative heat shock protein [Arabidopsis thaliana]
  misc_feature (1)..(182): Homolog of NCBI NO: 18400095 NR Description: heat shock protein -related [Arabidopsis
  misc_feature (1)..(190): Homolog of NCBI NO: 30686476 NR Description: chloroplast GrpE protein [Arabidopsis thaliana]
  misc_feature (1)..(190): Homolog of NCBI NO: 18418410 NR Description: chloroplast GrpE protein [Arabidopsis thaliana]
MNDDEAKIAEIESFLLTIEDEKNSLMGKITALDAELTTERDRIVRISSDFDNYRKRTEREKLSLMTNVQGEVVESLLPVLDNFERAKTQIKVETEREAKINDSYQSIYKQLVEILKSLGVEDVETVGKPFDPMLHEAIMREESVEYEDGVVLQEFRKGFKLGERLLRPAMVKVSAGPGPEKSGDDDTTIGEDSVGPQAFDDGEDDGFDDADAE

SEQ ID NO: 66878 - protein, 188 aa, Triticum aestivum
  peptide (1)..(188): Ceres Seq. ID no. 13659341
  misc_feature (1)..(150): Pfam Name: GrpE Pfam Description: GrpE
  misc_feature (1)..(150): Homolog of NCBI NO: 17229937 NR Description: heat shock protein [Nostoc sp. PCC 7120]
  misc_feature (1)..(168): Homolog of NCBI NO: 33239468 NR Description: Molecular chaperone GrpE, heat shock protein
  misc_feature (1)..(167): Homolog of NCBI NO: 22298857 NR Description: heat shock protein [Thermosynechococcus elongatus
  misc_feature (1)..(162): Homolog of NCBI NO: 32488078 NR Description: OSJNBa0084A10.6 [Oryza sativa (japonica
  misc_feature (1)..(160): Homolog of NCBI NO: 15384277 NR Description: co-chaperone CGE1 precursor isoform a
  misc_feature (1)..(160): Homolog of NCBI NO: 15384279 NR Description: co-chaperone CGE1 precursor isoform b
  misc_feature (1)..(157): Homolog of NCBI NO: 21593629 NR Description: putative heat shock protein [Arabidopsis thaliana]
  misc_feature (1)..(157): Homolog of NCBI NO: 18400095 NR Description: heat shock protein -related [Arabidopsis
  misc_feature (1)..(165): Homolog of NCBI NO: 30686476 NR Description: chloroplast GrpE protein [Arabidopsis thaliana]
  misc_feature (1)..(165): Homolog of NCBI NO: 18418410 NR Description: chloroplast GrpE protein [Arabidopsis thaliana]
MGKITALDAELTTERDRIVRISSDFDNYRKRTEREKLSLMTNVQGEVVESLLPVLDNFERAKTQIKVETEREAKINDSYQSIYKQLVEILKSLGVEDVETVGKPFDPMLHEAIMREESVEYEDGVVLQEFRKGFKLGERLLRPAMVKVSAGPGPEKSGDDDTTIGEDSVGPQAFDDGEDDGFDDADAE

SEQ ID NO: 66879 - DNA, 1242 bp, Triticum aestivum
  misc_feature (1)..(1242): Ceres Seq. ID no. 15179888
ccgcgttatctcgttgcctccacccctccgccccattcccgctgctgctgctcctctctcctcttagcccaaacacacctcacctcgctccccgtcccgccgatctcttctcttagggtcgtccgcgatggcggctccggtggtggacgccgagtacctgcgccaggtcgacagggggcgccgcgctctccgcgccctcatcgcctccaagggatgcgcccccatcatgctccgcctcgcatggcatgatgctggcacgtatgatgtgaacacaagaactggtggtgcaaatggttcaattagatacgaggaagagtacacccatggttcaaatgctggcttaaaaattgctattgatctcctcgagcctattaaagcgaagcatccaaagattacatatgcagacctttatcagcttgctggagtagttgcagttgaagtcaccgggggtccaaccgttgagttcatccctggaagacgtgattcgtcagtttgtccccgtgaagggcgccttcctgatgctaagaaaggcgcaccacatctaagggacatcttttatcgaatgggcttaacagacaaagatattgtagcactatctggggggcacagcctgggaaaggcacatcctgaaaggtctggttttgacggtgcatggactcgtgaccctctgaagtttgacaactcatactttcttgagctactgaagggggaatcggagggtcttctgaagctccctactgataaggcattgttggatgatcctgaatttagacgttatgtggagctttatgcaaaggacgaggatgctttcttcaaggactatactgaatcacacaagaaactttctgaacttggcttcacaccacggatcagtggcccagcttctacaaaatcagatgtttcaactgctgttgtacttgcacagagtgcagtgggggtagcagttgcggcagctgtagtcatcgcgggctacctgtacgaggcttccaagaggagcaagtaaggggtttcatgagttcttggatggcattgccttatttagtaagtatcaagttattcttaaaaaaataagtgccaagttcaaataatagaactctagtgatgaacaaccaacagcagtcttaaaatatttcaggcattcttgaggacatctccttcatgtatacatcatacttgaatatttcagtgacaatgaatgcttactattaaaagcatttttgggcatgtatcttgtgcaatacg

SEQ ID NO: 66880 - protein, 291 aa, Triticum aestivum
  peptide (1)..(291): Ceres Seq. ID no. 15179889
  misc_feature (18)..(224): Pfam Name: Peroxidase Pfam Description: Peroxidase
  misc_feature (1)..(244): Homolog of NCBI NO: 27552464 NR Description: putative ascorbate peroxidase [Physcomitrella
  misc_feature (1)..(291): Homolog of NCBI NO: 3288066 NR Description: ascorbate peroxidase [Arabidopsis thaliana]
  misc_feature (2)..(289): Homolog of NCBI NO: 37030052 NR Description: putative peroxisome-bound ascorbate peroxidase
  misc_feature (2)..(289): Homolog of NCBI NO: 38344123 NR Description: OSJNBb0072N21.2 [Oryza sativa (japonica
  misc_feature (1)..(291): Homolog of NCBI NO: 17066705 NR Description: ascorbate peroxidase [Capsicum annuum]
  misc_feature (1)..(291): Homolog of NCBI NO: 15236239 NR Description: ascorbate peroxidase, putative (APX) [Arabidopsis
  misc_feature (1)..(291): Homolog of NCBI NO: 15430584 NR Description: peroxisomal ascorbate peroxidase [Cucurbita cv.
  misc_feature (1)..(291): Homolog of NCBI NO: 5442410 NR Description: ascorbate peroxidase [Zantedeschia aethiopica]
  misc_feature (1)..(291): Homolog of NCBI NO: 7484726 NR Description: L-ascorbate peroxidase (EC 1.11.1.11),
  misc_feature (1)..(291): Homolog of NCBI NO: 15080682 NR Description: peroxisome type ascorbate peroxidase
MAAPVVDAEYLRQVDRGRRALRALIASKGCAPIMLRLAWHDAGTYDVNTRTGGANGSIRYEEEYTHGSNAGLKIAIDLLEPIKAKHPKITYADLYQLAGVVAVEVTGGPTVEFIPGRRDSSVCPREGRLPDAKKGAPHLRDIFYRMGLTDKDIVALSGGHSLGKAHPERSGFDGAWTRDPLKFDNSYFLELLKGESEGLLKLPTDKALLDDPEFRRYVELYAKDEDAFFKDYTESHKKLSELGFTPRISGPASTKSDVSTAVVLAQSAVGVAVAAAVVIAGYLYEASKRSK

SEQ ID NO: 66881 - protein, 258 aa, Triticum aestivum
  peptide (1)..(258): Ceres Seq. ID no. 15179890
  misc_feature (1)..(191): Pfam Name: Peroxidase Pfam Description: Peroxidase
  misc_feature (1)..(211): Homolog of NCBI NO: 27552464 NR Description: putative ascorbate peroxidase [Physcomitrella
  misc_feature (1)..(258): Homolog of NCBI NO: 3288066 NR Description: ascorbate peroxidase [Arabidopsis thaliana]
  misc_feature (1)..(256): Homolog of NCBI NO: 37030052 NR Description: putative peroxisome-bound ascorbate peroxidase
  misc_feature (1)..(256): Homolog of NCBI NO: 38344123 NR Description: OSJNBb0072N21.2 [Oryza sativa (japonica
  misc_feature (1)..(258): Homolog of NCBI NO: 17066705 NR Description: ascorbate peroxidase [Capsicum annuum]
  misc_feature (1)..(258): Homolog of NCBI NO: 15236239 NR Description: ascorbate peroxidase, putative (APX) [Arabidopsis
  misc_feature (1)..(258): Homolog of NCBI NO: 15430584 NR Description: peroxisomal ascorbate peroxidase [Cucurbita cv.
  misc_feature (1)..(258): Homolog of NCBI NO: 5442410 NR Description: ascorbate peroxidase [Zantedeschia aethiopica]
  misc_feature (1)..(258): Homolog of NCBI NO: 7484726 NR Description: L-ascorbate peroxidase (EC 1.11.1.11),
  misc_feature (1)..(258): Homolog of NCBI NO: 15080682 NR Description: peroxisome type ascorbate peroxidase
MLRLAWHDAGTYDVNTRTGGANGSIRYEEEYTHGSNAGLKIAIDLLEPIKAKHPKITYADLYQLAGVVAVEVTGGPTVEFIPGRRDSSVCPREGRLPDAKKGAPHLRDIFYRMGLTDKDIVALSGGHSLGKAHPERSGFDGAWTRDPLKFDNSYFLELLKGESEGLLKLPTDKALLDDPEFRRYVELYAKDEDAFFKDYTESHKKLSELGFTPRISGPASTKSDVSTAVVLAQSAVGVAVAAAVVIAGYLYEASKRSK

SEQ ID NO: 66882 - protein, 146 aa, Triticum aestivum
  peptide (1)..(146): Ceres Seq. ID no. 15179891
  misc_feature (1)..(79): Pfam Name: Peroxidase Pfam Description: Peroxidase
  misc_feature (1)..(99): Homolog of NCBI NO: 27552464 NR Description: putative ascorbate peroxidase [Physcomitrella
  misc_feature (1)..(146): Homolog of NCBI NO: 3288066 NR Description: ascorbate peroxidase [Arabidopsis thaliana]
  misc_feature (1)..(144): Homolog of NCBI NO: 37030052 NR Description: putative peroxisome-bound ascorbate peroxidase
  misc_feature (1)..(144): Homolog of NCBI NO: 38344123 NR Description: OSJNBb0072N21.2 [Oryza sativa (japonica
  misc_feature (1)..(146): Homolog of NCBI NO: 17066705 NR Description: ascorbate peroxidase [Capsicum annuum]
  misc_feature (1)..(146): Homolog of NCBI NO: 15236239 NR Description: ascorbate peroxidase, putative (APX) [Arabidopsis
  misc_feature (1)..(146): Homolog of NCBI NO: 15430584 NR Description: peroxisomal ascorbate peroxidase [Cucurbita cv.
  misc_feature (1)..(146): Homolog of NCBI NO: 5442410 NR Description: ascorbate peroxidase [Zantedeschia aethiopica]
  misc_feature (1)..(146): Homolog of NCBI NO: 7484726 NR Description: L-ascorbate peroxidase (EC 1.11.1.11),
  misc_feature (1)..(146): Homolog of NCBI NO: 15080682 NR Description: peroxisome type ascorbate peroxidase
MGLTDKDIVALSGGHSLGKAHPERSGFDGAWTRDPLKFDNSYFLELLKGESEGLLKLPTDKALLDDPEFRRYVELYAKDEDAFFKDYTESHKKLSELGFTPRISGPASTKSDVSTAVVLAQSAVGVAVAAAVVIAGYLYEASKRSK

SEQ ID NO: 66883 - DNA, 1740 bp, Triticum aestivum
  misc_feature (1)..(1740): Ceres Seq. ID no. 14303197
ccatatctccgactcctctgccctgccgcgcgggcccaactcggcgccaaaaaatccatctcgcatctcacgctcttctagctctctccccccgccatggaagaccggcaagccaccggcggcgccggcgccgcgaccaaggtccgcgtgaacggcacgacggccgaagcgacactctccaccacaggcggctgccccgagctccggtggcgctgcgctagggccacggcggagaggagcctctcgctggaggccgacgtgctcggagccgaggcgagcggcaaggaggtcgtcgtcagggccttcgtggcggaggatgccgcgagaccgccgtcgcgcgccaaggcgagagggaagaggcgcaggagggagtacgtcttcgagatggccgacggcgagggcgcggccgcggcctggggcgagacgctacggggctgcttggactcgatagggcggcccaagagattgttcgtcctcatcaacccctacggaggcaaaagacgggcgagcaagatctacgaggcagaaatcaaacccctgttcgaagccgccggcgtcgaagtcacaatgcaagagacccggtaccgggggcatgcccgggaggtggcgtcctctctcgaccttgcaagatacgacgggatcgtctgcgtcagcggcgatggcgtcctcgtggagcttgtgaatgggattctgcaaagatcagactgggaggaagcaataaagatgccaattggcatagttccagctggcacaggaaacggcatggccaaatcacttctccatgctgccagcgagacgtgctcagtttcagacgccgtatttgccattatcacaggtcacaagcaggccttggatgtctgcaccatagtgcaaggggaaaaaaccgttttcagcgtgctgtcaactacttggggtttggtggccgatgttgacatcgagtctgagaaatacaggtggatggggagcgcacggttcgacttttatgctctggttcgcataatgaacttgcgccgataccgcggaagcgtccactttgtgcctgccccgggctacgaggcatacggagatcctgtcaagcaagccgagactcccatcgtggagcgaaacggggaatctcaggtgtgctcttatcaaggccctacggccgagtttcaatgttcagactggagatccatcgatggcccatttgtgggtgtgtgcgtctacaacgtgccatgggctgctgaaaacgccatggcagctcctgaagccaagttctcagatggctacatggacgcggtcatactgaaagactgtccgaaggccgatcttttggctctgctgctgaagatgagcgatgggagctacgtgaaatcgccacatgttacatatttcaaggtgaaatccttccggttatcgccggggcagctcatggaggatcccaaaaggggcggcatcgtagacgtggacggcgaggtggttgccagaggagaaggaacgtacggcatgaaccaggatcaagatttgatggcctatggcccttctgttcagctgaccgtgcaccagggcttggccactgtatactgtcccaaatgatcctaccttgccttctcctctcaccagagattgtccctttgtgtcaattgctttattcttgttcatatttaaaaaagtactctattgtattcaaaacaagattctttcaagaaaaggtcacacgtctctgagcaaaaaaaaaaaaaaaaaaaaaaaaaaaaaaat

SEQ ID NO: 66884 - protein, 492 aa, Triticum aestivum
  peptide (1)..(492): Ceres Seq. ID no. 14303198
  misc_feature (123)..(259): Pfam Name: Diacylglycerol kinase catalytic domain (presumed) Pfam Description: Diacylglycerol kinase catalytic domain
  misc_feature (88)..(316): Homolog of NCBI NO: 28828335 NR Description: similar to Homo sapiens (Human). Hypothetical
  misc_feature (1)..(386): Homolog of NCBI NO: 15234501 NR Description: expressed protein [Arabidopsis thaliana]
  misc_feature (1)..(296): Homolog of NCBI NO: 34910090 NR Description: B1100D10.20 [Oryza sativa (japonica
  misc_feature (295)..(408): Homolog of NCBI NO: 34910090 NR Description: B1100D10.20 [Oryza sativa (japonica
  misc_feature (1)..(194): Homolog of NCBI NO: 34910090 NR Description: B1100D10.20 [Oryza sativa (japonica
  misc_feature (427)..(492): Homolog of NCBI NO: 15234501 NR Description: expressed protein [Arabidopsis thaliana]
  misc_feature (16)..(460): Homolog of NCBI NO: 15234501 NR Description: expressed protein [Arabidopsis thaliana]
  misc_feature (1)..(492): Homolog of NCBI NO: 22136030 NR Description: putative protein [Arabidopsis thaliana]
  misc_feature (1)..(217): Homolog of NCBI NO: 34898712 NR Description: putative sphingosine kinase
  misc_feature (213)..(492): Homolog of NCBI NO: 34898712 NR Description: putative sphingosine kinase
MEDRQATGGAGAATKVRVNGTTAEATLSTTGGCPELRWRCARATAERSLSLEADVLGAEASGKEVVVRAFVAEDAARPPSRAKARGKRRRREYVFEMADGEGAAAAWGETLRGCLDSIGRPKRLFVLINPYGGKRRASKIYEAEIKPLFEAAGVEVTMQETRYRGHAREVASSLDLARYDGIVCVSGDGVLVELVNGILQRSDWEEAIKMPIGIVPAGTGNGMAKSLLHAASETCSVSDAVFAIITGHKQALDVCTIVQGEKTVFSVLSTTWGLVADVDIESEKYRWMGSARFDFYALVRIMNLRRYRGSVHFVPAPGYEAYGDPVKQAETPIVERNGESQVCSYQGPTAEFQCSDWRSIDGPFVGVCVYNVPWAAENAMAAPEAKFSDGYMDAVILKDCPKADLLALLLKMSDGSYVKSPHVTYFKVKSFRLSPGQLMEDPKRGGIVDVDGEVVARGEGTYGMNQDQDLMAYGPSVQLTVHQGLATVYCPK

SEQ ID NO: 66885 - protein, 396 aa, Triticum aestivum
  peptide (1)..(396): Ceres Seq. ID no. 14303199
  misc_feature (27)..(163): Pfam Name: Diacylglycerol kinase catalytic domain (presumed) Pfam Description: Diacylglycerol kinase catalytic domain
  misc_feature (1)..(220): Homolog of NCBI NO: 28828335 NR Description: similar to Homo sapiens (Human). Hypothetical
  misc_feature (1)..(290): Homolog of NCBI NO: 15234501 NR Description: expressed protein [Arabidopsis thaliana]
  misc_feature (1)..(200): Homolog of NCBI NO: 34910090 NR Description: B1100D10.20 [Oryza sativa (japonica
  misc_feature (199)..(312): Homolog of NCBI NO: 34910090 NR Description: B1100D10.20 [Oryza sativa (japonica
  misc_feature (1)..(98): Homolog of NCBI NO: 34910090 NR Description: B1100D10.20 [Oryza sativa (japonica
  misc_feature (331)..(396): Homolog of NCBI NO: 15234501 NR Description: expressed protein [Arabidopsis thaliana]
  misc_feature (1)..(364): Homolog of NCBI NO: 15234501 NR Description: expressed protein [Arabidopsis thaliana]
  misc_feature (1)..(396): Homolog of NCBI NO: 22136030 NR Description: putative protein [Arabidopsis thaliana]
  misc_feature (1)..(121): Homolog of NCBI NO: 34898712 NR Description: putative sphingosine kinase
  misc_feature (117)..(396): Homolog of NCBI NO: 34898712 NR Description: putative sphingosine kinase
MADGEGAAAAWGETLRGCLDSIGRPKRLFVLINPYGGKRRASKIYEAEIKPLFEAAGVEVTMQETRYRGHAREVASSLDLARYDGIVCVSGDGVLVELVNGILQRSDWEEAIKMPIGIVPAGTGNGMAKSLLHAASETCSVSDAVFAIITGHKQALDVCTIVQGEKTVFSVLSTTWGLVADVDIESEKYRWMGSARFDFYALVRIMNLRRYRGSVHFVPAPGYEAYGDPVKQAETPIVERNGESQVCSYQGPTAEFQCSDWRSIDGPFVGVCVYNVPWAAENAMAAPEAKFSDGYMDAVILKDCPKADLLALLLKMSDGSYVKSPHVTYFKVKSFRLSPGQLMEDPKRGGIVDVDGEVVARGEGTYGMNQDQDLMAYGPSVQLTVHQGLATVYCPK

SEQ ID NO: 66886 - protein, 335 aa, Triticum aestivum
  peptide (1)..(335): Ceres Seq. ID no. 14303200
  misc_feature (1)..(102): Pfam Name: Diacylglycerol kinase catalytic domain (presumed) Pfam Description: Diacylglycerol kinase catalytic domain
  misc_feature (1)..(159): Homolog of NCBI NO: 28828335 NR Description: similar to Homo sapiens (Human). Hypothetical
  misc_feature (1)..(229): Homolog of NCBI NO: 15234501 NR Description: expressed protein [Arabidopsis thaliana]
  misc_feature (1)..(139): Homolog of NCBI NO: 34910090 NR Description: B1100D10.20 [Oryza sativa (japonica
  misc_feature (138)..(251): Homolog of NCBI NO: 34910090 NR Description: B1100D10.20 [Oryza sativa (japonica
  misc_feature (1)..(37): Homolog of NCBI NO: 34910090 NR Description: B1100D10.20 [Oryza sativa (japonica
  misc_feature (270)..(335): Homolog of NCBI NO: 15234501 NR Description: expressed protein [Arabidopsis thaliana]
  misc_feature (1)..(303): Homolog of NCBI NO: 15234501 NR Description: expressed protein [Arabidopsis thaliana]
  misc_feature (1)..(335): Homolog of NCBI NO: 22136030 NR Description: putative protein [Arabidopsis thaliana]
  misc_feature (1)..(60): Homolog of NCBI NO: 34898712 NR Description: putative sphingosine kinase
  misc_feature (56)..(335): Homolog of NCBI NO: 34898712 NR Description: putative sphingosine kinase
MQETRYRGHAREVASSLDLARYDGIVCVSGDGVLVELVNGILQRSDWEEAIKMPIGIVPAGTGNGMAKSLLHAASETCSVSDAVFAIITGHKQALDVCTIVQGEKTVFSVLSTTWGLVADVDIESEKYRWMGSARFDFYALVRIMNLRRYRGSVHFVPAPGYEAYGDPVKQAETPIVERNGESQVCSYQGPTAEFQCSDWRSIDGPFVGVCVYNVPWAAENAMAAPEAKFSDGYMDAVILKDCPKADLLALLLKMSDGSYVKSPHVTYFKVKSFRLSPGQLMEDPKRGGIVDVDGEVVARGEGTYGMNQDQDLMAYGPSVQLTVHQGLATVYCPK

SEQ ID NO: 66887 - DNA, 1227 bp, Triticum aestivum
  misc_feature (1)..(1227): Ceres Seq. ID no. 13502809
cgaaaaaaaaaagaccgatcgtgaaccaccccgtgccctacaacctccgcccccgtccccgtccccgtccccgcgtgccttacacaactcctcctccgcctctgccgcgccgcgcgtcgcctccgtcgccgtccctggggttcgaggatgcaacagcctacaggcgagatggagatgaagaaggcgcctctgccagcgcctgctttccacaaagagtacactcttcctagagcacgacactaccttgatcaacactattcactccgccctcctctctccaaggatgattactccaaaaaggatcctacaagcgagatggagaagaagaagaaggcgccgctgccaacacctcatttccacaaagagcggcctcttcctagagcagagcggtcccccgatcgacgctactcgccttaccctcctccgtccatggatggttgctctggaaagaatgctggatcttggcctcttcccccgatttactatgggcctccatctgaagcctttcatgtcgactggcgcaataaagacggggttgtggacatggagcattacagcacagagctgtttgcagcgatggacaaacatagtattttgtcggtgcaccgttgtacacgcccacagtttggaccaaacgtcagcgctgagtatgtgcttgatcctatatttgaggatacgttccttgccaatccccgttttagctacctgcttcccttgatcggccacaaagtatcttctgcagctgaggctcccaattcaaccacgcaggttggcacaactactggatactggcagtgtgatggttctatagaagtccctgtccgcgaagttgctgctttgaagatttctgacaactagccacctatgtgcccaaccaagttgctcccagaagatgaaaatcaagattttcatggagggccctgagtttcatattgagattacgaacccgttagcagtaactatgtattagctacatctaccctatgtgtgggccgcatcttcaagatcaatgcgtgcaggatatattaattttaacttggtgtctgcgctgcgccgcatctatctatctatctatctatctatatagtgcaagatatttataagcttggttcaggttgtgtctgagaaagagtggcaatctgtcacagatgatgccattcgtcttatatatgcatatgaactggaaaagtttatctgcggtggtgactatttcmcaatatgcttytc

SEQ ID NO: 66888 - protein, 236 aa, Triticum aestivum
  peptide (1)..(236): Ceres Seq. ID no. 15223197
  misc_feature (4)..(116): Homolog of NCBI NO: 100209 NR Description: extensin (clone Tom J-10) - tomato
MQQPTGEMEMKKAPLPAPAFHKEYTLPRARHYLDQHYSLRPPLSKDDYSKKDPTSEMEKKKKAPLPTPHFHKERPLPRAERSPDRRYSPYPPPSMDGCSGKNAGSWPLPPIYYGPPSEAFHVDWRNKDGVVDMEHYSTELFAAMDKHSILSVHRCTRPQFGPNVSAEYVLDPIFEDTFLANPRFSYLLPLIGHKVSSAAEAPNSTTQVGTTTGYWQCDGSIEVPVREVAALKISDN

SEQ ID NO: 66889 - protein, 229 aa, Triticum aestivum
  peptide (1)..(229): Ceres Seq. ID no. 15223198
  misc_feature (1)..(109): Homolog of NCBI NO: 100209 NR Description: extensin (clone Tom J-10) - tomato
MEMKKAPLPAPAFHKEYTLPRARHYLDQHYSLRPPLSKDDYSKKDPTSEMEKKKKAPLPTPHFHKERPLPRAERSPDRRYSPYPPPSMDGCSGKNAGSWPLPPIYYGPPSEAFHVDWRNKDGVVDMEHYSTELFAAMDKHSILSVHRCTRPQFGPNVSAEYVLDPIFEDTFLANPRFSYLLPLIGHKVSSAAEAPNSTTQVGTTTGYWQCDGSIEVPVREVAALKISDN

SEQ ID NO: 66890 - protein, 227 aa, Triticum aestivum
  peptide (1)..(227): Ceres Seq. ID no. 15223199
  misc_feature (1)..(107): Homolog of NCBI NO: 100209 NR Description: extensin (clone Tom J-10) - tomato
MKKAPLPAPAFHKEYTLPRARHYLDQHYSLRPPLSKDDYSKKDPTSEMEKKKKAPLPTPHFHKERPLPRAERSPDRRYSPYPPPSMDGCSGKNAGSWPLPPIYYGPPSEAFHVDWRNKDGVVDMEHYSTELFAAMDKHSILSVHRCTRPQFGPNVSAEYVLDPIFEDTFLANPRFSYLLPLIGHKVSSAAEAPNSTTQVGTTTGYWQCDGSIEVPVREVAALKISDN

SEQ ID NO: 66891 - DNA, 1157 bp, Triticum aestivum
  misc_feature (1)..(1157): Ceres Seq. ID no. 14302407
gaataacccgcacctatccacgacaccgagggagaggagcaactgatccccgacgccccaaatggcgcctcccctcctcctcctcctcctcgtccctctcgtcgccgccaccgcaccgtgcgcccacccggcccacccgagccagccggcgtcgtgcgccgcggagcccgtgctggcgccggagcgccgggaggcgcacggcgggggccgcatcctggacatcacccactactaccgggaggacatgccctcgtgggagtccggcgccggggtgggccagttcctctggctgcccgcctccatgcgcaacggctccctcgccaacaactccgagatgcggatgcccacccacaccggcacccacatcgacgcctccggccacgtcttccagcactacttcgacgctggcttcgacgtcgacaccctcgacctcgacgtcctcaacggtcctgcactgctggttgatgttccaagggatgaaaatattactgctaaaacgatggaatctttgcatattcctaaaggagttcaacgggtactttttagaacattaaacactgacaggaacctaatgtggaagaaagagtttgacacaagctatgtgggttttatgaaagatggtgcccaatggttggtagacaacacggatattaagcttgtcggaatagactatttgtccgttgcagctttcgatgacttgatcccttcacatttagttttacttgaaaaccgggatatcattcttgtggagggcctcaaactggagaatgtcatacctgggatatactcgttgcattgcctgccacttcggttgcgtggagctgaaggttcgccgatcagatgcatccttataaagtgaaagacatttgcatcccgctgcggcggtttagtttgataccgcaagcacttatatataaaaatagaatgtgtatagcagcaaaactcgtgtctttgataccagaggagtactgtcatgtgtccagaaacatggtggcacttcgatgcttagtaaggagcgacaaacggctagggatgcaaatgtgtagcctctagggtaccctccgaacctttagttgggctatagaagggatggattacaatacaaaccgcaatgttcggtggtaccaaaatcccaaaaaaaaaaaaaaaaaaaaaag

SEQ ID NO: 66892 - protein, 265 aa, Triticum aestivum
  peptide (1)..(265): Ceres Seq. ID no. 14302408
  misc_feature (51)..(251): Pfam Name: Putative cyclase Pfam Description: Putative cyclase
  misc_feature (51)..(263): Homolog of NCBI NO: 23056289 NR Description: hypothetical protein [Geobacter metallireducens]
  misc_feature (50)..(265): Homolog of NCBI NO: 39998438 NR Description: cyclase, putative [Geobacter sulfurreducens PCA]
  misc_feature (50)..(265): Homolog of NCBI NO: 23016903 NR Description: hypothetical protein [Magnetospirillum
  misc_feature (51)..(263): Homolog of NCBI NO: 16330650 NR Description: hypothetical protein [Synechocystis sp. PCC 6803]
  misc_feature (3)..(143): Homolog of NCBI NO: 7486023 NR Description: hypothetical protein F23E12.220 - Arabidopsis
  misc_feature (40)..(224): Homolog of NCBI NO: 7486287 NR Description: hypothetical protein F28A23.60 - Arabidopsis
  misc_feature (40)..(265): Homolog of NCBI NO: 15219416 NR Description: hypothetical protein [Arabidopsis thaliana]
  misc_feature (40)..(265): Homolog of NCBI NO: 18418393 NR Description: expressed protein [Arabidopsis thaliana]
  misc_feature (3)..(264): Homolog of NCBI NO: 18418598 NR Description: expressed protein [Arabidopsis thaliana]
  misc_feature (5)..(265): Homolog of NCBI NO: 35215089 NR Description: hypothetical protein [Oryza sativa (japonica
MAPPLLLLLLVPLVAATAPCAHPAHPSQPASCAAEPVLAPERREAHGGGRILDITHYYREDMPSWESGAGVGQFLWLPASMRNGSLANNSEMRMPTHTGTHIDASGHVFQHYFDAGFDVDTLDLDVLNGPALLVDVPRDENITAKTMESLHIPKGVQRVLFRTLNTDRNLMWKKEFDTSYVGFMKDGAQWLVDNTDIKLVGIDYLSVAAFDDLIPSHLVLLENRDIILVEGLKLENVIPGIYSLHCLPLRLRGAEGSPIRCILIK

SEQ ID NO: 66893 - protein, 204 aa, Triticum aestivum
  peptide (1)..(204): Ceres Seq. ID no. 14302409
  misc_feature (1)..(190): Pfam Name: Putative cyclase Pfam Description: Putative cyclase
  misc_feature (1)..(202): Homolog of NCBI NO: 23056289 NR Description: hypothetical protein [Geobacter metallireducens]
  misc_feature (1)..(204): Homolog of NCBI NO: 39998438 NR Description: cyclase, putative [Geobacter sulfurreducens PCA]
  misc_feature (1)..(204): Homolog of NCBI NO: 23016903 NR Description: hypothetical protein [Magnetospirillum
  misc_feature (1)..(202): Homolog of NCBI NO: 16330650 NR Description: hypothetical protein [Synechocystis sp. PCC 6803]
  misc_feature (1)..(82): Homolog of NCBI NO: 7486023 NR Description: hypothetical protein F23E12.220 - Arabidopsis
  misc_feature (1)..(163): Homolog of NCBI NO: 7486287 NR Description: hypothetical protein F28A23.60 - Arabidopsis
  misc_feature (1)..(204): Homolog of NCBI NO: 15219416 NR Description: hypothetical protein [Arabidopsis thaliana]
  misc_feature (1)..(204): Homolog of NCBI NO: 18418393 NR Description: expressed protein [Arabidopsis thaliana]
  misc_feature (1)..(203): Homolog of NCBI NO: 18418598 NR Description: expressed protein [Arabidopsis thaliana]
  misc_feature (1)..(204): Homolog of NCBI NO: 35215089 NR Description: hypothetical protein [Oryza sativa (japonica
MPSWESGAGVGQFLWLPASMRNGSLANNSEMRMPTHTGTHIDASGHVFQHYFDAGFDVDTLDLDVLNGPALLVDVPRDENITAKTMESLHIPKGVQRVLFRTLNTDRNLMWKKEFDTSYVGFMKDGAQWLVDNTDIKLVGIDYLSVAAFDDLIPSHLVLLENRDIILVEGLKLENVIPGIYSLHCLPLRLRGAEGSPIRCILIK

SEQ ID NO: 66894 - protein, 185 aa, Triticum aestivum
  peptide (1)..(185): Ceres Seq. ID no. 14302410
  misc_feature (1)..(171): Pfam Name: Putative cyclase Pfam Description: Putative cyclase
  misc_feature (1)..(183): Homolog of NCBI NO: 23056289 NR Description: hypothetical protein [Geobacter metallireducens]
  misc_feature (1)..(185): Homolog of NCBI NO: 39998438 NR Description: cyclase, putative [Geobacter sulfurreducens PCA]
  misc_feature (1)..(185): Homolog of NCBI NO: 23016903 NR Description: hypothetical protein [Magnetospirillum
  misc_feature (1)..(183): Homolog of NCBI NO: 16330650 NR Description: hypothetical protein [Synechocystis sp. PCC 6803]
  misc_feature (1)..(63): Homolog of NCBI NO: 7486023 NR Description: hypothetical protein F23E12.220 - Arabidopsis
  misc_feature (1)..(144): Homolog of NCBI NO: 7486287 NR Description: hypothetical protein F28A23.60 - Arabidopsis
  misc_feature (1)..(185): Homolog of NCBI NO: 15219416 NR Description: hypothetical protein [Arabidopsis thaliana]
  misc_feature (1)..(185): Homolog of NCBI NO: 18418393 NR Description: expressed protein [Arabidopsis thaliana]
  misc_feature (1)..(184): Homolog of NCBI NO: 18418598 NR Description: expressed protein [Arabidopsis thaliana]
  misc_feature (1)..(185): Homolog of NCBI NO: 35215089 NR Description: hypothetical protein [Oryza sativa (japonica
MRNGSLANNSEMRMPTHTGTHIDASGHVFQHYFDAGFDVDTLDLDVLNGPALLVDVPRDENITAKTMESLHIPKGVQRVLFRTLNTDRNLMWKKEFDTSYVGFMKDGAQWLVDNTDIKLVGIDYLSVAAFDDLIPSHLVLLENRDIILVEGLKLENVIPGIYSLHCLPLRLRGAEGSPIRCILIK

SEQ ID NO: 66895 - DNA, 1104 bp, Triticum aestivum
  misc_feature (1)..(1104): Ceres Seq. ID no. 13660394
cattacctagaacatcctaatcgaaaaatgaatgaatgtcactgaggcataaaccccctgttcctcttgttcctccccttcggcctccggcgcagttggttgccacgacgaggggcggacccacccatcggacgaggtccgtcgccggacattccagccggtggtgagcggagggcggcaaggcgtgggagctcgcggcgacgtacaaggctgggtgagagtggcgcttgaggcggacggccaactccgacagcggacccctcagccgacgacgccaccgaagttggtcagcattagctccttcaggcttctggccggtgtgaaaagttgctaggtcaccatggatgtcgatcgacaagaaacgatggaagagaccattctcgtcggtgatgatcttatgcgtgggccaccttcccctgtcgtaccgaaagagattgcatcccatgtccttgaaggtgttgagctttgtgatggtatcctgaagaatcttttcctatgcttgcaaatcaatgatattgagccattttgtcaagacgaaattgtgctatacaaacaatgtgctgagaaaagggataaggaaataagggaacgacttcaggatagtgagtataaattaggtttctcgatgcccctcgaagatgcaaaggaaagagtcactcaactccaatcagaactcacactgctcgaaaggcgcatgattcttgctagtggtcttccgggtatggaaggatttcgccaacgatggagcttgcatggacagcttggcgatacaaggaaaaggttggaggcgctgaacagtgggatggcaaaaagagagagcccaagtcctccaggcgaaggcacaacacctgcagttaagaagaggtggttcttttagtacgttagcgcatatttttccgacttgcaaaacgttgtaactaatgctgtgttagtggcaatgtcatccactctttcttggtttggggttctacctccaaagtaactactactgtgtttgctaacagtggtttcgccacagctgcacttttgattaaaaatatggaaatacttggcctgtaaaccttgaacataccatttgaattacccacgaaaatggtgatatgc

SEQ ID NO: 66896 - protein, 178 aa, Triticum aestivum
  peptide (1)..(178): Ceres Seq. ID no. 15219233
  misc_feature (128)..(168): Homolog of NCBI NO: 34906406 NR Description: P0710E05.16 [Oryza sativa (japonica
  misc_feature (9)..(143): Homolog of NCBI NO: 15233419 NR Description: hypothetical protein [Arabidopsis thaliana]
  misc_feature (9)..(177): Homolog of NCBI NO: 21741739 NR Description: OSJNBa0073L04.19 [Oryza sativa (japonica
MDVDRQETMEETILVGDDLMRGPPSPVVPKEIASHVLEGVELCDGILKNLFLCLQINDIEPFCQDEIVLYKQCAEKRDKEIRERLQDSEYKLGFSMPLEDAKERVTQLQSELTLLERRMILASGLPGMEGFRQRWSLHGQLGDTRKRLEALNSGMAKRESPSPPGEGTTPAVKKRWFF

SEQ ID NO: 66897 - protein, 170 aa, Triticum aestivum
  peptide (1)..(170): Ceres Seq. ID no. 15219234
  misc_feature (120)..(160): Homolog of NCBI NO: 34906406 NR Description: P0710E05.16 [Oryza sativa (japonica
  misc_feature (1)..(135): Homolog of NCBI NO: 15233419 NR Description: hypothetical protein [Arabidopsis thaliana]
  misc_feature (1)..(169): Homolog of NCBI NO: 21741739 NR Description: OSJNBa0073L04.19 [Oryza sativa (japonica
MEETILVGDDLMRGPPSPVVPKEIASHVLEGVELCDGILKNLFLCLQINDIEPFCQDEIVLYKQCAEKRDKEIRERLQDSEYKLGFSMPLEDAKERVTQLQSELTLLERRMILASGLPGMEGFRQRWSLHGQLGDTRKRLEALNSGMAKRESPSPPGEGTTPAVKKRWFF

SEQ ID NO: 66898 - protein, 159 aa, Triticum aestivum
  peptide (1)..(159): Ceres Seq. ID no. 15219235
  misc_feature (109)..(149): Homolog of NCBI NO: 34906406 NR Description: P0710E05.16 [Oryza sativa (japonica
  misc_feature (1)..(124): Homolog of NCBI NO: 15233419 NR Description: hypothetical protein [Arabidopsis thaliana]
  misc_feature (1)..(158): Homolog of NCBI NO: 21741739 NR Description: OSJNBa0073L04.19 [Oryza sativa (japonica
MRGPPSPVVPKEIASHVLEGVELCDGILKNLFLCLQINDIEPFCQDEIVLYKQCAEKRDKEIRERLQDSEYKLGFSMPLEDAKERVTQLQSELTLLERRMILASGLPGMEGFRQRWSLHGQLGDTRKRLEALNSGMAKRESPSPPGEGTTPAVKKRWFF

SEQ ID NO: 66899 - DNA, 1699 bp, Triticum aestivum
  misc_feature (1)..(1699): Ceres Seq. ID no. 14302742
actgctcctccctcctccctcctcctccacctcttccctcccctgacccctcgcctccaaattactatctccgtcggacgcacgcacgcgcgcggaaaggtttggttttgcggtgaccatgcaggcagcgacggtggcagcggcggcgaacggcgggggcgacgtgcagaagcagcagcaggtgggggcggcgccgctcccggcggtggcggcgctggcgccgccgccccattgggtggccatgccgttcgcgccgccgggcgccgcggccatggtggtgccgcaccagatggcgccggcgccgccccaccagttcgcgccgcacttcgtgccgttccacgccgtcgcaccgccgcccccgccgctgcagccgcgcccggcgcacgtcgccatgggctcgcccgcccccgccgcgcagcccggccaggaggagaacaagaccatctgggtcggcgacctccattactggatggacgagaactacctccacacctgcttcggctacaccggcgaggttgtcgcaatcaaggttattcgtaataagcaaaccggacaatcagaaggatatggatttgtagagttctacagtcatgctgcagctgaaaaagtacttgatggttttgctgggcatataatgccaaatactgaccaaccttttaggataaactgggcatcatttagcatgggggataggcgctcggacattgcttcagatcattccatatttgtaggcgatcttgcctctgatgtcaatgatactgcattgctagagactttctccagcaggtactcctctgtcaaaggtgcaaaagttgttattgatgctaacactggtagatccaagggctatggctttgtgcggtttggagatgatagtgagaagacaaacgccatgactgagatgaatggagtgtattgctcaactaggcccatgaggattggccctgcaactcccagaaaatcttcaggtacttctggatctactgtttcatctgctcgatcagacggagatttgacaaacacaactgtatttgtcggtgggcttgacccaaatgttagtgaagatgatcttaagcaaaccttctcccagtatggcgagatttcctctgtgaagattccagttgggaaacagtgcgggtttgtgcagtttcttcagagaaagaatgcagaagatgcattgcaagggctgaacgggagcaccattgggaaacagaccgtgcgcctttcatggggtcgcaatccagcaaacaagcagttgaggagtgacaacggcaaccagtggaacaacgggatgtactacgcgccctcgcccttctacaacgggtacggctaccccgcggcaccgttccctgacccgggcatgtacgccgctgcctatggcgcataccccgtctacgggaaccagcaacaggtcagctgaagatcggaggatcacacgcccatcgatccctcgacaacaacccgaggcgcgcacgcagtagctgtagctcttgctagagaaagaaggtagacgatgacggcttcttaggtgagctagatgtagtgactggtcatgtaaagtacattactattacgaagaactagcaccactaaggcacctaaaatgactcgaccgccatggccgtctagctggattgttctagggaaaaaaaaagttttggcatagagctgcaatataaggtagaacaataatctattc

SEQ ID NO: 66900 - protein, 433 aa, Triticum aestivum
  peptide (1)..(433): Ceres Seq. ID no. 14302743
  misc_feature (202)..(274): Pfam Name: RNA recognition motif. (a.k.a. RRM, RBD, or RNP domain) Pfam Description: RNA recognition motif. (a.k.a. RRM, RBD, or RNP
  misc_feature (11)..(307): Homolog of NCBI NO: 25386576 NR Description: probable RNA binding protein [imported] -
  misc_feature (284)..(405): Homolog of NCBI NO: 15230291 NR Description: RNA-binding protein, putative [Arabidopsis
  misc_feature (39)..(282): Homolog of NCBI NO: 15230291 NR Description: RNA-binding protein, putative [Arabidopsis
  misc_feature (100)..(422): Homolog of NCBI NO: 7489112 NR Description: DNA binding protein ACBF - common tobacco
  misc_feature (35)..(431): Homolog of NCBI NO: 34896988 NR Description: putative RNA binding protein [Oryza sativa]
  misc_feature (13)..(422): Homolog of NCBI NO: 7489196 NR Description: RNA binding protein homolog - common tobacco
  misc_feature (13)..(422): Homolog of NCBI NO: 9663769 NR Description: RNA Binding Protein 47 [Nicotiana plumbaginifolia]
  misc_feature (28)..(433): Homolog of NCBI NO: 15220241 NR Description: RNA binding protein 47 (RBP47), putative
  misc_feature (35)..(433): Homolog of NCBI NO: 15220233 NR Description: RNA binding protein 47 (RBP47), putative
  misc_feature (17)..(433): Homolog of NCBI NO: 15594035 NR Description: nucleic acid binding protein [Nicotiana tabacum]
MQAATVAAAANGGGDVQKQQQVGAAPLPAVAALAPPPHWVAMPFAPPGAAAMVVPHQMAPAPPHQFAPHFVPFHAVAPPPPPLQPRPAHVAMGSPAPAAQPGQEENKTIWVGDLHYWMDENYLHTCFGYTGEVVAIKVIRNKQTGQSEGYGFVEFYSHAAAEKVLDGFAGHIMPNTDQPFRINWASFSMGDRRSDIASDHSIFVGDLASDVNDTALLETFSSRYSSVKGAKVVIDANTGRSKGYGFVRFGDDSEKTNAMTEMNGVYCSTRPMRIGPATPRKSSGTSGSTVSSARSDGDLTNTTVFVGGLDPNVSEDDLKQTFSQYGEISSVKIPVGKQCGFVQFLQRKNAEDALQGLNGSTIGKQTVRLSWGRNPANKQLRSDNGNQWNNGMYYAPSPFYNGYGYPAAPFPDPGMYAAAYGAYPVYGNQQQVS

SEQ ID NO: 66901 - protein, 392 aa, Triticum aestivum
  peptide (1)..(392): Ceres Seq. ID no. 14302744
  misc_feature (161)..(233): Pfam Name: RNA recognition motif. (a.k.a. RRM, RBD, or RNP domain) Pfam Description: RNA recognition motif. (a.k.a. RRM, RBD, or RNP
  misc_feature (1)..(266): Homolog of NCBI NO: 25386576 NR Description: probable RNA binding protein [imported] -
  misc_feature (243)..(364): Homolog of NCBI NO: 15230291 NR Description: RNA-binding protein, putative [Arabidopsis
  misc_feature (1)..(241): Homolog of NCBI NO: 15230291 NR Description: RNA-binding protein, putative [Arabidopsis
  misc_feature (59)..(381): Homolog of NCBI NO: 7489112 NR Description: DNA binding protein ACBF - common tobacco
  misc_feature (1)..(390): Homolog of NCBI NO: 34896988 NR Description: putative RNA binding protein [Oryza sativa]
  misc_feature (1)..(381): Homolog of NCBI NO: 7489196 NR Description: RNA binding protein homolog - common tobacco
  misc_feature (1)..(381): Homolog of NCBI NO: 9663769 NR Description: RNA Binding Protein 47 [Nicotiana plumbaginifolia]
  misc_feature (1)..(392): Homolog of NCBI NO: 15220241 NR Description: RNA binding protein 47 (RBP47), putative
  misc_feature (1)..(392): Homolog of NCBI NO: 15220233 NR Description: RNA binding protein 47 (RBP47), putative
  misc_feature (1)..(392): Homolog of NCBI NO: 15594035 NR Description: nucleic acid binding protein [Nicotiana tabacum]
MPFAPPGAAAMVVPHQMAPAPPHQFAPHFVPFHAVAPPPPPLQPRPAHVAMGSPAPAAQPGQEENKTIWVGDLHYWMDENYLHTCFGYTGEVVAIKVIRNKQTGQSEGYGFVEFYSHAAAEKVLDGFAGHIMPNTDQPFRINWASFSMGDRRSDIASDHSIFVGDLASDVNDTALLETFSSRYSSVKGAKVVIDANTGRSKGYGFVRFGDDSEKTNAMTEMNGVYCSTRPMRIGPATPRKSSGTSGSTVSSARSDGDLTNTTVFVGGLDPNVSEDDLKQTFSQYGEISSVKIPVGKQCGFVQFLQRKNAEDALQGLNGSTIGKQTVRLSWGRNPANKQLRSDNGNQWNNGMYYAPSPFYNGYGYPAAPFPDPGMYAAAYGAYPVYGNQQQVS

SEQ ID NO: 66902 - protein, 382 aa, Triticum aestivum
  peptide (1)..(382): Ceres Seq. ID no. 14302745
  misc_feature (151)..(223): Pfam Name: RNA recognition motif. (a.k.a. RRM, RBD, or RNP domain) Pfam Description: RNA recognition motif. (a.k.a. RRM, RBD, or RNP
  misc_feature (1)..(256): Homolog of NCBI NO: 25386576 NR Description: probable RNA binding protein [imported] -
  misc_feature (233)..(354): Homolog of NCBI NO: 15230291 NR Description: RNA-binding protein, putative [Arabidopsis
  misc_feature (1)..(231): Homolog of NCBI NO: 15230291 NR Description: RNA-binding protein, putative [Arabidopsis
  misc_feature (49)..(371): Homolog of NCBI NO: 7489112 NR Description: DNA binding protein ACBF - common tobacco
  misc_feature (1)..(380): Homolog of NCBI NO: 34896988 NR Description: putative RNA binding protein [Oryza sativa]
  misc_feature (1)..(371): Homolog of NCBI NO: 7489196 NR Description: RNA binding protein homolog - common tobacco
  misc_feature (1)..(371): Homolog of NCBI NO: 9663769 NR Description: RNA Binding Protein 47 [Nicotiana plumbaginifolia]
  misc_feature (1)..(382): Homolog of NCBI NO: 15220241 NR Description: RNA binding protein 47 (RBP47), putative
  misc_feature (1)..(382): Homolog of NCBI NO: 15220233 NR Description: RNA binding protein 47 (RBP47), putative
  misc_feature (1)..(382): Homolog of NCBI NO: 15594035 NR Description: nucleic acid binding protein [Nicotiana tabacum]
MVVPHQMAPAPPHQFAPHFVPFHAVAPPPPPLQPRPAHVAMGSPAPAAQPGQEENKTIWVGDLHYWMDENYLHTCFGYTGEVVAIKVIRNKQTGQSEGYGFVEFYSHAAAEKVLDGFAGHIMPNTDQPFRINWASFSMGDRRSDIASDHSIFVGDLASDVNDTALLETFSSRYSSVKGAKVVIDANTGRSKGYGFVRFGDDSEKTNAMTEMNGVYCSTRPMRIGPATPRKSSGTSGSTVSSARSDGDLTNTTVFVGGLDPNVSEDDLKQTFSQYGEISSVKIPVGKQCGFVQFLQRKNAEDALQGLNGSTIGKQTVRLSWGRNPANKQLRSDNGNQWNNGMYYAPSPFYNGYGYPAAPFPDPGMYAAAYGAYPVYGNQQQVS

SEQ ID NO: 66903 - DNA, 841 bp, Triticum aestivum
  misc_feature (1)..(841): Ceres Seq. ID no. 13663564
acaagaggacagggaagaatcttgttcgcgttgagccgccgcagaccttccctttccccacgcccaggcgatcccctcaaatcccccgcaccatccccctctccttcgatcggatccgcccgcccgcccgcctgccgcaccggtcgatcgacgatgacgctgggcagctccggcgccggatcgagcgtcgtcgttcctcggaacttcaggctgctagaagagcttgagcgcggggagaagggcattggagatggaacggtcagctatggaatggatgatgctgatgacatatacatgcggtcatggactggcaccattattggtcctcacaatactgtccatgagggtcgcatctaccagctgaagctgttctgtgacaaggactaccccgagaaggcaccatctgttagatttcattcaagaatcaacatggcttgtgttaatcacgagaccggggcggttgacccgaagaagttcagtgtgctggcgaactggcagcgagagtacactatggaacatgtcttgacccagctgaagaaagatatggcggcgacgcagaaccgcaagctagtgcagcctccagaagggacattcttctagcggggtgttttcctgcccatctccagttccaacagcagcgatctatgtcactcccatgggatttgaaatgtagattcagcgtctgctgcctgcagatcttttcccagttttatgtgaaaccgtgttcctcgcgatctgcccgattgccgttaaggagatggaatgaaacatgtaccggtttgccgttaaggagtactaattaaggtctgtaattgaagaaacaacccgtgtcaaggaaata

SEQ ID NO: 66904 - protein, 199 aa, Triticum aestivum
  peptide (1)..(199): Ceres Seq. ID no. 13663565
  misc_feature (65)..(196): Homolog of NCBI NO: 13324790 NR Description: putative DNA-binding protein [Oryza sativa]
  misc_feature (57)..(196): Homolog of NCBI NO: 18395221 NR Description: ubiquitin-conjugating enzyme family [Arabidopsis
  misc_feature (63)..(196): Homolog of NCBI NO: 18409647 NR Description: ubiquitin-conjugating enzyme family [Arabidopsis
  misc_feature (63)..(196): Homolog of NCBI NO: 21593918 NR Description: E2, ubiquitin-conjugating enzyme, putative
  misc_feature (52)..(199): Homolog of NCBI NO: 32488709 NR Description: OSJNBa0088H09.10 [Oryza sativa (japonica
  misc_feature (60)..(199): Homolog of NCBI NO: 2982253 NR Description: CROC-1-like protein [Picea mariana]
  misc_feature (52)..(199): Homolog of NCBI NO: 30693656 NR Description: ubiquitin-conjugating enzyme family [Arabidopsis
  misc_feature (52)..(199): Homolog of NCBI NO: 30686662 NR Description: ubiquitin-conjugating enzyme family [Arabidopsis
  misc_feature (52)..(199): Homolog of NCBI NO: 18409633 NR Description: ubiquitin-conjugating enzyme family [Arabidopsis
  misc_feature (52)..(199): Homolog of NCBI NO: 18404032 NR Description: ubiquitin-conjugating enzyme family [Arabidopsis
TRGQGRILFALSRRRPSLSPRPGDPLKSPAPSPSPSIGSARPPACRTGRSTMTLGSSGAGSSVVVPRNFRLLEELERGEKGIGDGTVSYGMDDADDIYMRSWTGTIIGPHNTVHEGRIYQLKLFCDKDYPEKAPSVRFHSRINMACVNHETGAVDPKKFSVLANWQREYTMEHVLTQLKKDMAATQNRKLVQPPEGTFF

SEQ ID NO: 66905 - protein, 148 aa, Triticum aestivum
  peptide (1)..(148): Ceres Seq. ID no. 13663566
  misc_feature (14)..(145): Homolog of NCBI NO: 13324790 NR Description: putative DNA-binding protein [Oryza sativa]
  misc_feature (6)..(145): Homolog of NCBI NO: 18395221 NR Description: ubiquitin-conjugating enzyme family [Arabidopsis
  misc_feature (12)..(145): Homolog of NCBI NO: 18409647 NR Description: ubiquitin-conjugating enzyme family [Arabidopsis
  misc_feature (12)..(145): Homolog of NCBI NO: 21593918 NR Description: E2, ubiquitin-conjugating enzyme, putative
  misc_feature (1)..(148): Homolog of NCBI NO: 32488709 NR Description: OSJNBa0088H09.10 [Oryza sativa (japonica
  misc_feature (9)..(148): Homolog of NCBI NO: 2982253 NR Description: CROC-1-like protein [Picea mariana]
  misc_feature (1)..(148): Homolog of NCBI NO: 30693656 NR Description: ubiquitin-conjugating enzyme family [Arabidopsis
  misc_feature (1)..(148): Homolog of NCBI NO: 30686662 NR Description: ubiquitin-conjugating enzyme family [Arabidopsis
  misc_feature (1)..(148): Homolog of NCBI NO: 18409633 NR Description: ubiquitin-conjugating enzyme family [Arabidopsis
  misc_feature (1)..(148): Homolog of NCBI NO: 18404032 NR Description: ubiquitin-conjugating enzyme family [Arabidopsis
MTLGSSGAGSSVVVPRNFRLLEELERGEKGIGDGTVSYGMDDADDIYMRSWTGTIIGPHNTVHEGRIYQLKLFCDKDYPEKAPSVRFHSRINMACVNHETGAVDPKKFSVLANWQREYTMEHVLTQLKKDMAATQNRKLVQPPEGTFF

SEQ ID NO: 66906 - protein, 109 aa, Triticum aestivum
  peptide (1)..(109): Ceres Seq. ID no. 13663567
  misc_feature (1)..(106): Homolog of NCBI NO: 13324790 NR Description: putative DNA-binding protein [Oryza sativa]
  misc_feature (1)..(106): Homolog of NCBI NO: 18395221 NR Description: ubiquitin-conjugating enzyme family [Arabidopsis
  misc_feature (1)..(106): Homolog of NCBI NO: 18409647 NR Description: ubiquitin-conjugating enzyme family [Arabidopsis
  misc_feature (1)..(106): Homolog of NCBI NO: 21593918 NR Description: E2, ubiquitin-conjugating enzyme, putative
  misc_feature (1)..(109): Homolog of NCBI NO: 32488709 NR Description: OSJNBa0088H09.10 [Oryza sativa (japonica
  misc_feature (1)..(109): Homolog of NCBI NO: 2982253 NR Description: CROC-1-like protein [Picea mariana]
  misc_feature (1)..(109): Homolog of NCBI NO: 30693656 NR Description: ubiquitin-conjugating enzyme family [Arabidopsis
  misc_feature (1)..(109): Homolog of NCBI NO: 30686662 NR Description: ubiquitin-conjugating enzyme family [Arabidopsis
  misc_feature (1)..(109): Homolog of NCBI NO: 18409633 NR Description: ubiquitin-conjugating enzyme family [Arabidopsis
  misc_feature (1)..(109): Homolog of NCBI NO: 18404032 NR Description: ubiquitin-conjugating enzyme family [Arabidopsis
MDDADDIYMRSWTGTIIGPHNTVHEGRIYQLKLFCDKDYPEKAPSVRFHSRINMACVNHETGAVDPKKFSVLANWQREYTMEHVLTQLKKDMAATQNRKLVQPPEGTFF

SEQ ID NO: 66907 - DNA, 981 bp, Triticum aestivum
  misc_feature (1)..(981): Ceres Seq. ID no. 14302396
agtagacaacagaaaatttccccattcttctccgaaccctagctccccgcttcccgctcctcacgcctctcgccgtcgccgtcccgccgagcccatggctaagacgcgtccgcccaagaagatcctcgagtcctacaccatcaaggggtccgacaaagtcatcaagcctggggactgtgtgctaatgagatcagctgatacatcaaagccaccatatgtggcaaaagttgagtccattgaggcagcagggtctcgaggcacaaatgtgagagtacgggttcgatggtactatcgtccagaagaattcattggtgggaggcgaccatttcatggttccaaagaggtattcctctctgaccactatgatgtacagagtgctgacacaatagagggaaaatgcaatgtccacagcttccgtagctacacaaagcttgattctgtgaatgccgaggacttcttctgtcgctttgactacaaatcagcatctggcagtttcgtgcccgaccgtatagctgtgttttgcaagtgtgagatgccgtacaatcctgatgaccttatgatccaatgtgaggaatgctctgactggtttcacccttcttgtattggaatgaccattaaagaagcaaagaaacgagaacactttttctgccagagctgtactgctgaaaatgggaagacaactgagaattttcatgaagccacggcagagtcagaagaaaagctggtggagtcgaaaaggcggagaaggtgatgggctggattaatttgatggaattcccacacggatatacaaactacatagccttctagtatgaggtctgtggtgatgtttgtggcagtctgtgaccccttctaatgtcaggcatgcagtgtacataacgtgcaacctgagattgttgtattaggagaaaatagaatttggacgctagtgtcagagtttgagcagtatggcaccatcaagatcccttgtgatcttccctc

SEQ ID NO: 66908 - protein, 249 aa, Triticum aestivum
  peptide (1)..(249): Ceres Seq. ID no. 14302397
  misc_feature (53)..(169): Pfam Name: BAH domain Pfam Description: BAH domain
  misc_feature (62)..(236): Homolog of NCBI NO: 15234729 NR Description: receptor like protein (fragment) [Arabidopsis
  misc_feature (57)..(236): Homolog of NCBI NO: 11292613 NR Description: receptor like protein - Arabidopsis thaliana
  misc_feature (32)..(243): Homolog of NCBI NO: 34904940 NR Description: OSJNBa0077M12.13 [Oryza sativa (japonica
  misc_feature (32)..(240): Homolog of NCBI NO: 7484948 NR Description: ES43 protein homolog F19H22.200 - Arabidopsis
  misc_feature (32)..(249): Homolog of NCBI NO: 21595796 NR Description: ES43 like protein [Arabidopsis thaliana]
  misc_feature (32)..(249): Homolog of NCBI NO: 18420377 NR Description: ES43 like protein [Arabidopsis thaliana]
  misc_feature (32)..(249): Homolog of NCBI NO: 37573088 NR Description: receptor like protein [Oryza sativa (japonica
  misc_feature (31)..(249): Homolog of NCBI NO: 629783 NR Description: ES43 protein - barley
  misc_feature (32)..(249): Homolog of NCBI NO: 34897170 NR Description: putative DNA-binding protein
  misc_feature (32)..(249): Homolog of NCBI NO: 33146914 NR Description: putative ES43 protein [Oryza sativa (japonica
VDNRKFPHSSPNPSSPLPAPHASRRRRPAEPMAKTRPPKKILESYTIKGSDKVIKPGDCVLMRSADTSKPPYVAKVESIEAAGSRGTNVRVRVRWYYRPEEFIGGRRPFHGSKEVFLSDHYDVQSADTIEGKCNVHSFRSYTKLDSVNAEDFFCRFDYKSASGSFVPDRIAVFCKCEMPYNPDDLMIQCEECSDWFHPSCIGMTIKEAKKREHFFCQSCTAENGKTTENFHEATAESEEKLVESKRRRR

SEQ ID NO: 66909 - protein, 218 aa, Triticum aestivum
  peptide (1)..(218): Ceres Seq. ID no. 14302398
  misc_feature (22)..(138): Pfam Name: BAH domain Pfam Description: BAH domain
  misc_feature (31)..(205): Homolog of NCBI NO: 15234729 NR Description: receptor like protein (fragment) [Arabidopsis
  misc_feature (26)..(205): Homolog of NCBI NO: 11292613 NR Description: receptor like protein - Arabidopsis thaliana
  misc_feature (1)..(212): Homolog of NCBI NO: 34904940 NR Description: OSJNBa0077M12.13 [Oryza sativa (japonica
  misc_feature (1)..(209): Homolog of NCBI NO: 7484948 NR Description: ES43 protein homolog F19H22.200 - Arabidopsis
  misc_feature (1)..(218): Homolog of NCBI NO: 21595796 NR Description: ES43 like protein [Arabidopsis thaliana]
  misc_feature (1)..(218): Homolog of NCBI NO: 18420377 NR Description: ES43 like protein [Arabidopsis thaliana]
  misc_feature (1)..(218): Homolog of NCBI NO: 37573088 NR Description: receptor like protein [Oryza sativa (japonica
  misc_feature (1)..(218): Homolog of NCBI NO: 629783 NR Description: ES43 protein - barley
  misc_feature (1)..(218): Homolog of NCBI NO: 34897170 NR Description: putative DNA-binding protein
  misc_feature (1)..(218): Homolog of NCBI NO: 33146914 NR Description: putative ES43 protein [Oryza sativa (japonica
MAKTRPPKKILESYTIKGSDKVIKPGDCVLMRSADTSKPPYVAKVESIEAAGSRGTNVRVRVRWYYRPEEFIGGRRPFHGSKEVFLSDHYDVQSADTIEGKCNVHSFRSYTKLDSVNAEDFFCRFDYKSASGSFVPDRIAVFCKCEMPYNPDDLMIQCEECSDWFHPSCIGMTIKEAKKREHFFCQSCTAENGKTTENFHEATAESEEKLVESKRRRR

SEQ ID NO: 66910 - protein, 188 aa, Triticum aestivum
  peptide (1)..(188): Ceres Seq. ID no. 14302399
  misc_feature (1)..(108): Pfam Name: BAH domain Pfam Description: BAH domain
  misc_feature (1)..(175): Homolog of NCBI NO: 15234729 NR Description: receptor like protein (fragment) [Arabidopsis
  misc_feature (1)..(175): Homolog of NCBI NO: 11292613 NR Description: receptor like protein - Arabidopsis thaliana
  misc_feature (1)..(182): Homolog of NCBI NO: 34904940 NR Description: OSJNBa0077M12.13 [Oryza sativa (japonica
  misc_feature (1)..(179): Homolog of NCBI NO: 7484948 NR Description: ES43 protein homolog F19H22.200 - Arabidopsis
  misc_feature (1)..(188): Homolog of NCBI NO: 21595796 NR Description: ES43 like protein [Arabidopsis thaliana]
  misc_feature (1)..(188): Homolog of NCBI NO: 18420377 NR Description: ES43 like protein [Arabidopsis thaliana]
  misc_feature (1)..(188): Homolog of NCBI NO: 37573088 NR Description: receptor like protein [Oryza sativa (japonica
  misc_feature (1)..(188): Homolog of NCBI NO: 629783 NR Description: ES43 protein - barley
  misc_feature (1)..(188): Homolog of NCBI NO: 34897170 NR Description: putative DNA-binding protein
  misc_feature (1)..(188): Homolog of NCBI NO: 33146914 NR Description: putative ES43 protein [Oryza sativa (japonica
MRSADTSKPPYVAKVESIEAAGSRGTNVRVRVRWYYRPEEFIGGRRPFHGSKEVFLSDHYDVQSADTIEGKCNVHSFRSYTKLDSVNAEDFFCRFDYKSASGSFVPDRIAVFCKCEMPYNPDDLMIQCEECSDWFHPSCIGMTIKEAKKREHFFCQSCTAENGKTTENFHEATAESEEKLVESKRRRR

SEQ ID NO: 66911 - DNA, 849 bp, Triticum aestivum
  misc_feature (1)..(849): Ceres Seq. ID no. 12626698
aaaaaaaagaaagaatgccctattattttcatccccttcacaatttccctcacaccctcaccccgcagcccatttgccccctgaccaagccgccgccgccgccatctccggccaccccgcctctcccccctctccctccccggcctcnccgccgccgacccataccggaacaggaggaccgccaccgcngtaaagcctccgtgccagctgcctccccgtcggccacgctgcaaccagagcaagatcccgcccctggtcgcatctcagaatggcgaccctgaggaacctgaagatcaagacgtcgacgtgcaagaggatcgtcaaagagctgcgctcgtacgagaaggaggtggagaaggaggccgccaagaccgccgacatgaaggagaagggcgccgacccctatgatctcaagcagcaggaaaatgttttagctgagtcgaggatgatggtcccagactgccataagcggcttgaagctgcactgacagacttgaaagcaactctggccgagttgaaggagtcaaatgaacaaggcactgagatcggtgaggctgaggctacaatcactgaagttgaagctgtctacacgccaacagaagctgaagattaagctcgcaacttccttttcgctgaaatgtcagtatgcatcaccagacttgctcttgtcgacaagttagtcccattcatatgatgttgacgcgaaagcttgtatgtatcacgactcatgatctgtctcgagatgtgcaactggtaatatcactgtactggaatatggttaggcgtttatgatgtgctggaaatgctgcatgttgttggcattgttccatttgagtctcggatgcatat

SEQ ID NO: 66912 - protein, 114 aa, Triticum aestivum
  peptide (1)..(114): Ceres Seq. ID no. 12626699
  misc_feature (6)..(99): Pfam Name: Tubulin binding cofactor A Pfam Description: Tubulin binding cofactor A
  misc_feature (1)..(104): Homolog of NCBI NO: 34868671 NR Description: similar to homeodomain protein [Rattus norvegicus]
  misc_feature (4)..(104): Homolog of NCBI NO: 1711660 NR Description: TUBULIN-SPECIFIC CHAPERONE A (TUBULIN-FOLDING
  misc_feature (4)..(104): Homolog of NCBI NO: 1711661 NR Description: TUBULIN-SPECIFIC CHAPERONE A (TUBULIN-FOLDING
  misc_feature (4)..(104): Homolog of NCBI NO: 30585151 NR Description: Homo sapiens tubulin-specific chaperone a
  misc_feature (4)..(104): Homolog of NCBI NO: 21706425 NR Description: Unknown (protein for IMAGE:4209187) [Mus musculus]
  misc_feature (4)..(104): Homolog of NCBI NO: 28461233 NR Description: tubulin cofactor a [Bos taurus]
  misc_feature (4)..(104): Homolog of NCBI NO: 6678225 NR Description: tubulin cofactor a
  misc_feature (4)..(104): Homolog of NCBI NO: 4759212 NR Description: beta-tubulin cofactor A [Homo sapiens]
  misc_feature (1)..(80): Homolog of NCBI NO: 25408070 NR Description: probable TCP1-chaperonin cofactor A
  misc_feature (1)..(111): Homolog of NCBI NO: 18402340 NR Description: TCP1-chaperonin cofactor A isolog
MATLRNLKIKTSTCKRIVKELRSYEKEVEKEAAKTADMKEKGADPYDLKQQENVLAESRMMVPDCHKRLEAALTDLKATLAELKESNEQGTEIGEAEATITEVEAVYTPTEAED

SEQ ID NO: 66913 - protein, 92 aa, Triticum aestivum
  peptide (1)..(92): Ceres Seq. ID no. 12626700
  misc_feature (49)..(49): Xaa is any aa, unknown or other
  misc_feature (63)..(63): Xaa is any aa, unknown or other
KKERMPYYFHPLHNFPHTLTPQPICPLTKPPPPPSPATPPLPPLPPRPXRRRPIPEQEDRHRXKASVPAASPSATLQPEQDPAPGRISEWRP

SEQ ID NO: 66914 - protein, 88 aa, Triticum aestivum
  peptide (1)..(88): Ceres Seq. ID no. 12626701
  misc_feature (45)..(45): Xaa is any aa, unknown or other
  misc_feature (59)..(59): Xaa is any aa, unknown or other
MPYYFHPLHNFPHTLTPQPICPLTKPPPPPSPATPPLPPLPPRPXRRRPIPEQEDRHRXKASVPAASPSATLQPEQDPAPGRISEWRP

SEQ ID NO: 66915 - DNA, 2132 bp, Triticum aestivum
  misc_feature (1)..(2132): Ceres Seq. ID no. 14307896
caccgcatcgcacgaaaaacaccgaccttttttccagccgagacacgatgatccaccgccattagcagcggcggggaagcggcgatcgatcttccgtggccccgcgctcgcgtgctcgctctcgccggatcgggcctggcaaatggcgcgcgcggcctccctggcggcgctctgcctcctcctcctcgccgccgccgccgccgccggagctcgaatggacccgatttattctggccaactggtgccggactggagcagggaacccaagattaaaccgcagaatttctccctgaatcgagaggataatcttcagctcctaagcaggtcacgagatgtgactcgcaggaaattgggggagaggaccggtgtaataaagatggaaacagtacagcaggatgatgaagccctggttaaacttgagaatgcaggttttgagcgttcaaaagcagttgattctgctgtgctgggaaaatatagtctatggagacgcgaaaatgaaaacgagaaggcggatgcaaatgtccgtctgatgcgggaccaaatgatcatggctagaatatattccgtgcttgccaaatccagggacaagctcgatctttatcgggagctactcgccaggatcaaggaaagccagcgctcccttggggaagctactgctgattctgatctccctaagagtgcttctgagagagcaaaagcgatgggtctagttttatcaaaagcaagggatcaattgtacaattgcaaggaaattacccatcgtttaagatcaatgcttcagtcagctgatgagcaggtccggagcttaaagaagcagagcaccttcctcagtcagttggcagctaagacaataccgaatggcatacattgcttgtccatgcgcttaacaatagactattaccttctctctccagagaaaagaaagttccctaatagtgagaatttggaagatcctgatctttatcactatgctcttttttcggacaatgttctggcagcatcagttgtggttaactcaaccatcgtgaacgcaaaggagcctgagaagcatgtctttcatcttgttactgacaaactgaactttggggcaatgaacatgtggttcttgttgaatccacctggggatgccacaatccatgttgaaaatgtggatgacttcaaatggttgaactcttcgtactgccctgttttgaagcagctcgagtctgcagccatgaaagagtactactttaaggcagatcgtcaaaaaactctctctgctgggtcctctaatctgaagtaccgaaacccaaaatatctgtccatgctcaaccatctaagattttacctgccacaagtctatcctaagttgaataaaatccttttcctcgatgacgacattgtggtccagaaggacttgaccggactgtgggatgttgatcttaatgggaatgtaaatggtgctgtggaaacgtgcggggagagcttccaccgatttgacaagtacctcaatttctcgaacccaaatatttcgcagaattttgatcctaacgcatgtggttgggcttatggaatgaatatatttgatctggaggagtggaagaagaaggacattactggaatttaccataagtggcagaacatgaatgaaaacaggctgctgtggaaactggggacgcttccgccaggcctgatgactttctacaagctgacgcaccccctggacaaatcatggcatgtgcttgggttagggtacaacccgacggtcgagcacgcggagatcgacaccgccgccgtcatccactacaacgggaacatgaagccgtggctggagattgcgatgaccaagtaccggccttactggacgcagtacatcaactacgagcactcctatgtccggggctgcaagatcagtcaataggcagtagctagaagaggagcattcgcttcgacaggactactaaagaaagaaagtgtttccctgttggtagtgcagttatagcgcatgttcttcgttcgtgttattagatttgttttggttggtatcttttctgctgtatgtagcttcctcgcccgattcgttgtgctgcctcgactagtctgctgcggcacgtgttacatgttattctcttgaaaagaatggtgaacttggc

SEQ ID NO: 66916 - protein, 632 aa, Triticum aestivum
  peptide (1)..(632): Ceres Seq. ID no. 14307897
  misc_feature (503)..(630): Homolog of NCBI NO: 15227235 NR Description: glycosyltransferase family 8 [Arabidopsis
  misc_feature (132)..(517): Homolog of NCBI NO: 15227235 NR Description: glycosyltransferase family 8 [Arabidopsis
  misc_feature (171)..(631): Homolog of NCBI NO: 18422837 NR Description: glycosyltransferase family 8 [Arabidopsis
  misc_feature (171)..(631): Homolog of NCBI NO: 10177914 NR Description: emb|CAB71043.1~gene_id:MCA23.10~strong similarity
  misc_feature (105)..(632): Homolog of NCBI NO: 37533460 NR Description: hypothetical protein [Oryza sativa (japonica
  misc_feature (96)..(632): Homolog of NCBI NO: 30691875 NR Description: glycosyltransferase family 8 [Arabidopsis
  misc_feature (96)..(632): Homolog of NCBI NO: 7485958 NR Description: hypothetical protein F22I13.40 - Arabidopsis
  misc_feature (64)..(569): Homolog of NCBI NO: 14517362 NR Description: AT3g61130/T20K12_30 [Arabidopsis thaliana]
  misc_feature (112)..(632): Homolog of NCBI NO: 7271113 NR Description: 68 kDa protein [Cicer arietinum]
  misc_feature (64)..(632): Homolog of NCBI NO: 15233046 NR Description: glycosyltransferase family 8 [Arabidopsis
TASHEKHRPFFQPRHDDPPPLAAAGKRRSIFRGPALACSLSPDRAWQMARAASLAALCLLLLAAAAAAGARMDPIYSGQLVPDWSREPKIKPQNFSLNREDNLQLLSRSRDVTRRKLGERTGVIKMETVQQDDEALVKLENAGFERSKAVDSAVLGKYSLWRRENENEKADANVRLMRDQMIMARIYSVLAKSRDKLDLYRELLARIKESQRSLGEATADSDLPKSASERAKAMGLVLSKARDQLYNCKEITHRLRSMLQSADEQVRSLKKQSTFLSQLAAKTIPNGIHCLSMRLTIDYYLLSPEKRKFPNSENLEDPDLYHYALFSDNVLAASVVVNSTIVNAKEPEKHVFHLVTDKLNFGAMNMWFLLNPPGDATIHVENVDDFKWLNSSYCPVLKQLESAAMKEYYFKADRQKTLSAGSSNLKYRNPKYLSMLNHLRFYLPQVYPKLNKILFLDDDIVVQKDLTGLWDVDLNGNVNGAVETCGESFHRFDKYLNFSNPNISQNFDPNACGWAYGMNIFDLEEWKKKDITGIYHKWQNMNENRLLWKLGTLPPGLMTFYKLTHPLDKSWHVLGLGYNPTVEHAEIDTAAVIHYNGNMKPWLEIAMTKYRPYWTQYINYEHSYVRGCKISQ

SEQ ID NO: 66917 - protein, 585 aa, Triticum aestivum
  peptide (1)..(585): Ceres Seq. ID no. 14307898
  misc_feature (456)..(583): Homolog of NCBI NO: 15227235 NR Description: glycosyltransferase family 8 [Arabidopsis
  misc_feature (85)..(470): Homolog of NCBI NO: 15227235 NR Description: glycosyltransferase family 8 [Arabidopsis
  misc_feature (124)..(584): Homolog of NCBI NO: 18422837 NR Description: glycosyltransferase family 8 [Arabidopsis
  misc_feature (124)..(584): Homolog of NCBI NO: 10177914 NR Description: emb|CAB71043.1~gene_id:MCA23.10~strong similarity
  misc_feature (58)..(585): Homolog of NCBI NO: 37533460 NR Description: hypothetical protein [Oryza sativa (japonica
  misc_feature (49)..(585): Homolog of NCBI NO: 30691875 NR Description: glycosyltransferase family 8 [Arabidopsis
  misc_feature (49)..(585): Homolog of NCBI NO: 7485958 NR Description: hypothetical protein F22I13.40 - Arabidopsis
  misc_feature (17)..(522): Homolog of NCBI NO: 14517362 NR Description: AT3g61130/T20K12_30 [Arabidopsis thaliana]
  misc_feature (65)..(585): Homolog of NCBI NO: 7271113 NR Description: 68 kDa protein [Cicer arietinum]
  misc_feature (17)..(585): Homolog of NCBI NO: 15233046 NR Description: glycosyltransferase family 8 [Arabidopsis
MARAASLAALCLLLLAAAAAAGARMDPIYSGQLVPDWSREPKIKPQNFSLNREDNLQLLSRSRDVTRRKLGERTGVIKMETVQQDDEALVKLENAGFERSKAVDSAVLGKYSLWRRENENEKADANVRLMRDQMIMARIYSVLAKSRDKLDLYRELLARIKESQRSLGEATADSDLPKSASERAKAMGLVLSKARDQLYNCKEITHRLRSMLQSADEQVRSLKKQSTFLSQLAAKTIPNGIHCLSMRLTIDYYLLSPEKRKFPNSENLEDPDLYHYALFSDNVLAASVVVNSTIVNAKEPEKHVFHLVTDKLNFGAMNMWFLLNPPGDATIHVENVDDFKWLNSSYCPVLKQLESAAMKEYYFKADRQKTLSAGSSNLKYRNPKYLSMLNHLRFYLPQVYPKLNKILFLDDDIVVQKDLTGLWDVDLNGNVNGAVETCGESFHRFDKYLNFSNPNISQNFDPNACGWAYGMNIFDLEEWKKKDITGIYHKWQNMNENRLLWKLGTLPPGLMTFYKLTHPLDKSWHVLGLGYNPTVEHAEIDTAAVIHYNGNMKPWLEIAMTKYRPYWTQYINYEHSYVRGCKISQ

SEQ ID NO: 66918 - protein, 561 aa, Triticum aestivum
  peptide (1)..(561): Ceres Seq. ID no. 14307899
  misc_feature (432)..(559): Homolog of NCBI NO: 15227235 NR Description: glycosyltransferase family 8 [Arabidopsis
  misc_feature (61)..(446): Homolog of NCBI NO: 15227235 NR Description: glycosyltransferase family 8 [Arabidopsis
  misc_feature (100)..(560): Homolog of NCBI NO: 18422837 NR Description: glycosyltransferase family 8 [Arabidopsis
  misc_feature (100)..(560): Homolog of NCBI NO: 10177914 NR Description: emb|CAB71043.1~gene_id:MCA23.10~strong similarity
  misc_feature (34)..(561): Homolog of NCBI NO: 37533460 NR Description: hypothetical protein [Oryza sativa (japonica
  misc_feature (25)..(561): Homolog of NCBI NO: 30691875 NR Description: glycosyltransferase family 8 [Arabidopsis
  misc_feature (25)..(561): Homolog of NCBI NO: 7485958 NR Description: hypothetical protein F22I13.40 - Arabidopsis
  misc_feature (1)..(498): Homolog of NCBI NO: 14517362 NR Description: AT3g61130/T20K12_30 [Arabidopsis thaliana]
  misc_feature (41)..(561): Homolog of NCBI NO: 7271113 NR Description: 68 kDa protein [Cicer arietinum]
  misc_feature (1)..(561): Homolog of NCBI NO: 15233046 NR Description: glycosyltransferase family 8 [Arabidopsis
MDPIYSGQLVPDWSREPKIKPQNFSLNREDNLQLLSRSRDVTRRKLGERTGVIKMETVQQDDEALVKLENAGFERSKAVDSAVLGKYSLWRRENENEKADANVRLMRDQMIMARIYSVLAKSRDKLDLYRELLARIKESQRSLGEATADSDLPKSASERAKAMGLVLSKARDQLYNCKEITHRLRSMLQSADEQVRSLKKQSTFLSQLAAKTIPNGIHCLSMRLTIDYYLLSPEKRKFPNSENLEDPDLYHYALFSDNVLAASVVVNSTIVNAKEPEKHVFHLVTDKLNFGAMNMWFLLNPPGDATIHVENVDDFKWLNSSYCPVLKQLESAAMKEYYFKADRQKTLSAGSSNLKYRNPKYLSMLNHLRFYLPQVYPKLNKILFLDDDIVVQKDLTGLWDVDLNGNVNGAVETCGESFHRFDKYLNFSNPNISQNFDPNACGWAYGMNIFDLEEWKKKDITGIYHKWQNMNENRLLWKLGTLPPGLMTFYKLTHPLDKSWHVLGLGYNPTVEHAEIDTAAVIHYNGNMKPWLEIAMTKYRPYWTQYINYEHSYVRGCKISQ

SEQ ID NO: 66919 - DNA, 1422 bp, Triticum aestivum
  misc_feature (1)..(1422): Ceres Seq. ID no. 14302776
atcccgcacccaccattgagagaagcagcagcacgagcagcacatgtcacagagggccagcgtcccacactcctcctgcatagccttcgccctccattcccacctcctcgtgtcctctgagatgtgccccagctcctactgggaatagaatagccacccccgcccaaatcccacacctttttcgtttttgatttcctctcttctttagattttttttctagatctttgggggcctccaattcgtccgtccgcgagggggaagcgaggggaagatgggcgtcaaggggttcgtcgagggcggcatcgcctccatcgtcgccggctgctccacccaccctctcgacctcatcaaggtccggatgcagctgcagggggagtcctccgcggccgcggcccagcccgcgctccgcccggcgctcgccttccaggccggggcgcacaccgtgacgctcccgcacgcgcccacgccggtgcccaagcccggcccgattggcatctgcacgcagatcctgcgcgccgagggcgccgccgggctcttctccgggatctcggccaccatgctgcgccagacgctctactccaccacgcggatggggctctacgacatcctcaagaagcgctggacccaggagaacgccggcgtgctgccgctgcaccgcaagatcgccgccggcctcatcgccggcggcgtcggcgcggccgtcggcaacccggccgacctggccatggtgcggatgcaggccgacggccgcctcccgctggccgaccgcaggaactaccgcagcgtgggcgacgccatcgcccggatgacgcgcgacgagggcgtgcgcagcctctggcgcggctccgcgctcacggtcaaccgcgccatgattgtcaccgcgtcgcagctggccacctacgaccaggccaaggaggccatcctggcccgccgcggcccggccgccgacgggctgggcacgcacgtggccgccagcttcgccgcgggcatcgtggccgccgccgcgtccaaccccgtggacgtggtcaagaccagggtgatgaacatgaaggtggcgcccggcgcgccccctccgtacgccggggccctggactgcgcgctcaagacggtgcggtcggagggcgtgatggcgctctacaaggggttcatccccacggtgtcgcgccaggggcccttcaccgtggtgctcttcgtcaccctggagcaggtgcgcaaggtcttcaaggacgtcgagttctaatgcagtgcagaccaccgcacggcgcggcgccatggatccatgatgatgacgacaagaagctgcccattgatgccgctgctgctaagaataactagtagtaccgctggagggatttctccagttcctgcctctcattttattcggatgaatttgatcgattttgaatgaaattctcattttc

SEQ ID NO: 66920 - protein, 322 aa, Triticum aestivum
  peptide (1)..(322): Ceres Seq. ID no. 14302777
  misc_feature (1)..(37): Homolog of NCBI NO: 1079478 NR Description: 2-oxoglutarate carrier protein - human
  misc_feature (77)..(318): Homolog of NCBI NO: 1079478 NR Description: 2-oxoglutarate carrier protein - human
  misc_feature (6)..(39): Homolog of NCBI NO: 31240035 NR Description: ENSANGP00000016898 [Anopheles gambiae]
  misc_feature (78)..(317): Homolog of NCBI NO: 31240035 NR Description: ENSANGP00000016898 [Anopheles gambiae]
  misc_feature (1)..(42): Homolog of NCBI NO: 15242423 NR Description: mitochondrial carrier protein family [Arabidopsis
  misc_feature (46)..(322): Homolog of NCBI NO: 15242423 NR Description: mitochondrial carrier protein family [Arabidopsis
  misc_feature (1)..(319): Homolog of NCBI NO: 15233884 NR Description: mitochondrial carrier protein family [Arabidopsis
  misc_feature (1)..(322): Homolog of NCBI NO: 13878155 NR Description: putative mitochondrial dicarboxylate carrier
  misc_feature (1)..(322): Homolog of NCBI NO: 21554157 NR Description: putative mitochondrial dicarboxylate carrier
  misc_feature (1)..(322): Homolog of NCBI NO: 15227225 NR Description: mitochondrial carrier protein family [Arabidopsis
MGVKGFVEGGIASIVAGCSTHPLDLIKVRMQLQGESSAAAAQPALRPALAFQAGAHTVTLPHAPTPVPKPGPIGICTQILRAEGAAGLFSGISATMLRQTLYSTTRMGLYDILKKRWTQENAGVLPLHRKIAAGLIAGGVGAAVGNPADLAMVRMQADGRLPLADRRNYRSVGDAIARMTRDEGVRSLWRGSALTVNRAMIVTASQLATYDQAKEAILARRGPAADGLGTHVAASFAAGIVAAAASNPVDVVKTRVMNMKVAPGAPPPYAGALDCALKTVRSEGVMALYKGFIPTVSRQGPFTVVLFVTLEQVRKVFKDVEF

SEQ ID NO: 66921 - protein, 293 aa, Triticum aestivum
  peptide (1)..(293): Ceres Seq. ID no. 14302778
  misc_feature (48)..(289): Homolog of NCBI NO: 21312994 NR Description: solute carrier family 25 (mitochondrial carrier
  misc_feature (48)..(289): Homolog of NCBI NO: 21361114 NR Description: solute carrier family 25 (mitochondrial carrier
  misc_feature (48)..(289): Homolog of NCBI NO: 1079478 NR Description: 2-oxoglutarate carrier protein - human
  misc_feature (49)..(288): Homolog of NCBI NO: 31240035 NR Description: ENSANGP00000016898 [Anopheles gambiae]
  misc_feature (1)..(13): Homolog of NCBI NO: 15242423 NR Description: mitochondrial carrier protein family [Arabidopsis
  misc_feature (17)..(293): Homolog of NCBI NO: 15242423 NR Description: mitochondrial carrier protein family [Arabidopsis
  misc_feature (1)..(290): Homolog of NCBI NO: 15233884 NR Description: mitochondrial carrier protein family [Arabidopsis
  misc_feature (1)..(293): Homolog of NCBI NO: 13878155 NR Description: putative mitochondrial dicarboxylate carrier
  misc_feature (1)..(293): Homolog of NCBI NO: 21554157 NR Description: putative mitochondrial dicarboxylate carrier
  misc_feature (1)..(293): Homolog of NCBI NO: 15227225 NR Description: mitochondrial carrier protein family [Arabidopsis
MQLQGESSAAAAQPALRPALAFQAGAHTVTLPHAPTPVPKPGPIGICTQILRAEGAAGLFSGISATMLRQTLYSTTRMGLYDILKKRWTQENAGVLPLHRKIAAGLIAGGVGAAVGNPADLAMVRMQADGRLPLADRRNYRSVGDAIARMTRDEGVRSLWRGSALTVNRAMIVTASQLATYDQAKEAILARRGPAADGLGTHVAASFAAGIVAAAASNPVDVVKTRVMNMKVAPGAPPPYAGALDCALKTVRSEGVMALYKGFIPTVSRQGPFTVVLFVTLEQVRKVFKDVEF

SEQ ID NO: 66922 - protein, 227 aa, Triticum aestivum
  peptide (1)..(227): Ceres Seq. ID no. 14302779
  misc_feature (1)..(223): Homolog of NCBI NO: 1580888 NR Description: 2-oxoglutarate carrier protein
  misc_feature (1)..(223): Homolog of NCBI NO: 21312994 NR Description: solute carrier family 25 (mitochondrial carrier
  misc_feature (1)..(223): Homolog of NCBI NO: 21361114 NR Description: solute carrier family 25 (mitochondrial carrier
  misc_feature (1)..(223): Homolog of NCBI NO: 1079478 NR Description: 2-oxoglutarate carrier protein - human
  misc_feature (1)..(222): Homolog of NCBI NO: 31240035 NR Description: ENSANGP00000016898 [Anopheles gambiae]
  misc_feature (1)..(227): Homolog of NCBI NO: 15242423 NR Description: mitochondrial carrier protein family [Arabidopsis
  misc_feature (1)..(224): Homolog of NCBI NO: 15233884 NR Description: mitochondrial carrier protein family [Arabidopsis
  misc_feature (1)..(227): Homolog of NCBI NO: 13878155 NR Description: putative mitochondrial dicarboxylate carrier
  misc_feature (1)..(227): Homolog of NCBI NO: 21554157 NR Description: putative mitochondrial dicarboxylate carrier
  misc_feature (1)..(227): Homolog of NCBI NO: 15227225 NR Description: mitochondrial carrier protein family [Arabidopsis
MLRQTLYSTTRMGLYDILKKRWTQENAGVLPLHRKIAAGLIAGGVGAAVGNPADLAMVRMQADGRLPLADRRNYRSVGDAIARMTRDEGVRSLWRGSALTVNRAMIVTASQLATYDQAKEAILARRGPAADGLGTHVAASFAAGIVAAAASNPVDVVKTRVMNMKVAPGAPPPYAGALDCALKTVRSEGVMALYKGFIPTVSRQGPFTVVLFVTLEQVRKVFKDVEF

SEQ ID NO: 66923 - DNA, 1283 bp, Triticum aestivum
  misc_feature (1)..(1283): Ceres Seq. ID no. 13663895
atagcaaaggactctatccttctccccttgcgcctccggtgttccaaattccaaattccaaaacccacccccgaggcgaggaaaagcaccgcaccctcctcgcgatacaaaaggcgcagagagaaagtgaggagcggcccccgtaccgcatcccaccaccccggcccgaacccctgcacgccgcaaccgcccgcccgcccgcctgcctgcccggccgcgatgatccagctcctcttcaccttgctgggcgcggaggcgggcgtggcggccgtcctgctcttcaagacgccgctgcggaagctggcgatgctcgcgctcgaccgcctcaagcgcggccgggcccccgtcatggtgcgcaccgtcgccgccaccgtcctcgtcgtcctcgcctccagcctccacagcatggccaagatccacggccacgccggcgccggcgagctcgacgcgcccggcgcgctcagccccaccgaccaggtcctcctcgcccgccacctcctcgaggcctccctcatgggatatattttattccttgctctcgtcattgaccggctacacagctacatcagagagatgcgagggctgaagaagaacctggaggctgtgtcgaagcagaacaagaccttagaagaagcaaaatctggaaggtccgacgagagcaagccacaccacaacgacattgcttcgctgaacgaggagatcaagaagctgaagcggcaactgaaagaaaaggcggaggaggccaaggatgcagaggccaaagcactagctgcccagacgcagtctgaaggtcttgcgcgcaaatatgaccgcctgctggaggacaacaagcatctccatgaccagctgcagtcaggagacatcccgctgtcgcgttcggatggcaagaagaatgcctaagttgtggttggtcctcatcaagctagtcggaaactcctgcaagcctgaagacagttgcgagatgaaaatgacgtcggttactgataatcagccatcggagtagtaccatctttacataaatgttctggtactgtgtaccagaacgcaaaaatatcactcaacctcttacagccaggttagccgagactatgcgaagatgctcgcctgtaaacatctgatggtgttcgactgaatgttcttagtctgatcaagtcgtagttagaacatgagaggtattcatatctcgacaaatctggctgctggttgtcttcgccatcgacttacttgtccaaacatagagaagccgtcattgaactctggttaccctttcataaatttcggct

SEQ ID NO: 66924 - protein, 299 aa, Triticum aestivum
  peptide (1)..(299): Ceres Seq. ID no. 15220263
  misc_feature (77)..(270): Pfam Name: B-cell receptor-associated protein 31-like Pfam Description: B-cell receptor-associated protein 31-like
  misc_feature (74)..(208): Homolog of NCBI NO: 18402620 NR Description: expressed protein [Arabidopsis thaliana]
  misc_feature (74)..(232): Homolog of NCBI NO: 30682503 NR Description: expressed protein [Arabidopsis thaliana]
  misc_feature (74)..(286): Homolog of NCBI NO: 15231412 NR Description: expressed protein [Arabidopsis thaliana]
  misc_feature (74)..(283): Homolog of NCBI NO: 15239667 NR Description: hypothetical protein [Arabidopsis thaliana]
  misc_feature (74)..(283): Homolog of NCBI NO: 34897474 NR Description: unknown protein [Oryza sativa (japonica
  misc_feature (74)..(298): Homolog of NCBI NO: 22655198 NR Description: unknown protein [Arabidopsis thaliana]
  misc_feature (74)..(296): Homolog of NCBI NO: 9759015 NR Description: gene_id:K16E1.4~unknown protein [Arabidopsis
  misc_feature (74)..(297): Homolog of NCBI NO: 18422225 NR Description: expressed protein [Arabidopsis thaliana]
  misc_feature (74)..(297): Homolog of NCBI NO: 21553655 NR Description: unknown [Arabidopsis thaliana]
IAKDSILLPLRLRCSKFQIPKPTPEARKSTAPSSRYKRRREKVRSGPRTASHHPGPNPCTPQPPARPPACPAAMIQLLFTLLGAEAGVAAVLLFKTPLRKLAMLALDRLKRGRAPVMVRTVAATVLVVLASSLHSMAKIHGHAGAGELDAPGALSPTDQVLLARHLLEASLMGYILFLALVIDRLHSYIREMRGLKKNLEAVSKQNKTLEEAKSGRSDESKPHHNDIASLNEEIKKLKRQLKEKAEEAKDAEAKALAAQTQSEGLARKYDRLLEDNKHLHDQLQSGDIPLSRSDGKKNA

SEQ ID NO: 66925 - protein, 226 aa, Triticum aestivum
  peptide (1)..(226): Ceres Seq. ID no. 15220264
  misc_feature (4)..(197): Pfam Name: B-cell receptor-associated protein 31-like Pfam Description: B-cell receptor-associated protein 31-like
  misc_feature (1)..(135): Homolog of NCBI NO: 18402620 NR Description: expressed protein [Arabidopsis thaliana]
  misc_feature (1)..(159): Homolog of NCBI NO: 30682503 NR Description: expressed protein [Arabidopsis thaliana]
  misc_feature (1)..(213): Homolog of NCBI NO: 15231412 NR Description: expressed protein [Arabidopsis thaliana]
  misc_feature (1)..(210): Homolog of NCBI NO: 15239667 NR Description: hypothetical protein [Arabidopsis thaliana]
  misc_feature (1)..(210): Homolog of NCBI NO: 34897474 NR Description: unknown protein [Oryza sativa (japonica
  misc_feature (1)..(225): Homolog of NCBI NO: 22655198 NR Description: unknown protein [Arabidopsis thaliana]
  misc_feature (1)..(223): Homolog of NCBI NO: 9759015 NR Description: gene_id:K16E1.4~unknown protein [Arabidopsis
  misc_feature (1)..(224): Homolog of NCBI NO: 18422225 NR Description: expressed protein [Arabidopsis thaliana]
  misc_feature (1)..(224): Homolog of NCBI NO: 21553655 NR Description: unknown [Arabidopsis thaliana]
MIQLLFTLLGAEAGVAAVLLFKTPLRKLAMLALDRLKRGRAPVMVRTVAATVLVVLASSLHSMAKIHGHAGAGELDAPGALSPTDQVLLARHLLEASLMGYILFLALVIDRLHSYIREMRGLKKNLEAVSKQNKTLEEAKSGRSDESKPHHNDIASLNEEIKKLKRQLKEKAEEAKDAEAKALAAQTQSEGLARKYDRLLEDNKHLHDQLQSGDIPLSRSDGKKNA

SEQ ID NO: 66926 - protein, 197 aa, Triticum aestivum
  peptide (1)..(197): Ceres Seq. ID no. 15220265
  misc_feature (1)..(168): Pfam Name: B-cell receptor-associated protein 31-like Pfam Description: B-cell receptor-associated protein 31-like
  misc_feature (1)..(106): Homolog of NCBI NO: 18402620 NR Description: expressed protein [Arabidopsis thaliana]
  misc_feature (1)..(130): Homolog of NCBI NO: 30682503 NR Description: expressed protein [Arabidopsis thaliana]
  misc_feature (1)..(184): Homolog of NCBI NO: 15231412 NR Description: expressed protein [Arabidopsis thaliana]
  misc_feature (1)..(181): Homolog of NCBI NO: 15239667 NR Description: hypothetical protein [Arabidopsis thaliana]
  misc_feature (1)..(181): Homolog of NCBI NO: 34897474 NR Description: unknown protein [Oryza sativa (japonica
  misc_feature (1)..(196): Homolog of NCBI NO: 22655198 NR Description: unknown protein [Arabidopsis thaliana]
  misc_feature (1)..(194): Homolog of NCBI NO: 9759015 NR Description: gene_id:K16E1.4~unknown protein [Arabidopsis
  misc_feature (1)..(195): Homolog of NCBI NO: 18422225 NR Description: expressed protein [Arabidopsis thaliana]
  misc_feature (1)..(195): Homolog of NCBI NO: 21553655 NR Description: unknown [Arabidopsis thaliana]
MLALDRLKRGRAPVMVRTVAATVLVVLASSLHSMAKIHGHAGAGELDAPGALSPTDQVLLARHLLEASLMGYILFLALVIDRLHSYIREMRGLKKNLEAVSKQNKTLEEAKSGRSDESKPHHNDIASLNEEIKKLKRQLKEKAEEAKDAEAKALAAQTQSEGLARKYDRLLEDNKHLHDQLQSGDIPLSRSDGKKNA

SEQ ID NO: 66927 - DNA, 578 bp, Triticum aestivum
  misc_feature (1)..(578): Ceres Seq. ID no. 12621638
attagacacacttaaaccctcctagctcactctcaccagcagtacctactagctagccggcagcaatggcgtccaggaccttctcggcggcgtgcctgctggcgctgctggtggccaacacgttcctcgccggcgatgcctgcggcagctgcaagcaccaaaccccgccgccggcctccccgtccccgcccccaccatcgccgtctacgacgccgtgcccacctccttcgtcaggcggtgggcgcgccggcgggggtgctgggcgggctggcgctggcggaagggccgagctacctggaggacaagatcgaggacgacgtggcggagaaggtggaggacgtcctggccggcggcggctacgacgacgacgactactagagaaaacgaaaacgatgggcacctcctgagagattgttgtacacgctggtgttgactagccagctatcttctgtacttttattatgaccggatttgttgaataaatacgggaaacaacttaacatcgagtgtagcagtacatccaatcgaaatgttttacgtggccttggccccaacaaattgttgaacacagcaacgtt

SEQ ID NO: 66928 - protein, 113 aa, Triticum aestivum
  peptide (1)..(113): Ceres Seq. ID no. 12621639
  misc_feature (35)..(90): Pfam Name: TT viral ORF2 Pfam Description: TT viral ORF2
  misc_feature (1)..(56): Homolog of NCBI NO: 7488729 NR Description: CIC protein, cold-inducible - alfalfa
  misc_feature (25)..(95): Homolog of NCBI NO: 102424 NR Description: collagen-related protein 1 precursor - Hydra
  misc_feature (23)..(94): Homolog of NCBI NO: 7510074 NR Description: hypothetical protein Y50E8A.g - Caenorhabditis
  misc_feature (34)..(59): Homolog of NCBI NO: 15234820 NR Description: extensin like protein; protein id: At4g16140.1
  misc_feature (1)..(93): Homolog of NCBI NO: 7510074 NR Description: hypothetical protein Y50E8A.g - Caenorhabditis
MASRTFSAACLLALLVANTFLAGDACGSCKHQTPPPASPSPPPPSPSTTPCPPPSSGGGRAGGGAGRAGAGGRAELPGGQDRGRRGGEGGGRPGRRRLRRRRLLEKTKTMGTS

SEQ ID NO: 66929 - protein, 80 aa, Triticum aestivum
  peptide (1)..(80): Ceres Seq. ID no. 12621640
MPAAAASTKPRRRPPRPRPHHRRLRRRAHLLRQAVGAPAGVLGGLALAEGPSYLEDKIEDDVAEKVEDVLAGGGYDDDDY

SEQ ID NO: 66930 - DNA, 1127 bp, Triticum aestivum
  misc_feature (1)..(1127): Ceres Seq. ID no. 15179896
caaaccacacatgacacgccatctcccacatctctctccacaaaagacaggcagcctgcagttgcacagcctttccctccctctctcgcgtatcatctccgtcgacctctctccacaaagctagctagctcttgagtcttgagttcgtgtgaatttgccaagcataaagcacgagctagctctaggctgtcttgctgcctacttggtatacttgatatatacatacatacacaccagagagggagagagagaaaggggtagtcatgtgcgactacttcttgaagagggctgagggccaccagcaggccggagacctcaccgacatcgtccgagccggcggggccatgccggctggctctgcggatcccccgtcgacggccaccgagtggctgcagctgccggctgacccgatcctcttcccgctgccccagacgtcgtcctcggacggtgctgggccgagcagcgcagacgctctcggtgacccgttctccggcctcccggatgccttcagcaccgactacccctcctcctccggcagcgccgccgccgatttcttcgacgccgtccaggacgcgatgggtgtcggcatggccaagcaggtcggcttcgtcgacacgaccggctgcggcggcggtggaacaactgccggtgctggtggcgggttcctggacatgaggaatcaccatatgtttccaggggagatgccgatgcgcgggctgtcgccgtacgcgctgatgggcggtggcgcggcgaagctcggcgtgccgatggccgggcacgggctggcggctggcccgtgcgcgttcgacgccgtcgcagggctgcagatgtcgtcctcaccgcgtggcggggggatcaagcgcaggttcggcaccggccatcgttagctagctgtctgttcagtcagatctacacaagtgcgccttaatttcttcgattcctcccgacaagtgtaattaagcacggagttccttgtcgtcggggcactgttcagggtttcgtaatttagggaaagtttgcagctccatttcctcctaccgtgcttagtttttcctcattctgcaactcccaacaatgtaaggatcgagatgaaagaagaaacttaaatgcatcgccagctttgggac

SEQ ID NO: 66931 - protein, 207 aa, Triticum aestivum
  peptide (1)..(207): Ceres Seq. ID no. 15179897
  misc_feature (7)..(168): Homolog of NCBI NO: 38567968 NR Description: OSJNBa0093F12.9 [Oryza sativa (japonica
MCDYFLKRAEGHQQAGDLTDIVRAGGAMPAGSADPPSTATEWLQLPADPILFPLPQTSSSDGAGPSSADALGDPFSGLPDAFSTDYPSSSGSAAADFFDAVQDAMGVGMAKQVGFVDTTGCGGGGTTAGAGGGFLDMRNHHMFPGEMPMRGLSPYALMGGGAAKLGVPMAGHGLAAGPCAFDAVAGLQMSSSPRGGGIKRRFGTGHR

SEQ ID NO: 66932 - protein, 180 aa, Triticum aestivum
  peptide (1)..(180): Ceres Seq. ID no. 15179898
  misc_feature (1)..(141): Homolog of NCBI NO: 38567968 NR Description: OSJNBa0093F12.9 [Oryza sativa (japonica
MPAGSADPPSTATEWLQLPADPILFPLPQTSSSDGAGPSSADALGDPFSGLPDAFSTDYPSSSGSAAADFFDAVQDAMGVGMAKQVGFVDTTGCGGGGTTAGAGGGFLDMRNHHMFPGEMPMRGLSPYALMGGGAAKLGVPMAGHGLAAGPCAFDAVAGLQMSSSPRGGGIKRRFGTGHR

SEQ ID NO: 66933 - protein, 103 aa, Triticum aestivum
  peptide (1)..(103): Ceres Seq. ID no. 15179899
  misc_feature (1)..(64): Homolog of NCBI NO: 38567968 NR Description: OSJNBa0093F12.9 [Oryza sativa (japonica
MGVGMAKQVGFVDTTGCGGGGTTAGAGGGFLDMRNHHMFPGEMPMRGLSPYALMGGGAAKLGVPMAGHGLAAGPCAFDAVAGLQMSSSPRGGGIKRRFGTGHR

SEQ ID NO: 66934 - DNA, 1489 bp, Triticum aestivum
  misc_feature (1)..(1489): Ceres Seq. ID no. 15170690
cgcagaaaggcagaagctccttcctcccccaaaaaaagcgagacgacgggacgagacagcgagggcgagacagacagacaggaggccgaggccgaggccgaggcgcgacccacccaagcaagccctaggcgacgagacgcgacggcgacgacggcggcggcgaaggcgtatcccgcgtccgcgtgcccggattcggggctcatccggtcggctcggccatgtccaccaagagggttctttgcaagttcttcatgcatggtgcttgcttgaaaggagagtattgtgagttctcccacgactggagtgaccaagcaaataatgtttgcacgttttaccagagaggctcatgctcttatggtaaccgttgcagatatgaccatgtcaaggtttctcgtaacaacccagtgcctccactaccatcatcaagtaccgcaacacgtaattccccacttcgcccgccaccatcatcaagtactgcgacacatgttgcatctacatctccacaacttttaagttctggacgtcctcttcacttgggacaccaaacaaattcaagcaaccaacggcaacagatatctatggataagctggcagtttctgaaagtaagcctgcatggaggaatgaggtccaacttaacagtgtatcagaggatgggattggctggtcatccattcaaactgcgcaaaaccaaacttccatgaaacttgctgatatgccaatttgttcttttgctgctggtggtaactgcccgtatggggaagagtgtcctcacatgcatggggatttgtgtgcgttctgtgggaaaatgtgcttgcatccttatcgtcctgatgagaggcaggagcatatcaagctatgtgaaaagaaccacaagcgtcttgaggctttgaaacgtagccaagaaatagaatgcagtgtctgcttggaccgcgtgctctcaaagtctactgctgcagaaaggaaatttggactattatctgaatgtgatcatcccttctgtatttcatgcataagaaattggcgtggcaactctcctacatctggtatggatgtgaactcagcactgagagcttgcccaatatgccgcaaactttcgtactatgtcattccaagtgttctttggtacttctcgaaagaggaaaagttggagatcactgaaaactacaaagcaaagctcaagtcaatagattgcaagtacttcgatttcggaacgggcacttgccccttcgggacaagctgtttctacaagcatgcttacagagatggccgcttggaagaagtcgtattgcgacatcttgattgtgatgatggaagtacacttattgctaagaacattaggttgtcagacttcctcggccggttgcatctttagggacctgcttcatatatatcgaattattccgaagacatcagtttaaatcgaggcatcttggaaaactgctgctttatctccaatttttttggtggttgctttgtcgccaaacatac

SEQ ID NO: 66935 - protein, 384 aa, Triticum aestivum
  peptide (1)..(384): Ceres Seq. ID no. 15170691
  misc_feature (232)..(289): Pfam Name: Zinc finger, C3HC4 type (RING finger) Pfam Description: Zinc finger, C3HC4 type (RING finger)
  misc_feature (3)..(86): Homolog of NCBI NO: 22255324 NR Description: gene encoding protein featuring ring-finger
  misc_feature (168)..(354): Homolog of NCBI NO: 37590960 NR Description: Makorin1 [Seriola quinqueradiata]
  misc_feature (168)..(354): Homolog of NCBI NO: 22255324 NR Description: gene encoding protein featuring ring-finger
  misc_feature (1)..(379): Homolog of NCBI NO: 12963621 NR Description: makorin, ring finger protein, 2
  misc_feature (1)..(379): Homolog of NCBI NO: 34858337 NR Description: similar to makorin, ring finger protein, 2
  misc_feature (1)..(379): Homolog of NCBI NO: 12847323 NR Description: unnamed protein product [Mus musculus]
  misc_feature (1)..(379): Homolog of NCBI NO: 23308621 NR Description: makorin, ring finger protein, 2 [Danio rerio]
  misc_feature (1)..(379): Homolog of NCBI NO: 40807149 NR Description: Mkrn2 protein [Danio rerio]
  misc_feature (5)..(83): Homolog of NCBI NO: 30680549 NR Description: zinc finger domain-containing protein
  misc_feature (165)..(384): Homolog of NCBI NO: 30680549 NR Description: zinc finger domain-containing protein
MSTKRVLCKFFMHGACLKGEYCEFSHDWSDQANNVCTFYQRGSCSYGNRCRYDHVKVSRNNPVPPLPSSSTATRNSPLRPPPSSSTATHVASTSPQLLSSGRPLHLGHQTNSSNQRQQISMDKLAVSESKPAWRNEVQLNSVSEDGIGWSSIQTAQNQTSMKLADMPICSFAAGGNCPYGEECPHMHGDLCAFCGKMCLHPYRPDERQEHIKLCEKNHKRLEALKRSQEIECSVCLDRVLSKSTAAERKFGLLSECDHPFCISCIRNWRGNSPTSGMDVNSALRACPICRKLSYYVIPSVLWYFSKEEKLEITENYKAKLKSIDCKYFDFGTGTCPFGTSCFYKHAYRDGRLEEVVLRHLDCDDGSTLIAKNIRLSDFLGRLHL

SEQ ID NO: 66936 - protein, 373 aa, Triticum aestivum
  peptide (1)..(373): Ceres Seq. ID no. 15170692
  misc_feature (221)..(278): Pfam Name: Zinc finger, C3HC4 type (RING finger) Pfam Description: Zinc finger, C3HC4 type (RING finger)
  misc_feature (1)..(75): Homolog of NCBI NO: 22255324 NR Description: gene encoding protein featuring ring-finger
  misc_feature (157)..(343): Homolog of NCBI NO: 37590960 NR Description: Makorin1 [Seriola quinqueradiata]
  misc_feature (157)..(343): Homolog of NCBI NO: 22255324 NR Description: gene encoding protein featuring ring-finger
  misc_feature (1)..(368): Homolog of NCBI NO: 12963621 NR Description: makorin, ring finger protein, 2
  misc_feature (1)..(368): Homolog of NCBI NO: 34858337 NR Description: similar to makorin, ring finger protein, 2
  misc_feature (1)..(368): Homolog of NCBI NO: 12847323 NR Description: unnamed protein product [Mus musculus]
  misc_feature (1)..(368): Homolog of NCBI NO: 23308621 NR Description: makorin, ring finger protein, 2 [Danio rerio]
  misc_feature (1)..(368): Homolog of NCBI NO: 40807149 NR Description: Mkrn2 protein [Danio rerio]
  misc_feature (1)..(72): Homolog of NCBI NO: 30680549 NR Description: zinc finger domain-containing protein
  misc_feature (154)..(373): Homolog of NCBI NO: 30680549 NR Description: zinc finger domain-containing protein
MHGACLKGEYCEFSHDWSDQANNVCTFYQRGSCSYGNRCRYDHVKVSRNNPVPPLPSSSTATRNSPLRPPPSSSTATHVASTSPQLLSSGRPLHLGHQTNSSNQRQQISMDKLAVSESKPAWRNEVQLNSVSEDGIGWSSIQTAQNQTSMKLADMPICSFAAGGNCPYGEECPHMHGDLCAFCGKMCLHPYRPDERQEHIKLCEKNHKRLEALKRSQEIECSVCLDRVLSKSTAAERKFGLLSECDHPFCISCIRNWRGNSPTSGMDVNSALRACPICRKLSYYVIPSVLWYFSKEEKLEITENYKAKLKSIDCKYFDFGTGTCPFGTSCFYKHAYRDGRLEEVVLRHLDCDDGSTLIAKNIRLSDFLGRLHL

SEQ ID NO: 66937 - protein, 264 aa, Triticum aestivum
  peptide (1)..(264): Ceres Seq. ID no. 15170693
  misc_feature (112)..(169): Pfam Name: Zinc finger, C3HC4 type (RING finger) Pfam Description: Zinc finger, C3HC4 type (RING finger)
  misc_feature (1)..(259): Homolog of NCBI NO: 32880199 NR Description: makorin, ring finger protein, 2 [Homo sapiens]
  misc_feature (1)..(259): Homolog of NCBI NO: 8714513 NR Description: HSPC070 [Homo sapiens]
  misc_feature (48)..(234): Homolog of NCBI NO: 37590960 NR Description: Makorin1 [Seriola quinqueradiata]
  misc_feature (48)..(234): Homolog of NCBI NO: 22255324 NR Description: gene encoding protein featuring ring-finger
  misc_feature (1)..(259): Homolog of NCBI NO: 12963621 NR Description: makorin, ring finger protein, 2
  misc_feature (1)..(259): Homolog of NCBI NO: 34858337 NR Description: similar to makorin, ring finger protein, 2
  misc_feature (1)..(259): Homolog of NCBI NO: 12847323 NR Description: unnamed protein product [Mus musculus]
  misc_feature (1)..(259): Homolog of NCBI NO: 23308621 NR Description: makorin, ring finger protein, 2 [Danio rerio]
  misc_feature (1)..(259): Homolog of NCBI NO: 40807149 NR Description: Mkrn2 protein [Danio rerio]
  misc_feature (45)..(264): Homolog of NCBI NO: 30680549 NR Description: zinc finger domain-containing protein
MDKLAVSESKPAWRNEVQLNSVSEDGIGWSSIQTAQNQTSMKLADMPICSFAAGGNCPYGEECPHMHGDLCAFCGKMCLHPYRPDERQEHIKLCEKNHKRLEALKRSQEIECSVCLDRVLSKSTAAERKFGLLSECDHPFCISCIRNWRGNSPTSGMDVNSALRACPICRKLSYYVIPSVLWYFSKEEKLEITENYKAKLKSIDCKYFDFGTGTCPFGTSCFYKHAYRDGRLEEVVLRHLDCDDGSTLIAKNIRLSDFLGRLHL

SEQ ID NO: 66938 - DNA, 1495 bp, Triticum aestivum
  misc_feature (1)..(1495): Ceres Seq. ID no. 13659881
ataaatgtaaatatttctattgatggaccatcctgatttattgggctggctacgccactggcaggggggacgacctctcgctcggcttcaatgccggcgccgccgcggccgcggccgcggccgcctccggcgccgcgctgggggccgggctctggggcccggcgtccgcgtcctcctcgtcccccgcctcgcgccaggcggccctgaactacggcatggcggccggcgacgtggggatggtggtggtcgcccctgcggcctcgttccaccacacgcaccaccatcaccaccaccacgacgcggccgccgcggccgctgcctccgacgccatcttcccgctgctctccgcgggctcctgcgtgctcgaccccgaggcggccaaggccgcggccgccagcggcggcatccagttctggcagtccgcgcagcaccatcagcagcagcactcgccgtcrgccgcgggcggcggcggcggcaaccctaaccctagcctcggccccttctacctcaagaagcccttcccgatgctcgacaccggcggcgacgggtcctccggctccggcaccaccacctgccaggactgcggcaaccaggccaagaaggactgcacccacagccgctgccgcacctgctgcaagagccgcggcttcgactgctccacgcacgtcaagagcacctgggtccccgccgcccgccgccgcgagcgccagcacctcggcggctccgcctcgtcccccgccaccgcctccaccgccgcgggatcgaagaagcctcgcctcctctcctcccagcaggccaccacgtcgtacacctccacctccaacgccaccacgccgcgcagctacgacaccacctccagccatcaagacgcatcgttcagggggaacctgccgcggcaggtgcgcgcgccggcggtgttcaggtgcgtgcgcgtgacgtccgtcgacgacggcgaggacgagtacgcgtaccaggccacggtgaccatcaacggccacgtcttcaagggcttcctctacgaccagggcgtggacgacggccgcgccagcaatgacatcgactcgagcaccggcggcgccgtgcccaacatgtccgagctccacctcgggggcggcggcaatgccgcgaggggaggcgggggttcctcctcgatggcgccctccgacatgtacggcggcggtggcgccggaggagcaggcggagggggaggaggccagcacatactcggcggcgggtccagctatggtaacaccatgaactgagccgagctgctagaagagtaaggtcacatagtagatcattactacagtaccattctttcctttcttctcttcattgctagtaagtacaaacctgtcaaccctctcatggccggggtgcaatgcaatgcatggtgttcgccattaatttgttcatgctgtatgacatcaagtgttaatcgttggaacgggaggggrgttaaaaaaaaaaaaaaaaaagcttatcgataccgtcg

SEQ ID NO: 66939 - protein, 348 aa, Triticum aestivum
  peptide (1)..(348): Ceres Seq. ID no. 15220681
  misc_feature (111)..(275): Pfam Name: Domain of unknown function (DUF702) Pfam Description: Domain of unknown function (DUF702)
  misc_feature (104)..(238): Homolog of NCBI NO: 15230389 NR Description: expressed protein [Arabidopsis thaliana]
  misc_feature (226)..(274): Homolog of NCBI NO: 15224110 NR Description: expressed protein [Arabidopsis thaliana]
  misc_feature (112)..(222): Homolog of NCBI NO: 15224110 NR Description: expressed protein [Arabidopsis thaliana]
  misc_feature (65)..(271): Homolog of NCBI NO: 15222285 NR Description: hypothetical protein [Arabidopsis thaliana]
  misc_feature (107)..(285): Homolog of NCBI NO: 15223669 NR Description: hypothetical protein [Arabidopsis thaliana]
  misc_feature (67)..(271): Homolog of NCBI NO: 15239350 NR Description: zinc finger protein SHI-related [Arabidopsis
  misc_feature (112)..(322): Homolog of NCBI NO: 15234365 NR Description: expressed protein [Arabidopsis thaliana]
  misc_feature (4)..(330): Homolog of NCBI NO: 882341 NR Description: LRP1
  misc_feature (4)..(330): Homolog of NCBI NO: 18416839 NR Description: lateral root primordia (LRP1) [Arabidopsis
  misc_feature (5)..(348): Homolog of NCBI NO: 34906658 NR Description: putative LRP(lateral root primordia) 1
  misc_feature (80)..(80): Xaa is any aa, unknown or other
MAAGDVGMVVVAPAASFHHTHHHHHHHDAAAAAAASDAIFPLLSAGSCVLDPEAAKAAAASGGIQFWQSAQHHQQQHSPXAAGGGGGNPNPSLGPFYLKKPFPMLDTGGDGSSGSGTTTCQDCGNQAKKDCTHSRCRTCCKSRGFDCSTHVKSTWVPAARRRERQHLGGSASSPATASTAAGSKKPRLLSSQQATTSYTSTSNATTPRSYDTTSSHQDASFRGNLPRQVRAPAVFRCVRVTSVDDGEDEYAYQATVTINGHVFKGFLYDQGVDDGRASNDIDSSTGGAVPNMSELHLGGGGNAARGGGGSSSMAPSDMYGGGGAGGAGGGGGGQHILGGGSSYGNTMN

SEQ ID NO: 66940 - protein, 341 aa, Triticum aestivum
  peptide (1)..(341): Ceres Seq. ID no. 15220682
  misc_feature (104)..(268): Pfam Name: Domain of unknown function (DUF702) Pfam Description: Domain of unknown function (DUF702)
  misc_feature (97)..(231): Homolog of NCBI NO: 15230389 NR Description: expressed protein [Arabidopsis thaliana]
  misc_feature (219)..(267): Homolog of NCBI NO: 15224110 NR Description: expressed protein [Arabidopsis thaliana]
  misc_feature (105)..(215): Homolog of NCBI NO: 15224110 NR Description: expressed protein [Arabidopsis thaliana]
  misc_feature (58)..(264): Homolog of NCBI NO: 15222285 NR Description: hypothetical protein [Arabidopsis thaliana]
  misc_feature (100)..(278): Homolog of NCBI NO: 15223669 NR Description: hypothetical protein [Arabidopsis thaliana]
  misc_feature (60)..(264): Homolog of NCBI NO: 15239350 NR Description: zinc finger protein SHI-related [Arabidopsis
  misc_feature (105)..(315): Homolog of NCBI NO: 15234365 NR Description: expressed protein [Arabidopsis thaliana]
  misc_feature (1)..(323): Homolog of NCBI NO: 882341 NR Description: LRP1
  misc_feature (1)..(323): Homolog of NCBI NO: 18416839 NR Description: lateral root primordia (LRP1) [Arabidopsis
  misc_feature (1)..(341): Homolog of NCBI NO: 34906658 NR Description: putative LRP(lateral root primordia) 1
  misc_feature (73)..(73): Xaa is any aa, unknown or other
MVVVAPAASFHHTHHHHHHHDAAAAAAASDAIFPLLSAGSCVLDPEAAKAAAASGGIQFWQSAQHHQQQHSPXAAGGGGGNPNPSLGPFYLKKPFPMLDTGGDGSSGSGTTTCQDCGNQAKKDCTHSRCRTCCKSRGFDCSTHVKSTWVPAARRRERQHLGGSASSPATASTAAGSKKPRLLSSQQATTSYTSTSNATTPRSYDTTSSHQDASFRGNLPRQVRAPAVFRCVRVTSVDDGEDEYAYQATVTINGHVFKGFLYDQGVDDGRASNDIDSSTGGAVPNMSELHLGGGGNAARGGGGSSSMAPSDMYGGGGAGGAGGGGGGQHILGGGSSYGNTMN

SEQ ID NO: 66941 - protein, 245 aa, Triticum aestivum
  peptide (1)..(245): Ceres Seq. ID no. 15220683
  misc_feature (8)..(172): Pfam Name: Domain of unknown function (DUF702) Pfam Description: Domain of unknown function (DUF702)
  misc_feature (1)..(135): Homolog of NCBI NO: 15230389 NR Description: expressed protein [Arabidopsis thaliana]
  misc_feature (123)..(171): Homolog of NCBI NO: 15224110 NR Description: expressed protein [Arabidopsis thaliana]
  misc_feature (9)..(119): Homolog of NCBI NO: 15224110 NR Description: expressed protein [Arabidopsis thaliana]
  misc_feature (1)..(168): Homolog of NCBI NO: 15222285 NR Description: hypothetical protein [Arabidopsis thaliana]
  misc_feature (4)..(182): Homolog of NCBI NO: 15223669 NR Description: hypothetical protein [Arabidopsis thaliana]
  misc_feature (1)..(168): Homolog of NCBI NO: 15239350 NR Description: zinc finger protein SHI-related [Arabidopsis
  misc_feature (9)..(219): Homolog of NCBI NO: 15234365 NR Description: expressed protein [Arabidopsis thaliana]
  misc_feature (1)..(227): Homolog of NCBI NO: 882341 NR Description: LRP1
  misc_feature (1)..(227): Homolog of NCBI NO: 18416839 NR Description: lateral root primordia (LRP1) [Arabidopsis
  misc_feature (1)..(245): Homolog of NCBI NO: 34906658 NR Description: putative LRP(lateral root primordia) 1
MLDTGGDGSSGSGTTTCQDCGNQAKKDCTHSRCRTCCKSRGFDCSTHVKSTWVPAARRRERQHLGGSASSPATASTAAGSKKPRLLSSQQATTSYTSTSNATTPRSYDTTSSHQDASFRGNLPRQVRAPAVFRCVRVTSVDDGEDEYAYQATVTINGHVFKGFLYDQGVDDGRASNDIDSSTGGAVPNMSELHLGGGGNAARGGGGSSSMAPSDMYGGGGAGGAGGGGGGQHILGGGSSYGNTMN

SEQ ID NO: 66942 - DNA, 1117 bp, Triticum aestivum
  misc_feature (1)..(1117): Ceres Seq. ID no. 15179900
acactggtctctcacgcacgcacgcagctgccaacaccagccatcgtcaaagcgctagctccaccggaagccatggcgcgcgccttcgtgcgctccatctccttccctctcagcccctcgaggtctcccaaggcgcgcgctccctccttgtcgtaccacgggcggtccgtgagcctgccatgccgctcgcacccgatcttggcgcacctccacacccacatccgcgccgtgcgcgcctgggcgcagcagggcccagcggcgttgttctcctccgtcgcagcggggctcgcgcacgttgatgcgctccacaccgccgtcggcgacctgctcgacctgcccgaggcccaggacgcgctctccggcgccggcggcagcgtggaccgcctcctcgactccttcctccgcctcgccgacgcgcacggctgtttccaggaggccgtggttgcgctcaagcatgacgtggccgaggcgctggccgccgtgcgccgtcgcgacggtgcacgcctggcatcggccgtgcgggcgcagcgcagggccggcaaggagctcgcccgcctcgccgccgcggccaaagagtgtgccagccgtccctcgcgcctgagcatcctcggaggtggccaaggcagcgcggcggaggtggaggtgacggggctgctgatggagtcggccgcggcgacggcgtcggcgtctgccgcgctgttcggggccgtggcggccatgtccgggtccgtggaggcggagtcgtgctcgtgcaagggcacggcggcgctggtgtgcctcgtgaagaagagcaagaagaagtcgtcggcgccggccgggtgtggggaggaggggatggcggtggcggccgtggcggagaggctggaggagctggaggagtgcatcgaggagctggaggccgggagcgagaaggtgttccggagcctggtgcagaccagggtcgcgctcctcaacatccacacgctccacatcttctagctttactactatcactatcatcgatgatccatccatcttaattctagtacaaatgaaattagtgctagcaatcctgtgtaactgtaaaaaaaagttaagtagatgatgaatagaagaaggaatttgtgcaactcctgcg

SEQ ID NO: 66943 - protein, 325 aa, Triticum aestivum
  peptide (1)..(325): Ceres Seq. ID no. 15179901
  misc_feature (95)..(319): Pfam Name: Arabidopsis protein of unknown function Pfam Description: Arabidopsis protein of unknown function
  misc_feature (25)..(321): Homolog of NCBI NO: 15222989 NR Description: expressed protein [Arabidopsis thaliana]
  misc_feature (18)..(321): Homolog of NCBI NO: 6573720 NR Description: T23E18.17 [Arabidopsis thaliana]
  misc_feature (45)..(321): Homolog of NCBI NO: 37536548 NR Description: hypothetical protein [Oryza sativa (japonica
  misc_feature (53)..(320): Homolog of NCBI NO: 37535956 NR Description: hypothetical protein [Oryza sativa (japonica
  misc_feature (55)..(320): Homolog of NCBI NO: 37535958 NR Description: hypothetical protein [Oryza sativa (japonica
  misc_feature (277)..(319): Homolog of NCBI NO: 38345858 NR Description: OSJNBa0084K11.22 [Oryza sativa (japonica
  misc_feature (31)..(272): Homolog of NCBI NO: 38345858 NR Description: OSJNBa0084K11.22 [Oryza sativa (japonica
TLVSHARTQLPTPAIVKALAPPEAMARAFVRSISFPLSPSRSPKARAPSLSYHGRSVSLPCRSHPILAHLHTHIRAVRAWAQQGPAALFSSVAAGLAHVDALHTAVGDLLDLPEAQDALSGAGGSVDRLLDSFLRLADAHGCFQEAVVALKHDVAEALAAVRRRDGARLASAVRAQRRAGKELARLAAAAKECASRPSRLSILGGGQGSAAEVEVTGLLMESAAATASASAALFGAVAAMSGSVEAESCSCKGTAALVCLVKKSKKKSSAPAGCGEEGMAVAAVAERLEELEECIEELEAGSEKVFRSLVQTRVALLNIHTLHIF

SEQ ID NO: 66944 - protein, 301 aa, Triticum aestivum
  peptide (1)..(301): Ceres Seq. ID no. 15179902
  misc_feature (71)..(295): Pfam Name: Arabidopsis protein of unknown function Pfam Description: Arabidopsis protein of unknown function
  misc_feature (1)..(297): Homolog of NCBI NO: 15222989 NR Description: expressed protein [Arabidopsis thaliana]
  misc_feature (1)..(297): Homolog of NCBI NO: 6573720 NR Description: T23E18.17 [Arabidopsis thaliana]
  misc_feature (21)..(297): Homolog of NCBI NO: 37536548 NR Description: hypothetical protein [Oryza sativa (japonica
  misc_feature (29)..(296): Homolog of NCBI NO: 37535956 NR Description: hypothetical protein [Oryza sativa (japonica
  misc_feature (31)..(296): Homolog of NCBI NO: 37535958 NR Description: hypothetical protein [Oryza sativa (japonica
  misc_feature (253)..(295): Homolog of NCBI NO: 38345858 NR Description: OSJNBa0084K11.22 [Oryza sativa (japonica
  misc_feature (7)..(248): Homolog of NCBI NO: 38345858 NR Description: OSJNBa0084K11.22 [Oryza sativa (japonica
MARAFVRSISFPLSPSRSPKARAPSLSYHGRSVSLPCRSHPILAHLHTHIRAVRAWAQQGPAALFSSVAAGLAHVDALHTAVGDLLDLPEAQDALSGAGGSVDRLLDSFLRLADAHGCFQEAVVALKHDVAEALAAVRRRDGARLASAVRAQRRAGKELARLAAAAKECASRPSRLSILGGGQGSAAEVEVTGLLMESAAATASASAALFGAVAAMSGSVEAESCSCKGTAALVCLVKKSKKKSSAPAGCGEEGMAVAAVAERLEELEECIEELEAGSEKVFRSLVQTRVALLNIHTLHIF

SEQ ID NO: 66945 - DNA, 913 bp, Triticum aestivum
  misc_feature (1)..(913): Ceres Seq. ID no. 15179903
aagctagctagcgaaagcagcagccttccgctgattgccagagatcgagcgagcgaggctgacgccggccatgagcgaccagccccagcccgtccgcaccggggacgtctacccgccctcggccgccgctcacgacgcgcgccgccagcgcgacgaagtcctcacccatgatgatcagcagcagaaacaagatgatcgccgcggccagctccgggtcaccgagaccgacgagccacacgctgggagacgcgtcgtcaccgccaccgccggcggccaggtgatggcgcagttcacggtgccggtgccggacrccggtgtggaggaggcgacagacgcggtgaccatcggcgaagctctacaggccgcggcgcagacgtccgcgggtgagaggccggtcgacctcgcggacgcggctgcggtgcaggccgccgagacgcgcgcgacggggctgggccgcgtcatccccggtggcgtggcggctgccgcgcagcaggccgcggagaccaacatgaggccccgggtcagtgacggtgagaagttgcggctgagggacgtgctggacagcgccgcggcggtgctgccggccaacaaggtggccacgagggaggacgccgttgcggtggccacagcagcggagcgctacgccgctgcgggagcaggtggaggaggcaagggtgtggccgacgcggtggccgtggccgccgagatgaacgacaagaggatgacgcgcacgcggcaggcttaggctaggtagcaggctagcagcctagcagaagaacgtgcgtggccactgtgatacgttgtactgcgtatgcaccacgcatatcactactacgtacgtaacgtacttctctatccgtgttgtaatctacatcatattgtacgctttttcagtagtataaaacgttcttac

SEQ ID NO: 66946 - protein, 224 aa, Triticum aestivum
  peptide (1)..(224): Ceres Seq. ID no. 15179904
  misc_feature (88)..(146): Pfam Name: Seed maturation protein Pfam Description: Seed maturation protein
  misc_feature (17)..(215): Homolog of NCBI NO: 126078 NR Description: LATE EMBRYOGENESIS ABUNDANT PROTEIN D-34 (LEA
  misc_feature (81)..(81): Xaa is any aa, unknown or other
MSDQPQPVRTGDVYPPSAAAHDARRQRDEVLTHDDQQQKQDDRRGQLRVTETDEPHAGRRVVTATAGGQVMAQFTVPVPDXGVEEATDAVTIGEALQAAAQTSAGERPVDLADAAAVQAAETRATGLGRVIPGGVAAAAQQAAETNMRPRVSDGEKLRLRDVLDSAAAVLPANKVATREDAVAVATAAERYAAAGAGGGGKGVADAVAVAAEMNDKRMTRTRQA

SEQ ID NO: 66947 - protein, 154 aa, Triticum aestivum
  peptide (1)..(154): Ceres Seq. ID no. 15179905
  misc_feature (18)..(76): Pfam Name: Seed maturation protein Pfam Description: Seed maturation protein
  misc_feature (1)..(145): Homolog of NCBI NO: 126078 NR Description: LATE EMBRYOGENESIS ABUNDANT PROTEIN D-34 (LEA
  misc_feature (11)..(11): Xaa is any aa, unknown or other
MAQFTVPVPDXGVEEATDAVTIGEALQAAAQTSAGERPVDLADAAAVQAAETRATGLGRVIPGGVAAAAQQAAETNMRPRVSDGEKLRLRDVLDSAAAVLPANKVATREDAVAVATAAERYAAAGAGGGGKGVADAVAVAAEMNDKRMTRTRQA

SEQ ID NO: 66948 - DNA, 1673 bp, Triticum aestivum
  misc_feature (1)..(1673): Ceres Seq. ID no. 14303209
aaaaaacaaaccgagtctgcagttgcaattcctatacgacctcgatccccctcctcccccaacaagtcgaatccgcccgcgttgaggaaggatgtgctcccaagcccccaaatccctagacctagacctcgacctcgacccctccccagtccccagatccctagacctcgaccccgaatcccaaccctgccccggcgtgacgacgacggccgagctccccgacgaagcggagaacccctgcttgtcgcggtttcgccaccggcgactcctcgccttcctctcgcgccagcgctacgatgtcgccttcaacgggctgatgctacaggcgagtgagcccttctgcttggagcgtctgcaggggctcgtgaggaagggcctgtgggaggatgccatcgactaccttgatggcttcctgcctgccggccccaggagcctccacgcccacgccttccgcaacttcctcttgatgcaccactacttggccagcatcgccgccggggatgagtccgccatggacaagctccgggcccaccattggatgcaacacgtcgttgatgcctggaaaacgaaagcgaaccacacatttcctcgtgtcatggcccaagccctgctctcgtcggagcagctccgggcgtccatggactgggatggagtgaggagggaggctgcgtacatcctctccaggttagcttcgaggaccccagagctcaacaggccgctcacattgccgacttgctacaccaagccgcaccaagtgcttcccattgacgttgcctctggattgtgcaggcggcggcgcgtgaaggaacagcgtccccatctacaaccagctgctgttgccagggccatccttttcagggggagtcagcgttacacaagatctctagccaactcaagtttcgaattcattgagaatgcaaaggaatggtttgcgactatcatggatgaaagcttacgagctggttcaggtaaagcgacttccctgctccaacaaattatgaaggaaggtgctcctgttgctccagtttcactgataagtcctgctaaaagttctggtacctcgtcattgacaaatgcaggtgctcctgtttcttcagtgtgccagactctgaacatgacaagagacgctgaaaactatggtatctcatcagtgacaagtccaggcccagaaaagagtcaagaaggtgcctgcggtggtttcaatcccagaaagaatccacgggcagaattggcaactattgatgaatatttggattcaaaaaggcaacgtactactgggacttttggggaagcaagtatggtgccggtgaatgaagtttgggctgaagctcactagctggctggtgaagtcaaccacctagattcataaccgagatatggtgacaatggtggtggtggtggtgtacctgctaactcgcacttcatttatgctttgaacttggatgttaattatacaactttgtttccaagtgcctactatgagctagtacttcataagtaattctgctagtgttggttaatcaggctgcttactgccagcattttctatcactgaaatgaaaattaatcagattattggatcatatcattcagtaacagtattgccaaaagatacacgtaagtgtgacctcaagcattgctttatgaagttgctcagaaaaaaaaaaaaaaac

SEQ ID NO: 66949 - protein, 414 aa, Triticum aestivum
  peptide (1)..(414): Ceres Seq. ID no. 14303210
  misc_feature (26)..(358): Homolog of NCBI NO: 34394797 NR Description: unknown protein [Oryza sativa (japonica
  misc_feature (26)..(286): Homolog of NCBI NO: 34394789 NR Description: hypothetical protein [Oryza sativa (japonica
  misc_feature (85)..(403): Homolog of NCBI NO: 38344249 NR Description: OSJNBa0008M17.1 [Oryza sativa (japonica
  misc_feature (47)..(329): Homolog of NCBI NO: 38345605 NR Description: OSJNBa0093O08.7 [Oryza sativa (japonica
MCSQAPKSLDLDLDLDPSPVPRSLDLDPESQPCPGVTTTAELPDEAENPCLSRFRHRRLLAFLSRQRYDVAFNGLMLQASEPFCLERLQGLVRKGLWEDAIDYLDGFLPAGPRSLHAHAFRNFLLMHHYLASIAAGDESAMDKLRAHHWMQHVVDAWKTKANHTFPRVMAQALLSSEQLRASMDWDGVRREAAYILSRLASRTPELNRPLTLPTCYTKPHQVLPIDVASGLCRRRRVKEQRPHLQPAAVARAILFRGSQRYTRSLANSSFEFIENAKEWFATIMDESLRAGSGKATSLLQQIMKEGAPVAPVSLISPAKSSGTSSLTNAGAPVSSVCQTLNMTRDAENYGISSVTSPGPEKSQEGACGGFNPRKNPRAELATIDEYLDSKRQRTTGTFGEASMVPVNEVWAEAH

SEQ ID NO: 66950 - protein, 339 aa, Triticum aestivum
  peptide (1)..(339): Ceres Seq. ID no. 14303211
  misc_feature (1)..(283): Homolog of NCBI NO: 34394797 NR Description: unknown protein [Oryza sativa (japonica
  misc_feature (1)..(211): Homolog of NCBI NO: 34394789 NR Description: hypothetical protein [Oryza sativa (japonica
  misc_feature (10)..(328): Homolog of NCBI NO: 38344249 NR Description: OSJNBa0008M17.1 [Oryza sativa (japonica
  misc_feature (1)..(254): Homolog of NCBI NO: 38345605 NR Description: OSJNBa0093O08.7 [Oryza sativa (japonica
MLQASEPFCLERLQGLVRKGLWEDAIDYLDGFLPAGPRSLHAHAFRNFLLMHHYLASIAAGDESAMDKLRAHHWMQHVVDAWKTKANHTFPRVMAQALLSSEQLRASMDWDGVRREAAYILSRLASRTPELNRPLTLPTCYTKPHQVLPIDVASGLCRRRRVKEQRPHLQPAAVARAILFRGSQRYTRSLANSSFEFIENAKEWFATIMDESLRAGSGKATSLLQQIMKEGAPVAPVSLISPAKSSGTSSLTNAGAPVSSVCQTLNMTRDAENYGISSVTSPGPEKSQEGACGGFNPRKNPRAELATIDEYLDSKRQRTTGTFGEASMVPVNEVWAEAH

SEQ ID NO: 66951 - protein, 289 aa, Triticum aestivum
  peptide (1)..(289): Ceres Seq. ID no. 14303212
  misc_feature (1)..(233): Homolog of NCBI NO: 34394797 NR Description: unknown protein [Oryza sativa (japonica
  misc_feature (1)..(161): Homolog of NCBI NO: 34394789 NR Description: hypothetical protein [Oryza sativa (japonica
  misc_feature (1)..(278): Homolog of NCBI NO: 38344249 NR Description: OSJNBa0008M17.1 [Oryza sativa (japonica
  misc_feature (1)..(204): Homolog of NCBI NO: 38345605 NR Description: OSJNBa0093O08.7 [Oryza sativa (japonica
MHHYLASIAAGDESAMDKLRAHHWMQHVVDAWKTKANHTFPRVMAQALLSSEQLRASMDWDGVRREAAYILSRLASRTPELNRPLTLPTCYTKPHQVLPIDVASGLCRRRRVKEQRPHLQPAAVARAILFRGSQRYTRSLANSSFEFIENAKEWFATIMDESLRAGSGKATSLLQQIMKEGAPVAPVSLISPAKSSGTSSLTNAGAPVSSVCQTLNMTRDAENYGISSVTSPGPEKSQEGACGGFNPRKNPRAELATIDEYLDSKRQRTTGTFGEASMVPVNEVWAEAH

SEQ ID NO: 66952 - DNA, 936 bp, Triticum aestivum
  misc_feature (1)..(936): Ceres Seq. ID no. 13597953
attcattcattctctcacagccatcgatccatctaaactaggtggagcagtacatacacagcaaagcaaggcataatggcctcgggagtgttcggtacccccatttcagagaagacggtgctggccactggagagtataaggaacccatcactcaaaaggatgttgcggactataccatgaagatgatcaacgccggtggtaaggatattaacgcacaaaccttcgtcgacaacctcaaggagaggtacggtaacggaatatctgtaaaatgcctcatctacaatgccaccggtgccactttgaacttggctaactacaaagactggcacggccatatctacgatacaccctacccatcagatattcagaatgggcaatggggggcatttctccacgtccacccaagtggcgctgcggttggttcagctggtgccgttgtgtatcgtaccaaggtcccatccagcagcagctcctgcgattggttgttctcctggaccgtcccctacattggtgccaatgggatctacaccgaaatccgtgaggaagggcactacccaagtgtgggaagctgggattatatctatgacgtgaagctggaaaatgcaaatctcaactctactgataaaaactatggatatgtttccgagactaacatcggtgaaggctctaccatgaacgctcgtggagttttccagtttccctactagatctctttgccagcatcgaggggttattgtggtcttcaaagtcttttgtggcgaggacgtttggggctgttatcttcctttactatatttgtggtgcactccactagtagaaaaagggcctaatgtgaagctcattagtcccggtttgtaattgaaccggcactaatgtgaccattagtgctgcttccaacggctaggcgggcggagctcaaaataatgaagctttgt

SEQ ID NO: 66953 - protein, 210 aa, Triticum aestivum
  peptide (1)..(210): Ceres Seq. ID no. 13597954
  misc_feature (27)..(199): Homolog of NCBI NO: 38347187 NR Description: OSJNBa0024J22.15 [Oryza sativa (japonica
  misc_feature (25)..(199): Homolog of NCBI NO: 38567934 NR Description: OSJNBa0033H08.11 [Oryza sativa (japonica
  misc_feature (6)..(199): Homolog of NCBI NO: 38347186 NR Description: OSJNBa0024J22.14 [Oryza sativa (japonica
  misc_feature (1)..(149): Homolog of NCBI NO: 7489427 NR Description: probable jasmonate-induced protein 1 - barley
  misc_feature (1)..(210): Homolog of NCBI NO: 400094 NR Description: 23 KD JASMONATE-INDUCED PROTEIN
MASGVFGTPISEKTVLATGEYKEPITQKDVADYTMKMINAGGKDINAQTFVDNLKERYGNGISVKCLIYNATGATLNLANYKDWHGHIYDTPYPSDIQNGQWGAFLHVHPSGAAVGSAGAVVYRTKVPSSSSSCDWLFSWTVPYIGANGIYTEIREEGHYPSVGSWDYIYDVKLENANLNSTDKNYGYVSETNIGEGSTMNARGVFQFPY

SEQ ID NO: 66954 - protein, 176 aa, Triticum aestivum
  peptide (1)..(176): Ceres Seq. ID no. 13597955
  misc_feature (1)..(165): Homolog of NCBI NO: 38347187 NR Description: OSJNBa0024J22.15 [Oryza sativa (japonica
  misc_feature (1)..(165): Homolog of NCBI NO: 38567934 NR Description: OSJNBa0033H08.11 [Oryza sativa (japonica
  misc_feature (1)..(165): Homolog of NCBI NO: 38347186 NR Description: OSJNBa0024J22.14 [Oryza sativa (japonica
  misc_feature (1)..(115): Homolog of NCBI NO: 7489427 NR Description: probable jasmonate-induced protein 1 - barley
  misc_feature (1)..(176): Homolog of NCBI NO: 400094 NR Description: 23 KD JASMONATE-INDUCED PROTEIN
MKMINAGGKDINAQTFVDNLKERYGNGISVKCLIYNATGATLNLANYKDWHGHIYDTPYPSDIQNGQWGAFLHVHPSGAAVGSAGAVVYRTKVPSSSSSCDWLFSWTVPYIGANGIYTEIREEGHYPSVGSWDYIYDVKLENANLNSTDKNYGYVSETNIGEGSTMNARGVFQFPY

SEQ ID NO: 66955 - protein, 174 aa, Triticum aestivum
  peptide (1)..(174): Ceres Seq. ID no. 13597956
  misc_feature (1)..(163): Homolog of NCBI NO: 38347187 NR Description: OSJNBa0024J22.15 [Oryza sativa (japonica
  misc_feature (1)..(163): Homolog of NCBI NO: 38567934 NR Description: OSJNBa0033H08.11 [Oryza sativa (japonica
  misc_feature (1)..(163): Homolog of NCBI NO: 38347186 NR Description: OSJNBa0024J22.14 [Oryza sativa (japonica
  misc_feature (1)..(113): Homolog of NCBI NO: 7489427 NR Description: probable jasmonate-induced protein 1 - barley
  misc_feature (1)..(174): Homolog of NCBI NO: 400094 NR Description: 23 KD JASMONATE-INDUCED PROTEIN
MINAGGKDINAQTFVDNLKERYGNGISVKCLIYNATGATLNLANYKDWHGHIYDTPYPSDIQNGQWGAFLHVHPSGAAVGSAGAVVYRTKVPSSSSSCDWLFSWTVPYIGANGIYTEIREEGHYPSVGSWDYIYDVKLENANLNSTDKNYGYVSETNIGEGSTMNARGVFQFPY

SEQ ID NO: 66956 - DNA, 1715 bp, Triticum aestivum
  misc_feature (1)..(1715): Ceres Seq. ID no. 14303301
agacgcttttaaattcgagattttattgtccgccttccccgacgcgcagctgcctcgctgccccggtgctgctgctcccctcccacccgccgcgccccgccgacgcctccgccgatggaccgggaagaaggtaaggcagcggcgagcctgccggatttgggagcgactgtggctaattttggggacgattcccgttggtgtgcagtgacggagttcctgggccaggtgcccctcctgcagtgcctccccggctcctccatccgcaggatcgccgaggccgtccaggtcaagcactacgaacctggtgattatgttgcccgtgaaggtgaacccgtagatggcctttgcatcatattggatgggcaggctgaagtttctgctcctgcaaacacagaagaagcaaaccgtccagactatgtgttaaataagtatgactactttggttacgggaccaatagttctgtacatcaagtaaatgttattgccgtgacaaagctgtcctgctttgtattgccgagtcaatatggacatctgctgcaaaccaagacaatttggaatgcagaagaaacacctgaaagccattcattgatggaacaaattttacatttagagaaattagaggttgatatatttcgtggatttactttgccagaagctccaacttttaatcaagtttttggaggacaattgattgggcaggcactagcagcagcatccaagactgtcgattgcctgaaacttgtgcatagtctgcatgcaatttttctaatagcaggagacaataatatgccaataatatatcaagtgcatcgggagcgtgatggaaccagctttgccaccagaaaagtggaggcaaagcagaaaggccttgttatgttcactttaattgtttctttccagaaggaagaattagggtttgagcatcaggctgcaatcatgcctgtcgttcctcctccagaacagctcctgaatatggaggagatacgggaaagaagactcactgatccacggtttccgatgcaatataggaactcagctgccaagaaaaagtttgtaccttggcccattgaaatgaggttctgccaagattctaaatctcagcatgaaccaagcctgcattattggtttagagctagaggaaaactttcggatgatccagctctgcatagatgcgttgtagcatatgcttcggatctactatattcaggcgtcagcctaaatccgcaccgtaagaggggtttgaagacatactctctcagtcttgatcactcgatgtggttccacaagcctgtgaaagctgatgactggttgttatatgtgatcgacagcccatccgcacatggtggcaggggattcgtcaccggacgtatgttcaaccggcaaggagagcttattgtgtcgctgacccaagaggcgttgattaggagggccaagacacccgggcaaaccccaaggccgaagctttgagatgtgcagaagagccatggctgtactttaatattttctttccccttgctgttccgtatttttatcttatatagtacacggagacaatggtgagatttatgtataggagtacagcttacagcttgaatttggcacacatgtgaacgattgtatcctcgcatgctgattcacattcaggttttcctttgcatatgtggatggcaattgccatccaacacgcggcacatgaatgtagacagatgtacctc

SEQ ID NO: 66957 - protein, 450 aa, Triticum aestivum
  peptide (1)..(450): Ceres Seq. ID no. 14303302
  misc_feature (309)..(435): Pfam Name: Acyl-CoA thioesterase Pfam Description: Acyl-CoA thioesterase
  misc_feature (155)..(442): Homolog of NCBI NO: 39933348 NR Description: acyl-CoA thioesterase II [Rhodopseudomonas
  misc_feature (151)..(438): Homolog of NCBI NO: 15966941 NR Description: PROBABLE ACYL-COA THIOESTERASE II PROTEIN
  misc_feature (153)..(442): Homolog of NCBI NO: 22962266 NR Description: hypothetical protein [Rhodopseudomonas palustris]
  misc_feature (162)..(438): Homolog of NCBI NO: 15599137 NR Description: acyl-CoA thioesterase II [Pseudomonas aeruginosa
  misc_feature (150)..(437): Homolog of NCBI NO: 23502749 NR Description: acyl-CoA thioesterase II [Brucella suis 1330]
  misc_feature (150)..(437): Homolog of NCBI NO: 17986450 NR Description: ACYL-COA THIOESTERASE II [Brucella melitensis]
  misc_feature (174)..(411): Homolog of NCBI NO: 25304479 NR Description: hypothetical protein T1N6.10 - Arabidopsis
  misc_feature (30)..(450): Homolog of NCBI NO: 26449786 NR Description: putative acyl CoA thioesterase [Arabidopsis
  misc_feature (30)..(450): Homolog of NCBI NO: 30678177 NR Description: acyl CoA thioesterase -related [Arabidopsis
  misc_feature (1)..(450): Homolog of NCBI NO: 38345758 NR Description: OSJNBa0065O17.11 [Oryza sativa (japonica
MDREEGKAAASLPDLGATVANFGDDSRWCAVTEFLGQVPLLQCLPGSSIRRIAEAVQVKHYEPGDYVAREGEPVDGLCIILDGQAEVSAPANTEEANRPDYVLNKYDYFGYGTNSSVHQVNVIAVTKLSCFVLPSQYGHLLQTKTIWNAEETPESHSLMEQILHLEKLEVDIFRGFTLPEAPTFNQVFGGQLIGQALAAASKTVDCLKLVHSLHAIFLIAGDNNMPIIYQVHRERDGTSFATRKVEAKQKGLVMFTLIVSFQKEELGFEHQAAIMPVVPPPEQLLNMEEIRERRLTDPRFPMQYRNSAAKKKFVPWPIEMRFCQDSKSQHEPSLHYWFRARGKLSDDPALHRCVVAYASDLLYSGVSLNPHRKRGLKTYSLSLDHSMWFHKPVKADDWLLYVIDSPSAHGGRGFVTGRMFNRQGELIVSLTQEALIRRAKTPGQTPRPKL

SEQ ID NO: 66958 - protein, 292 aa, Triticum aestivum
  peptide (1)..(292): Ceres Seq. ID no. 14303303
  misc_feature (151)..(277): Pfam Name: Acyl-CoA thioesterase Pfam Description: Acyl-CoA thioesterase
  misc_feature (1)..(284): Homolog of NCBI NO: 39933348 NR Description: acyl-CoA thioesterase II [Rhodopseudomonas
  misc_feature (1)..(280): Homolog of NCBI NO: 15966941 NR Description: PROBABLE ACYL-COA THIOESTERASE II PROTEIN
  misc_feature (1)..(284): Homolog of NCBI NO: 22962266 NR Description: hypothetical protein [Rhodopseudomonas palustris]
  misc_feature (4)..(280): Homolog of NCBI NO: 15599137 NR Description: acyl-CoA thioesterase II [Pseudomonas aeruginosa
  misc_feature (1)..(279): Homolog of NCBI NO: 23502749 NR Description: acyl-CoA thioesterase II [Brucella suis 1330]
  misc_feature (1)..(279): Homolog of NCBI NO: 17986450 NR Description: ACYL-COA THIOESTERASE II [Brucella melitensis]
  misc_feature (16)..(253): Homolog of NCBI NO: 25304479 NR Description: hypothetical protein T1N6.10 - Arabidopsis
  misc_feature (1)..(292): Homolog of NCBI NO: 26449786 NR Description: putative acyl CoA thioesterase [Arabidopsis
  misc_feature (1)..(292): Homolog of NCBI NO: 30678177 NR Description: acyl CoA thioesterase -related [Arabidopsis
  misc_feature (1)..(292): Homolog of NCBI NO: 38345758 NR Description: OSJNBa0065O17.11 [Oryza sativa (japonica
MEQILHLEKLEVDIFRGFTLPEAPTFNQVFGGQLIGQALAAASKTVDCLKLVHSLHAIFLIAGDNNMPIIYQVHRERDGTSFATRKVEAKQKGLVMFTLIVSFQKEELGFEHQAAIMPVVPPPEQLLNMEEIRERRLTDPRFPMQYRNSAAKKKFVPWPIEMRFCQDSKSQHEPSLHYWFRARGKLSDDPALHRCVVAYASDLLYSGVSLNPHRKRGLKTYSLSLDHSMWFHKPVKADDWLLYVIDSPSAHGGRGFVTGRMFNRQGELIVSLTQEALIRRAKTPGQTPRPKL

SEQ ID NO: 66959 - protein, 226 aa, Triticum aestivum
  peptide (1)..(226): Ceres Seq. ID no. 14303304
  misc_feature (85)..(211): Pfam Name: Acyl-CoA thioesterase Pfam Description: Acyl-CoA thioesterase
  misc_feature (1)..(218): Homolog of NCBI NO: 39933348 NR Description: acyl-CoA thioesterase II [Rhodopseudomonas
  misc_feature (1)..(214): Homolog of NCBI NO: 15966941 NR Description: PROBABLE ACYL-COA THIOESTERASE II PROTEIN
  misc_feature (1)..(218): Homolog of NCBI NO: 22962266 NR Description: hypothetical protein [Rhodopseudomonas palustris]
  misc_feature (1)..(214): Homolog of NCBI NO: 15599137 NR Description: acyl-CoA thioesterase II [Pseudomonas aeruginosa
  misc_feature (1)..(213): Homolog of NCBI NO: 23502749 NR Description: acyl-CoA thioesterase II [Brucella suis 1330]
  misc_feature (1)..(213): Homolog of NCBI NO: 17986450 NR Description: ACYL-COA THIOESTERASE II [Brucella melitensis]
  misc_feature (1)..(187): Homolog of NCBI NO: 25304479 NR Description: hypothetical protein T1N6.10 - Arabidopsis
  misc_feature (1)..(226): Homolog of NCBI NO: 26449786 NR Description: putative acyl CoA thioesterase [Arabidopsis
  misc_feature (1)..(226): Homolog of NCBI NO: 30678177 NR Description: acyl CoA thioesterase -related [Arabidopsis
  misc_feature (1)..(226): Homolog of NCBI NO: 38345758 NR Description: OSJNBa0065O17.11 [Oryza sativa (japonica
MPIIYQVHRERDGTSFATRKVEAKQKGLVMFTLIVSFQKEELGFEHQAAIMPVVPPPEQLLNMEEIRERRLTDPRFPMQYRNSAAKKKFVPWPIEMRFCQDSKSQHEPSLHYWFRARGKLSDDPALHRCVVAYASDLLYSGVSLNPHRKRGLKTYSLSLDHSMWFHKPVKADDWLLYVIDSPSAHGGRGFVTGRMFNRQGELIVSLTQEALIRRAKTPGQTPRPKL

SEQ ID NO: 66960 - DNA, 1706 bp, Triticum aestivum
  misc_feature (1)..(1706): Ceres Seq. ID no. 13590739
aggaagaaggaaagacagatcggtgcgtgtgaggcagccccgctccgctaaacctcgcaacaacccccgtgggcgaccaacccagcccagccgcccccctctcctcaccaacccccgagccggaagcagagccgcgatggccggcaccgtgcccaagctcgccgccccgaggccggcggccgcggggccgctcccctcgcagcccctccgcgccgccgcgctcgccttcgccccctccgcccgacgcttccgcgtctccctcgccggccgcgccaggagccccgtcattgcgatggcttccgccaaggaagggaacggtgcggtgacgaagaggaccacgctccatgacctctatgagcaacagggtcagtccccgtggtacgacaacctttgccggcctgtcaccgatttgctgccctacatcgccaacggtgtccgtggagtcaccagcaacccaacgattttccagaaagccatctcttcatcaaacgcctatgacggtcagttcaaggagcttatatcagctgggaaggatgcggagagcgcttactgggaactcgtcataaaggacatccaagacgcgtgcaagctgtttgagcccatctacgacgagactgatggggctgatggttacgtttcagtggaggtgtctcctaggctggcaaatgacacccaaggaaccgtcgaagctgcgaagtggttacacaaagtggtcaaccgccccaatgtgtacataaagatcccagctacagcagaatgtgttccttctatcaaggaagtcattgctaatggcatcagcgtcaatgtcactcttatcttctctgttgcaagatacgaggctgtgattgatgcttacctcgacgggcttgaggcttctggtttgagcgacttatcccgagtaaccagtgtagcatccttctttgtcagccgagttgacagtctgatcgacaaaatgcttgagaagattggaacaccggaagctcttgccctgaggggaaaggctgccgtagcacaagcaaagatagcaaatcagctttacctgaagaaattctctggcccgaggtgggaggctttggtgaagaagggagccaagaagcagaggttgttgtgggcatccaccagcgtgaagaacccggcttacttggacactctttacgtcgatcctctcatcggacctgacaccgtctctacgatgcccgaccaagctctggacgcgttcatcgaccacggcacagttgctaggacaatcgacgcgaacgtatcagaagctgagggcatatacagtgccctggagaagctgggcatcgactgggaagaggttggcaagcagctggagcacgagggcgtgagctccttcaaggggagcttcgacagcctgctcacgagcttggaggagaagggcaatgccctcaagaccgccgccaacctgtaggcgctaaaattgttggatagaatggtttggtaccggcgctggccatcaaacgattacccaataaaaatgccagcttgctggctctccccttccattcggaaatgaaatgctcccagttatctgggtgagcttctttgtattctaggcgtgcctggctgtcattgtgtaactgaggtttgttgctcgcaactgctatcgttttctgatcaattgtttttgagcaagtcagccatatttgtgtatctttggcaaatgcatttctccttactgttgt

SEQ ID NO: 66961 - protein, 476 aa, Triticum aestivum
  peptide (1)..(476): Ceres Seq. ID no. 15221001
  misc_feature (124)..(463): Pfam Name: Transaldolase Pfam Description: Transaldolase
  misc_feature (122)..(464): Homolog of NCBI NO: 23335136 NR Description: hypothetical protein [Bifidobacterium longum
  misc_feature (120)..(464): Homolog of NCBI NO: 29832856 NR Description: putative transaldolase [Streptomyces avermitilis
  misc_feature (108)..(467): Homolog of NCBI NO: 29828309 NR Description: putative transaldolase [Streptomyces avermitilis
  misc_feature (69)..(471): Homolog of NCBI NO: 32481059 NR Description: transaldolase [Lycopersicon esculentum]
  misc_feature (69)..(471): Homolog of NCBI NO: 10441272 NR Description: transaldolase [Lycopersicon esculentum]
  misc_feature (92)..(471): Homolog of NCBI NO: 7489279 NR Description: transaldolase (EC 2.2.1.2) - potato
  misc_feature (84)..(475): Homolog of NCBI NO: 15240625 NR Description: transaldolase - like protein [Arabidopsis
  misc_feature (46)..(101): Homolog of NCBI NO: 34907042 NR Description: putative transaldolase [Oryza sativa (japonica
  misc_feature (97)..(154): Homolog of NCBI NO: 34907042 NR Description: putative transaldolase [Oryza sativa (japonica
  misc_feature (154)..(476): Homolog of NCBI NO: 34907042 NR Description: putative transaldolase [Oryza sativa (japonica
GRRKDRSVRVRQPRSAKPRNNPRGRPTQPSRPPLLTNPRAGSRAAMAGTVPKLAAPRPAAAGPLPSQPLRAAALAFAPSARRFRVSLAGRARSPVIAMASAKEGNGAVTKRTTLHDLYEQQGQSPWYDNLCRPVTDLLPYIANGVRGVTSNPTIFQKAISSSNAYDGQFKELISAGKDAESAYWELVIKDIQDACKLFEPIYDETDGADGYVSVEVSPRLANDTQGTVEAAKWLHKVVNRPNVYIKIPATAECVPSIKEVIANGISVNVTLIFSVARYEAVIDAYLDGLEASGLSDLSRVTSVASFFVSRVDSLIDKMLEKIGTPEALALRGKAAVAQAKIANQLYLKKFSGPRWEALVKKGAKKQRLLWASTSVKNPAYLDTLYVDPLIGPDTVSTMPDQALDAFIDHGTVARTIDANVSEAEGIYSALEKLGIDWEEVGKQLEHEGVSSFKGSFDSLLTSLEEKGNALKTAANL

SEQ ID NO: 66962 - protein, 431 aa, Triticum aestivum
  peptide (1)..(431): Ceres Seq. ID no. 15221002
  misc_feature (79)..(418): Pfam Name: Transaldolase Pfam Description: Transaldolase
  misc_feature (77)..(419): Homolog of NCBI NO: 23335136 NR Description: hypothetical protein [Bifidobacterium longum
  misc_feature (75)..(419): Homolog of NCBI NO: 29832856 NR Description: putative transaldolase [Streptomyces avermitilis
  misc_feature (63)..(422): Homolog of NCBI NO: 29828309 NR Description: putative transaldolase [Streptomyces avermitilis
  misc_feature (24)..(426): Homolog of NCBI NO: 32481059 NR Description: transaldolase [Lycopersicon esculentum]
  misc_feature (24)..(426): Homolog of NCBI NO: 10441272 NR Description: transaldolase [Lycopersicon esculentum]
  misc_feature (47)..(426): Homolog of NCBI NO: 7489279 NR Description: transaldolase (EC 2.2.1.2) - potato
  misc_feature (39)..(430): Homolog of NCBI NO: 15240625 NR Description: transaldolase - like protein [Arabidopsis
  misc_feature (1)..(56): Homolog of NCBI NO: 34907042 NR Description: putative transaldolase [Oryza sativa (japonica
  misc_feature (52)..(109): Homolog of NCBI NO: 34907042 NR Description: putative transaldolase [Oryza sativa (japonica
  misc_feature (109)..(431): Homolog of NCBI NO: 34907042 NR Description: putative transaldolase [Oryza sativa (japonica
MAGTVPKLAAPRPAAAGPLPSQPLRAAALAFAPSARRFRVSLAGRARSPVIAMASAKEGNGAVTKRTTLHDLYEQQGQSPWYDNLCRPVTDLLPYIANGVRGVTSNPTIFQKAISSSNAYDGQFKELISAGKDAESAYWELVIKDIQDACKLFEPIYDETDGADGYVSVEVSPRLANDTQGTVEAAKWLHKVVNRPNVYIKIPATAECVPSIKEVIANGISVNVTLIFSVARYEAVIDAYLDGLEASGLSDLSRVTSVASFFVSRVDSLIDKMLEKIGTPEALALRGKAAVAQAKIANQLYLKKFSGPRWEALVKKGAKKQRLLWASTSVKNPAYLDTLYVDPLIGPDTVSTMPDQALDAFIDHGTVARTIDANVSEAEGIYSALEKLGIDWEEVGKQLEHEGVSSFKGSFDSLLTSLEEKGNALKTAANL

SEQ ID NO: 66963 - protein, 379 aa, Triticum aestivum
  peptide (1)..(379): Ceres Seq. ID no. 15221003
  misc_feature (27)..(366): Pfam Name: Transaldolase Pfam Description: Transaldolase
  misc_feature (25)..(367): Homolog of NCBI NO: 23465295 NR Description: transaldolase [Bifidobacterium longum NCC2705]
  misc_feature (25)..(367): Homolog of NCBI NO: 23335136 NR Description: hypothetical protein [Bifidobacterium longum
  misc_feature (23)..(367): Homolog of NCBI NO: 29832856 NR Description: putative transaldolase [Streptomyces avermitilis
  misc_feature (11)..(370): Homolog of NCBI NO: 29828309 NR Description: putative transaldolase [Streptomyces avermitilis
  misc_feature (1)..(374): Homolog of NCBI NO: 32481059 NR Description: transaldolase [Lycopersicon esculentum]
  misc_feature (1)..(374): Homolog of NCBI NO: 10441272 NR Description: transaldolase [Lycopersicon esculentum]
  misc_feature (1)..(374): Homolog of NCBI NO: 7489279 NR Description: transaldolase (EC 2.2.1.2) - potato
  misc_feature (1)..(378): Homolog of NCBI NO: 15240625 NR Description: transaldolase - like protein [Arabidopsis
  misc_feature (1)..(57): Homolog of NCBI NO: 34907042 NR Description: putative transaldolase [Oryza sativa (japonica
  misc_feature (57)..(379): Homolog of NCBI NO: 34907042 NR Description: putative transaldolase [Oryza sativa (japonica
MASAKEGNGAVTKRTTLHDLYEQQGQSPWYDNLCRPVTDLLPYIANGVRGVTSNPTIFQKAISSSNAYDGQFKELISAGKDAESAYWELVIKDIQDACKLFEPIYDETDGADGYVSVEVSPRLANDTQGTVEAAKWLHKVVNRPNVYIKIPATAECVPSIKEVIANGISVNVTLIFSVARYEAVIDAYLDGLEASGLSDLSRVTSVASFFVSRVDSLIDKMLEKIGTPEALALRGKAAVAQAKIANQLYLKKFSGPRWEALVKKGAKKQRLLWASTSVKNPAYLDTLYVDPLIGPDTVSTMPDQALDAFIDHGTVARTIDANVSEAEGIYSALEKLGIDWEEVGKQLEHEGVSSFKGSFDSLLTSLEEKGNALKTAANL

SEQ ID NO: 66964 - DNA, 1204 bp, Triticum aestivum
  misc_feature (1)..(1204): Ceres Seq. ID no. 13659351
gttttctattccttccctcttttgttttctcccgcgagcagctcgtgcgacagctgagctgcggccgccgccgccacactttgcttcgctgtgagcggtcccgagcgtgagccggtgggggtgtcggcgaggcgcgcgagggtcaggcagcgaggagaccgccgccgctgcagcctggtgtgcgcgcgctccaggctgctccgccactcagccaccgggttgcagatgccgccattgctcctgctaggctgctaccgtccgtcgccagccgtccgcgctgctgctgccaccttcgccgcgcacctgaccgcgccgccgcccgggaattgcccgacgcggccgtctcgtgttgccctctgccggcgcgcgcggcagacgacgcctttgacgtctatctttctggccaaacgcattcctcgggcatacagaggctaaagtcaaccttaaaatggaggatgctaacgcagtagtagattggaatgttgacattattggcccagatggtggtagcggcgcttgccgcaaattggcaaaaactgaagaccctgatgccacagagtgttcaagttcctttggggacacactatctggatctcaggatgatgcaaagccttcagagattagtgacattgaagtagactcaccattctgccgttatcctcataatggtgatgctgctgcactcttggatgcagctgctgctgacaatttggatagattattgaaaaagaaaaaagtgaccgatcattggagaagctatatcagcccattaatgtggagatgccaatggttagagctgcggatgaaagacttgcaatctcaagtatccagatatgacagggagcttgcagtacttaaacatgagaaagagttgcagacaaaaatgattgagttggactgttcctcgtcaagatcagtgcccttctcttctcattgctgcaggaagactatgaagaggaagaagaggaagagaaatgaggagaaaatcaatgctccctcatacatcgcaacccacaccatattgtcttattatgaaaaagagaccagcggatggctttgatacctggtacttgtttgcatgatatgctgttcccaagttatctccagagtgctgagcaccaactcccatcaaatcaagataatgttgatagtgngatataatgccattcatattatcaatggaccctttaccacagatggcatc

SEQ ID NO: 66965 - protein, 203 aa, Triticum aestivum
  peptide (1)..(203): Ceres Seq. ID no. 13659352
  misc_feature (39)..(197): Homolog of NCBI NO: 15229662 NR Description: hypothetical protein [Arabidopsis thaliana]
  misc_feature (109)..(201): Homolog of NCBI NO: 34894616 NR Description: P0028G04.3 [Oryza sativa (japonica
  misc_feature (31)..(196): Homolog of NCBI NO: 15235560 NR Description: expressed protein [Arabidopsis thaliana]
  misc_feature (11)..(196): Homolog of NCBI NO: 15231731 NR Description: hypothetical protein [Arabidopsis thaliana]
MEDANAVVDWNVDIIGPDGGSGACRKLAKTEDPDATECSSSFGDTLSGSQDDAKPSEISDIEVDSPFCRYPHNGDAAALLDAAAADNLDRLLKKKKVTDHWRSYISPLMWRCQWLELRMKDLQSQVSRYDRELAVLKHEKELQTKMIELDCSSSRSVPFSSHCCRKTMKRKKRKRNEEKINAPSYIATHTILSYYEKETSGWL

SEQ ID NO: 66966 - DNA, 827 bp, Triticum aestivum
  misc_feature (1)..(827): Ceres Seq. ID no. 13659433
attcacatcgattgatcatcgcagctagctaggttgcggcaacatggagagcggcagcacggcggcgtcgagcgacgaggccgtgagatcgcccggcgggacgacggcggtggcggccgcccggccgtactacgagtgcgtgttctgcaagcgcgggttcaccacggcgcaggcgctgggcgggcacatgaacatccaccgccgggaccgcgccaagcccgcccgcctcacgacgtcagcttcccggagcacagagtgcaacttggcgtaccccccagcgccgccggccacgtccctgatgagcagcggcgacttcgccatgttgtactacggccggcacaccggagccggagtggacgccgaggccgtgagccctggtagcccgatcccgagggagctgagcctgttcggcgcggacgacgacagtcacgacgaccgtgacgactgcttgcaactgggcctccggtgccatggaagcagcagcggcgacgggttcgagcggcggccggacggcgagctgccggagaggaagctggacttggagctcaggctcgggcccgggcctcgtccgaggcactgatcactcgcacggtaccctggtgcaactcagacacaggaacgcactcatctatatacatgcatgggcttcctagctagtattacttcagwtcttktgttgcttgatatcattattgctattctcatcttctgctgcttgtttatatgactaaatatatttatatttcgccataacaacaagagcagatgctttgatgtattgaatgtacatggagagctatatatgcttggctcttgttttgattcgc

SEQ ID NO: 66967 - protein, 178 aa, Triticum aestivum
  peptide (1)..(178): Ceres Seq. ID no. 15219972
  misc_feature (30)..(52): Pfam Name: Zinc finger, C2H2 type Pfam Description: Zinc finger, C2H2 type
  misc_feature (30)..(58): Homolog of NCBI NO: 15232631 NR Description: zinc finger (C2H2 type) protein family
  misc_feature (30)..(88): Homolog of NCBI NO: 15228971 NR Description: superman protein [Arabidopsis thaliana]
  misc_feature (2)..(174): Homolog of NCBI NO: 15236660 NR Description: SUPERMAN like protein [Arabidopsis thaliana]
  misc_feature (27)..(171): Homolog of NCBI NO: 15228973 NR Description: zinc finger (C2H2 type) protein family
  misc_feature (26)..(72): Homolog of NCBI NO: 15232335 NR Description: zinc finger (C2H2 type) protein family
  misc_feature (30)..(139): Homolog of NCBI NO: 38346721 NR Description: OSJNBa0086O06.19 [Oryza sativa (japonica
  misc_feature (18)..(57): Homolog of NCBI NO: 34903482 NR Description: OSJNBa0066B06.23 [Oryza sativa (japonica
  misc_feature (3)..(66): Homolog of NCBI NO: 15239898 NR Description: hypothetical protein [Arabidopsis thaliana]
  misc_feature (6)..(81): Homolog of NCBI NO: 27261470 NR Description: Hypothetical protein [Oryza sativa (japonica
  misc_feature (77)..(178): Homolog of NCBI NO: 27261470 NR Description: Hypothetical protein [Oryza sativa (japonica
MESGSTAASSDEAVRSPGGTTAVAAARPYYECVFCKRGFTTAQALGGHMNIHRRDRAKPARLTTSASRSTECNLAYPPAPPATSLMSSGDFAMLYYGRHTGAGVDAEAVSPGSPIPRELSLFGADDDSHDDRDDCLQLGLRCHGSSSGDGFERRPDGELPERKLDLELRLGPGPRPRH

SEQ ID NO: 66968 - protein, 130 aa, Triticum aestivum
  peptide (1)..(130): Ceres Seq. ID no. 15219973
  misc_feature (1)..(122): Homolog of NCBI NO: 32482926 NR Description: OSJNBa0058G03.3 [Oryza sativa (japonica
  misc_feature (1)..(40): Homolog of NCBI NO: 15228971 NR Description: superman protein [Arabidopsis thaliana]
  misc_feature (1)..(126): Homolog of NCBI NO: 15236660 NR Description: SUPERMAN like protein [Arabidopsis thaliana]
  misc_feature (1)..(123): Homolog of NCBI NO: 15228973 NR Description: zinc finger (C2H2 type) protein family
  misc_feature (1)..(24): Homolog of NCBI NO: 15232335 NR Description: zinc finger (C2H2 type) protein family
  misc_feature (1)..(91): Homolog of NCBI NO: 38346721 NR Description: OSJNBa0086O06.19 [Oryza sativa (japonica
  misc_feature (1)..(18): Homolog of NCBI NO: 15239898 NR Description: hypothetical protein [Arabidopsis thaliana]
  misc_feature (1)..(33): Homolog of NCBI NO: 27261470 NR Description: Hypothetical protein [Oryza sativa (japonica
  misc_feature (29)..(130): Homolog of NCBI NO: 27261470 NR Description: Hypothetical protein [Oryza sativa (japonica
MNIHRRDRAKPARLTTSASRSTECNLAYPPAPPATSLMSSGDFAMLYYGRHTGAGVDAEAVSPGSPIPRELSLFGADDDSHDDRDDCLQLGLRCHGSSSGDGFERRPDGELPERKLDLELRLGPGPRPRH

SEQ ID NO: 66969 - protein, 93 aa, Triticum aestivum
  peptide (1)..(93): Ceres Seq. ID no. 15219974
  misc_feature (1)..(85): Homolog of NCBI NO: 32482926 NR Description: OSJNBa0058G03.3 [Oryza sativa (japonica
  misc_feature (1)..(89): Homolog of NCBI NO: 15236660 NR Description: SUPERMAN like protein [Arabidopsis thaliana]
  misc_feature (1)..(86): Homolog of NCBI NO: 15228973 NR Description: zinc finger (C2H2 type) protein family
  misc_feature (1)..(54): Homolog of NCBI NO: 38346721 NR Description: OSJNBa0086O06.19 [Oryza sativa (japonica
  misc_feature (1)..(93): Homolog of NCBI NO: 27261470 NR Description: Hypothetical protein [Oryza sativa (japonica
MSSGDFAMLYYGRHTGAGVDAEAVSPGSPIPRELSLFGADDDSHDDRDDCLQLGLRCHGSSSGDGFERRPDGELPERKLDLELRLGPGPRPRH

SEQ ID NO: 66970 - DNA, 1369 bp, Triticum aestivum
  misc_feature (1)..(1369): Ceres Seq. ID no. 13659840
  misc_feature: Pfam Name: Pkinase Pfam Description: Protein kinase domain
agcttaggccccactcaagtcaacttacccttcttcctcctcgatccacatatgtacgcctgcagctagctagcaagtactcagatctctgggagtacttgctaggtccgcttcaagtagtagcaaggagccaaggagaccgagatctcgtttctctcttcccagcaaggatcccgcaagctattgttcctctcaagatcatcagagatggccaccgcaagtagtaacctgcaactaccggcagaactaccctacgattttgtgaagaaaattacaaatgacttctctaaggagcgagaaattagtgacaatccatttggaaaactttacaagggaattaatccagatgatggcacagtgattgctgtgaagaaacttcaggaaaacgcaccaatgccagctggcaagatatttataaatgaggttcagaatattatggtgctcaaacacgcaaacattgtaaaaatggttggatactgcagtgaaacaacaaagaaattggtgcagttcgatcatcgatatattcaggcagatgttactgaaagtgtactctgctatgaatatttacctaaaggggaccttgcaaagaatctatttggtaaactcattatcgattgggatacacgtttcaaaataatcaaggggatctgcaaggggttactttatctacacaaattagatattcccataatccatatggatctgaagcccgagaatatattgttggatgaagatatggtgcctaagattgcggactttgcactctctagagtctttggcgaagcacaaacccgattgtgcacacagactgtcgtgggatcatatggatatatggctccagaatatctatacaggggtgaaatctcagcgcaatcagacatatatagtttaggcctactcataattgagatcaccacaggagagaagaattgtcctgaaaccaaccaaccgtccgcaagaaattttattgataatgtacaaaaaaattggacagaggattacataacattcaagtactcaagtttaaccccagattgcctcaatcaagttaagcgatgcatcaaaattgggctggaatgtgttactatcgatcggaaaggcagacccactatagaaaaaattattgacaccctcaacggaataaactgaattgcgaacaaggtcttcgatcaggtctacagtgagcatgaaagatgggtctgttgggatccggtgaagaaaccatgcatgtccccattattgctaagtgtactttattttattttggaaataagtccctttgattgatgtcgtgtcattgtggaaataccaaatgtaatttctcgagaattgctgtagattttttgtgttgatcaagcatcaagatgtg

SEQ ID NO: 66971 - protein, 313 aa, Triticum aestivum
  peptide (1)..(313): Ceres Seq. ID no. 15220678
  misc_feature: Pfam Name: Pkinase Pfam Description: Protein kinase domain
  misc_feature (1)..(311): Homolog of NCBI NO: 33146545 NR Description: putative receptor-like protein kinase 4
  misc_feature (52)..(313): Homolog of NCBI NO: 21724199 NR Description: stem rust resistance protein [Hordeum vulgare
  misc_feature (10)..(131): Homolog of NCBI NO: 38344522 NR Description: OSJNBa0016N04.15 [Oryza sativa (japonica
  misc_feature (125)..(309): Homolog of NCBI NO: 38344522 NR Description: OSJNBa0016N04.15 [Oryza sativa (japonica
  misc_feature (13)..(313): Homolog of NCBI NO: 21929729 NR Description: barley stem rust resistance protein
  misc_feature (13)..(313): Homolog of NCBI NO: 21929723 NR Description: barley stem rust resistance protein
  misc_feature (13)..(313): Homolog of NCBI NO: 21728344 NR Description: stem rust resistance protein Rpg1
  misc_feature (10)..(313): Homolog of NCBI NO: 38344521 NR Description: OSJNBa0016N04.14 [Oryza sativa (japonica
  misc_feature (19)..(97): Homolog of NCBI NO: 37532178 NR Description: putative receptor-like protein kinase
  misc_feature (118)..(309): Homolog of NCBI NO: 37532178 NR Description: putative receptor-like protein kinase
MATASSNLQLPAELPYDFVKKITNDFSKEREISDNPFGKLYKGINPDDGTVIAVKKLQENAPMPAGKIFINEVQNIMVLKHANIVKMVGYCSETTKKLVQFDHRYIQADVTESVLCYEYLPKGDLAKNLFGKLIIDWDTRFKIIKGICKGLLYLHKLDIPIIHMDLKPENILLDEDMVPKIADFALSRVFGEAQTRLCTQTVVGSYGYMAPEYLYRGEISAQSDIYSLGLLIIEITTGEKNCPETNQPSARNFIDNVQKNWTEDYITFKYSSLTPDCLNQVKRCIKIGLECVTIDRKGRPTIEKIIDTLNGIN

SEQ ID NO: 66972 - protein, 251 aa, Triticum aestivum
  peptide (1)..(251): Ceres Seq. ID no. 15220679
  misc_feature: Pfam Name: Pkinase Pfam Description: Protein kinase domain
  misc_feature (1)..(249): Homolog of NCBI NO: 33146545 NR Description: putative receptor-like protein kinase 4
  misc_feature (1)..(251): Homolog of NCBI NO: 21724199 NR Description: stem rust resistance protein [Hordeum vulgare
  misc_feature (1)..(69): Homolog of NCBI NO: 38344522 NR Description: OSJNBa0016N04.15 [Oryza sativa (japonica
  misc_feature (63)..(247): Homolog of NCBI NO: 38344522 NR Description: OSJNBa0016N04.15 [Oryza sativa (japonica
  misc_feature (1)..(251): Homolog of NCBI NO: 21929729 NR Description: barley stem rust resistance protein
  misc_feature (1)..(251): Homolog of NCBI NO: 21929723 NR Description: barley stem rust resistance protein
  misc_feature (1)..(251): Homolog of NCBI NO: 21728344 NR Description: stem rust resistance protein Rpg1
  misc_feature (1)..(251): Homolog of NCBI NO: 38344521 NR Description: OSJNBa0016N04.14 [Oryza sativa (japonica
  misc_feature (1)..(35): Homolog of NCBI NO: 37532178 NR Description: putative receptor-like protein kinase
  misc_feature (56)..(247): Homolog of NCBI NO: 37532178 NR Description: putative receptor-like protein kinase
MPAGKIFINEVQNIMVLKHANIVKMVGYCSETTKKLVQFDHRYIQADVTESVLCYEYLPKGDLAKNLFGKLIIDWDTRFKIIKGICKGLLYLHKLDIPIIHMDLKPENILLDEDMVPKIADFALSRVFGEAQTRLCTQTVVGSYGYMAPEYLYRGEISAQSDIYSLGLLIIEITTGEKNCPETNQPSARNFIDNVQKNWTEDYITFKYSSLTPDCLNQVKRCIKIGLECVTIDRKGRPTIEKIIDTLNGIN

SEQ ID NO: 66973 - protein, 237 aa, Triticum aestivum
  peptide (1)..(237): Ceres Seq. ID no. 15220680
  misc_feature: Pfam Name: Pkinase Pfam Description: Protein kinase domain
  misc_feature (1)..(235): Homolog of NCBI NO: 33146545 NR Description: putative receptor-like protein kinase 4
  misc_feature (1)..(237): Homolog of NCBI NO: 21724199 NR Description: stem rust resistance protein [Hordeum vulgare
  misc_feature (1)..(55): Homolog of NCBI NO: 38344522 NR Description: OSJNBa0016N04.15 [Oryza sativa (japonica
  misc_feature (49)..(233): Homolog of NCBI NO: 38344522 NR Description: OSJNBa0016N04.15 [Oryza sativa (japonica
  misc_feature (1)..(237): Homolog of NCBI NO: 21929723 NR Description: barley stem rust resistance protein
  misc_feature (1)..(237): Homolog of NCBI NO: 21929729 NR Description: barley stem rust resistance protein
  misc_feature (1)..(237): Homolog of NCBI NO: 21728344 NR Description: stem rust resistance protein Rpg1
  misc_feature (1)..(237): Homolog of NCBI NO: 38344521 NR Description: OSJNBa0016N04.14 [Oryza sativa (japonica
  misc_feature (1)..(21): Homolog of NCBI NO: 37532178 NR Description: putative receptor-like protein kinase
  misc_feature (42)..(233): Homolog of NCBI NO: 37532178 NR Description: putative receptor-like protein kinase
MVLKHANIVKMVGYCSETTKKLVQFDHRYIQADVTESVLCYEYLPKGDLAKNLFGKLIIDWDTRFKIIKGICKGLLYLHKLDIPIIHMDLKPENILLDEDMVPKIADFALSRVFGEAQTRLCTQTVVGSYGYMAPEYLYRGEISAQSDIYSLGLLIIEITTGEKNCPETNQPSARNFIDNVQKNWTEDYITFKYSSLTPDCLNQVKRCIKIGLECVTIDRKGRPTIEKIIDTLNGIN

SEQ ID NO: 66974 - DNA, 1255 bp, Triticum aestivum
  misc_feature (1)..(1255): Ceres Seq. ID no. 12780029
gtggataattttaccggcgagggcgcggtgacgcggcacctctccatccagacacccgaactccgccgctctccagccgccgccagcacgccatgctcccgctcgccgccgcaagggcctgcctttcctccccggcgccgacgccgagacccccatccccatcccgagcggcgtctctctccccccttctccgtcgcagctccaccgccaggcagctcagacccgccaggctccccctcctccgcccgctccaggccgcaacgggcgccggcgcgccgggcgcgtcctcgcggcccgcgagggaccgcgtgatcgacttcggcaagcacaagggccagatgctgggcacgctgccgccgtcctacctgcgctgggtggtcgcggagctcgactacggggacacggcggcctgggcgcgcctggcgcgcgaggtgctcgacgaccccgtctacgtcgactgcgtcgagtgggagcacgcgcaccgcttcctccgcggcgactccaagttcgactacgtctacgacgacgccggcgaagacggcgacgggccgctccaggagatggccgagcgcttcggctgggacctctccgacgaggacggctggggccgcctcgacttccgcctcctcggcacctcctacggcggccgcatcccgaggaaggccgaccggcgccagagcaccggcaacagatccccccgcggcggcggcggcgccctgttcgacgccggggcggacgggccgagggggaagagggacgagaggcgggagcggatgcggacgaggagggaggagcaggtgaggacggccaaactggatgtgctcggcgtgaacgccggcgcgaaggatggcggcgcactggggacggcgaggaaggcccgcattggtgtggcggcaaagaaggagatcctggggctgggccgctgcggcgagagggcggcgccgctgaaaggcggcgagggagggaacccgttccccggccggcaagccttcctcgacaaggtcaggaagctcaagggcgatgatagctagcgccagcagctaggctaggtgatatcaggatcgtttagtgctcaatagacgtaaattttgggcagttcatggaagcaagcagattgtattccttagataaattacagtacaagagtgagatctactctagcagacaagcaaggcactaggaatttaagaacttctttacgggaacattgacactgtttgagttgctgctaggaatttaagaatttaagatcgtc

SEQ ID NO: 66975 - protein, 312 aa, Triticum aestivum
  peptide (1)..(312): Ceres Seq. ID no. 12780030
  misc_feature (69)..(229): Homolog of NCBI NO: 15223713 NR Description: hypothetical protein; protein id: At1g51080.1
MLPLAAARACLSSPAPTPRPPSPSRAASLSPLLRRSSTARQLRPARLPLLRPLQAATGAGAPGASSRPARDRVIDFGKHKGQMLGTLPPSYLRWVVAELDYGDTAAWARLAREVLDDPVYVDCVEWEHAHRFLRGDSKFDYVYDDAGEDGDGPLQEMAERFGWDLSDEDGWGRLDFRLLGTSYGGRIPRKADRRQSTGNRSPRGGGGALFDAGADGPRGKRDERRERMRTRREEQVRTAKLDVLGVNAGAKDGGALGTARKARIGVAAKKEILGLGRCGERAAPLKGGEGGNPFPGRQAFLDKVRKLKGDDS

SEQ ID NO: 66976 - protein, 230 aa, Triticum aestivum
  peptide (1)..(230): Ceres Seq. ID no. 12780031
  misc_feature (1)..(147): Homolog of NCBI NO: 15223713 NR Description: hypothetical protein; protein id: At1g51080.1
MLGTLPPSYLRWVVAELDYGDTAAWARLAREVLDDPVYVDCVEWEHAHRFLRGDSKFDYVYDDAGEDGDGPLQEMAERFGWDLSDEDGWGRLDFRLLGTSYGGRIPRKADRRQSTGNRSPRGGGGALFDAGADGPRGKRDERRERMRTRREEQVRTAKLDVLGVNAGAKDGGALGTARKARIGVAAKKEILGLGRCGERAAPLKGGEGGNPFPGRQAFLDKVRKLKGDDS

SEQ ID NO: 66977 - protein, 156 aa, Triticum aestivum
  peptide (1)..(156): Ceres Seq. ID no. 12780032
  misc_feature (1)..(73): Homolog of NCBI NO: 15223713 NR Description: hypothetical protein; protein id: At1g51080.1
MAERFGWDLSDEDGWGRLDFRLLGTSYGGRIPRKADRRQSTGNRSPRGGGGALFDAGADGPRGKRDERRERMRTRREEQVRTAKLDVLGVNAGAKDGGALGTARKARIGVAAKKEILGLGRCGERAAPLKGGEGGNPFPGRQAFLDKVRKLKGDDS

SEQ ID NO: 66978 - DNA, 1818 bp, Triticum aestivum
  misc_feature (1)..(1818): Ceres Seq. ID no. 14302867
cgaaaaaaaatctatcggttttggtctctctcgccgccggatcgccggtccccaacccccacggccgcctccgtcagtaaggcatcgccatgtctgccgctccagaagctcctccttccgaaggtcctccatcgttcatcgccatgtctgccgctccggaagctcctccttccgaaggtccttcatcgtcggtcgccatatccacctcccccttccccaactggatactgctggagagctttgtcttccgcagggacgacaagaagtcttttccggacgacacaaaggcacccatcagggcgtccggcatcacctcctggaacgctcccttccggattgccttctcccttgccaagcccccgctcgcttcccgcctctatgcaaagttgcgacgctttccagatcctagtcaagagacgcctttagccatagtggcgacccacttcaatctactgctgcttcgcgtaggtaccaaaatccctgcacgagggctagtgcaggacttctttatctgcaatgcctatgaaccttccacgctcaaagctttgcctccttgtagagagccctacacagattatagccgcagcagcggtgacaacctacctcgtggtcgacccctccagaaggaggagcgacgcctgcttgaggttcaatcaatggggctcttgtgcggaggcggggagaagtttgcggtggcagagctctgcgttttcaagaccatccacttaaaatcatatgctgacatttgtttgctatgctctcccacatcagccgcccctgtccttggcggcaattggaactcgttccgtgtaccaatccttggcattgacagcaatgatccatggcacatttgttgctgggacactgacactgtcattacttttaggcactggctgtgctggatcgattatcatcgtggtattctattctttgacgtgttcggagagcctgtccctaccgtcacattccttgcttttcctcttgatgagtatccttccccgcacagtctcaaagaggtcaagccatccagccctctcaaatccagccggttgtatcgtggtgcgtctgtcttatttggtggcaatatgatcaaatttgtcaatgtcacccgccacgacggcattggttatggagaactcaaacctcgttcaggcttcaccatcacctgccacaccctcgagttaggcgacaccccagtgataggcaatgcaaggtggaagttagactacaagattacttctgatgagctttggtccgccaatcctcctgagcatcttccacacaacattctcatgttccctcaaatagacttagacatgccacatctagtgcactttatcatcagcgagtttgaattcgttattaagaagatgtggttggtgtccattgatatgaaaactaaggaggtgaaatcatttgctccgtacatcagtgggaaggaaggacttgaaacagacgacgcagacttgatcagagaaaggtctgacgctcccatgcccttcctaccctgtgatttctccaggtttctccgtctctcaaggttgagcaaggatatggaatgactcacggtgtacatttaagttcagctaccatgccaagactttccaaaggcaaacaacaagagaaatgacgcaatgacggacgatatacattaatacattattagatcctcacagacatcaagataacggtgtactacataagctgcgtatgagtagtctctcccaaagcttcatccttgtaattattgtagttgaacttgaattgtagaccgtaaagctatccagattgatgaagttggcacacgtgagtcattcc

SEQ ID NO: 66979 - protein, 490 aa, Triticum aestivum
  peptide (1)..(490): Ceres Seq. ID no. 14302868
  misc_feature (13)..(419): Homolog of NCBI NO: 38637211 NR Description: hypothetical protein [Oryza sativa (japonica
  misc_feature (37)..(482): Homolog of NCBI NO: 34912374 NR Description: P0518F01.23 [Oryza sativa (japonica
  misc_feature (32)..(479): Homolog of NCBI NO: 34896694 NR Description: hypothetical protein [Oryza sativa (japonica
MSAAPEAPPSEGPPSFIAMSAAPEAPPSEGPSSSVAISTSPFPNWILLESFVFRRDDKKSFPDDTKAPIRASGITSWNAPFRIAFSLAKPPLASRLYAKLRRFPDPSQETPLAIVATHFNLLLLRVGTKIPARGLVQDFFICNAYEPSTLKALPPCREPYTDYSRSSGDNLPRGRPLQKEERRLLEVQSMGLLCGGGEKFAVAELCVFKTIHLKSYADICLLCSPTSAAPVLGGNWNSFRVPILGIDSNDPWHICCWDTDTVITFRHWLCWIDYHRGILFFDVFGEPVPTVTFLAFPLDEYPSPHSLKEVKPSSPLKSSRLYRGASVLFGGNMIKFVNVTRHDGIGYGELKPRSGFTITCHTLELGDTPVIGNARWKLDYKITSDELWSANPPEHLPHNILMFPQIDLDMPHLVHFIISEFEFVIKKMWLVSIDMKTKEVKSFAPYISGKEGLETDDADLIRERSDAPMPFLPCDFSRFLRLSRLSKDME

SEQ ID NO: 66980 - protein, 472 aa, Triticum aestivum
  peptide (1)..(472): Ceres Seq. ID no. 14302869
  misc_feature (1)..(401): Homolog of NCBI NO: 38637211 NR Description: hypothetical protein [Oryza sativa (japonica
  misc_feature (19)..(464): Homolog of NCBI NO: 34912374 NR Description: P0518F01.23 [Oryza sativa (japonica
  misc_feature (14)..(461): Homolog of NCBI NO: 34896694 NR Description: hypothetical protein [Oryza sativa (japonica
MSAAPEAPPSEGPSSSVAISTSPFPNWILLESFVFRRDDKKSFPDDTKAPIRASGITSWNAPFRIAFSLAKPPLASRLYAKLRRFPDPSQETPLAIVATHFNLLLLRVGTKIPARGLVQDFFICNAYEPSTLKALPPCREPYTDYSRSSGDNLPRGRPLQKEERRLLEVQSMGLLCGGGEKFAVAELCVFKTIHLKSYADICLLCSPTSAAPVLGGNWNSFRVPILGIDSNDPWHICCWDTDTVITFRHWLCWIDYHRGILFFDVFGEPVPTVTFLAFPLDEYPSPHSLKEVKPSSPLKSSRLYRGASVLFGGNMIKFVNVTRHDGIGYGELKPRSGFTITCHTLELGDTPVIGNARWKLDYKITSDELWSANPPEHLPHNILMFPQIDLDMPHLVHFIISEFEFVIKKMWLVSIDMKTKEVKSFAPYISGKEGLETDDADLIRERSDAPMPFLPCDFSRFLRLSRLSKDME

SEQ ID NO: 66981 - protein, 301 aa, Triticum aestivum
  peptide (1)..(301): Ceres Seq. ID no. 14302870
  misc_feature (1)..(230): Homolog of NCBI NO: 38637211 NR Description: hypothetical protein [Oryza sativa (japonica
  misc_feature (1)..(293): Homolog of NCBI NO: 34912374 NR Description: P0518F01.23 [Oryza sativa (japonica
  misc_feature (1)..(290): Homolog of NCBI NO: 34896694 NR Description: hypothetical protein [Oryza sativa (japonica
MGLLCGGGEKFAVAELCVFKTIHLKSYADICLLCSPTSAAPVLGGNWNSFRVPILGIDSNDPWHICCWDTDTVITFRHWLCWIDYHRGILFFDVFGEPVPTVTFLAFPLDEYPSPHSLKEVKPSSPLKSSRLYRGASVLFGGNMIKFVNVTRHDGIGYGELKPRSGFTITCHTLELGDTPVIGNARWKLDYKITSDELWSANPPEHLPHNILMFPQIDLDMPHLVHFIISEFEFVIKKMWLVSIDMKTKEVKSFAPYISGKEGLETDDADLIRERSDAPMPFLPCDFSRFLRLSRLSKDME

SEQ ID NO: 66982 - DNA, 1160 bp, Triticum aestivum
  misc_feature (1)..(1160): Ceres Seq. ID no. 12784064
aaaaatcctcgatctcaccaacataagccttcctcattcattcattcagctgtacaactctgatcatcgaccagcagcgggattctcctcgtctgatttgttcatccgacacccgatcgatccgcagcagcaggtgatccggctacaatggaggcagcggtagctcgcgccgacacagcagcattcttctcgggccaggaggacgcggccggggggagcatatccagactaccggctcgggtcgccggctcgatcgtccgcggcgtgatcaccttcatcttcgccacagtgggcacgattctgggagccatcacgggcgggatgatcgggctggcgacggagagcggtctcgtccgcggcgcgggcatcggcgccatctccggcgccgtggtggccatggaggttgtcgacaggtccatggccatgtggcgctccgacgagtgcggcatctggagcgtcctatacgtgcttgacgtgatctggagcctcctgacgggtcgtctggtgcgcgagaaggtggaccccgcagtgcagaacgcggtcgacagccagatgaacgccgcgggcgacgggttcagcgacagcccgccgacgctctccgagatgtttgacatgggctccgcctccttcaaaggcatggctgcagacgccatcgccgagctccccgcgacgacgatcaccgagcagcaagccgccgtgcaggacgggggctgctccgtgtgcctccaggagttcgaggccggcgaggcggcgcggagcctgccggagtgccgccacacgttccacatgtcgtgcatagacgggtggctttgccggcatgcgtcgtgcccgctgtgccgccgcgccgtctaggcctggcgtgcccggctcgttaggatcgatgtgtgcatagccagcgtatatacacacgtgttacgcgcgtgtgtgagtgtggcgctagcacgtacggcacgcgcacgcacatacgggaagttcgttaatttgttatacgtagttagctactagttgggttgagactgacatgacatgacacttgtgccgacaagttctttcgtgacttgttcgttgccttcatttctgcggaaattatgattgtattgctacaccacacgcgcggctggttgcgaatatctatacagaaaatcatcagcgtttagatt

SEQ ID NO: 66983 - protein, 234 aa, Triticum aestivum
  peptide (1)..(234): Ceres Seq. ID no. 12784065
  misc_feature (189)..(230): Pfam Name: Zinc finger, C3HC4 type (RING finger) Pfam Description: Zinc finger, C3HC4 type (RING finger)
  misc_feature (28)..(229): Homolog of NCBI NO: 7485279 NR Description: hypothetical protein A_TM017A05.9 - Arabidopsis
  misc_feature (1)..(234): Homolog of NCBI NO: 33146606 NR Description: putative NEP1-interacting protein 2
  misc_feature (32)..(232): Homolog of NCBI NO: 27524902 NR Description: NEP1-interacting protein [Arabidopsis thaliana]
  misc_feature (35)..(232): Homolog of NCBI NO: 15239242 NR Description: putative protein; protein id: At5g66070.1
  misc_feature (32)..(232): Homolog of NCBI NO: 26451101 NR Description: unknown protein [Arabidopsis thaliana]
  misc_feature (28)..(229): Homolog of NCBI NO: 25411815 NR Description: hypothetical protein At2g17730 [imported] -
  misc_feature (28)..(234): Homolog of NCBI NO: 26452210 NR Description: unknown protein [Arabidopsis thaliana]
  misc_feature (21)..(234): Homolog of NCBI NO: 37536572 NR Description: hypothetical protein [Oryza sativa (japonica
  misc_feature (28)..(234): Homolog of NCBI NO: 30680091 NR Description: expressed protein [Arabidopsis thaliana]
  misc_feature (10)..(232): Homolog of NCBI NO: 18855037 NR Description: putative zinc finger protein [Oryza sativa]
MEAAVARADTAAFFSGQEDAAGGSISRLPARVAGSIVRGVITFIFATVGTILGAITGGMIGLATESGLVRGAGIGAISGAVVAMEVVDRSMAMWRSDECGIWSVLYVLDVIWSLLTGRLVREKVDPAVQNAVDSQMNAAGDGFSDSPPTLSEMFDMGSASFKGMAADAIAELPATTITEQQAAVQDGGCSVCLQEFEAGEAARSLPECRHTFHMSCIDGWLCRHASCPLCRRAV

SEQ ID NO: 66984 - protein, 176 aa, Triticum aestivum
  peptide (1)..(176): Ceres Seq. ID no. 12784066
  misc_feature (131)..(172): Pfam Name: Zinc finger, C3HC4 type (RING finger) Pfam Description: Zinc finger, C3HC4 type (RING finger)
  misc_feature (1)..(171): Homolog of NCBI NO: 7485279 NR Description: hypothetical protein A_TM017A05.9 - Arabidopsis
  misc_feature (1)..(176): Homolog of NCBI NO: 33146606 NR Description: putative NEP1-interacting protein 2
  misc_feature (1)..(174): Homolog of NCBI NO: 27524902 NR Description: NEP1-interacting protein [Arabidopsis thaliana]
  misc_feature (1)..(174): Homolog of NCBI NO: 15239242 NR Description: putative protein; protein id: At5g66070.1
  misc_feature (1)..(174): Homolog of NCBI NO: 26451101 NR Description: unknown protein [Arabidopsis thaliana]
  misc_feature (1)..(171): Homolog of NCBI NO: 25411815 NR Description: hypothetical protein At2g17730 [imported] -
  misc_feature (1)..(176): Homolog of NCBI NO: 26452210 NR Description: unknown protein [Arabidopsis thaliana]
  misc_feature (1)..(176): Homolog of NCBI NO: 37536572 NR Description: hypothetical protein [Oryza sativa (japonica
  misc_feature (1)..(176): Homolog of NCBI NO: 30680091 NR Description: expressed protein [Arabidopsis thaliana]
  misc_feature (1)..(174): Homolog of NCBI NO: 18855037 NR Description: putative zinc finger protein [Oryza sativa]
MIGLATESGLVRGAGIGAISGAVVAMEVVDRSMAMWRSDECGIWSVLYVLDVIWSLLTGRLVREKVDPAVQNAVDSQMNAAGDGFSDSPPTLSEMFDMGSASFKGMAADAIAELPATTITEQQAAVQDGGCSVCLQEFEAGEAARSLPECRHTFHMSCIDGWLCRHASCPLCRRAV

SEQ ID NO: 66985 - protein, 151 aa, Triticum aestivum
  peptide (1)..(151): Ceres Seq. ID no. 12784067
  misc_feature (106)..(147): Pfam Name: Zinc finger, C3HC4 type (RING finger) Pfam Description: Zinc finger, C3HC4 type (RING finger)
  misc_feature (1)..(146): Homolog of NCBI NO: 7485279 NR Description: hypothetical protein A_TM017A05.9 - Arabidopsis
  misc_feature (1)..(151): Homolog of NCBI NO: 33146606 NR Description: putative NEP1-interacting protein 2
  misc_feature (1)..(149): Homolog of NCBI NO: 27524902 NR Description: NEP1-interacting protein [Arabidopsis thaliana]
  misc_feature (1)..(149): Homolog of NCBI NO: 15239242 NR Description: putative protein; protein id: At5g66070.1
  misc_feature (1)..(149): Homolog of NCBI NO: 26451101 NR Description: unknown protein [Arabidopsis thaliana]
  misc_feature (1)..(146): Homolog of NCBI NO: 25411815 NR Description: hypothetical protein At2g17730 [imported] -
  misc_feature (1)..(151): Homolog of NCBI NO: 26452210 NR Description: unknown protein [Arabidopsis thaliana]
  misc_feature (1)..(151): Homolog of NCBI NO: 37536572 NR Description: hypothetical protein [Oryza sativa (japonica
  misc_feature (1)..(151): Homolog of NCBI NO: 30680091 NR Description: expressed protein [Arabidopsis thaliana]
  misc_feature (1)..(149): Homolog of NCBI NO: 18855037 NR Description: putative zinc finger protein [Oryza sativa]
MEVVDRSMAMWRSDECGIWSVLYVLDVIWSLLTGRLVREKVDPAVQNAVDSQMNAAGDGFSDSPPTLSEMFDMGSASFKGMAADAIAELPATTITEQQAAVQDGGCSVCLQEFEAGEAARSLPECRHTFHMSCIDGWLCRHASCPLCRRAV

SEQ ID NO: 66986 - DNA, 1379 bp, Triticum aestivum
  misc_feature (1)..(1379): Ceres Seq. ID no. 13659489
aaaacacggcagagttttcccctttcccccctcctccctccccactcgccaaaaatcctcgatccaaatccccactcccggcgacgcgacgcggccatgcgcagctgccgataggcgacgactgcagcgaccacgcacgagcggccatggacgagggctacgccagcctccccaccagccacctcctcggctccgtccccgctgtggctgtggctcccgatgagaggaagcccggtgcccccgccgaagttggaaatgccgctgccacctcgcgccttcagcagtttccgcctgctcctgctgccaacggaggagggtaccagcctccagggagtcctctaggtggagatgtagaaacacagacaaactggaaaggatacttcaatgttgcctcttatactccatatttcaatgttgatactgatgtcgttgttgacagacttatcagttcagtttatccaatggatgggtttttcaggaagatagatgctaatcctgacatgtatggacccttatggatcaccactacactgatattcatgctggctgcattcggaaactttgccacttatctaatgcaaaggaaaagtgatctgaatatatggaactttgatgtcagctatttcagtttggcggcatcagtcatgtacggttatgctatcgtggtacctgctgcattctttttcctgtttcagtactttggatcacgcccaagccttctccggttttggtgtatgtggggctattctctgttcatcttcgtgccggcatctatactgctccttattcctgtggaatttcttcgctgggtcatcatagctggtgctggtggtgcatcatcttggttcatctttttaaacttgaaggaatgcaccgaaggagctgatatgatggctttaatcgcaagtgcagcagtgctgcagtttgctctggcactgttcatcaaagttttcttttttgcctgagatctattctgtgttgcttcaggtgagctggatgttttctttgtgtccccgtcgttctgttctgccattcatctttccgaggaccaggcagtggactagtttcaccctacatacatattgaccctagatttgatagaccttgggagtgtctgttttcaagatttttgactcctgtagttaagggaatttcactgtgtgcgttccagtgcgaagttactaagtttgcatctaaatttgtacctggtgaactttctgccaccgtgttgtacaacaacggtggttagcaagaatgtgaagctcttttttgtttgtacaatccattgctgtgaatgcatggttttctcatgtttctatccagcataaaaaaaaaaaaaaaaaagcttatcgataccgtcgacctcgagggggggcccg

SEQ ID NO: 66987 - protein, 320 aa, Triticum aestivum
  peptide (1)..(320): Ceres Seq. ID no. 13659490
  misc_feature (136)..(292): Pfam Name: Yip1 domain Pfam Description: Yip1 domain
  misc_feature (81)..(319): Homolog of NCBI NO: 13128976 NR Description: hypothetical protein MGC3262 [Homo sapiens]
  misc_feature (108)..(319): Homolog of NCBI NO: 17536971 NR Description: Putative membrane protein, with at least 4
  misc_feature (102)..(320): Homolog of NCBI NO: 40740298 NR Description: hypothetical protein AN4017.2 [Aspergillus
  misc_feature (89)..(319): Homolog of NCBI NO: 18859855 NR Description: CG4645-PA [Drosophila melanogaster]
  misc_feature (52)..(319): Homolog of NCBI NO: 34912560 NR Description: P0410E03.18 [Oryza sativa (japonica
  misc_feature (53)..(319): Homolog of NCBI NO: 30679454 NR Description: expressed protein [Arabidopsis thaliana]
  misc_feature (53)..(319): Homolog of NCBI NO: 6729038 NR Description: unknown protein [Arabidopsis thaliana]
  misc_feature (53)..(319): Homolog of NCBI NO: 38564308 NR Description: At5g27490 [Arabidopsis thaliana]
  misc_feature (53)..(319): Homolog of NCBI NO: 30690667 NR Description: expressed protein [Arabidopsis thaliana]
  misc_feature (49)..(319): Homolog of NCBI NO: 30688039 NR Description: expressed protein [Arabidopsis thaliana]
NTAEFSPFPPPPSPLAKNPRSKSPLPATRRGHAQLPIGDDCSDHARAAMDEGYASLPTSHLLGSVPAVAVAPDERKPGAPAEVGNAAATSRLQQFPPAPAANGGGYQPPGSPLGGDVETQTNWKGYFNVASYTPYFNVDTDVVVDRLISSVYPMDGFFRKIDANPDMYGPLWITTTLIFMLAAFGNFATYLMQRKSDLNIWNFDVSYFSLAASVMYGYAIVVPAAFFFLFQYFGSRPSLLRFWCMWGYSLFIFVPASILLLIPVEFLRWVIIAGAGGASSWFIFLNLKECTEGADMMALIASAAVLQFALALFIKVFFFA

SEQ ID NO: 66988 - protein, 272 aa, Triticum aestivum
  peptide (1)..(272): Ceres Seq. ID no. 13659491
  misc_feature (88)..(244): Pfam Name: Yip1 domain Pfam Description: Yip1 domain
  misc_feature (33)..(271): Homolog of NCBI NO: 13128976 NR Description: hypothetical protein MGC3262 [Homo sapiens]
  misc_feature (60)..(271): Homolog of NCBI NO: 17536971 NR Description: Putative membrane protein, with at least 4
  misc_feature (54)..(272): Homolog of NCBI NO: 40740298 NR Description: hypothetical protein AN4017.2 [Aspergillus
  misc_feature (41)..(271): Homolog of NCBI NO: 18859855 NR Description: CG4645-PA [Drosophila melanogaster]
  misc_feature (4)..(271): Homolog of NCBI NO: 34912560 NR Description: P0410E03.18 [Oryza sativa (japonica
  misc_feature (5)..(271): Homolog of NCBI NO: 30679454 NR Description: expressed protein [Arabidopsis thaliana]
  misc_feature (5)..(271): Homolog of NCBI NO: 6729038 NR Description: unknown protein [Arabidopsis thaliana]
  misc_feature (5)..(271): Homolog of NCBI NO: 38564308 NR Description: At5g27490 [Arabidopsis thaliana]
  misc_feature (5)..(271): Homolog of NCBI NO: 30690667 NR Description: expressed protein [Arabidopsis thaliana]
  misc_feature (1)..(271): Homolog of NCBI NO: 30688039 NR Description: expressed protein [Arabidopsis thaliana]
MDEGYASLPTSHLLGSVPAVAVAPDERKPGAPAEVGNAAATSRLQQFPPAPAANGGGYQPPGSPLGGDVETQTNWKGYFNVASYTPYFNVDTDVVVDRLISSVYPMDGFFRKIDANPDMYGPLWITTTLIFMLAAFGNFATYLMQRKSDLNIWNFDVSYFSLAASVMYGYAIVVPAAFFFLFQYFGSRPSLLRFWCMWGYSLFIFVPASILLLIPVEFLRWVIIAGAGGASSWFIFLNLKECTEGADMMALIASAAVLQFALALFIKVFFFA

SEQ ID NO: 66989 - protein, 167 aa, Triticum aestivum
  peptide (1)..(167): Ceres Seq. ID no. 13659492
  misc_feature (1)..(139): Pfam Name: Yip1 domain Pfam Description: Yip1 domain
  misc_feature (1)..(166): Homolog of NCBI NO: 13128976 NR Description: hypothetical protein MGC3262 [Homo sapiens]
  misc_feature (1)..(166): Homolog of NCBI NO: 17536971 NR Description: Putative membrane protein, with at least 4
  misc_feature (1)..(167): Homolog of NCBI NO: 40740298 NR Description: hypothetical protein AN4017.2 [Aspergillus
  misc_feature (1)..(166): Homolog of NCBI NO: 18859855 NR Description: CG4645-PA [Drosophila melanogaster]
  misc_feature (1)..(166): Homolog of NCBI NO: 34912560 NR Description: P0410E03.18 [Oryza sativa (japonica
  misc_feature (1)..(166): Homolog of NCBI NO: 30679454 NR Description: expressed protein [Arabidopsis thaliana]
  misc_feature (1)..(166): Homolog of NCBI NO: 6729038 NR Description: unknown protein [Arabidopsis thaliana]
  misc_feature (1)..(166): Homolog of NCBI NO: 38564308 NR Description: At5g27490 [Arabidopsis thaliana]
  misc_feature (1)..(166): Homolog of NCBI NO: 30690667 NR Description: expressed protein [Arabidopsis thaliana]
  misc_feature (1)..(166): Homolog of NCBI NO: 30688039 NR Description: expressed protein [Arabidopsis thaliana]
MDGFFRKIDANPDMYGPLWITTTLIFMLAAFGNFATYLMQRKSDLNIWNFDVSYFSLAASVMYGYAIVVPAAFFFLFQYFGSRPSLLRFWCMWGYSLFIFVPASILLLIPVEFLRWVIIAGAGGASSWFIFLNLKECTEGADMMALIASAAVLQFALALFIKVFFFA

SEQ ID NO: 66990 - DNA, 885 bp, Triticum aestivum
  misc_feature (1)..(885): Ceres Seq. ID no. 13660037
agaacatcytaatcgaaaasgggagccgamccaaataggcaacctaaagtagaaaacagtccacgccgccgcggcaccgagcgaccccgcgggcgtccttggaagaagacgaagcggcggcgacgacgacctaggcagaccgctcgctcgtgttggagcctggatggcgtccggaggcatcgcccgcggccgcctcgccgaggagcgcaagtcgtggcgcaagaaccacccccatggcttcgtggccaagccggagaccctgccggatgggtccgtcaatctcatggtctggcggtgcgtcatccccggcaagccagggactgactgggaaggtggatatttcccgctaactctgcaatttgatgataattacccaacaaccgctcctagctgcaggttcccagcaggtttcttccatatcaatgtctatgattctggagtagtatgcctatcgatactgggtgatgcatggaaaccttcaattacagtgaagcaggttttggtaggcatccaggagttgctggatgacccaaatcctaactcagccgcacagcatcgatgctatgaactctataagaagaacatgccagagtacaggaacaaagtccgtgagcagaccaagcgctacccttcgcgcatgtagctactctagtagtgcataatattagtgtgcatttcgttggggactgaagtctagagttgcgccgcgatgggggtgtagttagcgcaatggtagtgtatttgttggaactgctgaactgcacttttgagtacatcttcgctacgaattgttccgggcctcggtagcttatctcaatgtagtttgggtgagctttgctgacccttttttttactttgtgatgaaaagagatatccttttcttcc

SEQ ID NO: 66991 - protein, 159 aa, Triticum aestivum
  peptide (1)..(159): Ceres Seq. ID no. 15220007
  misc_feature (5)..(157): Homolog of NCBI NO: 4507785 NR Description: ubiquitin-conjugating enzyme E2I (UBC9 homolog,
  misc_feature (5)..(157): Homolog of NCBI NO: 3212324 NR Description: Human Ubc9
  misc_feature (5)..(157): Homolog of NCBI NO: 20150955 NR Description: Chain A, Structural Basis For E2-Mediated Sumo Revealed By A Complex Between Ubiquitin Conjugating Enzyme Ubc9
  misc_feature (5)..(157): Homolog of NCBI NO: 2194010 NR Description: Chain A, Human Ubiquitin-Conjugating Enzyme Ubc9
  misc_feature (5)..(156): Homolog of NCBI NO: 7621708 NR Description: putative E2 enzyme Ubc9 [Dictyostelium discoideum]
  misc_feature (1)..(157): Homolog of NCBI NO: 15230881 NR Description: ubiquitin-conjugating enzyme, putative
  misc_feature (3)..(156): Homolog of NCBI NO: 25446690 NR Description: Putative ubiquitin-conjugating enzyme
  misc_feature (3)..(157): Homolog of NCBI NO: 37536440 NR Description: putative ubiquitin-conjugating enzyme
  misc_feature (3)..(157): Homolog of NCBI NO: 20975734 NR Description: putative ubiquitin-conjugating enzyme [Populus
  misc_feature (1)..(159): Homolog of NCBI NO: 38345867 NR Description: OSJNBa0064M23.9 [Oryza sativa (japonica
MASGGIARGRLAEERKSWRKNHPHGFVAKPETLPDGSVNLMVWRCVIPGKPGTDWEGGYFPLTLQFDDNYPTTAPSCRFPAGFFHINVYDSGVVCLSILGDAWKPSITVKQVLVGIQELLDDPNPNSAAQHRCYELYKKNMPEYRNKVREQTKRYPSRM

SEQ ID NO: 66992 - protein, 119 aa, Triticum aestivum
  peptide (1)..(119): Ceres Seq. ID no. 15220008
  misc_feature (1)..(117): Homolog of NCBI NO: 3212324 NR Description: Human Ubc9
  misc_feature (1)..(117): Homolog of NCBI NO: 4507785 NR Description: ubiquitin-conjugating enzyme E2I (UBC9 homolog,
  misc_feature (1)..(117): Homolog of NCBI NO: 20150955 NR Description: Chain A, Structural Basis For E2-Mediated Sumo Revealed By A Complex Between Ubiquitin Conjugating Enzyme Ubc9
  misc_feature (1)..(117): Homolog of NCBI NO: 2194010 NR Description: Chain A, Human Ubiquitin-Conjugating Enzyme Ubc9
  misc_feature (1)..(116): Homolog of NCBI NO: 7621708 NR Description: putative E2 enzyme Ubc9 [Dictyostelium discoideum]
  misc_feature (1)..(117): Homolog of NCBI NO: 15230881 NR Description: ubiquitin-conjugating enzyme, putative
  misc_feature (1)..(116): Homolog of NCBI NO: 25446690 NR Description: Putative ubiquitin-conjugating enzyme
  misc_feature (1)..(117): Homolog of NCBI NO: 37536440 NR Description: putative ubiquitin-conjugating enzyme
  misc_feature (1)..(117): Homolog of NCBI NO: 20975734 NR Description: putative ubiquitin-conjugating enzyme [Populus
  misc_feature (1)..(119): Homolog of NCBI NO: 38345867 NR Description: OSJNBa0064M23.9 [Oryza sativa (japonica
MVWRCVIPGKPGTDWEGGYFPLTLQFDDNYPTTAPSCRFPAGFFHINVYDSGVVCLSILGDAWKPSITVKQVLVGIQELLDDPNPNSAAQHRCYELYKKNMPEYRNKVREQTKRYPSRM

SEQ ID NO: 66993 - DNA, 762 bp, Triticum aestivum
  misc_feature (1)..(762): Ceres Seq. ID no. 12626722
aagactttgggctcacccgatgcttttcccctcccccacagccctcgtcctcttggtcggatcttctctctcgagtcttgtccaggccgcgccgccacagccacgccgcctagtgctatagttcttccctcccctcccctccctccatcccaccggccgcctgcgtccaatccgtcctgttgattccgaattttcaatcaatctttctaacaacagctagcttcttctcccccttccgcagatggagatgccgacgggttcttcgcaggcaggtggccgcttccctgtgccgcacaagtccctctccttggatatcaagggcaacaagactgacattgttatcagcaaatacgaagataactttctggtcattgtgacacagattggatgcatgggaaccatattagctgctaagaaagatgaaagtgttttctctgatccaacctacaatgtatctgttctttttgggaagagggatgagccactcctgctagtttgtgcacgccaacttatcgagcatataagtggtagtggctcagctcgtccgttggtgatctcttttggtttgaaggatcattcccagggaacatcgaaagatgtagtttcttccatcgttgacaaccgcctatggtgataactttgcaaaggttgggatgggcatttacagtttcggttcatcttcagagatattgacatacacaagctgtcagagcaaaaccagcccttccttaccatgcatgaatctctagaaactatgtaatg

SEQ ID NO: 66994 - protein, 130 aa, Triticum aestivum
  peptide (1)..(130): Ceres Seq. ID no. 12626723
  misc_feature (27)..(46): Homolog of NCBI NO: 34894978 NR Description: B1088D01.11 [Oryza sativa (japonica
  misc_feature (58)..(94): Homolog of NCBI NO: 34894978 NR Description: B1088D01.11 [Oryza sativa (japonica
  misc_feature (14)..(130): Homolog of NCBI NO: 15241480 NR Description: putative protein
  misc_feature (1)..(130): Homolog of NCBI NO: 37534018 NR Description: hypothetical protein [Oryza sativa (japonica
MEMPTGSSQAGGRFPVPHKSLSLDIKGNKTDIVISKYEDNFLVIVTQIGCMGTILAAKKDESVFSDPTYNVSVLFGKRDEPLLLVCARQLIEHISGSGSARPLVISFGLKDHSQGTSKDVVSSIVDNRLW

SEQ ID NO: 66995 - protein, 128 aa, Triticum aestivum
  peptide (1)..(128): Ceres Seq. ID no. 12626724
  misc_feature (25)..(44): Homolog of NCBI NO: 34894978 NR Description: B1088D01.11 [Oryza sativa (japonica
  misc_feature (56)..(92): Homolog of NCBI NO: 34894978 NR Description: B1088D01.11 [Oryza sativa (japonica
  misc_feature (12)..(128): Homolog of NCBI NO: 15241480 NR Description: putative protein
  misc_feature (1)..(128): Homolog of NCBI NO: 37534018 NR Description: hypothetical protein [Oryza sativa (japonica
MPTGSSQAGGRFPVPHKSLSLDIKGNKTDIVISKYEDNFLVIVTQIGCMGTILAAKKDESVFSDPTYNVSVLFGKRDEPLLLVCARQLIEHISGSGSARPLVISFGLKDHSQGTSKDVVSSIVDNRLW

SEQ ID NO: 66996 - protein, 80 aa, Triticum aestivum
  peptide (1)..(80): Ceres Seq. ID no. 12626725
  misc_feature (8)..(44): Homolog of NCBI NO: 34894978 NR Description: B1088D01.11 [Oryza sativa (japonica
  misc_feature (1)..(80): Homolog of NCBI NO: 15241480 NR Description: putative protein
  misc_feature (1)..(80): Homolog of NCBI NO: 37534018 NR Description: hypothetical protein [Oryza sativa (japonica
MGTILAAKKDESVFSDPTYNVSVLFGKRDEPLLLVCARQLIEHISGSGSARPLVISFGLKDHSQGTSKDVVSSIVDNRLW

SEQ ID NO: 66997 - DNA, 1627 bp, Triticum aestivum
  misc_feature (1)..(1627): Ceres Seq. ID no. 15226673
aagaacgtgacatgggcgcacattgacattaggctgctgctgccattccttcctctttcccctccttccacatcccagtcttctccacccacgccaccaaacccccgagatcacgcgagctatatatactgcatattctcccggccctgcaaagcgaggcctctattacttactgatatccccgccgaaatcaagatggggctgcggacctgcggcgccatggaaggcgagcacgttgtcgcctcgcctttcttcgagtggttgaagccgccgccggcgtcgccgtcctcgtcgagatcgtcgtcgactttctcgtcctcctcgtcgtctatggcgtctgggcaccaagaggatcgcagcagcgtggcatgcttgcccctgctccgcatgctcgaggaggggaagggggctggtggtgaccatgatcaccctgcacctccagtcaaggaagagatcatgggcagcggcgcggccgaggtgctggggcctggcgtggatctgaatatcggcttgccggttggtggatcttgcgatgatgacatcatggaggaggagagccaggaggaagatgatgaccacgactgtgacgaagaggaggaggaagagatggatgagttggaacctaaccatggcggttgcaaggtggaggcagaggagaaagagaagcacggcgagccggtggtctcggtggaaggatcaaacagcgtcagcatgccggaattcggcgtgctcggagcagagagcggcgtgcccatgagctgcgggtactggatcccgacgccggcgcagatcctcgtcggcccggtgcagtttgtctgccatgtctgtaacaagagcttcaacagatacaataacatgcagatgcacatgtggggccacgggcgcgagtaccgcaagggcccggagtcgctcaagggcacgcagacgctggcgctcctgaagctgccgtgctactgctgcgccgccgggtgccggaacagcgtggcccacccgcgcgcgcggccgctcaaggacttccgcaccctgcagacgcactacaagcgcaagcacggcgccaggcccttccgctgccgccgctgcgccaagcccttcgccgtcaagggcgactggcgcacgcacgagaagaactgcggcaagcgctggttctgcgcctgcggctccgacttcaagcacaagcgctcgctcaacgaccacgtccgctcattcggcggcgaccacctccccgtcgccctcgacggcgcccccgcccccgcccccgcccccgtcgaggaccgccgcatcatacgcttccaacggtgagatcgtacgtcgaccgagctagctgatcgtactacatagatcatatatatgcatgcatgcatgcagtgcatgctagggtgcatgcaggaggagcaacgaggtaagtgatagcgcaataagggggttctcgaccagttgctaaaagctgtgaagtagctgaattttcttcagccggactgtgggagctgcaggcagtgctattagctaggctgtcaatgcagctttgtaatggagaaaatttatcagcttcacaggctaactaaactggtatttggacctagtactgtatacatagcattttgaacatgagacatagcaatttatgagc

SEQ ID NO: 66998 - protein, 432 aa, Triticum aestivum
  peptide (1)..(432): Ceres Seq. ID no. 15226674
  misc_feature (271)..(293): Pfam Name: Zinc finger, C2H2 type Pfam Description: Zinc finger, C2H2 type
  misc_feature (256)..(406): Homolog of NCBI NO: 15222242 NR Description: zinc finger protein -related [Arabidopsis
  misc_feature (254)..(408): Homolog of NCBI NO: 15223175 NR Description: WIP3 protein [Arabidopsis thaliana]
  misc_feature (183)..(408): Homolog of NCBI NO: 30693123 NR Description: transparent testa 1 (TT1) protein [Arabidopsis
  misc_feature (183)..(408): Homolog of NCBI NO: 18253283 NR Description: transparent testa 1 [Arabidopsis thaliana]
  misc_feature (256)..(413): Homolog of NCBI NO: 15230370 NR Description: zinc finger - like protein [Arabidopsis thaliana]
  misc_feature (242)..(413): Homolog of NCBI NO: 28973719 NR Description: putative zinc finger protein [Arabidopsis
  misc_feature (256)..(412): Homolog of NCBI NO: 15223781 NR Description: expressed protein [Arabidopsis thaliana]
  misc_feature (256)..(425): Homolog of NCBI NO: 30685975 NR Description: DNA-binding protein -related [Arabidopsis
  misc_feature (256)..(425): Homolog of NCBI NO: 9294415 NR Description: zinc finger-like protein [Arabidopsis thaliana]
  misc_feature (74)..(432): Homolog of NCBI NO: 34908460 NR Description: P0683F02.21 [Oryza sativa (japonica
KNVTWAHIDIRLLLPFLPLSPPSTSQSSPPTPPNPRDHASYIYCIFSRPCKARPLLLTDIPAEIKMGLRTCGAMEGEHVVASPFFEWLKPPPASPSSSRSSSTFSSSSSSMASGHQEDRSSVACLPLLRMLEEGKGAGGDHDHPAPPVKEEIMGSGAAEVLGPGVDLNIGLPVGGSCDDDIMEEESQEEDDDHDCDEEEEEEMDELEPNHGGCKVEAEEKEKHGEPVVSVEGSNSVSMPEFGVLGAESGVPMSCGYWIPTPAQILVGPVQFVCHVCNKSFNRYNNMQMHMWGHGREYRKGPESLKGTQTLALLKLPCYCCAAGCRNSVAHPRARPLKDFRTLQTHYKRKHGARPFRCRRCAKPFAVKGDWRTHEKNCGKRWFCACGSDFKHKRSLNDHVRSFGGDHLPVALDGAPAPAPAPVEDRRIIRFQR

SEQ ID NO: 66999 - protein, 367 aa, Triticum aestivum
  peptide (1)..(367): Ceres Seq. ID no. 15226675
  misc_feature (206)..(228): Pfam Name: Zinc finger, C2H2 type Pfam Description: Zinc finger, C2H2 type
  misc_feature (191)..(341): Homolog of NCBI NO: 15222242 NR Description: zinc finger protein -related [Arabidopsis
  misc_feature (189)..(343): Homolog of NCBI NO: 15223175 NR Description: WIP3 protein [Arabidopsis thaliana]
  misc_feature (118)..(343): Homolog of NCBI NO: 30693123 NR Description: transparent testa 1 (TT1) protein [Arabidopsis
  misc_feature (118)..(343): Homolog of NCBI NO: 18253283 NR Description: transparent testa 1 [Arabidopsis thaliana]
  misc_feature (191)..(348): Homolog of NCBI NO: 15230370 NR Description: zinc finger - like protein [Arabidopsis thaliana]
  misc_feature (177)..(348): Homolog of NCBI NO: 28973719 NR Description: putative zinc finger protein [Arabidopsis
  misc_feature (191)..(347): Homolog of NCBI NO: 15223781 NR Description: expressed protein [Arabidopsis thaliana]
  misc_feature (191)..(360): Homolog of NCBI NO: 30685975 NR Description: DNA-binding protein -related [Arabidopsis
  misc_feature (191)..(360): Homolog of NCBI NO: 9294415 NR Description: zinc finger-like protein [Arabidopsis thaliana]
  misc_feature (9)..(367): Homolog of NCBI NO: 34908460 NR Description: P0683F02.21 [Oryza sativa (japonica
MGLRTCGAMEGEHVVASPFFEWLKPPPASPSSSRSSSTFSSSSSSMASGHQEDRSSVACLPLLRMLEEGKGAGGDHDHPAPPVKEEIMGSGAAEVLGPGVDLNIGLPVGGSCDDDIMEEESQEEDDDHDCDEEEEEEMDELEPNHGGCKVEAEEKEKHGEPVVSVEGSNSVSMPEFGVLGAESGVPMSCGYWIPTPAQILVGPVQFVCHVCNKSFNRYNNMQMHMWGHGREYRKGPESLKGTQTLALLKLPCYCCAAGCRNSVAHPRARPLKDFRTLQTHYKRKHGARPFRCRRCAKPFAVKGDWRTHEKNCGKRWFCACGSDFKHKRSLNDHVRSFGGDHLPVALDGAPAPAPAPVEDRRIIRFQR

SEQ ID NO: 67000 - protein, 359 aa, Triticum aestivum
  peptide (1)..(359): Ceres Seq. ID no. 15226676
  misc_feature (198)..(220): Pfam Name: Zinc finger, C2H2 type Pfam Description: Zinc finger, C2H2 type
  misc_feature (183)..(333): Homolog of NCBI NO: 15222242 NR Description: zinc finger protein -related [Arabidopsis
  misc_feature (181)..(335): Homolog of NCBI NO: 15223175 NR Description: WIP3 protein [Arabidopsis thaliana]
  misc_feature (110)..(335): Homolog of NCBI NO: 30693123 NR Description: transparent testa 1 (TT1) protein [Arabidopsis
  misc_feature (110)..(335): Homolog of NCBI NO: 18253283 NR Description: transparent testa 1 [Arabidopsis thaliana]
  misc_feature (183)..(340): Homolog of NCBI NO: 15230370 NR Description: zinc finger - like protein [Arabidopsis thaliana]
  misc_feature (169)..(340): Homolog of NCBI NO: 28973719 NR Description: putative zinc finger protein [Arabidopsis
  misc_feature (183)..(339): Homolog of NCBI NO: 15223781 NR Description: expressed protein [Arabidopsis thaliana]
  misc_feature (183)..(352): Homolog of NCBI NO: 30685975 NR Description: DNA-binding protein -related [Arabidopsis
  misc_feature (183)..(352): Homolog of NCBI NO: 9294415 NR Description: zinc finger-like protein [Arabidopsis thaliana]
  misc_feature (1)..(359): Homolog of NCBI NO: 34908460 NR Description: P0683F02.21 [Oryza sativa (japonica
MEGEHVVASPFFEWLKPPPASPSSSRSSSTFSSSSSSMASGHQEDRSSVACLPLLRMLEEGKGAGGDHDHPAPPVKEEIMGSGAAEVLGPGVDLNIGLPVGGSCDDDIMEEESQEEDDDHDCDEEEEEEMDELEPNHGGCKVEAEEKEKHGEPVVSVEGSNSVSMPEFGVLGAESGVPMSCGYWIPTPAQILVGPVQFVCHVCNKSFNRYNNMQMHMWGHGREYRKGPESLKGTQTLALLKLPCYCCAAGCRNSVAHPRARPLKDFRTLQTHYKRKHGARPFRCRRCAKPFAVKGDWRTHEKNCGKRWFCACGSDFKHKRSLNDHVRSFGGDHLPVALDGAPAPAPAPVEDRRIIRFQR

SEQ ID NO: 67001 - DNA, 1072 bp, Triticum aestivum
  misc_feature (1)..(1072): Ceres Seq. ID no. 15225398
cccactgccactgtacccgtgacgagctgctgctgctaagggacacgcgcgcgcgcgtacacgcgaacagcagtgtcacgagcacgaccgacggccatggcgagcggcgacccgaagccggacgaaaactactcctccgatggcggtgacaccaccgacgccgagtcctccgacgagtccccgcatcagccgcggaggggcccccgcgccaaccccatactgacgcgcctctccgtgtcgcggaatccgagcccgctctccgccgccaccgcggcgcctggggtctgcctcctccgcttcgcctgggagtcggccgccggttccctcgtcggcgccgtcgttggatatggaaaaggtttggttactacaaaagggtttaaaggctcatttgctgacgctgcctcttctgctaagatatttgctgttcttgccggcgttcaaagcttggtttcttgctctttgagaaagctacgtggcaaagatgacgttattaacgcaggagttgcaggctgttgcactggccttgctttgagttttccaggtgcaccgcaaactctgattcagagctgtctggcctttggaactttctcgtacatcatagaaaagctcaataggcagcaacctgcgcttgcgctaccgtcagccgctggcctgaaggatctgaaggctggcccgagtgttcttccccccttcacgcttaacatgccgcacgatgcgatggaaggtttttcttcgtttcaaaactttttgtcaaagttccgagaaagctgaaggacctgggggcatgatactttgatatctgtccatgtaaatgcatcgagctgagctttttgtttccagtttagtgtatcgcgaaggatgatcattctactctgcctttgaacagttttgcaaattaccctccagaaggaaatcagcttagctggtgtccaacctgatgaataatcgtgtataacctgggcagcagattgcctgaacctttgtgatagtcctttactagcgaatgctcttgtatatgacgggtactcggtaatgtttcatcaggtctcagaataagactagactgataact

SEQ ID NO: 67002 - protein, 224 aa, Triticum aestivum
  peptide (1)..(224): Ceres Seq. ID no. 15225399
  misc_feature (60)..(175): Pfam Name: Tim17/Tim22/Tim23 family Pfam Description: Tim17/Tim22/Tim23 family
  misc_feature (103)..(170): Homolog of NCBI NO: 18398755 NR Description: expressed protein [Arabidopsis thaliana]
  misc_feature (50)..(213): Homolog of NCBI NO: 24414272 NR Description: Unknown protein [Oryza sativa (japonica
  misc_feature (50)..(223): Homolog of NCBI NO: 7485327 NR Description: hypothetical protein F10M23.10 - Arabidopsis
  misc_feature (59)..(218): Homolog of NCBI NO: 37533490 NR Description: unknown protein [Oryza sativa (japonica
  misc_feature (50)..(223): Homolog of NCBI NO: 18416798 NR Description: expressed protein [Arabidopsis thaliana]
  misc_feature (13)..(220): Homolog of NCBI NO: 9758183 NR Description: contains similarity to unknown
  misc_feature (13)..(220): Homolog of NCBI NO: 15240525 NR Description: expressed protein [Arabidopsis thaliana]
MASGDPKPDENYSSDGGDTTDAESSDESPHQPRRGPRANPILTRLSVSRNPSPLSAATAAPGVCLLRFAWESAAGSLVGAVVGYGKGLVTTKGFKGSFADAASSAKIFAVLAGVQSLVSCSLRKLRGKDDVINAGVAGCCTGLALSFPGAPQTLIQSCLAFGTFSYIIEKLNRQQPALALPSAAGLKDLKAGPSVLPPFTLNMPHDAMEGFSSFQNFLSKFRES

SEQ ID NO: 67003 - DNA, 1229 bp, Triticum aestivum
  misc_feature (1)..(1229): Ceres Seq. ID no. 13663874
tgaacccgtctcttactttacctccttggaggaaaacccaactggagcccctcctttttctgccttcggcttgggtcctatattataaaccaaagggaggaaggacagctagctagctgtatcagagagccccatacctagtcgatcgtctgctctcttctgcctagctaggtttaccctccttatctgcgtgtttggcagagttccgggctgagactaagaagaggtcgagatggggaggggaaggattgagatcaagaggatcgagaacaccactagccggcaggtgaccttctgcaagcgccggaacgggctcctcaaaaaggcctacgagctctccgtcctgtgcgacgccgaggtggcgctcatcgtcttctccagccgcggccgcctctacgagtactccaacaacagtgtcaaggctacaattgacaggtacaagaaggcacatgcttgtggctcaacctctggggtacctctcatagaagtcaatgctcagcaatactaccagcaagaagctgcaaagctgcgccaccagatccagatgctgcaaagcactaacaagcacttggttggtgattctgttgggaacctgtcactcaaggagctgaagcaactcgaaagccggcttgagaaaggcattgcgaagatcagggccaggaagaatgagctcctatcttctgagatcaactacatggtcaaaagggagatagagcttcagagtgacagcattgatctcagaaccaagattgcggaggaggagcagcggttgcagcaggtgactatcgccaggccctcggtggcgccggagctgaaccctttcaccgcactggacatgaagtgcttcttccctgccaacctcttcgaggcggcggtgcatgcgcacgcgcaggcacaggctcaggctcaggctcaggcctcgcttcagctgaacctaggctaccagcagcttgctccaccgggcgccggcgatgtggctcatcagttctagtcaacctgcaggagctcttgcttgactacacacactgcaataaaactggaaagtcgtcggcagtgttatcagtactcaactgttccggtcaaaccgtctggctaagatatatgtgtgctaagttttattgtctcaagtacctctaaatttgccgctggtgtagaaccaaatttctgagataaaacctattgattaataattatttttttccttttcttttttgatgaaaaggaggtcg

SEQ ID NO: 67004 - protein, 252 aa, Triticum aestivum
  peptide (1)..(252): Ceres Seq. ID no. 13663875
  misc_feature (74)..(175): Pfam Name: K-box region Pfam Description: K-box region
  misc_feature (1)..(245): Homolog of NCBI NO: 21955182 NR Description: transcription factor MADS1 [Hyacinthus orientalis]
  misc_feature (1)..(212): Homolog of NCBI NO: 20385590 NR Description: MADS-box protein 5 [Vitis vinifera]
  misc_feature (1)..(218): Homolog of NCBI NO: 23194453 NR Description: MADS box protein GHMADS-2 [Gossypium hirsutum]
  misc_feature (1)..(243): Homolog of NCBI NO: 29467048 NR Description: MADS-box transcription factor AG [Agapanthus
  misc_feature (25)..(250): Homolog of NCBI NO: 29372744 NR Description: putative MADS-domain transcription factor [Zea
  misc_feature (11)..(252): Homolog of NCBI NO: 542192 NR Description: floral homeotic protein ZAG2 - maize (fragment)
  misc_feature (1)..(252): Homolog of NCBI NO: 951172 NR Description: MADS box protein
  misc_feature (1)..(250): Homolog of NCBI NO: 7446525 NR Description: MADS box protein - maize
  misc_feature (1)..(245): Homolog of NCBI NO: 33242915 NR Description: MADS protein [Oryza sativa (japonica
  misc_feature (1)..(245): Homolog of NCBI NO: 6470126 NR Description: transcription factor [Oryza sativa]
MGRGRIEIKRIENTTSRQVTFCKRRNGLLKKAYELSVLCDAEVALIVFSSRGRLYEYSNNSVKATIDRYKKAHACGSTSGVPLIEVNAQQYYQQEAAKLRHQIQMLQSTNKHLVGDSVGNLSLKELKQLESRLEKGIAKIRARKNELLSSEINYMVKREIELQSDSIDLRTKIAEEEQRLQQVTIARPSVAPELNPFTALDMKCFFPANLFEAAVHAHAQAQAQAQAQASLQLNLGYQQLAPPGAGDVAHQF

SEQ ID NO: 67005 - protein, 148 aa, Triticum aestivum
  peptide (1)..(148): Ceres Seq. ID no. 13663876
  misc_feature (1)..(71): Pfam Name: K-box region Pfam Description: K-box region
  misc_feature (1)..(141): Homolog of NCBI NO: 21955182 NR Description: transcription factor MADS1 [Hyacinthus orientalis]
  misc_feature (1)..(108): Homolog of NCBI NO: 20385590 NR Description: MADS-box protein 5 [Vitis vinifera]
  misc_feature (1)..(114): Homolog of NCBI NO: 23194453 NR Description: MADS box protein GHMADS-2 [Gossypium hirsutum]
  misc_feature (1)..(139): Homolog of NCBI NO: 29467048 NR Description: MADS-box transcription factor AG [Agapanthus
  misc_feature (1)..(146): Homolog of NCBI NO: 29372744 NR Description: putative MADS-domain transcription factor [Zea
  misc_feature (1)..(148): Homolog of NCBI NO: 542192 NR Description: floral homeotic protein ZAG2 - maize (fragment)
  misc_feature (1)..(148): Homolog of NCBI NO: 951172 NR Description: MADS box protein
  misc_feature (1)..(146): Homolog of NCBI NO: 7446525 NR Description: MADS box protein - maize
  misc_feature (1)..(141): Homolog of NCBI NO: 33242915 NR Description: MADS protein [Oryza sativa (japonica
  misc_feature (1)..(141): Homolog of NCBI NO: 6470126 NR Description: transcription factor [Oryza sativa]
MLQSTNKHLVGDSVGNLSLKELKQLESRLEKGIAKIRARKNELLSSEINYMVKREIELQSDSIDLRTKIAEEEQRLQQVTIARPSVAPELNPFTALDMKCFFPANLFEAAVHAHAQAQAQAQAQASLQLNLGYQQLAPPGAGDVAHQF

SEQ ID NO: 67006 - DNA, 1082 bp, Triticum aestivum
  misc_feature (1)..(1082): Ceres Seq. ID no. 15179906
cccaaccgacacgcgaagccgagccagcagccccgccaaaccctccctccggcgaccccggcgatctactcccccggagacggccgccgcgtctccagctgccgcgctctcttcccaccgtgcctttattggctatcaactgtatagtttgtagtggtttctggggttcttcgcaaaatggtgaagctgacaatgatagcacgtgtcaccgatggccttccgctggcagaagggctggatgacgggcgggatcagaaggattctgatttctacaagcagcaagctaaacttcttttcaagaacttgtcaaaggggcaacatgaagcctcacggatgtcaattgagaccggatcatactttttccattacatcattgaaggccgagtatgctatctaacaatgtgcgaccgttcttatccaaagaaacttgcattccagtacttggaagatctgaaaaatgaatttgagagggtcaatgggagtcaaattgaaactgctgcaaggccttacgctttcattaagtttgatacatacatacagaagactaagaaactgtatttggataccagaacccagaggaacattgcgaaattgaacgatgagctctatgaggtgcatcaaatcatgactcgcaatgttcaagaagttytcggtgtcggtgagaagctagatcaggttagtgaaatgtcaagtaggttgacatttgacacgagaatytatgctgataaggcaaaggatttcaatcgccaggccttcattcggaagtatgctccggttgccattgtgattggggttgtaataatactgttytgggccaagaacaagatatggtgattttactaaacaaggaagccggcctgttataacactggagaaagaaattctggatcaagcgatgcttcgatgacttgtatcccgtatctgcccgttcaagggagtagtttgaagccacctttacacctcgttacaagcagttattcaagtgaatgaattcgttggttgtagtatagaccatatggcggacttgattttgtgaaccctgggaaccgtgcatacaagagctctgtagagtcgagttttcg

SEQ ID NO: 67007 - protein, 218 aa, Triticum aestivum
  peptide (1)..(218): Ceres Seq. ID no. 15179907
  misc_feature (132)..(218): Pfam Name: Synaptobrevin Pfam Description: Synaptobrevin
  misc_feature (1)..(212): Homolog of NCBI NO: 1927215 NR Description: ERS-24 [Cricetulus griseus]
  misc_feature (1)..(212): Homolog of NCBI NO: 14290512 NR Description: SEC22 vesicle trafficking protein-like 1 [Mus
  misc_feature (1)..(212): Homolog of NCBI NO: 4759086 NR Description: vesicle trafficking protein sec22b [Homo sapiens]
  misc_feature (1)..(121): Homolog of NCBI NO: 35215218 NR Description: putative vesicle trafficking protein
  misc_feature (1)..(121): Homolog of NCBI NO: 34015230 NR Description: putative vesicle trafficking protein
  misc_feature (1)..(218): Homolog of NCBI NO: 34904386 NR Description: unnamed protein product [Oryza sativa (japonica
  misc_feature (1)..(64): Homolog of NCBI NO: 25402691 NR Description: hypothetical protein [imported] - Arabidopsis
  misc_feature (62)..(218): Homolog of NCBI NO: 25402691 NR Description: hypothetical protein [imported] - Arabidopsis
  misc_feature (1)..(218): Homolog of NCBI NO: 15221123 NR Description: vesicle transport protein SEC22, putative
  misc_feature (1)..(218): Homolog of NCBI NO: 28269424 NR Description: putative vesicle trafficking protein
  misc_feature (158)..(158): Xaa is any aa, unknown or other
  misc_feature (180)..(180): Xaa is any aa, unknown or other
  misc_feature (211)..(211): Xaa is any aa, unknown or other
MVKLTMIARVTDGLPLAEGLDDGRDQKDSDFYKQQAKLLFKNLSKGQHEASRMSIETGSYFFHYIIEGRVCYLTMCDRSYPKKLAFQYLEDLKNEFERVNGSQIETAARPYAFIKFDTYIQKTKKLYLDTRTQRNIAKLNDELYEVHQIMTRNVQEVXGVGEKLDQVSEMSSRLTFDTRXYADKAKDFNRQAFIRKYAPVAIVIGVVIILXWAKNKIW

SEQ ID NO: 67008 - protein, 213 aa, Triticum aestivum
  peptide (1)..(213): Ceres Seq. ID no. 15179908
  misc_feature (127)..(213): Pfam Name: Synaptobrevin Pfam Description: Synaptobrevin
  misc_feature (1)..(207): Homolog of NCBI NO: 1927215 NR Description: ERS-24 [Cricetulus griseus]
  misc_feature (1)..(207): Homolog of NCBI NO: 14290512 NR Description: SEC22 vesicle trafficking protein-like 1 [Mus
  misc_feature (1)..(207): Homolog of NCBI NO: 4759086 NR Description: vesicle trafficking protein sec22b [Homo sapiens]
  misc_feature (1)..(116): Homolog of NCBI NO: 35215218 NR Description: putative vesicle trafficking protein
  misc_feature (1)..(116): Homolog of NCBI NO: 34015230 NR Description: putative vesicle trafficking protein
  misc_feature (1)..(213): Homolog of NCBI NO: 34904386 NR Description: unnamed protein product [Oryza sativa (japonica
  misc_feature (1)..(59): Homolog of NCBI NO: 25402691 NR Description: hypothetical protein [imported] - Arabidopsis
  misc_feature (57)..(213): Homolog of NCBI NO: 25402691 NR Description: hypothetical protein [imported] - Arabidopsis
  misc_feature (1)..(213): Homolog of NCBI NO: 15221123 NR Description: vesicle transport protein SEC22, putative
  misc_feature (1)..(213): Homolog of NCBI NO: 28269424 NR Description: putative vesicle trafficking protein
  misc_feature (153)..(153): Xaa is any aa, unknown or other
  misc_feature (175)..(175): Xaa is any aa, unknown or other
  misc_feature (206)..(206): Xaa is any aa, unknown or other
MIARVTDGLPLAEGLDDGRDQKDSDFYKQQAKLLFKNLSKGQHEASRMSIETGSYFFHYIIEGRVCYLTMCDRSYPKKLAFQYLEDLKNEFERVNGSQIETAARPYAFIKFDTYIQKTKKLYLDTRTQRNIAKLNDELYEVHQIMTRNVQEVXGVGEKLDQVSEMSSRLTFDTRXYADKAKDFNRQAFIRKYAPVAIVIGVVIILXWAKNKIW

SEQ ID NO: 67009 - protein, 166 aa, Triticum aestivum
  peptide (1)..(166): Ceres Seq. ID no. 15179909
  misc_feature (80)..(166): Pfam Name: Synaptobrevin Pfam Description: Synaptobrevin
  misc_feature (1)..(160): Homolog of NCBI NO: 1927215 NR Description: ERS-24 [Cricetulus griseus]
  misc_feature (1)..(160): Homolog of NCBI NO: 14290512 NR Description: SEC22 vesicle trafficking protein-like 1 [Mus
  misc_feature (1)..(160): Homolog of NCBI NO: 4759086 NR Description: vesicle trafficking protein sec22b [Homo sapiens]
  misc_feature (1)..(69): Homolog of NCBI NO: 35215218 NR Description: putative vesicle trafficking protein
  misc_feature (1)..(69): Homolog of NCBI NO: 34015230 NR Description: putative vesicle trafficking protein
  misc_feature (1)..(166): Homolog of NCBI NO: 34904386 NR Description: unnamed protein product [Oryza sativa (japonica
  misc_feature (1)..(12): Homolog of NCBI NO: 25402691 NR Description: hypothetical protein [imported] - Arabidopsis
  misc_feature (10)..(166): Homolog of NCBI NO: 25402691 NR Description: hypothetical protein [imported] - Arabidopsis
  misc_feature (1)..(166): Homolog of NCBI NO: 15221123 NR Description: vesicle transport protein SEC22, putative
  misc_feature (1)..(166): Homolog of NCBI NO: 28269424 NR Description: putative vesicle trafficking protein
  misc_feature (106)..(106): Xaa is any aa, unknown or other
  misc_feature (128)..(128): Xaa is any aa, unknown or other
  misc_feature (159)..(159): Xaa is any aa, unknown or other
MSIETGSYFFHYIIEGRVCYLTMCDRSYPKKLAFQYLEDLKNEFERVNGSQIETAARPYAFIKFDTYIQKTKKLYLDTRTQRNIAKLNDELYEVHQIMTRNVQEVXGVGEKLDQVSEMSSRLTFDTRXYADKAKDFNRQAFIRKYAPVAIVIGVVIILXWAKNKIW

SEQ ID NO: 67010 - DNA, 1907 bp, Triticum aestivum
  misc_feature (1)..(1907): Ceres Seq. ID no. 13660049
gcataaaggcggcaatgcaaaccgagcaactggaaggaatccccgcaccacgataatcacgaagcgcgacgcaagcgccacaactcaactcccccactgactgcctgtctcctccccaaaccccgcgccgcccaagcgcctcctcgccgccgccgccgccggacccagctagggttccggcgagctcgcggcctcgccgccccgccgcgcctccttcctcgagggctccgctcctcggtgagggcgcccgcccctgcgcccccttgctggatttggtagcagctatgcaaaaggatacaggctctggtgatgtttctccttctcatgtaggacgtgttagacatcggaggcgccctaatgagactgccaccgatgggaatagagccaatgggacggttttgcttgtcagcgaccagaacaagtacaagtcaatgcttatccgtacatattcaagtttgtggatgattggaggctttgtgttcgtagtttatatgggtcatctttatatctgggccatggtggttgtgattcaaatatttatggcaacagagctttttaacctactcagaagatccagcgaagagaaacaactgccagggttcaggctcctgaattggcacttcttcttcacggcaatgttgtttacttatgggcgttttcttagccgggagcttgttaacacagtaacttcagatcacttgctgtataagctcgtcagcggcctaataaagtatcagatgtttatttgctattttctttatattgcaggatttgtatggtttattttgactctgaagaagaagacatacaattatcagttcaaacagtatgcctggacgcacatgatccttttaacggtttttgcccaatcttctttcaccgtggcaaatatatttgaagggatgttctggtttcttctccctgcttcgctcattgtgatcaatgacattgctgcgtatttatttgggttttttctcgggagaacaccattgatcaagttatcaccaaagaaaacatgggaaggttttattggtgcatcggtgacaaccatcatctctgcttttctgttggcaaacgtaatgggtcattttcagtggttaacctgcccaagaaaggacctgtcgacaggatggcttacctgtgatcccggttctatgtttaagccagagcattactttttgggggattgggtgccacaatggtttccatggaaagaagttttccttttacccgtgcagtggcatgctttagcccttgggttgtttgcatcgataatagcaccatttggaggatttttcgcaagtggcttcaagagggcttttaaaataaaggattttggcgacagtatacctgggcatggtggaattactgaccgaatggattgtcaaatggtcatggcagtctttgcatacatatatcaccaatcatttatctcaccccacaatttctctgttgacacaatcttggatcagattgtaagaaacctaacctacgaggagcagaagtccttataccagcaactaggagagatcttccgtgaaaggcagtttatgcaaagctgaagatttatttgcatgaaccacacaaccacacaagacagctgcgtatggttcattatgtagttctagatctatgtacagcatcatagctcctctgtaccgtgatagagtgatgtccttatccagaccattgtacagaacggagtgtggataggggtttaggttcttgatccgctctccacttatgttgcttcttttaatcatctgcgctaattctctccttgttcgttatcatcagtgttcttgtaaaaacagagctggaaatgcttattcgtgtatatcactttgtcggtcttcgcatcaaatattttgtaagcccttagtttgccagtgtcctttgtttttttg

SEQ ID NO: 67011 - protein, 425 aa, Triticum aestivum
  peptide (1)..(425): Ceres Seq. ID no. 13660050
  misc_feature (44)..(415): Homolog of NCBI NO: 40743157 NR Description: hypothetical protein AN5166.2 [Aspergillus
  misc_feature (387)..(416): Homolog of NCBI NO: 37532798 NR Description: putative phosphatidate cytidylyltransferase
  misc_feature (278)..(368): Homolog of NCBI NO: 37532798 NR Description: putative phosphatidate cytidylyltransferase
  misc_feature (1)..(133): Homolog of NCBI NO: 37532798 NR Description: putative phosphatidate cytidylyltransferase
  misc_feature (13)..(420): Homolog of NCBI NO: 15236874 NR Description: phosphatidate cytidylyltransferase, putative
  misc_feature (11)..(420): Homolog of NCBI NO: 7484839 NR Description: CDP-diacylglycerol synthetase homolog F24O1.17 -
  misc_feature (1)..(420): Homolog of NCBI NO: 15235611 NR Description: phosphatidate cytidylyltransferase, putative
  misc_feature (11)..(420): Homolog of NCBI NO: 30696710 NR Description: phosphatidate cytidylyltransferase (CDS)
  misc_feature (1)..(425): Homolog of NCBI NO: 3121837 NR Description: Phosphatidate cytidylyltransferase synthetase) (CDP-diglyceride pyrophosphorylase) synthase) (CDS) (CTP:phosphatidate cytidylyltransferase) (CDP-DAG
  misc_feature (1)..(416): Homolog of NCBI NO: 20303635 NR Description: putative CDP-diacylglycerol synthetase
MQKDTGSGDVSPSHVGRVRHRRRPNETATDGNRANGTVLLVSDQNKYKSMLIRTYSSLWMIGGFVFVVYMGHLYIWAMVVVIQIFMATELFNLLRRSSEEKQLPGFRLLNWHFFFTAMLFTYGRFLSRELVNTVTSDHLLYKLVSGLIKYQMFICYFLYIAGFVWFILTLKKKTYNYQFKQYAWTHMILLTVFAQSSFTVANIFEGMFWFLLPASLIVINDIAAYLFGFFLGRTPLIKLSPKKTWEGFIGASVTTIISAFLLANVMGHFQWLTCPRKDLSTGWLTCDPGSMFKPEHYFLGDWVPQWFPWKEVFLLPVQWHALALGLFASIIAPFGGFFASGFKRAFKIKDFGDSIPGHGGITDRMDCQMVMAVFAYIYHQSFISPHNFSVDTILDQIVRNLTYEEQKSLYQQLGEIFRERQFMQS

SEQ ID NO: 67012 - protein, 376 aa, Triticum aestivum
  peptide (1)..(376): Ceres Seq. ID no. 13660051
  misc_feature (1)..(366): Homolog of NCBI NO: 40743157 NR Description: hypothetical protein AN5166.2 [Aspergillus
  misc_feature (338)..(367): Homolog of NCBI NO: 37532798 NR Description: putative phosphatidate cytidylyltransferase
  misc_feature (229)..(319): Homolog of NCBI NO: 37532798 NR Description: putative phosphatidate cytidylyltransferase
  misc_feature (1)..(84): Homolog of NCBI NO: 37532798 NR Description: putative phosphatidate cytidylyltransferase
  misc_feature (1)..(371): Homolog of NCBI NO: 15236874 NR Description: phosphatidate cytidylyltransferase, putative
  misc_feature (1)..(371): Homolog of NCBI NO: 7484839 NR Description: CDP-diacylglycerol synthetase homolog F24O1.17 -
  misc_feature (1)..(371): Homolog of NCBI NO: 15235611 NR Description: phosphatidate cytidylyltransferase, putative
  misc_feature (1)..(371): Homolog of NCBI NO: 30696710 NR Description: phosphatidate cytidylyltransferase (CDS)
  misc_feature (1)..(376): Homolog of NCBI NO: 3121837 NR Description: Phosphatidate cytidylyltransferase synthetase) (CDP-diglyceride pyrophosphorylase) synthase) (CDS) (CTP:phosphatidate cytidylyltransferase) (CDP-DAG
  misc_feature (1)..(367): Homolog of NCBI NO: 20303635 NR Description: putative CDP-diacylglycerol synthetase
MLIRTYSSLWMIGGFVFVVYMGHLYIWAMVVVIQIFMATELFNLLRRSSEEKQLPGFRLLNWHFFFTAMLFTYGRFLSRELVNTVTSDHLLYKLVSGLIKYQMFICYFLYIAGFVWFILTLKKKTYNYQFKQYAWTHMILLTVFAQSSFTVANIFEGMFWFLLPASLIVINDIAAYLFGFFLGRTPLIKLSPKKTWEGFIGASVTTIISAFLLANVMGHFQWLTCPRKDLSTGWLTCDPGSMFKPEHYFLGDWVPQWFPWKEVFLLPVQWHALALGLFASIIAPFGGFFASGFKRAFKIKDFGDSIPGHGGITDRMDCQMVMAVFAYIYHQSFISPHNFSVDTILDQIVRNLTYEEQKSLYQQLGEIFRERQFMQS

SEQ ID NO: 67013 - protein, 366 aa, Triticum aestivum
  peptide (1)..(366): Ceres Seq. ID no. 13660052
  misc_feature (1)..(356): Homolog of NCBI NO: 40743157 NR Description: hypothetical protein AN5166.2 [Aspergillus
  misc_feature (328)..(357): Homolog of NCBI NO: 37532798 NR Description: putative phosphatidate cytidylyltransferase
  misc_feature (219)..(309): Homolog of NCBI NO: 37532798 NR Description: putative phosphatidate cytidylyltransferase
  misc_feature (1)..(74): Homolog of NCBI NO: 37532798 NR Description: putative phosphatidate cytidylyltransferase
  misc_feature (1)..(361): Homolog of NCBI NO: 15236874 NR Description: phosphatidate cytidylyltransferase, putative
  misc_feature (1)..(361): Homolog of NCBI NO: 7484839 NR Description: CDP-diacylglycerol synthetase homolog F24O1.17 -
  misc_feature (1)..(361): Homolog of NCBI NO: 15235611 NR Description: phosphatidate cytidylyltransferase, putative
  misc_feature (1)..(361): Homolog of NCBI NO: 30696710 NR Description: phosphatidate cytidylyltransferase (CDS)
  misc_feature (1)..(366): Homolog of NCBI NO: 3121837 NR Description: Phosphatidate cytidylyltransferase synthetase) (CDP-diglyceride pyrophosphorylase) synthase) (CDS) (CTP:phosphatidate cytidylyltransferase) (CDP-DAG
  misc_feature (1)..(357): Homolog of NCBI NO: 20303635 NR Description: putative CDP-diacylglycerol synthetase
MIGGFVFVVYMGHLYIWAMVVVIQIFMATELFNLLRRSSEEKQLPGFRLLNWHFFFTAMLFTYGRFLSRELVNTVTSDHLLYKLVSGLIKYQMFICYFLYIAGFVWFILTLKKKTYNYQFKQYAWTHMILLTVFAQSSFTVANIFEGMFWFLLPASLIVINDIAAYLFGFFLGRTPLIKLSPKKTWEGFIGASVTTIISAFLLANVMGHFQWLTCPRKDLSTGWLTCDPGSMFKPEHYFLGDWVPQWFPWKEVFLLPVQWHALALGLFASIIAPFGGFFASGFKRAFKIKDFGDSIPGHGGITDRMDCQMVMAVFAYIYHQSFISPHNFSVDTILDQIVRNLTYEEQKSLYQQLGEIFRERQFMQS

SEQ ID NO: 67014 - DNA, 1142 bp, Triticum aestivum
  misc_feature (1)..(1142): Ceres Seq. ID no. 13659378
ctagaacatcctaatcgaaaaagctaggcagagcccgacccgtcaatcctttcccctccagaaccctccctcccgccccctcccctccccgccaccacccgccgccgccgcctcgccgcggaaaccctagacccctcccccgtccgccccgtccgttcgccgctccgtcgccgccgccacccgcttcagatctcgacgacttccgcccgcgatggaggactgggagaatgatgattttcaaccaatcgcgcctgttgtgaaagctcaacctcttaaaagtaactgggaagatgaagatgtggatgaagatgatgtcaaagaatcttgggaagaggaggaagagaaacctaagccacaacctgtagaaaagcctgctccaaaacctagtgctaaagctgctgtgaaaaaaggcaaacagccctcaacgagtactgaagtagttgatgatgatgttcttgatgatcctatttcagagaagcttcgccaacaaaggctagtggaagaagctgactttaaggcaacagcagagctttttgcaaagaaggacggcagtgaaaagtcactagagactttcatcccgaagtctgagagcgactttgcggaatatgctgagcttatcgcaaacaaaattcgcccgtatgagaaaagctttcactacatgggtctacttaagaatgtcatgagactttccatggcatcgttgaaaggtgcggatgcgaaagaaatatcctcctctgtcacggcaattgctaatgaaaagatcaaggctgagaaagaagctgcagcaggcaaaaagaaaggaggagcaaaaaagaagcagctccatatagagaaaggagaggaggactttgttgcccgaccgggtgcatcttttgacgatcccgacgagttcgacttcatgtgattggctgggaggggaatagcctcttccgtgtaatacctttgaggcaaagcagagactagggtttgcggcggtctgtattcccttcagaggcacctgaacacttggaactgcgtgggaacatgtcttatctatttgaggttgattttgacactcggagaataagaagaacgcttgcggctccctgaggcgtttttcttgttcaaaaaaaaaaaaaaaaaagcttatcgataccgtcgac

SEQ ID NO: 67015 - protein, 230 aa, Triticum aestivum
  peptide (1)..(230): Ceres Seq. ID no. 13659379
  misc_feature (25)..(198): Homolog of NCBI NO: 10435304 NR Description: unnamed protein product [Homo sapiens]
  misc_feature (25)..(198): Homolog of NCBI NO: 34856798 NR Description: similar to Eukaryotic translation initiation
  misc_feature (25)..(198): Homolog of NCBI NO: 26349519 NR Description: unnamed protein product [Mus musculus]
  misc_feature (2)..(230): Homolog of NCBI NO: 27374269 NR Description: Adam-PA [Drosophila pseudoobscura]
  misc_feature (2)..(227): Homolog of NCBI NO: 19921950 NR Description: CG12131-PA [Drosophila melanogaster]
  misc_feature (2)..(227): Homolog of NCBI NO: 27374242 NR Description: CG12131-PA [Drosophila erecta]
  misc_feature (2)..(227): Homolog of NCBI NO: 27374365 NR Description: Adam-PA [Drosophila willistoni]
  misc_feature (2)..(196): Homolog of NCBI NO: 32766433 NR Description: Unknown (protein for MGC:63801) [Danio rerio]
  misc_feature (1)..(230): Homolog of NCBI NO: 30693092 NR Description: expressed protein [Arabidopsis thaliana]
  misc_feature (1)..(230): Homolog of NCBI NO: 18408426 NR Description: expressed protein [Arabidopsis thaliana]
MEDWENDDFQPIAPVVKAQPLKSNWEDEDVDEDDVKESWEEEEEKPKPQPVEKPAPKPSAKAAVKKGKQPSTSTEVVDDDVLDDPISEKLRQQRLVEEADFKATAELFAKKDGSEKSLETFIPKSESDFAEYAELIANKIRPYEKSFHYMGLLKNVMRLSMASLKGADAKEISSSVTAIANEKIKAEKEAAAGKKKGGAKKKQLHIEKGEEDFVARPGASFDDPDEFDFM

SEQ ID NO: 67016 - DNA, 796 bp, Triticum aestivum
  misc_feature (1)..(796): Ceres Seq. ID no. 12621592
atattattattaggcttcccgtcgtgggccgctcactgggcttctcctctgcttctctcggccgaaaccccagctcagcgagcagagacccggcggcggcggcgatatgcagttcctccgggcggtcggcggcgggggaggaggggcggggtcgacggcgtgggaggcgttcaggaggcatttctcgcggaagcgggcggtggacatccggcggatcaaccccaaggtgcccaaggaggaggccgtggccatctccggccgcctcctccagatcctcgccgaccacgggcccctcaccgtcggcaacacctggaaccacgccaaggatgctgcgatcgatggcctgaacagcaagacccacatgaagatcctgctcaagtggatgtgggggaggaggatcatcaagctctcctgcacgcaggccggcaacaccaagaagttcctctactccccgttcaccgccgacgacgccgaggcggccgaggagccatcgccagccgaggagcagccgaagaagaaagggtggaaagggaaacacccaaagtaccagaccaagaaacagcctgcggcagcagcttgaccctggtctgctgagcattctttcgggcattttcccgctgctgttggcttttctgttttacttagcacggaagagttcaccgccatatctgtttgacaacaaaacatatattttgtgatggaccatttgggtgggcacaaattacgctggcaggccgatttgttcggctctgtgttgtagactctgtctggtagaataatgatgacacgataatcc

SEQ ID NO: 67017 - protein, 197 aa, Triticum aestivum
  peptide (1)..(197): Ceres Seq. ID no. 12621593
ILLLGFPSWAAHWASPLLLSAETPAQRAETRRRRRYAVPPGGRRRGRRGGVDGVGGVQEAFLAEAGGGHPADQPQGAQGGGRGHLRPPPPDPRRPRAPHRRQHLEPRQGCCDRWPEQQDPHEDPAQVDVGEEDHQALLHAGRQHQEVPLLPVHRRRRRGGRGAIASRGAAEEERVERETPKVPDQETACGSSLTLVC

SEQ ID NO: 67018 - protein, 157 aa, Triticum aestivum
  peptide (1)..(157): Ceres Seq. ID no. 12621594
  misc_feature (24)..(146): Homolog of NCBI NO: 38637563 NR Description: unknown protein [Oryza sativa (japonica
  misc_feature (24)..(146): Homolog of NCBI NO: 21594042 NR Description: unknown [Arabidopsis thaliana]
  misc_feature (24)..(146): Homolog of NCBI NO: 15239880 NR Description: putative protein
  misc_feature (24)..(146): Homolog of NCBI NO: 18410491 NR Description: expressed protein
  misc_feature (1)..(155): Homolog of NCBI NO: 27573361 NR Description: unknown protein [Oryza sativa (japonica
MQFLRAVGGGGGGAGSTAWEAFRRHFSRKRAVDIRRINPKVPKEEAVAISGRLLQILADHGPLTVGNTWNHAKDAAIDGLNSKTHMKILLKWMWGRRIIKLSCTQAGNTKKFLYSPFTADDAEAAEEPSPAEEQPKKKGWKGKHPKYQTKKQPAAAA

SEQ ID NO: 67019 - protein, 114 aa, Triticum aestivum
  peptide (1)..(114): Ceres Seq. ID no. 12621595
IIIRLPVVGRSLGFSSASLGRNPSSASRDPAAAAICSSSGRSAAGEEGRGRRRGRRSGGISRGSGRWTSGGSTPRCPRRRPWPSPAASSRSSPTTGPSPSATPGTTPRMLRSMA

SEQ ID NO: 67020 - DNA, 1629 bp, Triticum aestivum
  misc_feature (1)..(1629): Ceres Seq. ID no. 14301826
cctaagtacctctcccgcacctctcctccttcccgtcggcaccgccgccatctttgctaggtcttcctccagatccaactcacagcttccatgcccataggtaccgccgcaaccaccatgcccaccgttgcctcctggatcctcctccatgtccatgccaccgtccgccaacctcccaaaaacgcctccgccgtcgcccactcgagcaataacgagaaaatatatgcttcccttctccgccagcgcccgccggttccctccaatctgtacgtgtactgcgcagacggcacattcggagagaccccccgcgtgctgtcaatggtggacgacatcatcctcttccacgcatacatcggtcctgcgttcccctcccccaagccatggaagggggacttcttcatataccggtctgactccaatcgacggtctctggagcgtctaccgcacccccaaggtatgatcggaagggacgatccattcggcatctttccccgagagggcgacagctacacaatcgcggcgctgttacccagcatatcctctatgtacgattttgaactccacctcttcgactcggagactcggatttggagcaggaagaatctgactgttgggtcgcgacaggaaaggttcaaggttgatatccccatcaacataagtcagatcttacaccataacacatccactgtgatcactcttggaggctccatgtgctgggttgatctttggcgtggtatattgttctgtgacatgctctccgagaaacatgcactcacaggtgttccactgccactgccattgatctactattctggtgatagaagcaagatcctaggacctgcgaagtgtcaccgtagcattgcttttcttgatggatgcaccaggctcgttgaggtgaattctgatgtcagtattgccgaaggaactgaatttggttgtggccgaactgaagactggacgattaccacatggtacaacaataatgtgcataataattcttatgatgattggcatccggacatcacactaaaagcttccaacatcatcctgggcaaccactccgtgaagctgccgttaggcttgcagtacctttttttctgacccaactatttgcatgaacaatagggatggctatattgtttacctgactgccagggagaagtatatgcattctaagtcatggattattgctattgatttgaaaaagcgcaaggtgcaaagtgtggttctgtctggtcctgtacctccgccaatgccgcgcattgacactaactactgcacttgtagtatctccaagtactgtaccagcacttcaacagtatcaggtggtacttaagatgctgagcagtcgtgtggcagtaaattcaatgtacgatgtctacaagttcctggtggctgagattgaggaatgcatgtgtttatcacttactacattccaaacaatatattgttctcctggtcctgcttgacatcatatatctatcctaattagctatatcctatgtagtgaactggttaattattattggcagtgaactgattacttgttcttgttggacattatgtatcttgaacattttgtactagcatgtttatggtttaatttttttgttcggtctgcttggcttt

SEQ ID NO: 67021 - protein, 336 aa, Triticum aestivum
  peptide (1)..(336): Ceres Seq. ID no. 14301827
  misc_feature (53)..(320): Homolog of NCBI NO: 32483272 NR Description: OSJNBa0024J22.3 [Oryza sativa (japonica
  misc_feature (64)..(236): Homolog of NCBI NO: 18855027 NR Description: hypothetical protein [Oryza sativa]
  misc_feature (72)..(236): Homolog of NCBI NO: 37535036 NR Description: hypothetical protein [Oryza sativa (japonica
  misc_feature (14)..(236): Homolog of NCBI NO: 18855020 NR Description: unknown protein [Oryza sativa]
  misc_feature (16)..(248): Homolog of NCBI NO: 34393336 NR Description: hypothetical protein [Oryza sativa (japonica
  misc_feature (17)..(236): Homolog of NCBI NO: 34910024 NR Description: P0413G02.13 [Oryza sativa (japonica
  misc_feature (17)..(243): Homolog of NCBI NO: 34913296 NR Description: P0519E12.26 [Oryza sativa (japonica
  misc_feature (17)..(333): Homolog of NCBI NO: 33146903 NR Description: hypothetical protein [Oryza sativa (japonica
MPIGTAATTMPTVASWILLHVHATVRQPPKNASAVAHSSNNEKIYASLLRQRPPVPSNLYVYCADGTFGETPRVLSMVDDIILFHAYIGPAFPSPKPWKGDFFIYRSDSNRRSLERLPHPQGMIGRDDPFGIFPREGDSYTIAALLPSISSMYDFELHLFDSETRIWSRKNLTVGSRQERFKVDIPINISQILHHNTSTVITLGGSMCWVDLWRGILFCDMLSEKHALTGVPLPLPLIYYSGDRSKILGPAKCHRSIAFLDGCTRLVEVNSDVSIAEGTEFGCGRTEDWTITTWYNNNVHNNSYDDWHPDITLKASNIILGNHSVKLPLGLQYLFF

SEQ ID NO: 67022 - protein, 327 aa, Triticum aestivum
  peptide (1)..(327): Ceres Seq. ID no. 14301828
  misc_feature (44)..(311): Homolog of NCBI NO: 32483272 NR Description: OSJNBa0024J22.3 [Oryza sativa (japonica
  misc_feature (55)..(227): Homolog of NCBI NO: 18855027 NR Description: hypothetical protein [Oryza sativa]
  misc_feature (63)..(227): Homolog of NCBI NO: 37535036 NR Description: hypothetical protein [Oryza sativa (japonica
  misc_feature (5)..(227): Homolog of NCBI NO: 18855020 NR Description: unknown protein [Oryza sativa]
  misc_feature (7)..(239): Homolog of NCBI NO: 34393336 NR Description: hypothetical protein [Oryza sativa (japonica
  misc_feature (8)..(227): Homolog of NCBI NO: 34910024 NR Description: P0413G02.13 [Oryza sativa (japonica
  misc_feature (8)..(234): Homolog of NCBI NO: 34913296 NR Description: P0519E12.26 [Oryza sativa (japonica
  misc_feature (8)..(324): Homolog of NCBI NO: 33146903 NR Description: hypothetical protein [Oryza sativa (japonica
MPTVASWILLHVHATVRQPPKNASAVAHSSNNEKIYASLLRQRPPVPSNLYVYCADGTFGETPRVLSMVDDIILFHAYIGPAFPSPKPWKGDFFIYRSDSNRRSLERLPHPQGMIGRDDPFGIFPREGDSYTIAALLPSISSMYDFELHLFDSETRIWSRKNLTVGSRQERFKVDIPINISQILHHNTSTVITLGGSMCWVDLWRGILFCDMLSEKHALTGVPLPLPLIYYSGDRSKILGPAKCHRSIAFLDGCTRLVEVNSDVSIAEGTEFGCGRTEDWTITTWYNNNVHNNSYDDWHPDITLKASNIILGNHSVKLPLGLQYLFF

SEQ ID NO: 67023 - protein, 260 aa, Triticum aestivum
  peptide (1)..(260): Ceres Seq. ID no. 14301829
  misc_feature (1)..(244): Homolog of NCBI NO: 32483272 NR Description: OSJNBa0024J22.3 [Oryza sativa (japonica
  misc_feature (1)..(160): Homolog of NCBI NO: 18855027 NR Description: hypothetical protein [Oryza sativa]
  misc_feature (1)..(160): Homolog of NCBI NO: 37535036 NR Description: hypothetical protein [Oryza sativa (japonica
  misc_feature (1)..(160): Homolog of NCBI NO: 18855020 NR Description: unknown protein [Oryza sativa]
  misc_feature (1)..(172): Homolog of NCBI NO: 34393336 NR Description: hypothetical protein [Oryza sativa (japonica
  misc_feature (1)..(160): Homolog of NCBI NO: 34910024 NR Description: P0413G02.13 [Oryza sativa (japonica
  misc_feature (1)..(167): Homolog of NCBI NO: 34913296 NR Description: P0519E12.26 [Oryza sativa (japonica
  misc_feature (1)..(257): Homolog of NCBI NO: 33146903 NR Description: hypothetical protein [Oryza sativa (japonica
MVDDIILFHAYIGPAFPSPKPWKGDFFIYRSDSNRRSLERLPHPQGMIGRDDPFGIFPREGDSYTIAALLPSISSMYDFELHLFDSETRIWSRKNLTVGSRQERFKVDIPINISQILHHNTSTVITLGGSMCWVDLWRGILFCDMLSEKHALTGVPLPLPLIYYSGDRSKILGPAKCHRSIAFLDGCTRLVEVNSDVSIAEGTEFGCGRTEDWTITTWYNNNVHNNSYDDWHPDITLKASNIILGNHSVKLPLGLQYLFF

SEQ ID NO: 67024 - DNA, 1898 bp, Triticum aestivum
  misc_feature (1)..(1898): Ceres Seq. ID no. 15224862
acttttccttgcggacggacgtgccaaccgtttccttccgaaaacaagaaccggcggccgccgcccgagctcgaactcgacagccatggcctcccaactagggccgccgacggcgagatatgccccacctgctcccagcaccatcacttctataggcgacgaccttctccgcgagatcttcctccatctcccctccctcccgagcctcgtccgcgccgcccttgcctgccgcaccttcctccacgctgtccgttcgtcccccgtcttccgccggggattccggtcgctccacccatccccattccttggcctctttatcgagtcctacagctgttccctcccttctttcgtccccctccgccgccggtccgacccggacctcgccgccgcaatacgcggcggcgatctcttcctcactcgactcccggaggacaacgacgacccctctcccgggtgggagatccagggctgccaagacggctacgtcgtcctgctcaaccggagcaccgagcagattgccgcctacaaccccctcacactggctctggatttcctccctccactgccccatgagatgtcccgctcccgctccctcgagatccacgtcgtcttctcccaagagggccaggggtcgttccgtgcggtctgcgtccgccacggcaggtccctgcggcgggcgcgggcgcgcatcgccgtcttctcatcggacgacaggggcaaggggtggctggttatgccggcggtggacaccgcgacgccacagcctggggatggtggagttgacaagcccatgtttcacactggcaccctggtgaatggattcatctattggaagcgcaagacccaagcctgcatgctcgtgctcaacactgcgacattgcagttctctgaaatggatttgccgcagcccctaaaagggaaacactccacaaacttcaggcttggtcagaccaaggatggcgagctctgtatcgtttgcgcagacgactcccgtgcaaaggagtggacgcttgctgtttggttctggagagccgacgatggcggtgtcaagagatggatggagaagaggtttccgttgcacaagtttgttgagttcaccgagtgttcaggagaagatcatgtcgtggtgaacagtttggcagttgtcgacggctttgtgtacctgtctagttactgtcacgcaagtactgaatctcctgagtggtttctatccttctgccttgaaacagcggagcttatcaaactcttccggggtacatttgacagccctctccatccctacatcatggcctggccaccttctttggtatgcaacaaggaggattcagagaccaaagtaactggggccaatgttgtagaagatggtttgtaagcacagagaaatttccctctgttctcgtcagtgttgcagtcatgcaaagaagctttggttagtgatgatggggcaaaatttgcagagatagaggcctttttactttctagggtgagaagaagtctgagcaaaatggctgctctacatacagaattgacaactgcgaggagtcacatcttgaggataggtgttcttcgatagctacagggaatagacagaagcagagagctgatgatcaatttacaaggagaggcagtggagaacctgtgaccacttatttgccagttgaacttgcctctttggaatggtcaccgcgtatttcttctgttgagatgatcggcgtatttcttctgttgagatgagcttttattcagcgtgcctagctcccaagagaccgagtgagcttttatcttgatcttcattgaggtttctgtattgctgtctatgattgagtttgttgttgcacttgatccatcttacagcactttatgtccatcctaatattttagtttaaacagttcttctc

SEQ ID NO: 67025 - protein, 456 aa, Triticum aestivum
  peptide (1)..(456): Ceres Seq. ID no. 15224863
  misc_feature (34)..(193): Homolog of NCBI NO: 37530886 NR Description: hypothetical protein [Oryza sativa (japonica
  misc_feature (44)..(179): Homolog of NCBI NO: 37530914 NR Description: unknown protein [Oryza sativa (japonica
  misc_feature (41)..(202): Homolog of NCBI NO: 34393351 NR Description: hypothetical protein [Oryza sativa (japonica
  misc_feature (20)..(179): Homolog of NCBI NO: 37530944 NR Description: hypothetical protein [Oryza sativa (japonica
  misc_feature (39)..(179): Homolog of NCBI NO: 37530924 NR Description: unknown protein [Oryza sativa (japonica
  misc_feature (53)..(226): Homolog of NCBI NO: 34914580 NR Description: P0455H0310.25 [Oryza sativa (japonica
  misc_feature (42)..(436): Homolog of NCBI NO: 34914940 NR Description: B1096D03.37 [Oryza sativa (japonica
  misc_feature (34)..(423): Homolog of NCBI NO: 34914942 NR Description: B1096D03.38 [Oryza sativa (japonica
  misc_feature (112)..(438): Homolog of NCBI NO: 34901902 NR Description: OSJNBa0036M16.17 [Oryza sativa (japonica
  misc_feature (19)..(364): Homolog of NCBI NO: 34901902 NR Description: OSJNBa0036M16.17 [Oryza sativa (japonica
LFLADGRANRFLPKTRTGGRRPSSNSTAMASQLGPPTARYAPPAPSTITSIGDDLLREIFLHLPSLPSLVRAALACRTFLHAVRSSPVFRRGFRSLHPSPFLGLFIESYSCSLPSFVPLRRRSDPDLAAAIRGGDLFLTRLPEDNDDPSPGWEIQGCQDGYVVLLNRSTEQIAAYNPLTLALDFLPPLPHEMSRSRSLEIHVVFSQEGQGSFRAVCVRHGRSLRRARARIAVFSSDDRGKGWLVMPAVDTATPQPGDGGVDKPMFHTGTLVNGFIYWKRKTQACMLVLNTATLQFSEMDLPQPLKGKHSTNFRLGQTKDGELCIVCADDSRAKEWTLAVWFWRADDGGVKRWMEKRFPLHKFVEFTECSGEDHVVVNSLAVVDGFVYLSSYCHASTESPEWFLSFCLETAELIKLFRGTFDSPLHPYIMAWPPSLVCNKEDSETKVTGANVVEDGL

SEQ ID NO: 67026 - protein, 428 aa, Triticum aestivum
  peptide (1)..(428): Ceres Seq. ID no. 15224864
  misc_feature (6)..(165): Homolog of NCBI NO: 37530886 NR Description: hypothetical protein [Oryza sativa (japonica
  misc_feature (16)..(151): Homolog of NCBI NO: 37530914 NR Description: unknown protein [Oryza sativa (japonica
  misc_feature (13)..(174): Homolog of NCBI NO: 34393351 NR Description: hypothetical protein [Oryza sativa (japonica
  misc_feature (1)..(151): Homolog of NCBI NO: 37530944 NR Description: hypothetical protein [Oryza sativa (japonica
  misc_feature (11)..(151): Homolog of NCBI NO: 37530924 NR Description: unknown protein [Oryza sativa (japonica
  misc_feature (25)..(198): Homolog of NCBI NO: 34914580 NR Description: P0455H0310.25 [Oryza sativa (japonica
  misc_feature (14)..(408): Homolog of NCBI NO: 34914940 NR Description: B1096D03.37 [Oryza sativa (japonica
  misc_feature (6)..(395): Homolog of NCBI NO: 34914942 NR Description: B1096D03.38 [Oryza sativa (japonica
  misc_feature (84)..(410): Homolog of NCBI NO: 34901902 NR Description: OSJNBa0036M16.17 [Oryza sativa (japonica
  misc_feature (1)..(336): Homolog of NCBI NO: 34901902 NR Description: OSJNBa0036M16.17 [Oryza sativa (japonica
MASQLGPPTARYAPPAPSTITSIGDDLLREIFLHLPSLPSLVRAALACRTFLHAVRSSPVFRRGFRSLHPSPFLGLFIESYSCSLPSFVPLRRRSDPDLAAAIRGGDLFLTRLPEDNDDPSPGWEIQGCQDGYVVLLNRSTEQIAAYNPLTLALDFLPPLPHEMSRSRSLEIHVVFSQEGQGSFRAVCVRHGRSLRRARARIAVFSSDDRGKGWLVMPAVDTATPQPGDGGVDKPMFHTGTLVNGFIYWKRKTQACMLVLNTATLQFSEMDLPQPLKGKHSTNFRLGQTKDGELCIVCADDSRAKEWTLAVWFWRADDGGVKRWMEKRFPLHKFVEFTECSGEDHVVVNSLAVVDGFVYLSSYCHASTESPEWFLSFCLETAELIKLFRGTFDSPLHPYIMAWPPSLVCNKEDSETKVTGANVVEDGL

SEQ ID NO: 67027 - protein, 265 aa, Triticum aestivum
  peptide (1)..(265): Ceres Seq. ID no. 15224865
  misc_feature (1)..(123): Homolog of NCBI NO: 38347670 NR Description: OSJNBa0054D14.5 [Oryza sativa (japonica
  misc_feature (1)..(162): Homolog of NCBI NO: 37530982 NR Description: unknown protein [Oryza sativa (japonica
  misc_feature (1)..(11): Homolog of NCBI NO: 34393351 NR Description: hypothetical protein [Oryza sativa (japonica
  misc_feature (1)..(35): Homolog of NCBI NO: 34914580 NR Description: P0455H0310.25 [Oryza sativa (japonica
  misc_feature (1)..(245): Homolog of NCBI NO: 34914940 NR Description: B1096D03.37 [Oryza sativa (japonica
  misc_feature (1)..(232): Homolog of NCBI NO: 34914942 NR Description: B1096D03.38 [Oryza sativa (japonica
  misc_feature (1)..(247): Homolog of NCBI NO: 34901902 NR Description: OSJNBa0036M16.17 [Oryza sativa (japonica
  misc_feature (1)..(173): Homolog of NCBI NO: 34901902 NR Description: OSJNBa0036M16.17 [Oryza sativa (japonica
MSRSRSLEIHVVFSQEGQGSFRAVCVRHGRSLRRARARIAVFSSDDRGKGWLVMPAVDTATPQPGDGGVDKPMFHTGTLVNGFIYWKRKTQACMLVLNTATLQFSEMDLPQPLKGKHSTNFRLGQTKDGELCIVCADDSRAKEWTLAVWFWRADDGGVKRWMEKRFPLHKFVEFTECSGEDHVVVNSLAVVDGFVYLSSYCHASTESPEWFLSFCLETAELIKLFRGTFDSPLHPYIMAWPPSLVCNKEDSETKVTGANVVEDGL

SEQ ID NO: 67028 - DNA, 1549 bp, Triticum aestivum
  misc_feature (1)..(1549): Ceres Seq. ID no. 14316017
acacgccccggctccaaagcgcaggccttctctttccccacaccacaccacccaccggcctcctcccacccgaacccccattaaccccagaggagagatcccccgtcctctgacgccagcggccatgtccgtcacgcgggttcttgcgctgcttgtcgcggcggcgctggcggccgcggcgccggcgcgcgtgggcgcggcgggggcgtgcgcggcggagaggttctccaagaaccgcgtgtacgccgcctgcaccgacctgcccaccctgggcgcgtccgtgcactggacctacgacccggcggcctcctccctctccgtggcgttcgtcgccgcgccgccctcgtccggcggctgggtcgcctggggcctcaacccctccggcgacggcatgagcggcacgcaggcgctcgtcgcctcgcccacgggcagcggcggcgcgtacggcgtccagacgttcgacatccagggcacatcgctcggatcgccgggccccatcgcctacaagacgtccgacctcgccgccgaggtcggcgccgacggccgcgtccagatgttcgggaagctcgcgctccagaacggcaccggggaggtgaaccaggtctggcaggtgggaccggcgtcgggcgggagcatcggcatacacgccatggccgccgccaacatgggggccaaggggaagctcaacctcgtcacgggggcgaccacagccgtcagcggaggcagcatcctcaggaagaaaaatacccatggaattctgaatgctgtgagctgggggattcttctgccaatgggaggcatagttgctagatacctcaagacattcaaatcagccgaccctgcctggttctaccttcacgttgcttgccagctgatcgggtatgctgtgggagtgtctggctgggccaccggcattcatctaggaaatctgtccaagggaatcacctactcgcttcacaggaacatcgggatcgccgtatttgctctcggtaccgttcagatctttgcgctgttcctgaggccgaagaaggatcacaagctgcgggtgtactggaacgtgtaccaccactcggtgggctacaccatcatcatcctgggcatcgtcaacatcttcaagggcatgagcatcctggacgtggcgcagaagtggaagacgggctacatcatcgccatcggcatcctgggcggcgtcgcggtggcgctggaggtgatcacctgggccatcgtgctcaagaggaggaagacggaggacaaggcctacaacggcggcgcctccaacaacaacaacggccatctgcccatgtgatgcgatgtgatgtgattctttctcggtggccggagtctgtgggctgtgttgagctgagctgcgtgtgtgtgagcatggattggcagatgctatgtaggttagggccgggccttagtggccttcgtctctctgtttctttttttatgatgatgatgatgattgatagatctgtgtgtatagtactgctgcacattatattagttattatatactggaatgagagaggtgatgccggtcgatgct

SEQ ID NO: 67029 - protein, 434 aa, Triticum aestivum
  peptide (1)..(434): Ceres Seq. ID no. 14316018
  misc_feature (131)..(257): Pfam Name: Protein of unknown function (DUF568) Pfam Description: Protein of unknown function (DUF568)
  misc_feature (42)..(430): Homolog of NCBI NO: 13785213 NR Description: putative membrane protein [Solanum tuberosum]
  misc_feature (70)..(426): Homolog of NCBI NO: 13785209 NR Description: putative membrane protein [Solanum tuberosum]
  misc_feature (50)..(432): Homolog of NCBI NO: 15238124 NR Description: auxin-induced protein, putative [Arabidopsis
  misc_feature (54)..(413): Homolog of NCBI NO: 21592781 NR Description: putative membrane protein [Arabidopsis thaliana]
  misc_feature (54)..(413): Homolog of NCBI NO: 18421491 NR Description: auxin-induced protein family [Arabidopsis
  misc_feature (42)..(426): Homolog of NCBI NO: 18086563 NR Description: AT4g17280/dl4675c [Arabidopsis thaliana]
  misc_feature (51)..(428): Homolog of NCBI NO: 24414270 NR Description: Putative membrane protein [Oryza sativa (japonica
  misc_feature (40)..(413): Homolog of NCBI NO: 18404500 NR Description: auxin-induced protein family [Arabidopsis
  misc_feature (43)..(416): Homolog of NCBI NO: 15235545 NR Description: auxin-induced protein, putative [Arabidopsis
  misc_feature (43)..(416): Homolog of NCBI NO: 21593814 NR Description: unknown [Arabidopsis thaliana]
HAPAPKRRPSLSPHHTTHRPPPTRTPINPRGEIPRPLTPAAMSVTRVLALLVAAALAAAAPARVGAAGACAAERFSKNRVYAACTDLPTLGASVHWTYDPAASSLSVAFVAAPPSSGGWVAWGLNPSGDGMSGTQALVASPTGSGGAYGVQTFDIQGTSLGSPGPIAYKTSDLAAEVGADGRVQMFGKLALQNGTGEVNQVWQVGPASGGSIGIHAMAAANMGAKGKLNLVTGATTAVSGGSILRKKNTHGILNAVSWGILLPMGGIVARYLKTFKSADPAWFYLHVACQLIGYAVGVSGWATGIHLGNLSKGITYSLHRNIGIAVFALGTVQIFALFLRPKKDHKLRVYWNVYHHSVGYTIIILGIVNIFKGMSILDVAQKWKTGYIIAIGILGGVAVALEVITWAIVLKRRKTEDKAYNGGASNNNNGHLPM

SEQ ID NO: 67030 - protein, 393 aa, Triticum aestivum
  peptide (1)..(393): Ceres Seq. ID no. 14316019
  misc_feature (90)..(216): Pfam Name: Protein of unknown function (DUF568) Pfam Description: Protein of unknown function (DUF568)
  misc_feature (1)..(389): Homolog of NCBI NO: 13785213 NR Description: putative membrane protein [Solanum tuberosum]
  misc_feature (29)..(385): Homolog of NCBI NO: 13785209 NR Description: putative membrane protein [Solanum tuberosum]
  misc_feature (9)..(391): Homolog of NCBI NO: 15238124 NR Description: auxin-induced protein, putative [Arabidopsis
  misc_feature (13)..(372): Homolog of NCBI NO: 21592781 NR Description: putative membrane protein [Arabidopsis thaliana]
  misc_feature (13)..(372): Homolog of NCBI NO: 18421491 NR Description: auxin-induced protein family [Arabidopsis
  misc_feature (1)..(385): Homolog of NCBI NO: 18086563 NR Description: AT4g17280/dl4675c [Arabidopsis thaliana]
  misc_feature (10)..(387): Homolog of NCBI NO: 24414270 NR Description: Putative membrane protein [Oryza sativa (japonica
  misc_feature (1)..(372): Homolog of NCBI NO: 18404500 NR Description: auxin-induced protein family [Arabidopsis
  misc_feature (2)..(375): Homolog of NCBI NO: 15235545 NR Description: auxin-induced protein, putative [Arabidopsis
  misc_feature (2)..(375): Homolog of NCBI NO: 21593814 NR Description: unknown [Arabidopsis thaliana]
MSVTRVLALLVAAALAAAAPARVGAAGACAAERFSKNRVYAACTDLPTLGASVHWTYDPAASSLSVAFVAAPPSSGGWVAWGLNPSGDGMSGTQALVASPTGSGGAYGVQTFDIQGTSLGSPGPIAYKTSDLAAEVGADGRVQMFGKLALQNGTGEVNQVWQVGPASGGSIGIHAMAAANMGAKGKLNLVTGATTAVSGGSILRKKNTHGILNAVSWGILLPMGGIVARYLKTFKSADPAWFYLHVACQLIGYAVGVSGWATGIHLGNLSKGITYSLHRNIGIAVFALGTVQIFALFLRPKKDHKLRVYWNVYHHSVGYTIIILGIVNIFKGMSILDVAQKWKTGYIIAIGILGGVAVALEVITWAIVLKRRKTEDKAYNGGASNNNNGHLPM

SEQ ID NO: 67031 - protein, 304 aa, Triticum aestivum
  peptide (1)..(304): Ceres Seq. ID no. 14316020
  misc_feature (1)..(127): Pfam Name: Protein of unknown function (DUF568) Pfam Description: Protein of unknown function (DUF568)
  misc_feature (1)..(300): Homolog of NCBI NO: 13785213 NR Description: putative membrane protein [Solanum tuberosum]
  misc_feature (1)..(296): Homolog of NCBI NO: 13785209 NR Description: putative membrane protein [Solanum tuberosum]
  misc_feature (1)..(302): Homolog of NCBI NO: 15238124 NR Description: auxin-induced protein, putative [Arabidopsis
  misc_feature (1)..(283): Homolog of NCBI NO: 21592781 NR Description: putative membrane protein [Arabidopsis thaliana]
  misc_feature (1)..(283): Homolog of NCBI NO: 18421491 NR Description: auxin-induced protein family [Arabidopsis
  misc_feature (1)..(296): Homolog of NCBI NO: 18086563 NR Description: AT4g17280/dl4675c [Arabidopsis thaliana]
  misc_feature (1)..(298): Homolog of NCBI NO: 24414270 NR Description: Putative membrane protein [Oryza sativa (japonica
  misc_feature (1)..(283): Homolog of NCBI NO: 18404500 NR Description: auxin-induced protein family [Arabidopsis
  misc_feature (1)..(286): Homolog of NCBI NO: 15235545 NR Description: auxin-induced protein, putative [Arabidopsis
  misc_feature (1)..(286): Homolog of NCBI NO: 21593814 NR Description: unknown [Arabidopsis thaliana]
MSGTQALVASPTGSGGAYGVQTFDIQGTSLGSPGPIAYKTSDLAAEVGADGRVQMFGKLALQNGTGEVNQVWQVGPASGGSIGIHAMAAANMGAKGKLNLVTGATTAVSGGSILRKKNTHGILNAVSWGILLPMGGIVARYLKTFKSADPAWFYLHVACQLIGYAVGVSGWATGIHLGNLSKGITYSLHRNIGIAVFALGTVQIFALFLRPKKDHKLRVYWNVYHHSVGYTIIILGIVNIFKGMSILDVAQKWKTGYIIAIGILGGVAVALEVITWAIVLKRRKTEDKAYNGGASNNNNGHLPM

SEQ ID NO: 67032 - DNA, 1681 bp, Triticum aestivum
  misc_feature (1)..(1681): Ceres Seq. ID no. 15169501
acttctccaccgtgactgcgactgccactgcgactgcgactgctctctcctgactggagtcagtgtctcgggtgctgctgacccgccgtcttctccgcttgccgtgccgccatcgccatggatggggtttcgacggagcctcgccacccgctcctgcaggccgttctcgacggcgacctccgcctcctcaaagagatggcgggcgtcgtggcggcggacgtcggcatcagggcgcgcgcgctgactgtggcggtcatggaagggcggctggacatctgtaggtgcctcgtcgaggaccacggcgtcgatgtcaaccagcgcaccttcacaggtgacactcctctggccatttctacgacttatgggacgcctgctaccaccagatatcttctggatcgtggtgctgatccaactttagctggtgccctgtggccacctcttcatgctgctgcaatttttggacaatgtgagatagtggaattgctgctttcaactggaattgatgtggatcatttcgattctgtgtatgggaccgcattgcatgttgccgctactaatggtcaagatggctcgatgaatattttgttgcagcatcatgcagatcccaataaggttttccgccttgatagtaccccgttaaggctggccatgatttctgaatcactggaatgtgtgaagctactcattaaggctggcgctgatgtgaataaaattgactatactggtgttacttacttgatgatagcagcgggcaatggcttatctgataccctgaaatgcttactagatgctggcgctaacccagatattgatgatgggtttggtacaactccaatcgaaattgccgccctccaagccagatgggatatggttgcgatgttatttcctttaacttctcccatttcaagattgccggattggagtgttgatggaattatttctcatgtgcaatctttcggtttgaagccgagggatatacatctatgtgaagcgaaaagagctgaactaaagttgcaagctacagaggcttttaagagaaaggaatatatcatagcaggagacctatatacttgtgcaatgagttttcagcctagtccaaaaggtcttgcaaacctgctagcacataggagtttctgtatgttgcacgcgggaataggaaaagaggctctctccgactctgctaggtgcacagtgctacgacctctttggcccaaaggttactatcgactaggagcagcctttatgttgctacaggactatggaaaagcagctcagacgttcgaagctggcttgaaactggaccctacaaatgcggatatggcaaacgctttaagggaagcccaagagacggcgaggaatcctcctcgcaccaggggggctggagtgccttcacccatttggaatgagacgttcctggagtgattgaggcgctgtttcgttgctatgtccagtccagggtatgcatgcctgcctgttattctcttttcctatgtccagtccaaggtatgcgtgcctgttattctctggagagactgagactctgtttcgttgcttaagactctgttttgtgttgaaccgtccaagagtactgatctcatgtgctatattgtagaccgtgtaaacatggctatctgtacattgtggttatatgtcgtctccgtgaaccattgtggttatatac

SEQ ID NO: 67033 - protein, 434 aa, Triticum aestivum
  peptide (1)..(434): Ceres Seq. ID no. 15169502
  misc_feature (366)..(398): Pfam Name: TPR Domain Pfam Description: TPR Domain
  misc_feature (1)..(195): Homolog of NCBI NO: 38637543 NR Description: ankyrin-like protein [Oryza sativa (japonica
  misc_feature (1)..(279): Homolog of NCBI NO: 24745936 NR Description: ankyrin-like protein [Solanum tuberosum]
  misc_feature (163)..(416): Homolog of NCBI NO: 34910278 NR Description: OSJNBa0089K24.26 [Oryza sativa (japonica
  misc_feature (42)..(413): Homolog of NCBI NO: 13435247 NR Description: putative ankyrin [Oryza sativa]
  misc_feature (293)..(405): Homolog of NCBI NO: 13435243 NR Description: putative gag-pol polyprotein [Oryza sativa]
  misc_feature (1)..(289): Homolog of NCBI NO: 13435243 NR Description: putative gag-pol polyprotein [Oryza sativa]
  misc_feature (41)..(413): Homolog of NCBI NO: 15229331 NR Description: ankyrin-related protein [Arabidopsis thaliana]
  misc_feature (45)..(408): Homolog of NCBI NO: 34896852 NR Description: putative ankyrin [Oryza sativa]
  misc_feature (13)..(408): Homolog of NCBI NO: 27542766 NR Description: ankyrin-like protein-like protein [Sorghum
  misc_feature (9)..(406): Homolog of NCBI NO: 27542768 NR Description: ankyrin-like protein-like protein [Sorghum
MDGVSTEPRHPLLQAVLDGDLRLLKEMAGVVAADVGIRARALTVAVMEGRLDICRCLVEDHGVDVNQRTFTGDTPLAISTTYGTPATTRYLLDRGADPTLAGALWPPLHAAAIFGQCEIVELLLSTGIDVDHFDSVYGTALHVAATNGQDGSMNILLQHHADPNKVFRLDSTPLRLAMISESLECVKLLIKAGADVNKIDYTGVTYLMIAAGNGLSDTLKCLLDAGANPDIDDGFGTTPIEIAALQARWDMVAMLFPLTSPISRLPDWSVDGIISHVQSFGLKPRDIHLCEAKRAELKLQATEAFKRKEYIIAGDLYTCAMSFQPSPKGLANLLAHRSFCMLHAGIGKEALSDSARCTVLRPLWPKGYYRLGAAFMLLQDYGKAAQTFEAGLKLDPTNADMANALREAQETARNPPRTRGAGVPSPIWNETFLE

SEQ ID NO: 67034 - protein, 408 aa, Triticum aestivum
  peptide (1)..(408): Ceres Seq. ID no. 15169503
  misc_feature (340)..(372): Pfam Name: TPR Domain Pfam Description: TPR Domain
  misc_feature (1)..(169): Homolog of NCBI NO: 38637543 NR Description: ankyrin-like protein [Oryza sativa (japonica
  misc_feature (1)..(253): Homolog of NCBI NO: 24745936 NR Description: ankyrin-like protein [Solanum tuberosum]
  misc_feature (137)..(390): Homolog of NCBI NO: 34910278 NR Description: OSJNBa0089K24.26 [Oryza sativa (japonica
  misc_feature (16)..(387): Homolog of NCBI NO: 13435247 NR Description: putative ankyrin [Oryza sativa]
  misc_feature (267)..(379): Homolog of NCBI NO: 13435243 NR Description: putative gag-pol polyprotein [Oryza sativa]
  misc_feature (1)..(263): Homolog of NCBI NO: 13435243 NR Description: putative gag-pol polyprotein [Oryza sativa]
  misc_feature (15)..(387): Homolog of NCBI NO: 15229331 NR Description: ankyrin-related protein [Arabidopsis thaliana]
  misc_feature (19)..(382): Homolog of NCBI NO: 34896852 NR Description: putative ankyrin [Oryza sativa]
  misc_feature (1)..(382): Homolog of NCBI NO: 27542766 NR Description: ankyrin-like protein-like protein [Sorghum
  misc_feature (1)..(380): Homolog of NCBI NO: 27542768 NR Description: ankyrin-like protein-like protein [Sorghum
MAGVVAADVGIRARALTVAVMEGRLDICRCLVEDHGVDVNQRTFTGDTPLAISTTYGTPATTRYLLDRGADPTLAGALWPPLHAAAIFGQCEIVELLLSTGIDVDHFDSVYGTALHVAATNGQDGSMNILLQHHADPNKVFRLDSTPLRLAMISESLECVKLLIKAGADVNKIDYTGVTYLMIAAGNGLSDTLKCLLDAGANPDIDDGFGTTPIEIAALQARWDMVAMLFPLTSPISRLPDWSVDGIISHVQSFGLKPRDIHLCEAKRAELKLQATEAFKRKEYIIAGDLYTCAMSFQPSPKGLANLLAHRSFCMLHAGIGKEALSDSARCTVLRPLWPKGYYRLGAAFMLLQDYGKAAQTFEAGLKLDPTNADMANALREAQETARNPPRTRGAGVPSPIWNETFLE

SEQ ID NO: 67035 - protein, 388 aa, Triticum aestivum
  peptide (1)..(388): Ceres Seq. ID no. 15169504
  misc_feature (320)..(352): Pfam Name: TPR Domain Pfam Description: TPR Domain
  misc_feature (1)..(149): Homolog of NCBI NO: 38637543 NR Description: ankyrin-like protein [Oryza sativa (japonica
  misc_feature (1)..(233): Homolog of NCBI NO: 24745936 NR Description: ankyrin-like protein [Solanum tuberosum]
  misc_feature (117)..(370): Homolog of NCBI NO: 34910278 NR Description: OSJNBa0089K24.26 [Oryza sativa (japonica
  misc_feature (1)..(367): Homolog of NCBI NO: 13435247 NR Description: putative ankyrin [Oryza sativa]
  misc_feature (247)..(359): Homolog of NCBI NO: 13435243 NR Description: putative gag-pol polyprotein [Oryza sativa]
  misc_feature (1)..(243): Homolog of NCBI NO: 13435243 NR Description: putative gag-pol polyprotein [Oryza sativa]
  misc_feature (1)..(367): Homolog of NCBI NO: 15229331 NR Description: ankyrin-related protein [Arabidopsis thaliana]
  misc_feature (1)..(362): Homolog of NCBI NO: 34896852 NR Description: putative ankyrin [Oryza sativa]
  misc_feature (1)..(362): Homolog of NCBI NO: 27542766 NR Description: ankyrin-like protein-like protein [Sorghum
  misc_feature (1)..(360): Homolog of NCBI NO: 27542768 NR Description: ankyrin-like protein-like protein [Sorghum
MEGRLDICRCLVEDHGVDVNQRTFTGDTPLAISTTYGTPATTRYLLDRGADPTLAGALWPPLHAAAIFGQCEIVELLLSTGIDVDHFDSVYGTALHVAATNGQDGSMNILLQHHADPNKVFRLDSTPLRLAMISESLECVKLLIKAGADVNKIDYTGVTYLMIAAGNGLSDTLKCLLDAGANPDIDDGFGTTPIEIAALQARWDMVAMLFPLTSPISRLPDWSVDGIISHVQSFGLKPRDIHLCEAKRAELKLQATEAFKRKEYIIAGDLYTCAMSFQPSPKGLANLLAHRSFCMLHAGIGKEALSDSARCTVLRPLWPKGYYRLGAAFMLLQDYGKAAQTFEAGLKLDPTNADMANALREAQETARNPPRTRGAGVPSPIWNETFLE

SEQ ID NO: 67036 - DNA, 1635 bp, Triticum aestivum
  misc_feature (1)..(1635): Ceres Seq. ID no. 14316049
gagaaaaggactcgaataataaaaactcataaacaactccgccctcgggaccgagaccgagacccgaagaagagggagatcgctcgctcgctgcacaacgcccgcccacgccgccgtctccctctccctctccgcctccctccgtccaaccgcagcccgctccacctcatggcgtcgctctccctctccctccgcgcctccgcctcctcggccgcagccggatcccgcgccgccgccccaatcaaggcgtcgtgtgtgaggagcaaggttacctgcagcttaccatccatcagagctacctcctcacctgctagaagcattgagcccgtaagagccaccgccacacaggcgccccctgccacccctcaatcttctagcggagagaagacaaaggtcggcatcaatggttttgggcggattgggaggttagttctgcgaattgcaattgatagagatgacattgaagttgtggctgtcaatgatccgtttatcgatgctaagtacatggcctacatgtttaagtatgattccacacacggtccattcaaaggaaccataacagttctggatgagtcaaccttggagattaatgggaagaaagtctcagttacaagcaaaagggacccgtcagatatcccttggggtaactttggagctgaatatgttgttgaatcatctggtgtttttacaacagttgagaaagcttcagcacatttgaaggggggtgcaaagaaagtggtgatatcggctccgtcagcggatgctcccatgtttgttgttggagtaaatgagaagaattacaaccctagcatggatgtcgtctctaatgctagttgtaccaccaactgtcttgctcctgttgccaaggttgtccacgaggagtttggcattcttgaaggcctaatgacaactgtccatgccacaacatccactcaaaagactgttgatggtccttcaatgaaggactggaggggaggacgtggtgctggtcaaaacatcatccctagctctacgggtgcagcaaaggctgttggaaaggtccttccagctttaaatggaaagctcactggcatggccttccgggttcctacacctaacgtatctgttgttgatctgacctgccgacttgagaaaaatgcttcatatgaagatgtgaaagcagctatcaaggacgcatcagaaggttcgcttaaaggtattctaggctacacagatgaggatgttgtttcaaacgatttcgttggtgacacaaggtcgagcatatttgatgccaatgctggtatgggactaagttcatctttcatgaagctcgtctcctggtacgacaacgagtggggctacagcaaccgtgtcctcgatctgatcgggcacatgtctcttgttgcctaacgatgatgccacgatacgatttagcacagaaggtctcctcgcgtagtgtaggaagtgaaggctgcaattttgatggccattttcgtatcctggaataataataattctgtacgatgaaaacaatcaaatcaatcggcgtcgacttgaagctgcagaacgctcatgctggtctgtaaaaccccataattgaactgttgtgggtggacaataaacccaatctccgactcgtcgagtcatagtgctgtt

SEQ ID NO: 67037 - protein, 462 aa, Triticum aestivum
  peptide (1)..(462): Ceres Seq. ID no. 14316050
  misc_feature (280)..(441): Pfam Name: Glyceraldehyde 3-phosphate dehydrogenase, Pfam Description: Glyceraldehyde 3-phosphate dehydrogenase,
  misc_feature (110)..(461): Homolog of NCBI NO: 3059122 NR Description: glyeraldehyde-3-phosphate dehydrogenase [Marsilea
  misc_feature (59)..(462): Homolog of NCBI NO: 25284351 NR Description: hypothetical protein F3O9.10 - Arabidopsis
  misc_feature (104)..(462): Homolog of NCBI NO: 2129472 NR Description: glyceraldehyde-3-phosphate dehydrogenase
  misc_feature (104)..(462): Homolog of NCBI NO: 3059140 NR Description: NAD-dependent glyceraldehyde-3-phosphate
  misc_feature (104)..(462): Homolog of NCBI NO: 2129471 NR Description: glyceraldehyde-3-phosphate dehydrogenase
  misc_feature (58)..(462): Homolog of NCBI NO: 18072805 NR Description: glyceraldehyde-3-phosphate dehydrogenase
  misc_feature (104)..(462): Homolog of NCBI NO: 15219406 NR Description: glyceraldehyde-3-phosphate dehydrogenase -related
  misc_feature (59)..(462): Homolog of NCBI NO: 21618027 NR Description: putative glyceraldehyde-3-phosphate dehydrogenase
  misc_feature (59)..(462): Homolog of NCBI NO: 15219206 NR Description: glyceraldehyde-3-phosphate dehydrogenase -related
  misc_feature (59)..(462): Homolog of NCBI NO: 27754473 NR Description: putative glyceraldehyde-3-phosphate dehydrogenase
EKRTRIIKTHKQLRPRDRDRDPKKREIARSLHNARPRRRLPLPLRLPPSNRSPLHLMASLSLSLRASASSAAAGSRAAAPIKASCVRSKVTCSLPSIRATSSPARSIEPVRATATQAPPATPQSSSGEKTKVGINGFGRIGRLVLRIAIDRDDIEVVAVNDPFIDAKYMAYMFKYDSTHGPFKGTITVLDESTLEINGKKVSVTSKRDPSDIPWGNFGAEYVVESSGVFTTVEKASAHLKGGAKKVVISAPSADAPMFVVGVNEKNYNPSMDVVSNASCTTNCLAPVAKVVHEEFGILEGLMTTVHATTSTQKTVDGPSMKDWRGGRGAGQNIIPSSTGAAKAVGKVLPALNGKLTGMAFRVPTPNVSVVDLTCRLEKNASYEDVKAAIKDASEGSLKGILGYTDEDVVSNDFVGDTRSSIFDANAGMGLSSSFMKLVSWYDNEWGYSNRVLDLIGHMSLVA

SEQ ID NO: 67038 - protein, 406 aa, Triticum aestivum
  peptide (1)..(406): Ceres Seq. ID no. 14316051
  misc_feature (224)..(385): Pfam Name: Glyceraldehyde 3-phosphate dehydrogenase, Pfam Description: Glyceraldehyde 3-phosphate dehydrogenase,
  misc_feature (54)..(405): Homolog of NCBI NO: 3059122 NR Description: glyeraldehyde-3-phosphate dehydrogenase [Marsilea
  misc_feature (3)..(406): Homolog of NCBI NO: 25284351 NR Description: hypothetical protein F3O9.10 - Arabidopsis
  misc_feature (48)..(406): Homolog of NCBI NO: 2129472 NR Description: glyceraldehyde-3-phosphate dehydrogenase
  misc_feature (48)..(406): Homolog of NCBI NO: 3059140 NR Description: NAD-dependent glyceraldehyde-3-phosphate
  misc_feature (48)..(406): Homolog of NCBI NO: 2129471 NR Description: glyceraldehyde-3-phosphate dehydrogenase
  misc_feature (2)..(406): Homolog of NCBI NO: 18072805 NR Description: glyceraldehyde-3-phosphate dehydrogenase
  misc_feature (48)..(406): Homolog of NCBI NO: 15219406 NR Description: glyceraldehyde-3-phosphate dehydrogenase -related
  misc_feature (3)..(406): Homolog of NCBI NO: 21618027 NR Description: putative glyceraldehyde-3-phosphate dehydrogenase
  misc_feature (3)..(406): Homolog of NCBI NO: 15219206 NR Description: glyceraldehyde-3-phosphate dehydrogenase -related
  misc_feature (3)..(406): Homolog of NCBI NO: 27754473 NR Description: putative glyceraldehyde-3-phosphate dehydrogenase
MASLSLSLRASASSAAAGSRAAAPIKASCVRSKVTCSLPSIRATSSPARSIEPVRATATQAPPATPQSSSGEKTKVGINGFGRIGRLVLRIAIDRDDIEVVAVNDPFIDAKYMAYMFKYDSTHGPFKGTITVLDESTLEINGKKVSVTSKRDPSDIPWGNFGAEYVVESSGVFTTVEKASAHLKGGAKKVVISAPSADAPMFVVGVNEKNYNPSMDVVSNASCTTNCLAPVAKVVHEEFGILEGLMTTVHATTSTQKTVDGPSMKDWRGGRGAGQNIIPSSTGAAKAVGKVLPALNGKLTGMAFRVPTPNVSVVDLTCRLEKNASYEDVKAAIKDASEGSLKGILGYTDEDVVSNDFVGDTRSSIFDANAGMGLSSSFMKLVSWYDNEWGYSNRVLDLIGHMSLVA

SEQ ID NO: 67039 - protein, 294 aa, Triticum aestivum
  peptide (1)..(294): Ceres Seq. ID no. 14316052
  misc_feature (112)..(273): Pfam Name: Glyceraldehyde 3-phosphate dehydrogenase, Pfam Description: Glyceraldehyde 3-phosphate dehydrogenase,
  misc_feature (1)..(293): Homolog of NCBI NO: 3059122 NR Description: glyeraldehyde-3-phosphate dehydrogenase [Marsilea
  misc_feature (1)..(294): Homolog of NCBI NO: 25284351 NR Description: hypothetical protein F3O9.10 - Arabidopsis
  misc_feature (1)..(294): Homolog of NCBI NO: 2129472 NR Description: glyceraldehyde-3-phosphate dehydrogenase
  misc_feature (1)..(294): Homolog of NCBI NO: 3059140 NR Description: NAD-dependent glyceraldehyde-3-phosphate
  misc_feature (1)..(294): Homolog of NCBI NO: 2129471 NR Description: glyceraldehyde-3-phosphate dehydrogenase
  misc_feature (1)..(294): Homolog of NCBI NO: 18072805 NR Description: glyceraldehyde-3-phosphate dehydrogenase
  misc_feature (1)..(294): Homolog of NCBI NO: 15219406 NR Description: glyceraldehyde-3-phosphate dehydrogenase -related
  misc_feature (1)..(294): Homolog of NCBI NO: 21618027 NR Description: putative glyceraldehyde-3-phosphate dehydrogenase
  misc_feature (1)..(294): Homolog of NCBI NO: 15219206 NR Description: glyceraldehyde-3-phosphate dehydrogenase -related
  misc_feature (1)..(294): Homolog of NCBI NO: 27754473 NR Description: putative glyceraldehyde-3-phosphate dehydrogenase
MAYMFKYDSTHGPFKGTITVLDESTLEINGKKVSVTSKRDPSDIPWGNFGAEYVVESSGVFTTVEKASAHLKGGAKKVVISAPSADAPMFVVGVNEKNYNPSMDVVSNASCTTNCLAPVAKVVHEEFGILEGLMTTVHATTSTQKTVDGPSMKDWRGGRGAGQNIIPSSTGAAKAVGKVLPALNGKLTGMAFRVPTPNVSVVDLTCRLEKNASYEDVKAAIKDASEGSLKGILGYTDEDVVSNDFVGDTRSSIFDANAGMGLSSSFMKLVSWYDNEWGYSNRVLDLIGHMSLVA

SEQ ID NO: 67040 - DNA, 445 bp, Triticum aestivum
  misc_feature (1)..(445): Ceres Seq. ID no. 13660231
aatcacgcgcgtcaggctccgtaattgttaccgatccgagtctgatttcgccatcacgcgtcccaggctccataaattccagggatcgtccttatggcggtttcggcgactgagattttgcagcatccgctagaggagtaggtccagaggattcgagatctgccttgcccgatccttgggggagattatggccgtgataaaggtgcgagtgagcaaactccgcgaggcaaagagtgttgaggacagcaggcacaagagtgccagtcgcgagccaaaggaaggccagagcagcaacccaaagagggccaatggcgaggcaccagttgagcctcagcagagggaagtttgtgcattttgcgacgatggtggtgaattaatctgctgtgatggtggatgtctgagatccttccacccaaccaaagaacatggtgaaagatctatgtgc

SEQ ID NO: 67041 - protein, 86 aa, Triticum aestivum
  peptide (1)..(86): Ceres Seq. ID no. 13660232
  misc_feature (53)..(85): Homolog of NCBI NO: 15240501 NR Description: expressed protein [Arabidopsis thaliana]
MAVIKVRVSKLREAKSVEDSRHKSASREPKEGQSSNPKRANGEAPVEPQQREVCAFCDDGGELICCDGGCLRSFHPTKEHGERSMC

SEQ ID NO: 67042 - protein, 43 aa, Triticum aestivum
  peptide (1)..(43): Ceres Seq. ID no. 13660233
ITRVRLRNCYRSESDFAITRPRLHKFQGSSLWRFRRLRFCSIR

SEQ ID NO: 67043 - DNA, 867 bp, Triticum aestivum
  misc_feature (1)..(867): Ceres Seq. ID no. 13659322
aacggctcgccacaaagccaacaaacccagcagccccagccctttccgcctccccccgctcccaaaccaagccccgcccccgttctgtccctccgcaaaaccctagctccgtacacgcgcggcgacctccaccatgaagggcaaggccgacacctccaagaagggcgagggcaggctcaaggccgccggcggcgccagcaagaggaagaaggacgccgctgccgctggcaagcccaagcgcccaccctccgccttcttcgtcttcatgtctgagttcaggcagcagtacaacgcggagaaccccaacaacaagagtgtcgccaacgtgagcaaggcggcgggtgagaagtggagagctatgtctgatgaggacaaagcaccttatgtggaaaaggctgaacagaagaagaaggactatgagaagaccaaagccacctttgataacaaggagagtgcgagctccaagaaggccaagactcagaacgatgaggaggtcaaatctgaggtcgaagatgagggtagcgatgaggaaaacgaggacgatgatgagtaaatagtgtatcagagtatgaggtagcaaattgggtgtttggtccccgcttagtgtactagtttgctatcctgctatcctcagtgttagatgatgagatttggaagtagatgttgtgtttgtgtgttaagggggcccttttagacttgtggactcatggtttgagaagttgcttagtagtgtattagcagagaggaagctgagaatgctaccagctgttccaatgcttttctcttgctaaccacctgtgtaagaacttgttttcattcgctaatctgatgactgcccagccattggctcttggttaatttcgcctt

SEQ ID NO: 67044 - protein, 139 aa, Triticum aestivum; identical to SEQ ID NO: 51863
  peptide (1)..(139): Ceres Seq. ID no. 13659323
  misc_feature (34)..(103): Pfam Name: HMG (high mobility group) box Pfam Description: HMG (high mobility group) box
  misc_feature (1)..(138): Homolog of NCBI NO: 11346367 NR Description: high mobility group protein HMG-gamma
  misc_feature (1)..(138): Homolog of NCBI NO: 13877775 NR Description: putative HMG protein [Arabidopsis thaliana]
  misc_feature (1)..(138): Homolog of NCBI NO: 21592453 NR Description: putative HMG protein [Arabidopsis thaliana]
  misc_feature (1)..(138): Homolog of NCBI NO: 15227862 NR Description: HMG protein -related [Arabidopsis thaliana]
  misc_feature (1)..(138): Homolog of NCBI NO: 729737 NR Description: HMG1/2-LIKE PROTEIN
  misc_feature (2)..(139): Homolog of NCBI NO: 7446231 NR Description: probable high mobility group protein HMG1 - sword
  misc_feature (1)..(138): Homolog of NCBI NO: 7446227 NR Description: high mobility group protein HMGc2 - maize
  misc_feature (1)..(138): Homolog of NCBI NO: 17017394 NR Description: HMG-like nucleosome/chromatin assembly factor D
  misc_feature (1)..(138): Homolog of NCBI NO: 7446226 NR Description: high mobility group protein HMGc1 - maize
  misc_feature (1)..(139): Homolog of NCBI NO: 18700443 NR Description: high mobility group box protein 2

SEQ ID NO: 67045 - protein, 95 aa, Triticum aestivum; identical to SEQ ID NO: 51864
  peptide (1)..(95): Ceres Seq. ID no. 13659324
  misc_feature (1)..(59): Pfam Name: HMG (high mobility group) box Pfam Description: HMG (high mobility group) box
  misc_feature (1)..(94): Homolog of NCBI NO: 11346367 NR Description: high mobility group protein HMG-gamma
  misc_feature (1)..(94): Homolog of NCBI NO: 13877775 NR Description: putative HMG protein [Arabidopsis thaliana]
  misc_feature (1)..(94): Homolog of NCBI NO: 21592453 NR Description: putative HMG protein [Arabidopsis thaliana]
  misc_feature (1)..(94): Homolog of NCBI NO: 15227862 NR Description: HMG protein -related [Arabidopsis thaliana]
  misc_feature (1)..(94): Homolog of NCBI NO: 729737 NR Description: HMG1/2-LIKE PROTEIN
  misc_feature (1)..(95): Homolog of NCBI NO: 7446231 NR Description: probable high mobility group protein HMG1 - sword
  misc_feature (1)..(94): Homolog of NCBI NO: 7446227 NR Description: high mobility group protein HMGc2 - maize
  misc_feature (1)..(94): Homolog of NCBI NO: 17017394 NR Description: HMG-like nucleosome/chromatin assembly factor D
  misc_feature (1)..(94): Homolog of NCBI NO: 7446226 NR Description: high mobility group protein HMGc1 - maize
  misc_feature (1)..(95): Homolog of NCBI NO: 18700443 NR Description: high mobility group box protein 2

SEQ ID NO: 67046 - protein, 90 aa, Triticum aestivum; identical to SEQ ID NO: 51865
  peptide (1)..(90): Ceres Seq. ID no. 13659325

SEQ ID NO: 67047 - DNA, 1123 bp, Triticum aestivum
  misc_feature (1)..(1123): Ceres Seq. ID no. 13659393
  misc_feature: Pfam Name: X8 Pfam Description: X8 domain
acctcactcactcacccgaccgcgcgccggcccgctcctgcactacacccagaggcttcctcccaccggacgcaggatcgcgaccgcctagctacctagagcagagcttggggaattcttacggctcagagcctgcctgggctctccggtggttgttccttccagcatcgatctgcttcttgggcgatcttggtagctgatggaggcggcattggttctggtggtggcggtgctccttgggtcctcagcccttgttgcctcagatttctgcgtgtgccggtcggagcagccgacggcggtgctgcagaaggcgatcgactacgcgtgcgggcagggcgcggactgcacggccatcgcgcagagcggggcgtgctacagccccgacgaggtcgccgcgcactgctcctgggccgccaacagctacttccagaagttcaggtccaccggcgccacctgcgacttctccggcgccgccaccctctccaccaccgaccccagtttctctggttgcacgttcccatccagtgccagtgccgccggcaccaccacgggaaccgggacagccacgacgggcaccggcaccaccacgggcaccgggacgaccacggggggcaccttcagccccgggatgggcaccggcttcaacagcaccgggttcagcccgacaaccgggagcatggacggcaccgccgcggcggccggcttgcttccgtcgatcagactggcggcctccatcgccgtcctcctcctctcctacttggcgctgccatgaactctgcctgcctgtccgtctcttctcatggcagaacacattagcagttagcttcagtggccttctggcctggcctgccagaagcaagctgagagtgtggatttgtctaatggaatccatcgatctggaagagttgatcgccgttattgttccctagtgtcatgggctggttagctgggggtgtcattttggttctagcttaattttaatttatatatggcctcccacaggctggaggagtggtgtatgatttggtaggatggctgtctctttccctctgcaaggacccttgtcttccatgtctgtttttatactgttggcctctcttaatttttaagcattttttgcttg

SEQ ID NO: 67048 - protein, 190 aa, Triticum aestivum
  peptide (1)..(190): Ceres Seq. ID no. 15219965
  misc_feature: Pfam Name: X8 Pfam Description: X8 domain
  misc_feature (5)..(183): Homolog of NCBI NO: 30683485 NR Description: expressed protein [Arabidopsis thaliana]
  misc_feature (3)..(185): Homolog of NCBI NO: 30697478 NR Description: glycosyl hydrolase family 17 [Arabidopsis
  misc_feature (1)..(110): Homolog of NCBI NO: 34909796 NR Description: P0403C05.4 [Oryza sativa (japonica
  misc_feature (4)..(155): Homolog of NCBI NO: 18394637 NR Description: glycosyl hydrolase family 17 [Arabidopsis
  misc_feature (5)..(169): Homolog of NCBI NO: 25404810 NR Description: unknown protein, 45065-49536 [imported] -
  misc_feature (3)..(178): Homolog of NCBI NO: 15241485 NR Description: glycosyl hydrolase family 17 [Arabidopsis
  misc_feature (3)..(178): Homolog of NCBI NO: 21592859 NR Description: unknown [Arabidopsis thaliana]
  misc_feature (5)..(169): Homolog of NCBI NO: 21553768 NR Description: unknown [Arabidopsis thaliana]
  misc_feature (5)..(169): Homolog of NCBI NO: 18409239 NR Description: expressed protein [Arabidopsis thaliana]
  misc_feature (1)..(189): Homolog of NCBI NO: 22775658 NR Description: contains ESTs
MEAALVLVVAVLLGSSALVASDFCVCRSEQPTAVLQKAIDYACGQGADCTAIAQSGACYSPDEVAAHCSWAANSYFQKFRSTGATCDFSGAATLSTTDPSFSGCTFPSSASAAGTTTGTGTATTGTGTTTGTGTTTGGTFSPGMGTGFNSTGFSPTTGSMDGTAAAAGLLPSIRLAASIAVLLLSYLALP

SEQ ID NO: 67049 - DNA, 2303 bp, Triticum aestivum
  misc_feature (1)..(2303): Ceres Seq. ID no. 13659394
atcacccattctcctcctccctcttctccgtccgtcaatccccctctatctcctccccgcaccagctcttgtactactcggagcacctccacccctgaccccgactccgaccacccatccatccgcttcttgcttcttccgctgtccgggccaagaatctgagatcctgtccggcgccgccgcttgtttcttgatggccgcatagatggcaggatcaacttcattttgagcttgtcccacaaggttgcaatcaccagtatgtcagctaaggcttcagaacgtacatatagatgctcagatgattcacaaatggcgtactacaacaactcggtgcctttagcagaaaatggacggttctatatgatgcaaaatcatctggatgttcactacacatcttcaggtgatgggtcacagaaaattagttccaatcctcaagtatttgaagcacagtactgcacactcgaatcatcatcggcaaatggtgtttatcctacacagagctccacatcttctcatagcatctcccctataagtgggagccccctgtctcagaatgatagccactcataccacacatatgattcacccccaactgcttcatgtgttaccgagataccggatttccagagtaaactgaaggagctagaaaatgcaattcttggacctgaattggacatagcctctgacagccccgagagcttattgcaagccaaccatcctttgaaacaagataactggagacagcttctgggaattaacacaggagacttgaagcaggtgatcatagcatgcggtaaggctgttgctgcgaatgatatgtatgcaacagaactattgatatctgagctaggtcagctggtgtctgtctctggagatccaatgcaacgcctaggggcatatatgttggaaggccttgtggccaggctctctttctctggaagtaagctgtataaatccttgaagtgcaaagaacctacaagctctgagctcatgtcttacatgcatctcctctgtgagatctgcccgttctacaagtttggttacatgtcggccaatggtgccatagcagaggctatcwrwggcgagaacttcgttcacatcattgatttccaaatcgcacaggggagccagtggataactatcattcaggctcttgcagcgaggcccgggggtccaccattcctaagaatcactggtatagatgactcaaactctgcttatgcccgaggtggtggactggatatggttgggacaagattgcatagcatctctgcttcgtgtggccttccctttgagttcaatgctgtccatgctgctagccatgaggtttatattcagcatcttgacacaagacctggggaggctattgtagtgaattttgcctatcagctgcaccatactcctgatgaaagcgtgagcgtggaaaatcaccgggacaggatcataagaatgatcaagagcctgtccccctagggtggtgactcttgttgagcaggagtcgaacacaaacacaagtgcattcttgccaaggtacttggagaccctcgactactatacggcaatgtttgagtcaatagatgttgctctaccaagggatgataagaggcggattagcacggagcaacactgtgtggcaagggatatcgtcaatttaatcgcgtgcgagggtgctgaaagggttgagaggcacgaggtgtttgggaaatggaaggcgaggtttgcaatggctggattcaggccgtacccgctgagttcggtggtgaacaacaccatcaaaacgctgctggatagctaccacagttgctacaggcttgaggagagggacggagtcctttaccttggttggaagggcagagtgttggtcgtgtcttctgcgtggtgctgacatgtcttgaggagaagctcatgtcatgtatgtacactgtttttattgttgaaacttaattcttgagtgattcgtgttacgtcgatccacgatatttctatagcctgacttgtcctttacccaatttcagatggaacctgagcttatcagtttcagatggaacctgagcttatataagggctttgctgcttgtctgcaccaggagttgctgtgatgataccgcgacagccgtgacttagaagaaggcatagtgattaaataaataaatatgttcatagctaggaatttggtgtgttgtggtttgctcccgttgttctaggattgacatgcttgtaatatactgtactactaattagaggatgtttagagacgattaaagggtatgcaggcacaagaggcggctgttgcatgtgtcctc

SEQ ID NO: 67050 - protein, 404 aa, Triticum aestivum
  peptide (1)..(404): Ceres Seq. ID no. 15219966
  misc_feature (145)..(404): Pfam Name: GRAS family transcription factor Pfam Description: GRAS family transcription factor
  misc_feature (133)..(404): Homolog of NCBI NO: 15224425 NR Description: scarecrow-like transcription factor 21 (SCL21)
  misc_feature (65)..(404): Homolog of NCBI NO: 16930433 NR Description: AT4g17230/dl4650c [Arabidopsis thaliana]
  misc_feature (133)..(404): Homolog of NCBI NO: 26450054 NR Description: putative SCARECROW gene regulator [Arabidopsis
  misc_feature (34)..(404): Homolog of NCBI NO: 14517552 NR Description: F17J6.12/F17J6.12 [Arabidopsis thaliana]
  misc_feature (34)..(404): Homolog of NCBI NO: 25405382 NR Description: scarecrow-like protein [imported] - Arabidopsis
  misc_feature (1)..(404): Homolog of NCBI NO: 30694805 NR Description: scarecrow-like transcription factor 5 (SCL5)
  misc_feature (1)..(404): Homolog of NCBI NO: 23397333 NR Description: putative scarecrow protein [Arabidopsis thaliana]
  misc_feature (59)..(404): Homolog of NCBI NO: 15238903 NR Description: phytochrome A signal transduction 1 (PAT1)
  misc_feature (39)..(404): Homolog of NCBI NO: 25989334 NR Description: chitin-inducible gibberellin-responsive protein
  misc_feature (18)..(404): Homolog of NCBI NO: 37533564 NR Description: putative SCARECROW gene regulator-like
  misc_feature (274)..(274): Xaa is any aa, unknown or other
MSAKASERTYRCSDDSQMAYYNNSVPLAENGRFYMMQNHLDVHYTSSGDGSQKISSNPQVFEAQYCTLESSSANGVYPTQSSTSSHSISPISGSPLSQNDSHSYHTYDSPPTASCVTEIPDFQSKLKELENAILGPELDIASDSPESLLQANHPLKQDNWRQLLGINTGDLKQVIIACGKAVAANDMYATELLISELGQLVSVSGDPMQRLGAYMLEGLVARLSFSGSKLYKSLKCKEPTSSELMSYMHLLCEICPFYKFGYMSANGAIAEAIXGENFVHIIDFQIAQGSQWITIIQALAARPGGPPFLRITGIDDSNSAYARGGGLDMVGTRLHSISASCGLPFEFNAVHAASHEVYIQHLDTRPGEAIVVNFAYQLHHTPDESVSVENHRDRIIRMIKSLSP

SEQ ID NO: 67051 - protein, 387 aa, Triticum aestivum
  peptide (1)..(387): Ceres Seq. ID no. 15219967
  misc_feature (128)..(387): Pfam Name: GRAS family transcription factor Pfam Description: GRAS family transcription factor
  misc_feature (116)..(387): Homolog of NCBI NO: 15224425 NR Description: scarecrow-like transcription factor 21 (SCL21)
  misc_feature (48)..(387): Homolog of NCBI NO: 16930433 NR Description: AT4g17230/dl4650c [Arabidopsis thaliana]
  misc_feature (116)..(387): Homolog of NCBI NO: 26450054 NR Description: putative SCARECROW gene regulator [Arabidopsis
  misc_feature (17)..(387): Homolog of NCBI NO: 14517552 NR Description: F17J6.12/F17J6.12 [Arabidopsis thaliana]
  misc_feature (17)..(387): Homolog of NCBI NO: 25405382 NR Description: scarecrow-like protein [imported] - Arabidopsis
  misc_feature (1)..(387): Homolog of NCBI NO: 30694805 NR Description: scarecrow-like transcription factor 5 (SCL5)
  misc_feature (1)..(387): Homolog of NCBI NO: 23397333 NR Description: putative scarecrow protein [Arabidopsis thaliana]
  misc_feature (42)..(387): Homolog of NCBI NO: 15238903 NR Description: phytochrome A signal transduction 1 (PAT1)
  misc_feature (22)..(387): Homolog of NCBI NO: 25989334 NR Description: chitin-inducible gibberellin-responsive protein
  misc_feature (1)..(387): Homolog of NCBI NO: 37533564 NR Description: putative SCARECROW gene regulator-like
  misc_feature (257)..(257): Xaa is any aa, unknown or other
MAYYNNSVPLAENGRFYMMQNHLDVHYTSSGDGSQKISSNPQVFEAQYCTLESSSANGVYPTQSSTSSHSISPISGSPLSQNDSHSYHTYDSPPTASCVTEIPDFQSKLKELENAILGPELDIASDSPESLLQANHPLKQDNWRQLLGINTGDLKQVIIACGKAVAANDMYATELLISELGQLVSVSGDPMQRLGAYMLEGLVARLSFSGSKLYKSLKCKEPTSSELMSYMHLLCEICPFYKFGYMSANGAIAEAIXGENFVHIIDFQIAQGSQWITIIQALAARPGGPPFLRITGIDDSNSAYARGGGLDMVGTRLHSISASCGLPFEFNAVHAASHEVYIQHLDTRPGEAIVVNFAYQLHHTPDESVSVENHRDRIIRMIKSLSP

SEQ ID NO: 67052 - protein, 370 aa, Triticum aestivum
  peptide (1)..(370): Ceres Seq. ID no. 15219968
  misc_feature (111)..(370): Pfam Name: GRAS family transcription factor Pfam Description: GRAS family transcription factor
  misc_feature (99)..(370): Homolog of NCBI NO: 15224425 NR Description: scarecrow-like transcription factor 21 (SCL21)
  misc_feature (31)..(370): Homolog of NCBI NO: 16930433 NR Description: AT4g17230/dl4650c [Arabidopsis thaliana]
  misc_feature (99)..(370): Homolog of NCBI NO: 26450054 NR Description: putative SCARECROW gene regulator [Arabidopsis
  misc_feature (1)..(370): Homolog of NCBI NO: 14517552 NR Description: F17J6.12/F17J6.12 [Arabidopsis thaliana]
  misc_feature (1)..(370): Homolog of NCBI NO: 25405382 NR Description: scarecrow-like protein [imported] - Arabidopsis
  misc_feature (1)..(370): Homolog of NCBI NO: 30694805 NR Description: scarecrow-like transcription factor 5 (SCL5)
  misc_feature (1)..(370): Homolog of NCBI NO: 23397333 NR Description: putative scarecrow protein [Arabidopsis thaliana]
  misc_feature (25)..(370): Homolog of NCBI NO: 15238903 NR Description: phytochrome A signal transduction 1 (PAT1)
  misc_feature (5)..(370): Homolog of NCBI NO: 25989334 NR Description: chitin-inducible gibberellin-responsive protein
  misc_feature (1)..(370): Homolog of NCBI NO: 37533564 NR Description: putative SCARECROW gene regulator-like
  misc_feature (240)..(240): Xaa is any aa, unknown or other
MMQNHLDVHYTSSGDGSQKISSNPQVFEAQYCTLESSSANGVYPTQSSTSSHSISPISGSPLSQNDSHSYHTYDSPPTASCVTEIPDFQSKLKELENAILGPELDIASDSPESLLQANHPLKQDNWRQLLGINTGDLKQVIIACGKAVAANDMYATELLISELGQLVSVSGDPMQRLGAYMLEGLVARLSFSGSKLYKSLKCKEPTSSELMSYMHLLCEICPFYKFGYMSANGAIAEAIXGENFVHIIDFQIAQGSQWITIIQALAARPGGPPFLRITGIDDSNSAYARGGGLDMVGTRLHSISASCGLPFEFNAVHAASHEVYIQHLDTRPGEAIVVNFAYQLHHTPDESVSVENHRDRIIRMIKSLSP

SEQ ID NO: 67053 - DNA, 1763 bp, Triticum aestivum
  misc_feature (1)..(1763): Ceres Seq. ID no. 15178236
cccaacgcgccctaaatcccccccaccactctgccgccggcgcgtccatcagcccccctaccgcctctctccctcgcgcgcgcgtcgccgccgccgccgtccttcctccccggggcaccgcgctcccgccgccccgtccgcgttgctcggccattgagcctccctcgaggtggtaatttttgtcaaggttgttgttaccatggaggtcaacggtcgtcacaagcctacaagagagtatatcgacagagggtgcaatggtgtaaaatcgcccaataatttcggcgaagttgatccctggaccgcgtgggcgtacagaccacggaccatctcgttgttactcatgggaacctgctttttaatttgggcaagtggtgctcttaatccagaaggaagcttctctgctgaccgtgtctcatctgtaaaaaggggtgtctttgcgatgattgctgttttcttggcttattcttttattcaggcaccttcaactgtgctcatcagaccacatcctgcaatttggcggctggtccatgggatggcagttgtttaccttgtggccctcacatttttgcttttccagactcgtgatgatgctaggcagttcatgaagtaccttcaccctgaccttggtgttgaattacctgaaagatcctatggaaccgactgccgtatatatgtacctgatcatccgaaaagcaggtttaacaatgtttatgacatcctttttgacgagtttgttattgcccatatccttggatggtggggaaaggctataatgatacgaaaccaaccacttctatgggtgttatcaattggctttgagttaatggagctaacttttcgacatatgttgccaaattttaacgaatgctggtgggatagcattgttctagacatattgatctgcaattggtttggtatctgggctggtatgaagactgtgagatattttgatgggaggacatatgaatgggttggcttgagtcgccagcccaatattatgagtaaggtgaaaaggacactaggtcagttcacaccagcacagtgggacaaggatgagtggtaccctctgctcggcccttggagattcatccaagtgctaagcctgtgcgtaattttcatgaccatcgaacttaacacattctttcttaagttctgcctctggattcctccccggaatcccttgattgtctaccgactggtcctttggtggttgattgcgataccaaccatccgcgaatacaacacctatttgcaggacaggaactctgtgaagaaggtggggtctttctgttggctttcgctggctatatgcatcatagagcttctgatctgcatcaagtttggccatggtctcttcccgaagtcgatgccgtcgtggctgatcatattctggacgacggtggccacgcttctcacgatgttcctttttgtgtggacatggaaaatttaccgaacaatgattagaaaaaggttgtgattgcaaccaaagccattgttttctctggcccacaccattcttttctcctccgattcaatattgccgtgtaaatatccattcaaattgtgtacatgtagcagtaggccattaatcggtgaccgcgtgaaggtcagccttagaaatttcttgtcgatccaccagcagaataagccccccttccttccgttcattcatgtaccgtgtcaatcaactccgaaactctgaaattcatttggtccgacctacttcgatttaatgaaagtaatgaaataaggttattctgtcc

SEQ ID NO: 67054 - protein, 425 aa, Triticum aestivum
  peptide (1)..(425): Ceres Seq. ID no. 15178237
  misc_feature (101)..(384): Pfam Name: Phosphatidyl serine synthase Pfam Description: Phosphatidyl serine synthase
  misc_feature (31)..(422): Homolog of NCBI NO: 13540555 NR Description: phosphatidylserine synthase 2 [Homo sapiens]
  misc_feature (29)..(56): Homolog of NCBI NO: 34911216 NR Description: putative phosphatidylserine synthase
  misc_feature (77)..(143): Homolog of NCBI NO: 34911216 NR Description: putative phosphatidylserine synthase
  misc_feature (214)..(328): Homolog of NCBI NO: 34911216 NR Description: putative phosphatidylserine synthase
  misc_feature (77)..(126): Homolog of NCBI NO: 34895332 NR Description: P0494A10.20 [Oryza sativa (japonica
  misc_feature (216)..(424): Homolog of NCBI NO: 22329573 NR Description: phosphatidylserine synthase -related [Arabidopsis
  misc_feature (315)..(353): Homolog of NCBI NO: 34895332 NR Description: P0494A10.20 [Oryza sativa (japonica
  misc_feature (1)..(54): Homolog of NCBI NO: 34895332 NR Description: P0494A10.20 [Oryza sativa (japonica
  misc_feature (191)..(298): Homolog of NCBI NO: 34895332 NR Description: P0494A10.20 [Oryza sativa (japonica
  misc_feature (1)..(384): Homolog of NCBI NO: 25518032 NR Description: F9L1.4 protein - Arabidopsis thaliana
MEVNGRHKPTREYIDRGCNGVKSPNNFGEVDPWTAWAYRPRTISLLLMGTCFLIWASGALNPEGSFSADRVSSVKRGVFAMIAVFLAYSFIQAPSTVLIRPHPAIWRLVHGMAVVYLVALTFLLFQTRDDARQFMKYLHPDLGVELPERSYGTDCRIYVPDHPKSRFNNVYDILFDEFVIAHILGWWGKAIMIRNQPLLWVLSIGFELMELTFRHMLPNFNECWWDSIVLDILICNWFGIWAGMKTVRYFDGRTYEWVGLSRQPNIMSKVKRTLGQFTPAQWDKDEWYPLLGPWRFIQVLSLCVIFMTIELNTFFLKFCLWIPPRNPLIVYRLVLWWLIAIPTIREYNTYLQDRNSVKKVGSFCWLSLAICIIELLICIKFGHGLFPKSMPSWLIIFWTTVATLLTMFLFVWTWKIYRTMIRKRL

SEQ ID NO: 67055 - protein, 378 aa, Triticum aestivum
  peptide (1)..(378): Ceres Seq. ID no. 15178238
  misc_feature (54)..(337): Pfam Name: Phosphatidyl serine synthase Pfam Description: Phosphatidyl serine synthase
  misc_feature (1)..(375): Homolog of NCBI NO: 4063700 NR Description: phosphatidylserine synthase-2 [Mus musculus]
  misc_feature (1)..(375): Homolog of NCBI NO: 2190007 NR Description: phosphatidylserine synthase II [Cricetulus
  misc_feature (1)..(375): Homolog of NCBI NO: 13540555 NR Description: phosphatidylserine synthase 2 [Homo sapiens]
  misc_feature (30)..(96): Homolog of NCBI NO: 34911216 NR Description: putative phosphatidylserine synthase
  misc_feature (167)..(281): Homolog of NCBI NO: 34911216 NR Description: putative phosphatidylserine synthase
  misc_feature (30)..(79): Homolog of NCBI NO: 34895332 NR Description: P0494A10.20 [Oryza sativa (japonica
  misc_feature (169)..(377): Homolog of NCBI NO: 22329573 NR Description: phosphatidylserine synthase -related [Arabidopsis
  misc_feature (268)..(306): Homolog of NCBI NO: 34895332 NR Description: P0494A10.20 [Oryza sativa (japonica
  misc_feature (144)..(251): Homolog of NCBI NO: 34895332 NR Description: P0494A10.20 [Oryza sativa (japonica
  misc_feature (1)..(337): Homolog of NCBI NO: 25518032 NR Description: F9L1.4 protein - Arabidopsis thaliana
MGTCFLIWASGALNPEGSFSADRVSSVKRGVFAMIAVFLAYSFIQAPSTVLIRPHPAIWRLVHGMAVVYLVALTFLLFQTRDDARQFMKYLHPDLGVELPERSYGTDCRIYVPDHPKSRFNNVYDILFDEFVIAHILGWWGKAIMIRNQPLLWVLSIGFELMELTFRHMLPNFNECWWDSIVLDILICNWFGIWAGMKTVRYFDGRTYEWVGLSRQPNIMSKVKRTLGQFTPAQWDKDEWYPLLGPWRFIQVLSLCVIFMTIELNTFFLKFCLWIPPRNPLIVYRLVLWWLIAIPTIREYNTYLQDRNSVKKVGSFCWLSLAICIIELLICIKFGHGLFPKSMPSWLIIFWTTVATLLTMFLFVWTWKIYRTMIRKRL

SEQ ID NO: 67056 - protein, 345 aa, Triticum aestivum
  peptide (1)..(345): Ceres Seq. ID no. 15178239
  misc_feature (21)..(304): Pfam Name: Phosphatidyl serine synthase Pfam Description: Phosphatidyl serine synthase
  misc_feature (1)..(342): Homolog of NCBI NO: 4063700 NR Description: phosphatidylserine synthase-2 [Mus musculus]
  misc_feature (1)..(342): Homolog of NCBI NO: 2190007 NR Description: phosphatidylserine synthase II [Cricetulus
  misc_feature (1)..(342): Homolog of NCBI NO: 13540555 NR Description: phosphatidylserine synthase 2 [Homo sapiens]
  misc_feature (1)..(63): Homolog of NCBI NO: 34911216 NR Description: putative phosphatidylserine synthase
  misc_feature (134)..(248): Homolog of NCBI NO: 34911216 NR Description: putative phosphatidylserine synthase
  misc_feature (1)..(46): Homolog of NCBI NO: 34895332 NR Description: P0494A10.20 [Oryza sativa (japonica
  misc_feature (136)..(344): Homolog of NCBI NO: 22329573 NR Description: phosphatidylserine synthase -related [Arabidopsis
  misc_feature (235)..(273): Homolog of NCBI NO: 34895332 NR Description: P0494A10.20 [Oryza sativa (japonica
  misc_feature (111)..(218): Homolog of NCBI NO: 34895332 NR Description: P0494A10.20 [Oryza sativa (japonica
  misc_feature (1)..(304): Homolog of NCBI NO: 25518032 NR Description: F9L1.4 protein - Arabidopsis thaliana
MIAVFLAYSFIQAPSTVLIRPHPAIWRLVHGMAVVYLVALTFLLFQTRDDARQFMKYLHPDLGVELPERSYGTDCRIYVPDHPKSRFNNVYDILFDEFVIAHILGWWGKAIMIRNQPLLWVLSIGFELMELTFRHMLPNFNECWWDSIVLDILICNWFGIWAGMKTVRYFDGRTYEWVGLSRQPNIMSKVKRTLGQFTPAQWDKDEWYPLLGPWRFIQVLSLCVIFMTIELNTFFLKFCLWIPPRNPLIVYRLVLWWLIAIPTIREYNTYLQDRNSVKKVGSFCWLSLAICIIELLICIKFGHGLFPKSMPSWLIIFWTTVATLLTMFLFVWTWKIYRTMIRKRL

SEQ ID NO: 67057 - DNA, 2008 bp, Triticum aestivum
  misc_feature (1)..(2008): Ceres Seq. ID no. 14313228
atccgcacgagcgcacacgcacagcgataaagccagcgcagcagcaaagccggagcagagccatcaaaccacgccgcgactcctccccctcccctgctcctcccggcgactcgcggggtgctgctgctgacggctcatgggctgctgccgctcgtcgctgcgggcggtgacgcacccccacccggagaagccgccggggacgggcgcgggggcggcgccgatggccaggcggccgtccttctcggcgagcgcgcaccgggccgcgccgcctccgccggcggcggcggcggcggcatcgtcctccgaggcggggttcgccgagttctcgctggcggagctgcgcgcggccacgggcgggttcgcgccggagaacatcgtgtccgagagcggcgacaaggcgcccaacttcgtctacaggggccgcctgcagcaggggcaggggcagggcccccgccgcgcgatcgccgtcaagaagttcggcaagatggcctggcccgaccccaagcagttcgcggaggaggccaggggggtgggcaggctgcgccaccgccggctcgccaacctcatcggctactgctgcgacggggacgagcgcctgctcgtcgccgagttcatgcccaacgacaccctcgccaagcacgtcttccactgggaaaaccagactattgaatgggctatgcgtctaagagtcgcgtaccacatagctgaggcgctggactactgcagcaacgagggtagacctttatatcatgacctaaatgcatatagggtcctttttgatgagaatggtgatcctcgcctttcatgctttggtttgatgaaaaacagcagagatgggaaaagttatagcacaaaccttgcatacacacctccagaatatttgagaactggaagagtcactccagaaagtgtcatattcagctttggcaccgtactactggaccttctaagtggaaaacgcatacctccttcccatgctcttgacatgatgcgaggcaacaatatccaaatgttgatggattcacatttggaaggaaactactcaacagaagaggcaaccgctttggtagatcttgcctcccagtgtttgcagtatgaagctagggaccgccccaatacaaaaaagctggttaacatacttgagcccttgcaaacaaaattagaggtaccgtcctacgagatgcttggcataccaaagcatgaggaagaagtacctccacctcctgccccacaaccaccacaacaccctctttctcccatggctgaggcctgttctaggatggacctgacagctatccagcagatccttgtatcgacacattacagagacgacgaaggcagtaatgagctatcattccaggaatggacgcagcagatgagggacatgttggacgccaggaaacgtggggatctagcttttcgtgacaaagatttcaagacagccatagaatgctatacacagtttgttgatgtgggcacaatggtatcgccgacggtgtatgcccgaaggagcttgtgtcacctcatgtgcgaccagcccgacgctgccctccgggacgcgatgcaagcgcaatgcgtgtaccccgaatggccaactgcattctatatgcaagccgtcgcgctttcgaagccagatatgcagagcgacgccaaggacatgttgagtgaggcttcgcagctagaagagaagaagcaaaagaactcgagatgatgtcgagagcgtggtctttgtaaagatgtgtcggttcggtctcttttgcggctcaaatgtttacgtcgattgaggcgtgctattccgtcctttggaaaagaaaaaaactgtgagatattcgaggttgagttagggagaaactgcagggaagaagtgccgccgtagagtcgtgtggttgtaactatttggtttggcatttctgcgatgcattattttttgggtctatatatatatatatatgacatttttaaaagctataatcaggcataatgcttaagctaatgccgtagcttccac

SEQ ID NO: 67058 - protein, 524 aa, Triticum aestivum
  peptide (1)..(524): Ceres Seq. ID no. 14313229
  misc_feature (60)..(519): Homolog of NCBI NO: 15237604 NR Description: protein kinase family [Arabidopsis thaliana]
  misc_feature (30)..(524): Homolog of NCBI NO: 28393210 NR Description: putative protein kinase [Arabidopsis thaliana]
  misc_feature (30)..(524): Homolog of NCBI NO: 15237465 NR Description: protein kinase family [Arabidopsis thaliana]
  misc_feature (60)..(524): Homolog of NCBI NO: 21553556 NR Description: protein kinase-like protein [Arabidopsis thaliana]
  misc_feature (60)..(522): Homolog of NCBI NO: 22327962 NR Description: protein kinase - related [Arabidopsis thaliana]
  misc_feature (60)..(524): Homolog of NCBI NO: 15232406 NR Description: protein kinase family [Arabidopsis thaliana]
  misc_feature (24)..(524): Homolog of NCBI NO: 37537032 NR Description: putative protein kinase [Oryza sativa (japonica
  misc_feature (1)..(524): Homolog of NCBI NO: 7486022 NR Description: hypothetical protein F23E12.210 - Arabidopsis
  misc_feature (1)..(524): Homolog of NCBI NO: 18418600 NR Description: protein kinase family [Arabidopsis thaliana]
  misc_feature (1)..(522): Homolog of NCBI NO: 37536550 NR Description: protein kinase-like protein
MGCCRSSLRAVTHPHPEKPPGTGAGAAPMARRPSFSASAHRAAPPPPAAAAAASSSEAGFAEFSLAELRAATGGFAPENIVSESGDKAPNFVYRGRLQQGQGQGPRRAIAVKKFGKMAWPDPKQFAEEARGVGRLRHRRLANLIGYCCDGDERLLVAEFMPNDTLAKHVFHWENQTIEWAMRLRVAYHIAEALDYCSNEGRPLYHDLNAYRVLFDENGDPRLSCFGLMKNSRDGKSYSTNLAYTPPEYLRTGRVTPESVIFSFGTVLLDLLSGKRIPPSHALDMMRGNNIQMLMDSHLEGNYSTEEATALVDLASQCLQYEARDRPNTKKLVNILEPLQTKLEVPSYEMLGIPKHEEEVPPPPAPQPPQHPLSPMAEACSRMDLTAIQQILVSTHYRDDEGSNELSFQEWTQQMRDMLDARKRGDLAFRDKDFKTAIECYTQFVDVGTMVSPTVYARRSLCHLMCDQPDAALRDAMQAQCVYPEWPTAFYMQAVALSKPDMQSDAKDMLSEASQLEEKKQKNSR

SEQ ID NO: 67059 - protein, 496 aa, Triticum aestivum
  peptide (1)..(496): Ceres Seq. ID no. 14313230
  misc_feature (32)..(491): Homolog of NCBI NO: 15237604 NR Description: protein kinase family [Arabidopsis thaliana]
  misc_feature (2)..(496): Homolog of NCBI NO: 28393210 NR Description: putative protein kinase [Arabidopsis thaliana]
  misc_feature (2)..(496): Homolog of NCBI NO: 15237465 NR Description: protein kinase family [Arabidopsis thaliana]
  misc_feature (32)..(496): Homolog of NCBI NO: 21553556 NR Description: protein kinase-like protein [Arabidopsis thaliana]
  misc_feature (32)..(494): Homolog of NCBI NO: 22327962 NR Description: protein kinase - related [Arabidopsis thaliana]
  misc_feature (32)..(496): Homolog of NCBI NO: 15232406 NR Description: protein kinase family [Arabidopsis thaliana]
  misc_feature (1)..(496): Homolog of NCBI NO: 37537032 NR Description: putative protein kinase [Oryza sativa (japonica
  misc_feature (1)..(496): Homolog of NCBI NO: 7486022 NR Description: hypothetical protein F23E12.210 - Arabidopsis
  misc_feature (1)..(496): Homolog of NCBI NO: 18418600 NR Description: protein kinase family [Arabidopsis thaliana]
  misc_feature (1)..(494): Homolog of NCBI NO: 37536550 NR Description: protein kinase-like protein
MARRPSFSASAHRAAPPPPAAAAAASSSEAGFAEFSLAELRAATGGFAPENIVSESGDKAPNFVYRGRLQQGQGQGPRRAIAVKKFGKMAWPDPKQFAEEARGVGRLRHRRLANLIGYCCDGDERLLVAEFMPNDTLAKHVFHWENQTIEWAMRLRVAYHIAEALDYCSNEGRPLYHDLNAYRVLFDENGDPRLSCFGLMKNSRDGKSYSTNLAYTPPEYLRTGRVTPESVIFSFGTVLLDLLSGKRIPPSHALDMMRGNNIQMLMDSHLEGNYSTEEATALVDLASQCLQYEARDRPNTKKLVNILEPLQTKLEVPSYEMLGIPKHEEEVPPPPAPQPPQHPLSPMAEACSRMDLTAIQQILVSTHYRDDEGSNELSFQEWTQQMRDMLDARKRGDLAFRDKDFKTAIECYTQFVDVGTMVSPTVYARRSLCHLMCDQPDAALRDAMQAQCVYPEWPTAFYMQAVALSKPDMQSDAKDMLSEASQLEEKKQKNSR

SEQ ID NO: 67060 - protein, 408 aa, Triticum aestivum
  peptide (1)..(408): Ceres Seq. ID no. 14313231
  misc_feature (1)..(403): Homolog of NCBI NO: 15237604 NR Description: protein kinase family [Arabidopsis thaliana]
  misc_feature (1)..(408): Homolog of NCBI NO: 28393210 NR Description: putative protein kinase [Arabidopsis thaliana]
  misc_feature (1)..(408): Homolog of NCBI NO: 15237465 NR Description: protein kinase family [Arabidopsis thaliana]
  misc_feature (1)..(408): Homolog of NCBI NO: 21553556 NR Description: protein kinase-like protein [Arabidopsis thaliana]
  misc_feature (1)..(406): Homolog of NCBI NO: 22327962 NR Description: protein kinase - related [Arabidopsis thaliana]
  misc_feature (1)..(408): Homolog of NCBI NO: 15232406 NR Description: protein kinase family [Arabidopsis thaliana]
  misc_feature (1)..(408): Homolog of NCBI NO: 37537032 NR Description: putative protein kinase [Oryza sativa (japonica
  misc_feature (1)..(408): Homolog of NCBI NO: 7486022 NR Description: hypothetical protein F23E12.210 - Arabidopsis
  misc_feature (1)..(408): Homolog of NCBI NO: 18418600 NR Description: protein kinase family [Arabidopsis thaliana]
  misc_feature (1)..(406): Homolog of NCBI NO: 37536550 NR Description: protein kinase-like protein
MAWPDPKQFAEEARGVGRLRHRRLANLIGYCCDGDERLLVAEFMPNDTLAKHVFHWENQTIEWAMRLRVAYHIAEALDYCSNEGRPLYHDLNAYRVLFDENGDPRLSCFGLMKNSRDGKSYSTNLAYTPPEYLRTGRVTPESVIFSFGTVLLDLLSGKRIPPSHALDMMRGNNIQMLMDSHLEGNYSTEEATALVDLASQCLQYEARDRPNTKKLVNILEPLQTKLEVPSYEMLGIPKHEEEVPPPPAPQPPQHPLSPMAEACSRMDLTAIQQILVSTHYRDDEGSNELSFQEWTQQMRDMLDARKRGDLAFRDKDFKTAIECYTQFVDVGTMVSPTVYARRSLCHLMCDQPDAALRDAMQAQCVYPEWPTAFYMQAVALSKPDMQSDAKDMLSEASQLEEKKQKNSR

SEQ ID NO: 67061 - DNA, 1901 bp, Triticum aestivum
  misc_feature (1)..(1901): Ceres Seq. ID no. 13663734
cattacctagaacatcctaatcgaaaaaaagcctctcttcccctcaccccccacagatcgatccctcccggacagaaacgcagcaaggccgactaccttccaccgccgcttcgacactagggttcagccgttacatcgtcggcggggcttggcccgccgccgccggagatgggcgtcgcggagattgcgaagaaggtcgacgccctcaaggccgagctcgccgccaagtcgtcccgcatcgccgacctggaggcccgggtctcgctcctcgaagccgagaacgcgcgcttgaggaaggccatgtccgagggagttgcgatgaaccgtagagccaaaaagggtccaacctttggtcgattggaggagggtctcggcggaaacaagcaaaagtcagccgacatcgcgggcgggcatctgatgaatgatgtcatagaggtcagcgacggcgaggaagarggsgatggctgtggatgtcaacagcggggaggagggcgttcctccggtcccgactcctagcaagtgtgcggtgcgggtggtgaccggcaagaggggtgttgcagaggagattaaggacgccgatggaggtggtgggcgagaccatgggagcgttcgctgtgatggcaatgtgattctggacgacgatgatgttttgatcacgccacgaggcaagaagcgcacagcgacacgggtaatcagtgacagtgagagtgaggatgaagatgagaatggtcaagggcatggagatggtgaggtgggtgttagaagcagcaggaaatgtttgttgcgtggagtcagtgacagtgcgagtgaggatggcagtgagggtgttcgtgtggttaatcaaaaacctgtttcacctctagttacgacaggggtcgagagtgaggatgacgatggtgaattacatgagatggaggggcgttctactccggcaacaaggcgcttcgctcggttggctgaaggtcaatcaaagagaatgcgacctacacgtcggaaacttgagttttttgaacccaagaatcatgaagagagcgaggatgattcagaagaggatgataatatggaaaattttatagtagatgattcagattgttcagaaaattctgctgattctgttgaagaatcctctgctggaccagaagagtctgacgacgaggaaacttataaagagcttatggataggatacgcggcaaaaggaatgccaagaataaggattggaagattgagccagagatgctatcagcatttgatgaataccctgaacttcgcctgaaagctgtttgtgccctctatcgaaagcagacccaggaagaacaggcaggaaaagctattatcatgcacaacaaaaaaggatttaaccagatagacgcccgaaggggttctaacatagcgcagtttcttctggatggtgatgctgctgggccgcttaagaagactgcacaagacttggaaaattacgatcggtatgctcttgagttctgtcacaagatggctttacgttactcgaagcagttgtttgcaatatatcagaataaggagtacccctactttccatgactctggtgtcagttatcacttacttcatatgttgacctttctgtgacccttgtacctccccaatcagtcagtcagagtcttttgtatatatgggtttagttttgtgtcttaagtaatctgtagttagggcatgctaaagttagtttatcactaggatgcacgctgttaagtgaagcacgtgtctgacagggtctatgttgtttagctgaactgcttgtgctccctgtaatatccatgcatagtaaatctatctctatccttgaaatgttacccaaggagttgttcaaaaaaaaaaaaaaaaaagcttatcgataccgtcgacctcgagggggggcccggtacc

SEQ ID NO: 67062 - protein, 365 aa, Triticum aestivum
  peptide (1)..(365): Ceres Seq. ID no. 15220724
  misc_feature (189)..(364): Homolog of NCBI NO: 21742592 NR Description: OSJNBb0076A22.19 [Oryza sativa (japonica
  misc_feature (84)..(364): Homolog of NCBI NO: 15238681 NR Description: hypothetical protein [Arabidopsis thaliana]
  misc_feature (1)..(146): Homolog of NCBI NO: 34904092 NR Description: unnamed protein product [Oryza sativa (japonica
MAVDVNSGEEGVPPVPTPSKCAVRVVTGKRGVAEEIKDADGGGGRDHGSVRCDGNVILDDDDVLITPRGKKRTATRVISDSESEDEDENGQGHGDGEVGVRSSRKCLLRGVSDSASEDGSEGVRVVNQKPVSPLVTTGVESEDDDGELHEMEGRSTPATRRFARLAEGQSKRMRPTRRKLEFFEPKNHEESEDDSEEDDNMENFIVDDSDCSENSADSVEESSAGPEESDDEETYKELMDRIRGKRNAKNKDWKIEPEMLSAFDEYPELRLKAVCALYRKQTQEEQAGKAIIMHNKKGFNQIDARRGSNIAQFLLDGDAAGPLKKTAQDLENYDRYALEFCHKMALRYSKQLFAIYQNKEYPYFP

SEQ ID NO: 67063 - protein, 215 aa, Triticum aestivum
  peptide (1)..(215): Ceres Seq. ID no. 15220725
  misc_feature (39)..(214): Homolog of NCBI NO: 21742592 NR Description: OSJNBb0076A22.19 [Oryza sativa (japonica
  misc_feature (1)..(214): Homolog of NCBI NO: 15238681 NR Description: hypothetical protein [Arabidopsis thaliana]
MEGRSTPATRRFARLAEGQSKRMRPTRRKLEFFEPKNHEESEDDSEEDDNMENFIVDDSDCSENSADSVEESSAGPEESDDEETYKELMDRIRGKRNAKNKDWKIEPEMLSAFDEYPELRLKAVCALYRKQTQEEQAGKAIIMHNKKGFNQIDARRGSNIAQFLLDGDAAGPLKKTAQDLENYDRYALEFCHKMALRYSKQLFAIYQNKEYPYFP

SEQ ID NO: 67064 - protein, 193 aa, Triticum aestivum
  peptide (1)..(193): Ceres Seq. ID no. 15220726
  misc_feature (17)..(192): Homolog of NCBI NO: 21742592 NR Description: OSJNBb0076A22.19 [Oryza sativa (japonica
  misc_feature (1)..(192): Homolog of NCBI NO: 15238681 NR Description: hypothetical protein [Arabidopsis thaliana]
MRPTRRKLEFFEPKNHEESEDDSEEDDNMENFIVDDSDCSENSADSVEESSAGPEESDDEETYKELMDRIRGKRNAKNKDWKIEPEMLSAFDEYPELRLKAVCALYRKQTQEEQAGKAIIMHNKKGFNQIDARRGSNIAQFLLDGDAAGPLKKTAQDLENYDRYALEFCHKMALRYSKQLFAIYQNKEYPYFP

SEQ ID NO: 67065 - DNA, 1091 bp, Triticum aestivum
  misc_feature (1)..(1091): Ceres Seq. ID no. 13663630
acctagaacatcctaacgaaaaaaatcacattcgtcccgttctctatctcggtatctccattcccgaacagaaaaaaagggaacacacacacaggcggacgcgtagagcccaatccccgcagggccgagatccccgccccactcctccggacaaccgccgccgactcgccggccctcgccgccttccgcgtcgccggcaccgccgccgtattgcagggcttcgtgtgctgttcctcaccagtgccgtctaagatggtgtcctttgagatgaatgaccttaagaagatagggctaggcctgacaggctttggagtattcttctccttcctgggaatcgttttcttctttgacaaggggcttattgctatgggcaatatactcttcctgtcaggtttgggtatgacaattggtctgaaatcaactatgcagttcttcacaaagcctaagaattacaagggtaccatctcatttggcgcaggctttttcctggttctcattggatggcctttctttggcatgctcttagaggcatatggttttatcgtgctcttcagtggattctggccaacactcgcagttttcctgcaaaggattcctatccttggctggatttttcaacaaccatttgtcacttcgttccttgaccgttacagagggaaacgagtgccggtgtagtatcacttcgcgctatgtttcttatgatgtagcagctgaagtttttttccttccctggggataacagcaagtagttgtgccatcctggcctttccctttgcctgtttacttactggtgactgtcctttgtaaattacacccctggatggttttatcaaagaccaagatgcaaattgtcccatggtatgggctgaagaaacttcataagcgaacccggacgattcaaatatgtagctgtagagggatgctgttgaagtagaagctacatcctatccgtctcttctgtacttatgttcagatatagatattctgttctctcgagtcttgagcttgtgtttgctttatttttgtgcgcgcttcatagcttgaagaaagtcaaatatgtgctggaactgaaattaattcatgattcatac

SEQ ID NO: 67066 - protein, 140 aa, Triticum aestivum
  peptide (1)..(140): Ceres Seq. ID no. 15220241
  misc_feature (30)..(129): Pfam Name: Got1-like family Pfam Description: Got1-like family
  misc_feature (1)..(132): Homolog of NCBI NO: 26384022 NR Description: unnamed protein product [Mus musculus]
  misc_feature (4)..(137): Homolog of NCBI NO: 22329359 NR Description: expressed protein [Arabidopsis thaliana]
  misc_feature (1)..(132): Homolog of NCBI NO: 7634779 NR Description: HDCMA39P [Homo sapiens]
  misc_feature (5)..(126): Homolog of NCBI NO: 17945675 NR Description: RE29988p [Drosophila melanogaster]
  misc_feature (5)..(126): Homolog of NCBI NO: 24642432 NR Description: CG32576-PA [Drosophila melanogaster]
  misc_feature (1)..(100): Homolog of NCBI NO: 6714435 NR Description: unknown protein [Arabidopsis thaliana]
  misc_feature (1)..(128): Homolog of NCBI NO: 33146513 NR Description: NFkB activating protein-like
  misc_feature (1)..(128): Homolog of NCBI NO: 12324443 NR Description: unknown protein; 50647-51606 [Arabidopsis
  misc_feature (1)..(140): Homolog of NCBI NO: 30678779 NR Description: expressed protein [Arabidopsis thaliana]
  misc_feature (1)..(140): Homolog of NCBI NO: 15229139 NR Description: expressed protein [Arabidopsis thaliana]
MVSFEMNDLKKIGLGLTGFGVFFSFLGIVFFFDKGLIAMGNILFLSGLGMTIGLKSTMQFFTKPKNYKGTISFGAGFFLVLIGWPFFGMLLEAYGFIVLFSGFWPTLAVFLQRIPILGWIFQQPFVTSFLDRYRGKRVPV

SEQ ID NO: 67067 - protein, 135 aa, Triticum aestivum
  peptide (1)..(135): Ceres Seq. ID no. 15220242
  misc_feature (25)..(124): Pfam Name: Got1-like family Pfam Description: Got1-like family
  misc_feature (1)..(127): Homolog of NCBI NO: 26384022 NR Description: unnamed protein product [Mus musculus]
  misc_feature (1)..(132): Homolog of NCBI NO: 22329359 NR Description: expressed protein [Arabidopsis thaliana]
  misc_feature (1)..(127): Homolog of NCBI NO: 7634779 NR Description: HDCMA39P [Homo sapiens]
  misc_feature (1)..(121): Homolog of NCBI NO: 17945675 NR Description: RE29988p [Drosophila melanogaster]
  misc_feature (1)..(121): Homolog of NCBI NO: 24642432 NR Description: CG32576-PA [Drosophila melanogaster]
  misc_feature (1)..(95): Homolog of NCBI NO: 6714435 NR Description: unknown protein [Arabidopsis thaliana]
  misc_feature (1)..(123): Homolog of NCBI NO: 33146513 NR Description: NFkB activating protein-like
  misc_feature (1)..(123): Homolog of NCBI NO: 12324443 NR Description: unknown protein; 50647-51606 [Arabidopsis
  misc_feature (1)..(135): Homolog of NCBI NO: 30678779 NR Description: expressed protein [Arabidopsis thaliana]
  misc_feature (1)..(135): Homolog of NCBI NO: 15229139 NR Description: expressed protein [Arabidopsis thaliana]
MNDLKKIGLGLTGFGVFFSFLGIVFFFDKGLIAMGNILFLSGLGMTIGLKSTMQFFTKPKNYKGTISFGAGFFLVLIGWPFFGMLLEAYGFIVLFSGFWPTLAVFLQRIPILGWIFQQPFVTSFLDRYRGKRVPV

SEQ ID NO: 67068 - protein, 102 aa, Triticum aestivum
  peptide (1)..(102): Ceres Seq. ID no. 15220243
  misc_feature (1)..(91): Pfam Name: Got1-like family Pfam Description: Got1-like family
  misc_feature (1)..(94): Homolog of NCBI NO: 26384022 NR Description: unnamed protein product [Mus musculus]
  misc_feature (1)..(99): Homolog of NCBI NO: 22329359 NR Description: expressed protein [Arabidopsis thaliana]
  misc_feature (1)..(94): Homolog of NCBI NO: 7634779 NR Description: HDCMA39P [Homo sapiens]
  misc_feature (1)..(88): Homolog of NCBI NO: 17945675 NR Description: RE29988p [Drosophila melanogaster]
  misc_feature (1)..(88): Homolog of NCBI NO: 24642432 NR Description: CG32576-PA [Drosophila melanogaster]
  misc_feature (1)..(62): Homolog of NCBI NO: 6714435 NR Description: unknown protein [Arabidopsis thaliana]
  misc_feature (1)..(90): Homolog of NCBI NO: 33146513 NR Description: NFkB activating protein-like
  misc_feature (1)..(90): Homolog of NCBI NO: 12324443 NR Description: unknown protein; 50647-51606 [Arabidopsis
  misc_feature (1)..(102): Homolog of NCBI NO: 30678779 NR Description: expressed protein [Arabidopsis thaliana]
  misc_feature (1)..(102): Homolog of NCBI NO: 15229139 NR Description: expressed protein [Arabidopsis thaliana]
MGNILFLSGLGMTIGLKSTMQFFTKPKNYKGTISFGAGFFLVLIGWPFFGMLLEAYGFIVLFSGFWPTLAVFLQRIPILGWIFQQPFVTSFLDRYRGKRVPV

SEQ ID NO: 67069 - DNA, 1902 bp, Triticum aestivum
  misc_feature (1)..(1902): Ceres Seq. ID no. 15170655
aagtgttgtgccaacggatgctggttttacattttataaacttgtcatggtattaagctgttgccccatggctgacgtatatctatgtttatatgatttactttgggccttatttgtatggtccagcagccgggcccatacacgtagtatttgaactaaattccacgaggatgggctgggatccgtgtccaccctagtctgtccaaattaagccttattgtgcaatgtctatttttaagtgatgtttaaggttgttgcttttcgtatgaaagtttttttttttaacatgtgacacacttgcttcttgagccttgtttgctgcatacctaaatgctaaaaccactcttgcaggttacagacagaaagtaaaagacattgtgcagggtgctctgtttcctgaggttggtgttgacaaaaggactggttctgctggaggaactggagggcaagttgttgttcgtgatatcgatctttattcatactgtgagtcttgcttacttccgttcagcatacaatgccatgttggatatgtgccctccggtggaagggtcgttgggttaagcaagctttcaagagtagctgatgtctttgccaagagatttcaaaaccctcagagattagctaatgaagtttgtggtgcattgcatgttagcatacaacctgctggtgttgctgttgctatgcagtgctggcacataccgttgccggagaacttcaaatgcaaaaattcgcgagctttgattagaacctcacattcatctcgttcgggagtttttgagggcgagaacagctccttttggaatgattttgtggctcttcttaagcttagaggcatagacatggagatggacagccgttctgcttctttaacttggtgccccttaaggcctcatgaggttccgctttgcaatgggcacgcaaagaagattacaaccaatggtgctagctcagcaaaatcggcatccattccatctaatatggtttctgctgtcagctcaatgctcctgtctcttggtgaggaccccctaaggaaagaacttctaggcagtcctcagcgttacgtgcaatggctgatgaggttcagagcatgcaatcttgatgtgaagctgaatggttttacacttaacagtgcaagtgtatatgagagaccaggcgaagatgctactgatcatcgagcaattggttctgagctgcatttgccattttgtgcccagtgcgagcaccacctcctgccgttctacggagtagtgcacattggttactttggcagtggagacggtgaagggatcaaccgctcacattttcaggctctggttcatttctacgggtgcaagcttcaggtccaggaaaggatgacaagacagatagctgaagcagtttattccgtctcacatcgtggagccatagttgttgtagaagcaaaccatatctgcatgatatcaaggggaatagagaaaatcaggagtagtacagcaacaattgcagttttgggtcagttttcaaccgattcttctgccaaggcatcctttctacagaacgtcttagatactgctaatcaggaagtatgagtggcttcagatcatatactgatagaatctcagcgaaaagatacaatgagtctaatccctggtcgtcatttcagcaaggcaggcactgcgacgactatatatatggtttgaagttgtcatgcagctatggcatggttgccattttaccagccattgcaggtgggagcgaccaggacctcgtcgcgtggaatgttgtgtctgaagaagattaaccagaagcaccagaaagttttggttctcccgtgttgtaccattttcgtttgaacgacatgtcaaagttatcctagcgttgtaggtgtggcggctgtgccgagcaatacagtataaatgtttt

SEQ ID NO: 67070 - protein, 295 aa, Triticum aestivum
  peptide (1)..(295): Ceres Seq. ID no. 15170656
  misc_feature (95)..(284): Homolog of NCBI NO: 20150237 NR Description: Chain A, Crystal Structure Of Rat GtpchiGFRP
  misc_feature (95)..(284): Homolog of NCBI NO: 13242245 NR Description: GTP cyclohydrolase 1 [Rattus norvegicus]
  misc_feature (85)..(289): Homolog of NCBI NO: 39593376 NR Description: Hypothetical protein CBG09642 [Caenorhabditis
  misc_feature (100)..(292): Homolog of NCBI NO: 22298852 NR Description: GTP cyclohydrolase I [Thermosynechococcus
  misc_feature (102)..(288): Homolog of NCBI NO: 15827020 NR Description: putative GTP cyclohydrolase I [Mycobacterium
  misc_feature (65)..(292): Homolog of NCBI NO: 17979018 NR Description: GTP cyclohydrolase I [Lycopersicon esculentum]
  misc_feature (1)..(163): Homolog of NCBI NO: 17979018 NR Description: GTP cyclohydrolase I [Lycopersicon esculentum]
  misc_feature (1)..(290): Homolog of NCBI NO: 19909132 NR Description: GTP cyclohydrolase I [Arabidopsis thaliana]
  misc_feature (1)..(290): Homolog of NCBI NO: 15231435 NR Description: GTP cyclohydrolase I [Arabidopsis thaliana]
  misc_feature (1)..(295): Homolog of NCBI NO: 38346071 NR Description: OSJNBa0084K01.11 [Oryza sativa (japonica
MQCWHIPLPENFKCKNSRALIRTSHSSRSGVFEGENSSFWNDFVALLKLRGIDMEMDSRSASLTWCPLRPHEVPLCNGHAKKITTNGASSAKSASIPSNMVSAVSSMLLSLGEDPLRKELLGSPQRYVQWLMRFRACNLDVKLNGFTLNSASVYERPGEDATDHRAIGSELHLPFCAQCEHHLLPFYGVVHIGYFGSGDGEGINRSHFQALVHFYGCKLQVQERMTRQIAEAVYSVSHRGAIVVVEANHICMISRGIEKIRSSTATIAVLGQFSTDSSAKASFLQNVLDTANQEV

SEQ ID NO: 67071 - protein, 242 aa, Triticum aestivum
  peptide (1)..(242): Ceres Seq. ID no. 15170657
  misc_feature (42)..(231): Homolog of NCBI NO: 20150237 NR Description: Chain A, Crystal Structure Of Rat GtpchiGFRP
  misc_feature (42)..(231): Homolog of NCBI NO: 13242245 NR Description: GTP cyclohydrolase 1 [Rattus norvegicus]
  misc_feature (32)..(236): Homolog of NCBI NO: 39593376 NR Description: Hypothetical protein CBG09642 [Caenorhabditis
  misc_feature (47)..(239): Homolog of NCBI NO: 22298852 NR Description: GTP cyclohydrolase I [Thermosynechococcus
  misc_feature (49)..(235): Homolog of NCBI NO: 15827020 NR Description: putative GTP cyclohydrolase I [Mycobacterium
  misc_feature (12)..(239): Homolog of NCBI NO: 17979018 NR Description: GTP cyclohydrolase I [Lycopersicon esculentum]
  misc_feature (1)..(110): Homolog of NCBI NO: 17979018 NR Description: GTP cyclohydrolase I [Lycopersicon esculentum]
  misc_feature (1)..(237): Homolog of NCBI NO: 19909132 NR Description: GTP cyclohydrolase I [Arabidopsis thaliana]
  misc_feature (1)..(237): Homolog of NCBI NO: 15231435 NR Description: GTP cyclohydrolase I [Arabidopsis thaliana]
  misc_feature (1)..(242): Homolog of NCBI NO: 38346071 NR Description: OSJNBa0084K01.11 [Oryza sativa (japonica
MEMDSRSASLTWCPLRPHEVPLCNGHAKKITTNGASSAKSASIPSNMVSAVSSMLLSLGEDPLRKELLGSPQRYVQWLMRFRACNLDVKLNGFTLNSASVYERPGEDATDHRAIGSELHLPFCAQCEHHLLPFYGVVHIGYFGSGDGEGINRSHFQALVHFYGCKLQVQERMTRQIAEAVYSVSHRGAIVVVEANHICMISRGIEKIRSSTATIAVLGQFSTDSSAKASFLQNVLDTANQEV

SEQ ID NO: 67072 - protein, 240 aa, Triticum aestivum
  peptide (1)..(240): Ceres Seq. ID no. 15170658
  misc_feature (40)..(229): Homolog of NCBI NO: 20150237 NR Description: Chain A, Crystal Structure Of Rat GtpchiGFRP
  misc_feature (40)..(229): Homolog of NCBI NO: 13242245 NR Description: GTP cyclohydrolase 1 [Rattus norvegicus]
  misc_feature (30)..(234): Homolog of NCBI NO: 39593376 NR Description: Hypothetical protein CBG09642 [Caenorhabditis
  misc_feature (45)..(237): Homolog of NCBI NO: 22298852 NR Description: GTP cyclohydrolase I [Thermosynechococcus
  misc_feature (47)..(233): Homolog of NCBI NO: 15827020 NR Description: putative GTP cyclohydrolase I [Mycobacterium
  misc_feature (10)..(237): Homolog of NCBI NO: 17979018 NR Description: GTP cyclohydrolase I [Lycopersicon esculentum]
  misc_feature (1)..(108): Homolog of NCBI NO: 17979018 NR Description: GTP cyclohydrolase I [Lycopersicon esculentum]
  misc_feature (1)..(235): Homolog of NCBI NO: 19909132 NR Description: GTP cyclohydrolase I [Arabidopsis thaliana]
  misc_feature (1)..(235): Homolog of NCBI NO: 15231435 NR Description: GTP cyclohydrolase I [Arabidopsis thaliana]
  misc_feature (1)..(240): Homolog of NCBI NO: 38346071 NR Description: OSJNBa0084K01.11 [Oryza sativa (japonica
MDSRSASLTWCPLRPHEVPLCNGHAKKITTNGASSAKSASIPSNMVSAVSSMLLSLGEDPLRKELLGSPQRYVQWLMRFRACNLDVKLNGFTLNSASVYERPGEDATDHRAIGSELHLPFCAQCEHHLLPFYGVVHIGYFGSGDGEGINRSHFQALVHFYGCKLQVQERMTRQIAEAVYSVSHRGAIVVVEANHICMISRGIEKIRSSTATIAVLGQFSTDSSAKASFLQNVLDTANQEV

SEQ ID NO: 67073 - DNA, 775 bp, Triticum aestivum
  misc_feature (1)..(775): Ceres Seq. ID no. 13663631
aatatgcagcaccagtagtatatagcagtaaaaaatactttgtacactcgtggcatcgccatcgatttgtcttgaactctcgatgagcaacaatcaatgggacatcaagatagtgctacgccgcgccgcatcgccgtccgcgctggccggccggcaacggagctgcgacgaagaccggcgaggcggagcggcaacgcgcgacggcggccggccatcagtattcagtaggggcgcatgccgacgtagttgccgggcgggtcgtagttgcaggtgatgaaggtgccgcggccgccgtagcactcgaccatggcgcaccccacgcgggtgctgccgcgccacacgatctgcgtgtagtgcccgcacatgccgccgctgcagcggttgctccagtagtcgtaccggggccgctccgccagccacgcccccacggcctgcgcgggcgcccagccggtgccgctgccccagaagaggttctcgccgtagggccccgacgagtgcaccagcgcgcagtccccgcgccgcgactcggcgtacgaccgcgcgtacgccgccacccgctcgtcccacctcagcgccggcagccccatcgccgcccgcgccgcgttctgctggaacaggaactgcgccctgtagtccccgccgccgccgcgggggtagccggcgtccaccacgacgacgaggaacgccgcattgcacagcgcgacggcgaggagggcgatggccagctgggctcgagtacaagtggaggaggccatgggaggtgggtggtgatgct

SEQ ID NO: 67074 - protein, 63 aa, Triticum aestivum
  peptide (1)..(63): Ceres Seq. ID no. 13663632
  misc_feature (14)..(63): Homolog of NCBI NO: 6649242 NR Description: splicing coactivator subunit SRm300 [Homo sapiens]
  misc_feature (14)..(63): Homolog of NCBI NO: 5821143 NR Description: RNA binding protein [Homo sapiens]
  misc_feature (18)..(63): Homolog of NCBI NO: 25989119 NR Description: unknown [Streptomyces aureofaciens]
  misc_feature (14)..(63): Homolog of NCBI NO: 30424862 NR Description: RIKEN cDNA 5033413A03 [Mus musculus]
  misc_feature (14)..(63): Homolog of NCBI NO: 5821145 NR Description: RNA binding protein [Homo sapiens]
  misc_feature (13)..(63): Homolog of NCBI NO: 25143299 NR Description: pre-mRNA splicing SR protein related RSR-1 (68.2
  misc_feature (14)..(63): Homolog of NCBI NO: 19923466 NR Description: splicing coactivator subunit SRm300
  misc_feature (14)..(63): Homolog of NCBI NO: 6649242 NR Description: splicing coactivator subunit SRm300 [Homo sapiens]
  misc_feature (14)..(63): Homolog of NCBI NO: 5821143 NR Description: RNA binding protein [Homo sapiens]
  misc_feature (14)..(63): Homolog of NCBI NO: 5821145 NR Description: RNA binding protein [Homo sapiens]
MSNNQWDIKIVLRRAASPSALAGRQRSCDEDRRGGAATRDGGRPSVFSRGACRRSCRAGRSCR

SEQ ID NO: 67075 - protein, 43 aa, Triticum aestivum
  peptide (1)..(43): Ceres Seq. ID no. 13663633
MGHQDSATPRRIAVRAGRPATELRRRPARRSGNARRRPAISIQ

SEQ ID NO: 67076 - DNA, 1041 bp, Triticum aestivum
  misc_feature (1)..(1041): Ceres Seq. ID no. 12622531
ataggttaccactagtaggccacgaccaaccgctcccgtcgcccgatccatcatctgattgccgccgccgcttgccgcccatcggtccagctcacactgaccgctacgtctcactctctcctccctctcctagctaattgcctagctactggtagagctagctagctggtgatcaccacgcgcgcccgcccgcagctcgttttaagccggccgggtcggacacggcatgcgctgctctgcccgcacggcaaacgatggctccagcttccgcctcgctcctgcccgccgccggcgccaagcgccctttcgccgcccccgacgctgctgagcaagagcagccactcgcgcaggagagcgcggtgaccaagaagaacggcgagagccagcagcagccgaagctggagtgcccgcggtgcagctccaccgacaccaagttctgctactacaacaactacagcacggcgcagccgcgccactactgccgcacctgccgccgctactggacgcacggcggcacgctgcgcaaggtccccgtcggtggcgcctgccgccgcggctccggcagcagcagcaagcgccgcaggtcctccgccgagccccacacgccctcctccgactcgacgccaccgccgcagccagacctgccagacacgctcccccagctccctgtcttcccgttcctcaccgacggcggccccgtcttccttccgcagttcgacctcgggctcggcgggttcccgtggacggcatcgtcagtcacagacaacctttacgacagtctcgcgccgtgggctgcctgcgacggcgcgctcgcccccaccggcgcatgggaggacttcggtggcctcgagctcacctggccaccgccaccacccccggcggccggcaactgatgatcggcgtcgtcgtgacagtcgccggcgcgttcgaggctcctgttttatcatcgcagcctcgatcgatcagctagttgttgcttaccttcaccagtttgcagtgtgtctgtctcctctgctaggaattaatgtactcatgcagctc

SEQ ID NO: 67077 - protein, 212 aa, Triticum aestivum
  peptide (1)..(212): Ceres Seq. ID no. 12622532
  misc_feature (44)..(105): Pfam Name: Dof domain, zinc finger Pfam Description: Dof domain, zinc finger
  misc_feature (19)..(177): Homolog of NCBI NO: 7489820 NR Description: prolamin box binding factor - maize
  misc_feature (21)..(123): Homolog of NCBI NO: 18401834 NR Description: Dof zinc finger protein
  misc_feature (27)..(203): Homolog of NCBI NO: 15027981 NR Description: putative Dof zinc finger protein [Arabidopsis
  misc_feature (21)..(121): Homolog of NCBI NO: 6092016 NR Description: elicitor-responsive Dof protein ERDP [Pisum
  misc_feature (18)..(197): Homolog of NCBI NO: 3777436 NR Description: DNA binding protein [Hordeum vulgare subsp.
  misc_feature (14)..(120): Homolog of NCBI NO: 4996646 NR Description: Dof zinc finger protein [Oryza sativa]
  misc_feature (11)..(123): Homolog of NCBI NO: 4996642 NR Description: Dof zinc finger protein [Oryza sativa]
  misc_feature (4)..(137): Homolog of NCBI NO: 4996644 NR Description: Dof zinc finger protein [Oryza sativa]
  misc_feature (3)..(133): Homolog of NCBI NO: 21538785 NR Description: dof zinc finger protein [Hordeum vulgare subsp.
  misc_feature (1)..(205): Homolog of NCBI NO: 38344208 NR Description: OSJNBa0064G10.24 [Oryza sativa (japonica
MAPASASLLPAAGAKRPFAAPDAAEQEQPLAQESAVTKKNGESQQQPKLECPRCSSTDTKFCYYNNYSTAQPRHYCRTCRRYWTHGGTLRKVPVGGACRRGSGSSSKRRRSSAEPHTPSSDSTPPPQPDLPDTLPQLPVFPFLTDGGPVFLPQFDLGLGGFPWTASSVTDNLYDSLAPWAACDGALAPTGAWEDFGGLELTWPPPPPPAAGN

SEQ ID NO: 67078 - DNA, 1323 bp, Triticum aestivum
  misc_feature (1)..(1323): Ceres Seq. ID no. 14303067
acacacatcccacccacacacatcatccatccacccgtagaaacatcgagcatacacttggcgacatccagctagctagctctcgtcggcgtcgacgatggcggggaggcggcaggcagcctggtgcctggtggtcatcgctctggcagtgacgctggcggtggcgtcggcgcagcccgtgcagccgagggtgggcgggccggggaagaaaggcggcaagatgccgccgggcaagttcgagacggtgaccttcgccaagaacaacaagcgcaagtacgaggtggcctgcaccgacaaccgcggcccgccctgcgtcgtctcctgccccaagacctgccccaacaagtgcctcgccttctgcgagtactgcatgaccttctgcatgtgcgacatgttcccgggcacgtcgtgcggggacccgcgcttcacgggcggcgacggcaacaccttctacttccacggaaagaaggaccaggacttttgcatcgtctctgacaaggacctccacatcaacgcgcacttcattggcaaccacaaccctgatatgaagcgtgacttcacgtgggtgcaggccctcggtgtcaccttcgtccatggcggcgccgaccaccgcctctacgtgggtgccaagaaggtcgtcgagtgggacgaggaggaggaccatgttcaaatcaccctcgatggggtgcccgtggaggtggaggccggcaagaatgcccaatgggtctctagggccatgccggggctctccgtcactcgcaccgacacggtgaacaccgtcgtcgtggagctcgacggcgtgttcagcatctcggccaacgccgtgcccatcactgacgaggactcccggatccacaactacgggaagaccaaggacagcctcatgcacctcgacctagggttcaagttccacacccttactaacggcgtcgacggcgtgctcggccagacctaccgcttagactacatcagcaaggtcaacgtcacggccaagatgcccatcatgggcggcgcgcccaagtacctctcggccagcctcttctccacagactgcgccgtctccagcttccaccgtaacggtgacgccgccatcgagacgttcgcctcataaaccattggttcatggaacctacacgagaaataaacaaatatcaaccggaagggagtgatatcatctccatcatgttgttgtggagtatatatgtgtgcatctcacacgattgaggttgtgaaataagtttcaagtcaataattgaagcaaagtgtgtaccatgttagtaacttaacatttttttaagaaaagaagcatcgtgcttacatagt

SEQ ID NO: 67079 - protein, 337 aa, Triticum aestivum
  peptide (1)..(337): Ceres Seq. ID no. 14303068
  misc_feature (64)..(329): Homolog of NCBI NO: 7484468 NR Description: late embryonic abundant protein EMB7 - white
  misc_feature (22)..(330): Homolog of NCBI NO: 30685319 NR Description: late embryogenesis abundant protein -related
  misc_feature (22)..(330): Homolog of NCBI NO: 11994465 NR Description: contains similarity to late embryogenesis
  misc_feature (5)..(324): Homolog of NCBI NO: 21741738 NR Description: OSJNBa0073L04.2 [Oryza sativa (japonica
  misc_feature (11)..(328): Homolog of NCBI NO: 4514637 NR Description: root cap protein 2 [Zea mays]
  misc_feature (10)..(331): Homolog of NCBI NO: 4514635 NR Description: root cap protein 1 [Zea mays]
  misc_feature (12)..(334): Homolog of NCBI NO: 34905934 NR Description: similar to root cap protein
  misc_feature (5)..(334): Homolog of NCBI NO: 34905930 NR Description: similar to root cap protein
  misc_feature (8)..(337): Homolog of NCBI NO: 34905936 NR Description: similar to root cap protein
  misc_feature (7)..(337): Homolog of NCBI NO: 34905940 NR Description: similar to root cap protein
MAGRRQAAWCLVVIALAVTLAVASAQPVQPRVGGPGKKGGKMPPGKFETVTFAKNNKRKYEVACTDNRGPPCVVSCPKTCPNKCLAFCEYCMTFCMCDMFPGTSCGDPRFTGGDGNTFYFHGKKDQDFCIVSDKDLHINAHFIGNHNPDMKRDFTWVQALGVTFVHGGADHRLYVGAKKVVEWDEEEDHVQITLDGVPVEVEAGKNAQWVSRAMPGLSVTRTDTVNTVVVELDGVFSISANAVPITDEDSRIHNYGKTKDSLMHLDLGFKFHTLTNGVDGVLGQTYRLDYISKVNVTAKMPIMGGAPKYLSASLFSTDCAVSSFHRNGDAAIETFAS

SEQ ID NO: 67080 - protein, 296 aa, Triticum aestivum
  peptide (1)..(296): Ceres Seq. ID no. 14303069
  misc_feature (23)..(288): Homolog of NCBI NO: 7484468 NR Description: late embryonic abundant protein EMB7 - white
  misc_feature (1)..(289): Homolog of NCBI NO: 30685319 NR Description: late embryogenesis abundant protein -related
  misc_feature (1)..(289): Homolog of NCBI NO: 11994465 NR Description: contains similarity to late embryogenesis
  misc_feature (1)..(283): Homolog of NCBI NO: 21741738 NR Description: OSJNBa0073L04.2 [Oryza sativa (japonica
  misc_feature (1)..(287): Homolog of NCBI NO: 4514637 NR Description: root cap protein 2 [Zea mays]
  misc_feature (1)..(290): Homolog of NCBI NO: 4514635 NR Description: root cap protein 1 [Zea mays]
  misc_feature (1)..(293): Homolog of NCBI NO: 34905934 NR Description: similar to root cap protein
  misc_feature (1)..(293): Homolog of NCBI NO: 34905930 NR Description: similar to root cap protein
  misc_feature (1)..(296): Homolog of NCBI NO: 34905936 NR Description: similar to root cap protein
  misc_feature (1)..(296): Homolog of NCBI NO: 34905940 NR Description: similar to root cap protein
MPPGKFETVTFAKNNKRKYEVACTDNRGPPCVVSCPKTCPNKCLAFCEYCMTFCMCDMFPGTSCGDPRFTGGDGNTFYFHGKKDQDFCIVSDKDLHINAHFIGNHNPDMKRDFTWVQALGVTFVHGGADHRLYVGAKKVVEWDEEEDHVQITLDGVPVEVEAGKNAQWVSRAMPGLSVTRTDTVNTVVVELDGVFSISANAVPITDEDSRIHNYGKTKDSLMHLDLGFKFHTLTNGVDGVLGQTYRLDYISKVNVTAKMPIMGGAPKYLSASLFSTDCAVSSFHRNGDAAIETFAS

SEQ ID NO: 67081 - protein, 246 aa, Triticum aestivum
  peptide (1)..(246): Ceres Seq. ID no. 14303070
  misc_feature (1)..(238): Homolog of NCBI NO: 7484468 NR Description: late embryonic abundant protein EMB7 - white
  misc_feature (1)..(239): Homolog of NCBI NO: 30685319 NR Description: late embryogenesis abundant protein -related
  misc_feature (1)..(239): Homolog of NCBI NO: 11994465 NR Description: contains similarity to late embryogenesis
  misc_feature (1)..(233): Homolog of NCBI NO: 21741738 NR Description: OSJNBa0073L04.2 [Oryza sativa (japonica
  misc_feature (1)..(237): Homolog of NCBI NO: 4514637 NR Description: root cap protein 2 [Zea mays]
  misc_feature (1)..(240): Homolog of NCBI NO: 4514635 NR Description: root cap protein 1 [Zea mays]
  misc_feature (1)..(243): Homolog of NCBI NO: 34905934 NR Description: similar to root cap protein
  misc_feature (1)..(243): Homolog of NCBI NO: 34905930 NR Description: similar to root cap protein
  misc_feature (1)..(246): Homolog of NCBI NO: 34905936 NR Description: similar to root cap protein
  misc_feature (1)..(246): Homolog of NCBI NO: 34905940 NR Description: similar to root cap protein
MTFCMCDMFPGTSCGDPRFTGGDGNTFYFHGKKDQDFCIVSDKDLHINAHFIGNHNPDMKRDFTWVQALGVTFVHGGADHRLYVGAKKVVEWDEEEDHVQITLDGVPVEVEAGKNAQWVSRAMPGLSVTRTDTVNTVVVELDGVFSISANAVPITDEDSRIHNYGKTKDSLMHLDLGFKFHTLTNGVDGVLGQTYRLDYISKVNVTAKMPIMGGAPKYLSASLFSTDCAVSSFHRNGDAAIETFAS

SEQ ID NO: 67082 - DNA, 830 bp, Triticum aestivum
  misc_feature (1)..(830): Ceres Seq. ID no. 12621847
aaaactcacagcaagacttggtaaaggcggccgaagaagcaaagctgactaatctgcaaccatgaagatgaagagatgcatcctgctgatgctcgcacttgaggccgccgtcctcgtcgccggccgcccctccgctgttgccgtctccaacgacgtgggcaccattctcatgccgaccgaaggcaaagggcaagtgggaacggcggcggcttccaggccatgggattgctgcgacaacaccatatgcaccaggtccttgccgccaatctgcatctgtctggacgaggtcgacgagtgcgcctccacctgcatggcctgcgtgccgtccgtctcaaacccattccgccgcgtctgcggagaccggtactacggcgaccccgggcccaagtgcacctacaacaccgtcgccggcgacaacaacgacgacgccctcgtagcggcggcggcagaggaggagaagccgtgggagtgctgtgacatggctctgtgcaccaggtcatacccgccgatgtgccgctgcgtggacgaggtcgagcagtgcgctgcaacctgcaagagctgcggggtgtccatcttgaacccgttccgccacgtctgcaacgactggtacaacggcttcccaggtcgcaagtgcaccgaggccgcccacgccggcggtaataactagcacctgcgttgatcaacgccatcaagagtgcacttgaatttcccctgcatgcaatgtgttacaaattacaataaaataaaataaaaaatggatggccggctggctggcctgctaccgctactgcttgcctgaatggtgatcagacaagcatgcatgcatgaat

SEQ ID NO: 67083 - protein, 201 aa, Triticum aestivum
  peptide (1)..(201): Ceres Seq. ID no. 12621848
  misc_feature (137)..(161): Pfam Name: Bowman-Birk serine protease inhibitor family Pfam Description: Bowman-Birk serine protease inhibitor family
  misc_feature (52)..(111): Homolog of NCBI NO: 6730112 NR Description: Chain A, Crystal Structure Of Barley Bbi
  misc_feature (52)..(111): Homolog of NCBI NO: 124037 NR Description: BOWMAN-BIRK TYPE TRYPSIN INHIBITOR
  misc_feature (48)..(155): Homolog of NCBI NO: 124037 NR Description: BOWMAN-BIRK TYPE TRYPSIN INHIBITOR
  misc_feature (17)..(191): Homolog of NCBI NO: 34895448 NR Description: putative Bowman Birk tryspin inhibitor
  misc_feature (52)..(155): Homolog of NCBI NO: 6730112 NR Description: Chain A, Crystal Structure Of Barley Bbi
  misc_feature (20)..(196): Homolog of NCBI NO: 34895432 NR Description: putative Bowman Birk trypsin inhibitor
  misc_feature (18)..(196): Homolog of NCBI NO: 34895446 NR Description: putative Bowman Birk tryspin inhibitor
  misc_feature (18)..(196): Homolog of NCBI NO: 7635923 NR Description: putative Bowman Birk tryspin inhibitor
  misc_feature (17)..(191): Homolog of NCBI NO: 7635919 NR Description: putative Bowman Birk trypsin inhibitor
  misc_feature (3)..(191): Homolog of NCBI NO: 34895496 NR Description: P0409B08.18 [Oryza sativa (japonica
MKMKRCILLMLALEAAVLVAGRPSAVAVSNDVGTILMPTEGKGQVGTAAASRPWDCCDNTICTRSLPPICICLDEVDECASTCMACVPSVSNPFRRVCGDRYYGDPGPKCTYNTVAGDNNDDALVAAAAEEEKPWECCDMALCTRSYPPMCRCVDEVEQCAATCKSCGVSILNPFRHVCNDWYNGFPGRKCTEAAHAGGNN

SEQ ID NO: 67084 - protein, 199 aa, Triticum aestivum
  peptide (1)..(199): Ceres Seq. ID no. 12621849
  misc_feature (135)..(159): Pfam Name: Bowman-Birk serine protease inhibitor family Pfam Description: Bowman-Birk serine protease inhibitor family
  misc_feature (50)..(109): Homolog of NCBI NO: 6730112 NR Description: Chain A, Crystal Structure Of Barley Bbi
  misc_feature (50)..(109): Homolog of NCBI NO: 124037 NR Description: BOWMAN-BIRK TYPE TRYPSIN INHIBITOR
  misc_feature (46)..(153): Homolog of NCBI NO: 124037 NR Description: BOWMAN-BIRK TYPE TRYPSIN INHIBITOR
  misc_feature (15)..(189): Homolog of NCBI NO: 34895448 NR Description: putative Bowman Birk tryspin inhibitor
  misc_feature (50)..(153): Homolog of NCBI NO: 6730112 NR Description: Chain A, Crystal Structure Of Barley Bbi
  misc_feature (18)..(194): Homolog of NCBI NO: 34895432 NR Description: putative Bowman Birk trypsin inhibitor
  misc_feature (16)..(194): Homolog of NCBI NO: 34895446 NR Description: putative Bowman Birk tryspin inhibitor
  misc_feature (16)..(194): Homolog of NCBI NO: 7635923 NR Description: putative Bowman Birk tryspin inhibitor
  misc_feature (15)..(189): Homolog of NCBI NO: 7635919 NR Description: putative Bowman Birk trypsin inhibitor
  misc_feature (1)..(189): Homolog of NCBI NO: 34895496 NR Description: P0409B08.18 [Oryza sativa (japonica
MKRCILLMLALEAAVLVAGRPSAVAVSNDVGTILMPTEGKGQVGTAAASRPWDCCDNTICTRSLPPICICLDEVDECASTCMACVPSVSNPFRRVCGDRYYGDPGPKCTYNTVAGDNNDDALVAAAAEEEKPWECCDMALCTRSYPPMCRCVDEVEQCAATCKSCGVSILNPFRHVCNDWYNGFPGRKCTEAAHAGGNN

SEQ ID NO: 67085 - protein, 192 aa, Triticum aestivum
  peptide (1)..(192): Ceres Seq. ID no. 12621850
  misc_feature (128)..(152): Pfam Name: Bowman-Birk serine protease inhibitor family Pfam Description: Bowman-Birk serine protease inhibitor family
  misc_feature (43)..(102): Homolog of NCBI NO: 6730112 NR Description: Chain A, Crystal Structure Of Barley Bbi
  misc_feature (43)..(102): Homolog of NCBI NO: 124037 NR Description: BOWMAN-BIRK TYPE TRYPSIN INHIBITOR
  misc_feature (39)..(146): Homolog of NCBI NO: 124037 NR Description: BOWMAN-BIRK TYPE TRYPSIN INHIBITOR
  misc_feature (8)..(182): Homolog of NCBI NO: 34895448 NR Description: putative Bowman Birk tryspin inhibitor
  misc_feature (43)..(146): Homolog of NCBI NO: 6730112 NR Description: Chain A, Crystal Structure Of Barley Bbi
  misc_feature (11)..(187): Homolog of NCBI NO: 34895432 NR Description: putative Bowman Birk trypsin inhibitor
  misc_feature (9)..(187): Homolog of NCBI NO: 34895446 NR Description: putative Bowman Birk tryspin inhibitor
  misc_feature (9)..(187): Homolog of NCBI NO: 7635923 NR Description: putative Bowman Birk tryspin inhibitor
  misc_feature (8)..(182): Homolog of NCBI NO: 7635919 NR Description: putative Bowman Birk trypsin inhibitor
  misc_feature (1)..(182): Homolog of NCBI NO: 34895496 NR Description: P0409B08.18 [Oryza sativa (japonica
MLALEAAVLVAGRPSAVAVSNDVGTILMPTEGKGQVGTAAASRPWDCCDNTICTRSLPPICICLDEVDECASTCMACVPSVSNPFRRVCGDRYYGDPGPKCTYNTVAGDNNDDALVAAAAEEEKPWECCDMALCTRSYPPMCRCVDEVEQCAATCKSCGVSILNPFRHVCNDWYNGFPGRKCTEAAHAGGNN

SEQ ID NO: 67086 - DNA, 1041 bp, Triticum aestivum
  misc_feature (1)..(1041): Ceres Seq. ID no. 14303031
aaatcccatgccagaaacgcggaacgacctgccgatggagccgtcgttcgggtccaactccgcgagcaccgaggaggcgtcgacccggcgcgtggccaaccgcatcatccgcgcgctgcagcaccacctccagctgctgcaccgcgccggcgcggacttcttcgtgctgggcgccacgggcaacgtgtacacggtgacgctggcgaccacgccggcgtgcacgtgccccgaccccggcgcgccctgcaagcacatcctcttcgtgctgctccgcgtcctcggcctgtccctcgacgaggcctgcgtgtggaggcagtcgctgcggccgtgccaggtcgcgcggctcgtcgccgcgcccacgtacccggaggtgctcgccggccctcgcgcccgggagaggttccaccagcagtgggcggcccacgcggcggctgcagccgcaaaggccgctgaccagcgccggcaggagtccgccggtccgtcgttgggccgcctcgacggcgccgcctgcccggtgtgcctcgaggagatggcgccgtcggcagaggcacaaggcggcgcggcggcaacggggccggcgccgctgctgacgtgcggcacctgccggaactcggtgcacgccgagtgcttcgcgcggtggaagcgcagccgcgcgaggcgggcggcgacgtgcgtcgtgtgccgcgcgaggtggcggaagccgagccgggaccgggagcaggaccagcagcagtacatgaacctgtcggcgtacatgaacgaggagaacgacgtggtggacatgcaggtcgaggacggggctccgtgtggcggatagaggaacttgttacggcggttcatatactgtatgaaatttaagaagctgtacagagggagtagcatcccaattcattcggactcgtgacatttctttcttatttttcttaggatctgacttattacatgcatgtacagaacttatatgtcaataaaatcactgtgttctgaagaaattatcgatgatgacagatatgccctctgtgataggaaacaatttttggg

SEQ ID NO: 67087 - protein, 271 aa, Triticum aestivum
  peptide (1)..(271): Ceres Seq. ID no. 14303032
  misc_feature (63)..(93): Pfam Name: SWIM zinc finger Pfam Description: SWIM zinc finger
  misc_feature (52)..(88): Homolog of NCBI NO: 25294132 NR Description: Znf1p [Gibberella moniliformis]
  misc_feature (139)..(249): Homolog of NCBI NO: 25294132 NR Description: Znf1p [Gibberella moniliformis]
  misc_feature (14)..(232): Homolog of NCBI NO: 37550279 NR Description: similar to Mitogen-activated protein kinase
  misc_feature (17)..(232): Homolog of NCBI NO: 16758760 NR Description: mitogen activated protein kinase kinase kinase 1
  misc_feature (14)..(232): Homolog of NCBI NO: 8488988 NR Description: Mitogen-activated protein kinase kinase kinase 1
  misc_feature (17)..(232): Homolog of NCBI NO: 33859656 NR Description: mitogen activated protein kinase kinase kinase 1;
  misc_feature (17)..(232): Homolog of NCBI NO: 6141559 NR Description: MEKK1 N-terminal [Mus musculus]
  misc_feature (52)..(93): Homolog of NCBI NO: 40741330 NR Description: hypothetical protein AN4359.2 [Aspergillus
  misc_feature (170)..(241): Homolog of NCBI NO: 40741330 NR Description: hypothetical protein AN4359.2 [Aspergillus
  misc_feature (31)..(266): Homolog of NCBI NO: 15239119 NR Description: expressed protein [Arabidopsis thaliana]
NPMPETRNDLPMEPSFGSNSASTEEASTRRVANRIIRALQHHLQLLHRAGADFFVLGATGNVYTVTLATTPACTCPDPGAPCKHILFVLLRVLGLSLDEACVWRQSLRPCQVARLVAAPTYPEVLAGPRARERFHQQWAAHAAAAAAKAADQRRQESAGPSLGRLDGAACPVCLEEMAPSAEAQGGAAATGPAPLLTCGTCRNSVHAECFARWKRSRARRAATCVVCRARWRKPSRDREQDQQQYMNLSAYMNEENDVVDMQVEDGAPCGG

SEQ ID NO: 67088 - protein, 269 aa, Triticum aestivum
  peptide (1)..(269): Ceres Seq. ID no. 14303033
  misc_feature (61)..(91): Pfam Name: SWIM zinc finger Pfam Description: SWIM zinc finger
  misc_feature (50)..(86): Homolog of NCBI NO: 25294132 NR Description: Znf1p [Gibberella moniliformis]
  misc_feature (137)..(247): Homolog of NCBI NO: 25294132 NR Description: Znf1p [Gibberella moniliformis]
  misc_feature (12)..(230): Homolog of NCBI NO: 37550279 NR Description: similar to Mitogen-activated protein kinase
  misc_feature (15)..(230): Homolog of NCBI NO: 16758760 NR Description: mitogen activated protein kinase kinase kinase 1
  misc_feature (12)..(230): Homolog of NCBI NO: 8488988 NR Description: Mitogen-activated protein kinase kinase kinase 1
  misc_feature (15)..(230): Homolog of NCBI NO: 33859656 NR Description: mitogen activated protein kinase kinase kinase 1;
  misc_feature (15)..(230): Homolog of NCBI NO: 6141559 NR Description: MEKK1 N-terminal [Mus musculus]
  misc_feature (50)..(91): Homolog of NCBI NO: 40741330 NR Description: hypothetical protein AN4359.2 [Aspergillus
  misc_feature (168)..(239): Homolog of NCBI NO: 40741330 NR Description: hypothetical protein AN4359.2 [Aspergillus
  misc_feature (29)..(264): Homolog of NCBI NO: 15239119 NR Description: expressed protein [Arabidopsis thaliana]
MPETRNDLPMEPSFGSNSASTEEASTRRVANRIIRALQHHLQLLHRAGADFFVLGATGNVYTVTLATTPACTCPDPGAPCKHILFVLLRVLGLSLDEACVWRQSLRPCQVARLVAAPTYPEVLAGPRARERFHQQWAAHAAAAAAKAADQRRQESAGPSLGRLDGAACPVCLEEMAPSAEAQGGAAATGPAPLLTCGTCRNSVHAECFARWKRSRARRAATCVVCRARWRKPSRDREQDQQQYMNLSAYMNEENDVVDMQVEDGAPCGG

SEQ ID NO: 67089 - protein, 260 aa, Triticum aestivum
  peptide (1)..(260): Ceres Seq. ID no. 14303034
  misc_feature (52)..(82): Pfam Name: SWIM zinc finger Pfam Description: SWIM zinc finger
  misc_feature (41)..(77): Homolog of NCBI NO: 25294132 NR Description: Znf1p [Gibberella moniliformis]
  misc_feature (128)..(238): Homolog of NCBI NO: 25294132 NR Description: Znf1p [Gibberella moniliformis]
  misc_feature (3)..(221): Homolog of NCBI NO: 37550279 NR Description: similar to Mitogen-activated protein kinase
  misc_feature (6)..(221): Homolog of NCBI NO: 16758760 NR Description: mitogen activated protein kinase kinase kinase 1
  misc_feature (3)..(221): Homolog of NCBI NO: 8488988 NR Description: Mitogen-activated protein kinase kinase kinase 1
  misc_feature (6)..(221): Homolog of NCBI NO: 33859656 NR Description: mitogen activated protein kinase kinase kinase 1;
  misc_feature (6)..(221): Homolog of NCBI NO: 6141559 NR Description: MEKK1 N-terminal [Mus musculus]
  misc_feature (41)..(82): Homolog of NCBI NO: 40741330 NR Description: hypothetical protein AN4359.2 [Aspergillus
  misc_feature (159)..(230): Homolog of NCBI NO: 40741330 NR Description: hypothetical protein AN4359.2 [Aspergillus
  misc_feature (20)..(255): Homolog of NCBI NO: 15239119 NR Description: expressed protein [Arabidopsis thaliana]
MEPSFGSNSASTEEASTRRVANRIIRALQHHLQLLHRAGADFFVLGATGNVYTVTLATTPACTCPDPGAPCKHILFVLLRVLGLSLDEACVWRQSLRPCQVARLVAAPTYPEVLAGPRARERFHQQWAAHAAAAAAKAADQRRQESAGPSLGRLDGAACPVCLEEMAPSAEAQGGAAATGPAPLLTCGTCRNSVHAECFARWKRSRARRAATCVVCRARWRKPSRDREQDQQQYMNLSAYMNEENDVVDMQVEDGAPCGG

SEQ ID NO: 67090 - DNA, 585 bp, Triticum aestivum
  misc_feature (1)..(585): Ceres Seq. ID no. 13659740
accccagcccgtccccaaatctccaaagcgcgagcgacaaccggccctgcctcaaccccccggcgcgtctccgactccatggcccgcaccaagcagacggcgaggaagtccgaggggcttaagcagacatttgccgcggtggaaacactggaaggagccctgcgggagtgctccaagggagagggctactttggtggtgagaccgtcgggcttgtggacatttcacttgggagcctgctctcctggttgaacgcgacagaagtgatgtccggaaccaagatatttgatcctgttaagactccgctcctggcagcgtggatggagcgctttagcaagctcgatgctgccaaggcggcgttgccagaagttgatagggtggtcgaatttgccaaagaagagacaagcacaggctgctgccgccgccgctgcttcagagaccaagtaaacatcatggggacgtgacttccattgaataaaaaaaagtgcatgttttctatatagcatatatgattgttgtttgtatgtcgatttttgttgtaatggtgccaaggataattaatgcatgtgatattttgtgaaggtttt

SEQ ID NO: 67091 - protein, 153 aa, Triticum aestivum
  peptide (1)..(153): Ceres Seq. ID no. 13659741
  misc_feature (29)..(114): Pfam Name: Glutathione S-transferase, C-terminal domain Pfam Description: Glutathione S-transferase, C-terminal domain
  misc_feature (29)..(131): Homolog of NCBI NO: 37536340 NR Description: putative glutathione S-transferase
  misc_feature (29)..(132): Homolog of NCBI NO: 37536330 NR Description: putative glutathione S-transferase
  misc_feature (31)..(131): Homolog of NCBI NO: 4127348 NR Description: glutathione transferase [Alopecurus myosuroides]
  misc_feature (29)..(131): Homolog of NCBI NO: 37536346 NR Description: putative glutathione S-transferase
  misc_feature (29)..(131): Homolog of NCBI NO: 37536310 NR Description: putative glutathione S-transferase
  misc_feature (29)..(131): Homolog of NCBI NO: 33304610 NR Description: tau class GST protein 4 [Oryza sativa (indica
  misc_feature (28)..(148): Homolog of NCBI NO: 22038181 NR Description: glutathione S-transferase [Aegilops tauschii]
  misc_feature (29)..(131): Homolog of NCBI NO: 21730248 NR Description: Chain A, The Structure Of A Tau Class Glutathione
  misc_feature (29)..(131): Homolog of NCBI NO: 21956482 NR Description: glutathione-S-transferase 28e45 [Triticum
  misc_feature (29)..(131): Homolog of NCBI NO: 22038178 NR Description: glutathione-S-transferase 2 [Aegilops tauschii]
TPARPQISKARATTGPASTPRRVSDSMARTKQTARKSEGLKQTFAAVETLEGALRECSKGEGYFGGETVGLVDISLGSLLSWLNATEVMSGTKIFDPVKTPLLAAWMERFSKLDAAKAALPEVDRVVEFAKEETSTGCCRRRCFRDQVNIMGT

SEQ ID NO: 67092 - protein, 127 aa, Triticum aestivum
  peptide (1)..(127): Ceres Seq. ID no. 13659742
  misc_feature (3)..(88): Pfam Name: Glutathione S-transferase, C-terminal domain Pfam Description: Glutathione S-transferase, C-terminal domain
  misc_feature (3)..(105): Homolog of NCBI NO: 37536340 NR Description: putative glutathione S-transferase
  misc_feature (3)..(106): Homolog of NCBI NO: 37536330 NR Description: putative glutathione S-transferase
  misc_feature (5)..(105): Homolog of NCBI NO: 4127348 NR Description: glutathione transferase [Alopecurus myosuroides]
  misc_feature (3)..(105): Homolog of NCBI NO: 37536346 NR Description: putative glutathione S-transferase
  misc_feature (3)..(105): Homolog of NCBI NO: 37536310 NR Description: putative glutathione S-transferase
  misc_feature (3)..(105): Homolog of NCBI NO: 33304610 NR Description: tau class GST protein 4 [Oryza sativa (indica
  misc_feature (2)..(122): Homolog of NCBI NO: 22038181 NR Description: glutathione S-transferase [Aegilops tauschii]
  misc_feature (3)..(105): Homolog of NCBI NO: 21730248 NR Description: Chain A, The Structure Of A Tau Class Glutathione
  misc_feature (3)..(105): Homolog of NCBI NO: 21956482 NR Description: glutathione-S-transferase 28e45 [Triticum
  misc_feature (3)..(105): Homolog of NCBI NO: 22038178 NR Description: glutathione-S-transferase 2 [Aegilops tauschii]
MARTKQTARKSEGLKQTFAAVETLEGALRECSKGEGYFGGETVGLVDISLGSLLSWLNATEVMSGTKIFDPVKTPLLAAWMERFSKLDAAKAALPEVDRVVEFAKEETSTGCCRRRCFRDQVNIMGT

SEQ ID NO: 67093 - protein, 82 aa, Triticum aestivum
  peptide (1)..(82): Ceres Seq. ID no. 13659743
PQPVPKSPKRERQPALPQPPGASPTPWPAPSRRRGSPRGLSRHLPRWKHWKEPCGSAPRERATLVVRPSGLWTFHLGACSPG

SEQ ID NO: 67094 - DNA, 904 bp, Triticum aestivum; identical to SEQ ID NO: 64285
  misc_feature (1)..(904): Ceres Seq. ID no. 13584363

SEQ ID NO: 67095 - protein, 119 aa, Triticum aestivum; identical to SEQ ID NO: 64286
  peptide (1)..(119): Ceres Seq. ID no. 13584364
  misc_feature (2)..(92): Pfam Name: Mitochondrial ribosomal protein L51 / S25 / Pfam Description: Mitochondrial ribosomal protein L51 / S25 /
  misc_feature (2)..(92): Pfam Name: Mitochondrial ribosomal protein L51 / S25 / Pfam Description: Mitochondrial ribosomal protein L51 / S25 /
  misc_feature (6)..(114): Homolog of NCBI NO: 6325356 NR Description: Mitochondrial Ribosome Protein, Large Subunit;
  misc_feature (4)..(119): Homolog of NCBI NO: 17647665 NR Description: mitochondrial ribosomal protein L-CI-B8 CG5479-PA
  misc_feature (10)..(114): Homolog of NCBI NO: 19112489 NR Description: hypothetical protein [Schizosaccharomyces pombe]
  misc_feature (8)..(114): Homolog of NCBI NO: 39589613 NR Description: Hypothetical protein CBG12220 [Caenorhabditis
  misc_feature (6)..(114): Homolog of NCBI NO: 6325356 NR Description: Mitochondrial Ribosome Protein, Large Subunit;
  misc_feature (10)..(114): Homolog of NCBI NO: 19112489 NR Description: hypothetical protein [Schizosaccharomyces pombe]
  misc_feature (8)..(114): Homolog of NCBI NO: 17505717 NR Description: NADH-ubiquinone oxidoreductase B8 [Caenorhabditis
  misc_feature (1)..(118): Homolog of NCBI NO: 15231727 NR Description: expressed protein [Arabidopsis thaliana]
  misc_feature (1)..(119): Homolog of NCBI NO: 26006491 NR Description: Unknown protein [Oryza sativa (japonica
  misc_feature (6)..(114): Homolog of NCBI NO: 40739113 NR Description: hypothetical protein AN6904.2 [Aspergillus
  misc_feature (8)..(114): Homolog of NCBI NO: 39589613 NR Description: Hypothetical protein CBG12220 [Caenorhabditis
  misc_feature (4)..(119): Homolog of NCBI NO: 17647665 NR Description: mitochondrial ribosomal protein L-CI-B8 CG5479-PA
  misc_feature (8)..(114): Homolog of NCBI NO: 17505717 NR Description: NADH-ubiquinone oxidoreductase B8 [Caenorhabditis
  misc_feature (6)..(114): Homolog of NCBI NO: 40739113 NR Description: hypothetical protein AN6904.2 [Aspergillus
  misc_feature (1)..(118): Homolog of NCBI NO: 15231727 NR Description: expressed protein [Arabidopsis thaliana]
  misc_feature (1)..(119): Homolog of NCBI NO: 26006491 NR Description: Unknown protein [Oryza sativa (japonica

SEQ ID NO: 67096 - protein, 90 aa, Triticum aestivum; identical to SEQ ID NO: 64287
  peptide (1)..(90): Ceres Seq. ID no. 13584365
  misc_feature (1)..(63): Pfam Name: Mitochondrial ribosomal protein L51 / S25 / Pfam Description: Mitochondrial ribosomal protein L51 / S25 /
  misc_feature (1)..(63): Pfam Name: Mitochondrial ribosomal protein L51 / S25 / Pfam Description: Mitochondrial ribosomal protein L51 / S25 /
  misc_feature (1)..(85): Homolog of NCBI NO: 6325356 NR Description: Mitochondrial Ribosome Protein, Large Subunit;
  misc_feature (1)..(90): Homolog of NCBI NO: 17647665 NR Description: mitochondrial ribosomal protein L-CI-B8 CG5479-PA
  misc_feature (1)..(85): Homolog of NCBI NO: 19112489 NR Description: hypothetical protein [Schizosaccharomyces pombe]
  misc_feature (1)..(85): Homolog of NCBI NO: 39589613 NR Description: Hypothetical protein CBG12220 [Caenorhabditis
  misc_feature (1)..(85): Homolog of NCBI NO: 6325356 NR Description: Mitochondrial Ribosome Protein, Large Subunit;
  misc_feature (1)..(85): Homolog of NCBI NO: 19112489 NR Description: hypothetical protein [Schizosaccharomyces pombe]
  misc_feature (1)..(85): Homolog of NCBI NO: 17505717 NR Description: NADH-ubiquinone oxidoreductase B8 [Caenorhabditis
  misc_feature (1)..(89): Homolog of NCBI NO: 15231727 NR Description: expressed protein [Arabidopsis thaliana]
  misc_feature (1)..(90): Homolog of NCBI NO: 26006491 NR Description: Unknown protein [Oryza sativa (japonica
  misc_feature (1)..(85): Homolog of NCBI NO: 40739113 NR Description: hypothetical protein AN6904.2 [Aspergillus
  misc_feature (1)..(85): Homolog of NCBI NO: 39589613 NR Description: Hypothetical protein CBG12220 [Caenorhabditis
  misc_feature (1)..(90): Homolog of NCBI NO: 17647665 NR Description: mitochondrial ribosomal protein L-CI-B8 CG5479-PA
  misc_feature (1)..(85): Homolog of NCBI NO: 17505717 NR Description: NADH-ubiquinone oxidoreductase B8 [Caenorhabditis
  misc_feature (1)..(85): Homolog of NCBI NO: 40739113 NR Description: hypothetical protein AN6904.2 [Aspergillus
  misc_feature (1)..(89): Homolog of NCBI NO: 15231727 NR Description: expressed protein [Arabidopsis thaliana]
  misc_feature (1)..(90): Homolog of NCBI NO: 26006491 NR Description: Unknown protein [Oryza sativa (japonica

SEQ ID NO: 67097 - DNA, 1233 bp, Triticum aestivum
  misc_feature (1)..(1233): Ceres Seq. ID no. 13502960
ccacttagaccgcctccgcccacgcatcatcgacggtgaagcgtaggtagcgagcgcctccacagatcgggatcaggcggcgatcgacttctccggcgatgtcaagcaggcgatcccccgcccggccgtcgctttcggcggcgtcggcagcgctggcgatcacggcggtgcacaaggtcgcccagggtccccggtgcagggctttccagcagcagggacagctccctggccgctgcgcgcggcgccgacgggggcaatgccaagttcgcgtggtacggcgcgccgtcggcggacgtggccgcggcggtggagcacgggttcgggaggaccaacagccgggtcctcggccatcgcgcgcacggcgacagcgtccacctctcgccgcctcagtctccttacgccagcgcaatgctagcaaatgcagatgagaacggcgaggcgcacatcgtgctgtgccgtgttctgatgggccggccagaggccatcccagccgggtcctcccagctccaccccagcagtgacgattacgacagcgccgtcgacaacatgcagaatccccagtggtacgttgtttggagcaaggatatgaacacgaggatcctcccagagtacgtcgtcagcttcaagtgccccagcctccatcagatgcaaggatcatcgggagcgacctccgccctaaagaagccttcgccggtggctcgtgacatgtttccgacgcttctagcagagatccagcggttcgtgccatcctccaagctggagacattgcaggggacctacaatcgcttcaagaaagggcagatgaagaaggatcagttcatccggttcttgcgcgccttcatcggcgacagggtgttgacagcagttgccaagaaactccgaggatactgatggacagtgcaagggtgttcttctgctagttctgttgtcgtcaaagtggtgtgctggtggtgaggtggtagctcattcggctgactccatagaaccggaagggtgtgcgtgtcgggtatcaaccagatagttcttcatttcttatgtcgccgtagtttagccgagaatcgttgttgatctcaagaacatagaggggttacgggcaatcttccattaaccaacacaaagttagattttattcttggtttctgctatattttacttggtattttgttacctgcaatctgtacagactgaaagttttaccaatttatgcctgaaagcaatcatttgttcgacgcc

SEQ ID NO: 67098 - protein, 160 aa, Triticum aestivum
  peptide (1)..(160): Ceres Seq. ID no. 13502961
  misc_feature (1)..(83): Homolog of NCBI NO: 18398335 NR Description: expressed protein [Arabidopsis thaliana]
  misc_feature (1)..(83): Homolog of NCBI NO: 11044957 NR Description: ceo protein [Arabidopsis thaliana]
  misc_feature (1)..(157): Homolog of NCBI NO: 15228235 NR Description: hypothetical protein [Arabidopsis thaliana]
  misc_feature (1)..(155): Homolog of NCBI NO: 21592445 NR Description: unknown [Arabidopsis thaliana]
  misc_feature (1)..(155): Homolog of NCBI NO: 15241862 NR Description: expressed protein [Arabidopsis thaliana]
  misc_feature (1)..(142): Homolog of NCBI NO: 7485680 NR Description: hypothetical protein F17O7.2 - Arabidopsis
  misc_feature (1)..(155): Homolog of NCBI NO: 8778582 NR Description: F28C11.18 [Arabidopsis thaliana]
  misc_feature (1)..(158): Homolog of NCBI NO: 15223159 NR Description: hypothetical protein [Arabidopsis thaliana]
  misc_feature (1)..(155): Homolog of NCBI NO: 15220787 NR Description: hypothetical protein [Arabidopsis thaliana]
  misc_feature (1)..(160): Homolog of NCBI NO: 27311235 NR Description: Unknown protein [Oryza sativa (japonica
MLANADENGEAHIVLCRVLMGRPEAIPAGSSQLHPSSDDYDSAVDNMQNPQWYVVWSKDMNTRILPEYVVSFKCPSLHQMQGSSGATSALKKPSPVARDMFPTLLAEIQRFVPSSKLETLQGTYNRFKKGQMKKDQFIRFLRAFIGDRVLTAVAKKLRGY

SEQ ID NO: 67099 - protein, 141 aa, Triticum aestivum
  peptide (1)..(141): Ceres Seq. ID no. 13502962
  misc_feature (1)..(64): Homolog of NCBI NO: 30692664 NR Description: expressed protein [Arabidopsis thaliana]
  misc_feature (1)..(64): Homolog of NCBI NO: 11044957 NR Description: ceo protein [Arabidopsis thaliana]
  misc_feature (1)..(138): Homolog of NCBI NO: 15228235 NR Description: hypothetical protein [Arabidopsis thaliana]
  misc_feature (1)..(136): Homolog of NCBI NO: 21592445 NR Description: unknown [Arabidopsis thaliana]
  misc_feature (1)..(136): Homolog of NCBI NO: 15241862 NR Description: expressed protein [Arabidopsis thaliana]
  misc_feature (1)..(123): Homolog of NCBI NO: 7485680 NR Description: hypothetical protein F17O7.2 - Arabidopsis
  misc_feature (1)..(136): Homolog of NCBI NO: 8778582 NR Description: F28C11.18 [Arabidopsis thaliana]
  misc_feature (1)..(139): Homolog of NCBI NO: 15223159 NR Description: hypothetical protein [Arabidopsis thaliana]
  misc_feature (1)..(136): Homolog of NCBI NO: 15220787 NR Description: hypothetical protein [Arabidopsis thaliana]
  misc_feature (1)..(141): Homolog of NCBI NO: 27311235 NR Description: Unknown protein [Oryza sativa (japonica
MGRPEAIPAGSSQLHPSSDDYDSAVDNMQNPQWYVVWSKDMNTRILPEYVVSFKCPSLHQMQGSSGATSALKKPSPVARDMFPTLLAEIQRFVPSSKLETLQGTYNRFKKGQMKKDQFIRFLRAFIGDRVLTAVAKKLRGY

SEQ ID NO: 67100 - protein, 114 aa, Triticum aestivum
  peptide (1)..(114): Ceres Seq. ID no. 13502963
  misc_feature (1)..(37): Homolog of NCBI NO: 18398335 NR Description: expressed protein [Arabidopsis thaliana]
  misc_feature (1)..(37): Homolog of NCBI NO: 11044957 NR Description: ceo protein [Arabidopsis thaliana]
  misc_feature (1)..(111): Homolog of NCBI NO: 15228235 NR Description: hypothetical protein [Arabidopsis thaliana]
  misc_feature (1)..(109): Homolog of NCBI NO: 21592445 NR Description: unknown [Arabidopsis thaliana]
  misc_feature (1)..(109): Homolog of NCBI NO: 15241862 NR Description: expressed protein [Arabidopsis thaliana]
  misc_feature (1)..(96): Homolog of NCBI NO: 7485680 NR Description: hypothetical protein F17O7.2 - Arabidopsis
  misc_feature (1)..(109): Homolog of NCBI NO: 8778582 NR Description: F28C11.18 [Arabidopsis thaliana]
  misc_feature (1)..(112): Homolog of NCBI NO: 15223159 NR Description: hypothetical protein [Arabidopsis thaliana]
  misc_feature (1)..(109): Homolog of NCBI NO: 15220787 NR Description: hypothetical protein [Arabidopsis thaliana]
  misc_feature (1)..(114): Homolog of NCBI NO: 27311235 NR Description: Unknown protein [Oryza sativa (japonica
MQNPQWYVVWSKDMNTRILPEYVVSFKCPSLHQMQGSSGATSALKKPSPVARDMFPTLLAEIQRFVPSSKLETLQGTYNRFKKGQMKKDQFIRFLRAFIGDRVLTAVAKKLRGY

SEQ ID NO: 67101 - DNA, 1466 bp, Triticum aestivum
  misc_feature (1)..(1466): Ceres Seq. ID no. 13659640
gtttttaactcgacttagccaagtttggcaaacgaacaggccccgtggccccgcccccgcgcgacagcgaccgggcgcccgaagtgtctcgcgctcgcccacggcacccgagcggagcccccgcccctaccatgtgctctccctgcccgcagacccctcaaaacccacccgcgcccgcacccaggcaccgagcacccagcagaaagaaacgcaccaaatctttatcccctgccctcagcagtgccgacctgagcgccggagatctgcggcgagcgagatgaaagtggaggagcagacggtggtgggaggaggaggaggggggctctgggggctggccgggcggccgtgcgacacgtgcgccgtggacgcggcgcggctctactgccggtcggacggcgcctacctctgcgccgggtgcgacgcgcgcgctcacggggccggctcccgccacgcgcgcgtctggctctgcgaggtctgcgagcacgcgcccgccgcggtcacctgccgcgccgacgccgccgcgctctgcgccacgtgcgacgccgacatccactccgccaacccgctcgccagccggcacgagcgcctccccgtcacgcctttcttcggcgcgctcgccgacccgccccagcccgccccctccccgtcctccgccgccgcgacgcaggaggacgcggacgacgacgggagcaacgaggccgaggcggcctcctggcttcttcccgagcctggcgatagccccgaggacagcaccgctaccttcttccctgactcggacgcgtacctcgatctggacttcgtccggtctatggacgggatcaaggccatcggggtgcccgtcgccccttccgagctcgacgtcgccggcggcgctctcttctaccccgaacactccatgaaccacagcatgtcaacgtccgaggtcgcggtggtgccggacgcgctgtcagccggcggggccccggcgccggcgccgtcggtggcggtggtggctagcaaggggaaggagcgggaggcccggctgatgcggtaccgggagaagcgcaagaaccggaggttccagaagaccatccgctacgcgtcccgcaaggcgtacgccgagacgcggccgcgcatcaagggccggttcgccaagcgcaccgccgaggacgacgcgctggagcgggacgggccgttctcgcccgcgtcgtcggcgcacctggcgtcggacggtgactacggcgtcgtgccgtccttctgaggagaccggcgacggcgacggcgactctgctgtagttttggcgcgcgcatccatccgagtgcgctcgcgtgcggtggctgcgacgcgcgctccgtgtaacattgaataatctgtacagttttgttccatgggattagtgccgtgaccgtgccgacctgaaaaaaaaaaaaaaaaaaaaaaaaaaaaaaaaatgtttaaacacaataaagttggaacgggagggggg

SEQ ID NO: 67102 - protein, 412 aa, Triticum aestivum
  peptide (1)..(412): Ceres Seq. ID no. 13659641
  misc_feature (111)..(155): Pfam Name: B-box zinc finger Pfam Description: B-box zinc finger
  misc_feature (111)..(266): Homolog of NCBI NO: 4091804 NR Description: CONSTANS-like protein 1 [Malus x domestica]
  misc_feature (291)..(412): Homolog of NCBI NO: 18424009 NR Description: CONSTANS B-box zinc finger family protein
  misc_feature (106)..(271): Homolog of NCBI NO: 18424009 NR Description: CONSTANS B-box zinc finger family protein
  misc_feature (291)..(412): Homolog of NCBI NO: 21594050 NR Description: CONSTANS-like B-box zinc finger protein-like
  misc_feature (106)..(271): Homolog of NCBI NO: 21594050 NR Description: CONSTANS-like B-box zinc finger protein-like
  misc_feature (284)..(388): Homolog of NCBI NO: 4091806 NR Description: CONSTANS-like protein 2 [Malus x domestica]
  misc_feature (111)..(266): Homolog of NCBI NO: 4091806 NR Description: CONSTANS-like protein 2 [Malus x domestica]
  misc_feature (93)..(408): Homolog of NCBI NO: 21667485 NR Description: CONSTANS-like protein [Hordeum vulgare subsp.
  misc_feature (105)..(412): Homolog of NCBI NO: 38345390 NR Description: OSJNBa0067K08.19 [Oryza sativa (japonica
  misc_feature (93)..(412): Homolog of NCBI NO: 21655154 NR Description: CONSTANS-like protein CO5 [Hordeum vulgare subsp.
FLTRLSQVWQTNRPRGPAPARQRPGARSVSRSPTAPERSPRPYHVLSLPADPSKPTRARTQAPSTQQKETHQIFIPCPQQCRPERRRSAASEMKVEEQTVVGGGGGGLWGLAGRPCDTCAVDAARLYCRSDGAYLCAGCDARAHGAGSRHARVWLCEVCEHAPAAVTCRADAAALCATCDADIHSANPLASRHERLPVTPFFGALADPPQPAPSPSSAAATQEDADDDGSNEAEAASWLLPEPGDSPEDSTATFFPDSDAYLDLDFVRSMDGIKAIGVPVAPSELDVAGGALFYPEHSMNHSMSTSEVAVVPDALSAGGAPAPAPSVAVVASKGKEREARLMRYREKRKNRRFQKTIRYASRKAYAETRPRIKGRFAKRTAEDDALERDGPFSPASSAHLASDGDYGVVPSF

SEQ ID NO: 67103 - protein, 320 aa, Triticum aestivum
  peptide (1)..(320): Ceres Seq. ID no. 13659642
  misc_feature (19)..(63): Pfam Name: B-box zinc finger Pfam Description: B-box zinc finger
  misc_feature (19)..(174): Homolog of NCBI NO: 4091804 NR Description: CONSTANS-like protein 1 [Malus x domestica]
  misc_feature (199)..(320): Homolog of NCBI NO: 18424009 NR Description: CONSTANS B-box zinc finger family protein
  misc_feature (14)..(179): Homolog of NCBI NO: 18424009 NR Description: CONSTANS B-box zinc finger family protein
  misc_feature (199)..(320): Homolog of NCBI NO: 21594050 NR Description: CONSTANS-like B-box zinc finger protein-like
  misc_feature (14)..(179): Homolog of NCBI NO: 21594050 NR Description: CONSTANS-like B-box zinc finger protein-like
  misc_feature (192)..(296): Homolog of NCBI NO: 4091806 NR Description: CONSTANS-like protein 2 [Malus x domestica]
  misc_feature (19)..(174): Homolog of NCBI NO: 4091806 NR Description: CONSTANS-like protein 2 [Malus x domestica]
  misc_feature (1)..(316): Homolog of NCBI NO: 21667485 NR Description: CONSTANS-like protein [Hordeum vulgare subsp.
  misc_feature (13)..(320): Homolog of NCBI NO: 38345390 NR Description: OSJNBa0067K08.19 [Oryza sativa (japonica
  misc_feature (1)..(320): Homolog of NCBI NO: 21655154 NR Description: CONSTANS-like protein CO5 [Hordeum vulgare subsp.
MKVEEQTVVGGGGGGLWGLAGRPCDTCAVDAARLYCRSDGAYLCAGCDARAHGAGSRHARVWLCEVCEHAPAAVTCRADAAALCATCDADIHSANPLASRHERLPVTPFFGALADPPQPAPSPSSAAATQEDADDDGSNEAEAASWLLPEPGDSPEDSTATFFPDSDAYLDLDFVRSMDGIKAIGVPVAPSELDVAGGALFYPEHSMNHSMSTSEVAVVPDALSAGGAPAPAPSVAVVASKGKEREARLMRYREKRKNRRFQKTIRYASRKAYAETRPRIKGRFAKRTAEDDALERDGPFSPASSAHLASDGDYGVVPSF

SEQ ID NO: 67104 - DNA, 815 bp, Triticum aestivum
  misc_feature (1)..(815): Ceres Seq. ID no. 12626708
agatcgagtcgctcgctcccttttccgaataggaaaagagtgagagaaaggagagaactccatggcagccgagggttccagcggcgtcggcgtcggcggccggaaaacatcgttgtctcataacccaagagagcgcggagtggcgaaattcctcaccggcttgccagcgcgaggaaacttctcctcaagttccatctcttccaatctgggaggcctcagggtttatgtctgcgagcacgacacaaatcctccagagggacaagtgatcgagacggatacgacaaatatcttaatcagacatctgcaactaaagaagaaagagagtgaggccaaagacgcaggttctaggactccaggggaaagtggcaagggtaaaagatgtgctgccagaagtttgggtgtgcagaagtcatcaaaaaagcccaacttgggcagttcttccggattgtcttcctctgatgaagcaatatctggcttttcacagcacacactgcagtccttcaccgtagagaggttgcgtgcacttctccgacaaagtggcctcacaaccaaggggaaaaaggacgaactgatcactcgcttaagagaggcgcagagttgatttcaatctcaagtttctgccttgtttgtgattgatcaattgcctactggcactgtaaaacgttgctgagctgaatgaatcatcaggctttacttgttgacattttgtaggtgtatgacttaaggtgatgtagtgatttactcgggctcaggctatcatgaatttgaagacttgtagcgaactttcactatatgcttgtcagaattcttgtttc

SEQ ID NO: 67105 - protein, 179 aa, Triticum aestivum
  peptide (1)..(179): Ceres Seq. ID no. 12626709
  misc_feature (24)..(167): Homolog of NCBI NO: 15242782 NR Description: unknown protein; protein id: At5g63460.1
MAAEGSSGVGVGGRKTSLSHNPRERGVAKFLTGLPARGNFSSSSISSNLGGLRVYVCEHDTNPPEGQVIETDTTNILIRHLQLKKKESEAKDAGSRTPGESGKGKRCAARSLGVQKSSKKPNLGSSSGLSSSDEAISGFSQHTLQSFTVERLRALLRQSGLTTKGKKDELITRLREAQS

SEQ ID NO: 67106 - DNA, 1264 bp, Triticum aestivum
  misc_feature (1)..(1264): Ceres Seq. ID no. 13659643
actwkawyrtsyttaatcgaaaagaaacccttttagctcctggcctcttcccggcccatggccatcgattcgctgatacgacgctcgcggacagcagccaccgctcgaatctccgcgccggctccggccacggaagtgttctcccccaccatcaccatggctcaggctccaggccgcgccgcctcctccatgcggctcttcgacgcgcactgccacctgcaggacccccgcatcgcggcggccgcccccgccctcatacgcgccgccacagcctccggcgtcggccggttcgcggtcaacggcacctccgagaaagactggcacctggtgaagcagatggcccaggagcacccggctgtcatcccctgcttcggcctccacccatggtgggtgccggagaggtcgcctgattggatggattcgctccggcagttcttctcggagaccccagaggcggctgttggagagactggtctcgacaagggatcgcatggaaaaactattgacttcagagaacaggttgaagtattccaacgacaacttgaacttgctaaggaattggagaaacctgtttctgttcattgtgtacgtgccttcggcgatcttctggaaatactaaagcgtactgggcctttcccagcaggtgtgctgttgcattcttatctggggtctgcagaaatggtgcccggccttgcaaatttaggttgttacttttcgttgtctggtttccttacaggcatgaaatctactaaggcaaagaaaatgctcaaagcaatacccttggacaggattctgttagagacagatgcaccagatgcagtaccaaagttggacaatgtttctctagttacagtccctgtggacatttcaaatgcagatattgaaaaattccacggcgattctacctcttcaaaagaatccttgaatcatccagctaacatccacattgttttgaagtatgtggcatcactgcttgaaatgccggaagcagaactcgccgaggcgagctacaggaacgccaccaaactgttctcctaccctggatccaaagttcatcccgaagctgaaactgtgtgaatggggtggtgcggatggccatccaatacgaaccatgctcatcggaatcctggtgcgttctgcctctggatgtttgcctgtataccgcatgtatattgttgtactagtatatataatcggcctaagacaaagtaacaatcagagaagaaataataaagcggttcatggctggccgtgccatgttgcc

SEQ ID NO: 67107 - protein, 339 aa, Triticum aestivum
  peptide (1)..(339): Ceres Seq. ID no. 15219975
  misc_feature (45)..(327): Pfam Name: TatD related DNase Pfam Description: TatD related DNase
  misc_feature (290)..(328): Homolog of NCBI NO: 27262182 NR Description: Sec-independent protein TatD [Heliobacillus
  misc_feature (45)..(256): Homolog of NCBI NO: 27262182 NR Description: Sec-independent protein TatD [Heliobacillus
  misc_feature (47)..(253): Homolog of NCBI NO: 23028677 NR Description: hypothetical protein [Microbulbifer degradans
  misc_feature (43)..(257): Homolog of NCBI NO: 23055931 NR Description: hypothetical protein [Geobacter metallireducens]
  misc_feature (45)..(257): Homolog of NCBI NO: 15677535 NR Description: conserved hypothetical protein [Neisseria
  misc_feature (45)..(257): Homolog of NCBI NO: 15794829 NR Description: conserved hypothetical protein [Neisseria
  misc_feature (45)..(262): Homolog of NCBI NO: 15228573 NR Description: hypothetical protein [Arabidopsis thaliana]
  misc_feature (45)..(332): Homolog of NCBI NO: 11357936 NR Description: hypothetical protein K10A8_50 - Arabidopsis
  misc_feature (45)..(332): Homolog of NCBI NO: 18418353 NR Description: expressed protein [Arabidopsis thaliana]
  misc_feature (34)..(339): Homolog of NCBI NO: 38345538 NR Description: OSJNBa0020J04.13 [Oryza sativa (japonica
MAIDSLIRRSRTAATARISAPAPATEVFSPTITMAQAPGRAASSMRLFDAHCHLQDPRIAAAAPALIRAATASGVGRFAVNGTSEKDWHLVKQMAQEHPAVIPCFGLHPWWVPERSPDWMDSLRQFFSETPEAAVGETGLDKGSHGKTIDFREQVEVFQRQLELAKELEKPVSVHCVRAFGDLLEILKRTGPFPAGVLLHSYLGSAEMVPGLANLGCYFSLSGFLTGMKSTKAKKMLKAIPLDRILLETDAPDAVPKLDNVSLVTVPVDISNADIEKFHGDSTSSKESLNHPANIHIVLKYVASLLEMPEAELAEASYRNATKLFSYPGSKVHPEAETV

SEQ ID NO: 67108 - protein, 306 aa, Triticum aestivum
  peptide (1)..(306): Ceres Seq. ID no. 15219976
  misc_feature (12)..(294): Pfam Name: TatD related DNase Pfam Description: TatD related DNase
  misc_feature (257)..(295): Homolog of NCBI NO: 27262182 NR Description: Sec-independent protein TatD [Heliobacillus
  misc_feature (12)..(223): Homolog of NCBI NO: 27262182 NR Description: Sec-independent protein TatD [Heliobacillus
  misc_feature (14)..(220): Homolog of NCBI NO: 23028677 NR Description: hypothetical protein [Microbulbifer degradans
  misc_feature (10)..(224): Homolog of NCBI NO: 23055931 NR Description: hypothetical protein [Geobacter metallireducens]
  misc_feature (12)..(224): Homolog of NCBI NO: 15677535 NR Description: conserved hypothetical protein [Neisseria
  misc_feature (12)..(224): Homolog of NCBI NO: 15794829 NR Description: conserved hypothetical protein [Neisseria
  misc_feature (12)..(229): Homolog of NCBI NO: 15228573 NR Description: hypothetical protein [Arabidopsis thaliana]
  misc_feature (12)..(299): Homolog of NCBI NO: 11357936 NR Description: hypothetical protein K10A8_50 - Arabidopsis
  misc_feature (12)..(299): Homolog of NCBI NO: 18418353 NR Description: expressed protein [Arabidopsis thaliana]
  misc_feature (1)..(306): Homolog of NCBI NO: 38345538 NR Description: OSJNBa0020J04.13 [Oryza sativa (japonica
MAQAPGRAASSMRLFDAHCHLQDPRIAAAAPALIRAATASGVGRFAVNGTSEKDWHLVKQMAQEHPAVIPCFGLHPWWVPERSPDWMDSLRQFFSETPEAAVGETGLDKGSHGKTIDFREQVEVFQRQLELAKELEKPVSVHCVRAFGDLLEILKRTGPFPAGVLLHSYLGSAEMVPGLANLGCYFSLSGFLTGMKSTKAKKMLKAIPLDRILLETDAPDAVPKLDNVSLVTVPVDISNADIEKFHGDSTSSKESLNHPANIHIVLKYVASLLEMPEAELAEASYRNATKLFSYPGSKVHPEAETV

SEQ ID NO: 67109 - protein, 295 aa, Triticum aestivum
  peptide (1)..(295): Ceres Seq. ID no. 15219977
  misc_feature (1)..(283): Pfam Name: TatD related DNase Pfam Description: TatD related DNase
  misc_feature (246)..(284): Homolog of NCBI NO: 27262182 NR Description: Sec-independent protein TatD [Heliobacillus
  misc_feature (1)..(212): Homolog of NCBI NO: 27262182 NR Description: Sec-independent protein TatD [Heliobacillus
  misc_feature (3)..(209): Homolog of NCBI NO: 23028677 NR Description: hypothetical protein [Microbulbifer degradans
  misc_feature (1)..(213): Homolog of NCBI NO: 23055931 NR Description: hypothetical protein [Geobacter metallireducens]
  misc_feature (1)..(213): Homolog of NCBI NO: 15677535 NR Description: conserved hypothetical protein [Neisseria
  misc_feature (1)..(213): Homolog of NCBI NO: 15794829 NR Description: conserved hypothetical protein [Neisseria
  misc_feature (1)..(218): Homolog of NCBI NO: 15228573 NR Description: hypothetical protein [Arabidopsis thaliana]
  misc_feature (1)..(288): Homolog of NCBI NO: 11357936 NR Description: hypothetical protein K10A8_50 - Arabidopsis
  misc_feature (1)..(288): Homolog of NCBI NO: 18418353 NR Description: expressed protein [Arabidopsis thaliana]
  misc_feature (1)..(295): Homolog of NCBI NO: 38345538 NR Description: OSJNBa0020J04.13 [Oryza sativa (japonica
MRLFDAHCHLQDPRIAAAAPALIRAATASGVGRFAVNGTSEKDWHLVKQMAQEHPAVIPCFGLHPWWVPERSPDWMDSLRQFFSETPEAAVGETGLDKGSHGKTIDFREQVEVFQRQLELAKELEKPVSVHCVRAFGDLLEILKRTGPFPAGVLLHSYLGSAEMVPGLANLGCYFSLSGFLTGMKSTKAKKMLKAIPLDRILLETDAPDAVPKLDNVSLVTVPVDISNADIEKFHGDSTSSKESLNHPANIHIVLKYVASLLEMPEAELAEASYRNATKLFSYPGSKVHPEAETV

SEQ ID NO: 67110 - DNA, 1601 bp, Triticum aestivum
  misc_feature (1)..(1601): Ceres Seq. ID no. 14303043
tttttttcttgtaaatttccgaatggaaaactagtttttcttcccaaaaaacccacgaacacgagggttttgcccccgtcgacccacggtcgccattggccactctgctccgccgctccatgctcctccctagcctcctccgcggcgcccacctgctgcggccgtgccaccctcctcgccgccacctctcccgcctcctagaccgctacggcttcgtgccgccggcctccctgacccccaccgcgaaagagatctcccacggcacaggcgccgccgccgaccagaagcgtcggaccaagaagcccccctaccggccgccctcttcgctggaccgcggagaccgcccggcctcccactccgacctccccttcgatttccgcttcagctacacggagagctccccggacgccaagcccatcgggctccgcgagcccaagtactcccctttcggccccggtcgcctcgaccgcccctggaccggcctctgcgcgcccgccgtcgacaccacgctccggagcgtcgacgccgaggaccccgcccccgccgccgagaaggacctggaggaggcccggcggcgcgagcgagagcgcgtgctcggcgagccgctcacccccgcggagcgctccttcttggtcgacaaatgccagaagaaccgcaccaagcggcagatcaatctcgggagagatgggctcactcataacatgctgaatgacattcacaaccactggaagcatggcgagggggtcagggtgaaatgccttggtgtgccgacggttgatatgcaaaatgtgtgccgtgagctcgaggataaaactggtggccttatcatccacaggcatggtggccagttaatactatacagagggaggcattatcatccaaagaaaagacctgttattccgttgatgttatggaagccagctgaaccgatctacccaaggctaattaaaacaacaatagaagggctgacagttcaggagacaaaggaaatgaggaagaagggcctacatgctcctgtcttgacaaagcttgcaaagaacgggtattatgctagtctcgtgtcgatggttcgagatggttttctggccgatgaattggttcgtatagattgtaaaggattgccaaagagtgattatcggaagattggagtcaagctcagggaccttgttccttgtattcttgtgtcttttgacaaggagcaaattattgtttggagggggaaagaccatgatgaaagcatacaggataatatgcacaaggcattcccttcagttcttcaattagagagtgcagcaggagagaatgaacaggaagaagcatcaagtgagagtgtagcaggagagaatgaacatggtgaaaaagaagaaacatcagttgactgttcttctgatgagtggtctgagatcagtagctctgacgatgtgccagatgataagtaggacatttccagggtagaatatctttagatcgatctgacatatccagaggactcaatctgccaccaggtgttcacaaagttggcatgtcatccaacaccaccaacttgtccattcttaccagtgatgattatgttctatcactagtcgcaaccaaatccagtt

SEQ ID NO: 67111 - protein, 439 aa, Triticum aestivum
  peptide (1)..(439): Ceres Seq. ID no. 14303044
  misc_feature (163)..(248): Pfam Name: CRS1 / YhbY domain Pfam Description: CRS1 / YhbY domain
  misc_feature (73)..(403): Homolog of NCBI NO: 22329751 NR Description: expressed protein [Arabidopsis thaliana]
  misc_feature (66)..(439): Homolog of NCBI NO: 30349367 NR Description: CRS2-associated factor 1 [Zea mays]
  misc_feature (83)..(401): Homolog of NCBI NO: 18399222 NR Description: expressed protein [Arabidopsis thaliana]
  misc_feature (83)..(121): Homolog of NCBI NO: 30349369 NR Description: CRS2-associated factor 2 [Zea mays]
  misc_feature (153)..(369): Homolog of NCBI NO: 30349369 NR Description: CRS2-associated factor 2 [Zea mays]
  misc_feature (80)..(368): Homolog of NCBI NO: 15240416 NR Description: expressed protein [Arabidopsis thaliana]
  misc_feature (1)..(288): Homolog of NCBI NO: 14596153 NR Description: Unknown protein [Arabidopsis thaliana]
  misc_feature (1)..(356): Homolog of NCBI NO: 25407702 NR Description: hypothetical protein AT4g31010 [imported] -
  misc_feature (1)..(382): Homolog of NCBI NO: 22329043 NR Description: expressed protein [Arabidopsis thaliana]
  misc_feature (1)..(439): Homolog of NCBI NO: 40253285 NR Description: putative CRS2-associated factor 1
MLLPSLLRGAHLLRPCHPPRRHLSRLLDRYGFVPPASLTPTAKEISHGTGAAADQKRRTKKPPYRPPSSLDRGDRPASHSDLPFDFRFSYTESSPDAKPIGLREPKYSPFGPGRLDRPWTGLCAPAVDTTLRSVDAEDPAPAAEKDLEEARRRERERVLGEPLTPAERSFLVDKCQKNRTKRQINLGRDGLTHNMLNDIHNHWKHGEGVRVKCLGVPTVDMQNVCRELEDKTGGLIIHRHGGQLILYRGRHYHPKKRPVIPLMLWKPAEPIYPRLIKTTIEGLTVQETKEMRKKGLHAPVLTKLAKNGYYASLVSMVRDGFLADELVRIDCKGLPKSDYRKIGVKLRDLVPCILVSFDKEQIIVWRGKDHDESIQDNMHKAFPSVLQLESAAGENEQEEASSESVAGENEHGEKEETSVDCSSDEWSEISSSDDVPDDK

SEQ ID NO: 67112 - protein, 245 aa, Triticum aestivum
  peptide (1)..(245): Ceres Seq. ID no. 14303045
  misc_feature (1)..(54): Pfam Name: CRS1 / YhbY domain Pfam Description: CRS1 / YhbY domain
  misc_feature (1)..(113): Homolog of NCBI NO: 34905354 NR Description: OJ1126_G08.1 [Oryza sativa (japonica
  misc_feature (1)..(209): Homolog of NCBI NO: 22329751 NR Description: expressed protein [Arabidopsis thaliana]
  misc_feature (1)..(245): Homolog of NCBI NO: 30349367 NR Description: CRS2-associated factor 1 [Zea mays]
  misc_feature (1)..(207): Homolog of NCBI NO: 18399222 NR Description: expressed protein [Arabidopsis thaliana]
  misc_feature (1)..(175): Homolog of NCBI NO: 30349369 NR Description: CRS2-associated factor 2 [Zea mays]
  misc_feature (1)..(174): Homolog of NCBI NO: 15240416 NR Description: expressed protein [Arabidopsis thaliana]
  misc_feature (1)..(94): Homolog of NCBI NO: 14596153 NR Description: Unknown protein [Arabidopsis thaliana]
  misc_feature (1)..(162): Homolog of NCBI NO: 25407702 NR Description: hypothetical protein AT4g31010 [imported] -
  misc_feature (1)..(188): Homolog of NCBI NO: 22329043 NR Description: expressed protein [Arabidopsis thaliana]
  misc_feature (1)..(245): Homolog of NCBI NO: 40253285 NR Description: putative CRS2-associated factor 1
MLNDIHNHWKHGEGVRVKCLGVPTVDMQNVCRELEDKTGGLIIHRHGGQLILYRGRHYHPKKRPVIPLMLWKPAEPIYPRLIKTTIEGLTVQETKEMRKKGLHAPVLTKLAKNGYYASLVSMVRDGFLADELVRIDCKGLPKSDYRKIGVKLRDLVPCILVSFDKEQIIVWRGKDHDESIQDNMHKAFPSVLQLESAAGENEQEEASSESVAGENEHGEKEETSVDCSSDEWSEISSSDDVPDDK

SEQ ID NO: 67113 - protein, 219 aa, Triticum aestivum
  peptide (1)..(219): Ceres Seq. ID no. 14303046
  misc_feature (1)..(87): Homolog of NCBI NO: 34905354 NR Description: OJ1126_G08.1 [Oryza sativa (japonica
  misc_feature (1)..(183): Homolog of NCBI NO: 22329751 NR Description: expressed protein [Arabidopsis thaliana]
  misc_feature (1)..(219): Homolog of NCBI NO: 30349367 NR Description: CRS2-associated factor 1 [Zea mays]
  misc_feature (1)..(181): Homolog of NCBI NO: 18399222 NR Description: expressed protein [Arabidopsis thaliana]
  misc_feature (1)..(149): Homolog of NCBI NO: 30349369 NR Description: CRS2-associated factor 2 [Zea mays]
  misc_feature (1)..(148): Homolog of NCBI NO: 15240416 NR Description: expressed protein [Arabidopsis thaliana]
  misc_feature (1)..(68): Homolog of NCBI NO: 14596153 NR Description: Unknown protein [Arabidopsis thaliana]
  misc_feature (1)..(136): Homolog of NCBI NO: 25407702 NR Description: hypothetical protein AT4g31010 [imported] -
  misc_feature (1)..(162): Homolog of NCBI NO: 22329043 NR Description: expressed protein [Arabidopsis thaliana]
  misc_feature (1)..(219): Homolog of NCBI NO: 40253285 NR Description: putative CRS2-associated factor 1
MQNVCRELEDKTGGLIIHRHGGQLILYRGRHYHPKKRPVIPLMLWKPAEPIYPRLIKTTIEGLTVQETKEMRKKGLHAPVLTKLAKNGYYASLVSMVRDGFLADELVRIDCKGLPKSDYRKIGVKLRDLVPCILVSFDKEQIIVWRGKDHDESIQDNMHKAFPSVLQLESAAGENEQEEASSESVAGENEHGEKEETSVDCSSDEWSEISSSDDVPDDK

SEQ ID NO: 67114 - DNA, 1482 bp, Triticum aestivum
  misc_feature (1)..(1482): Ceres Seq. ID no. 14303071
gttgatgctcgacacctttgtatcttgtgtttggtgtgtgctgtgtgcgatggtagtgtgtgtttgttcggctttcggttgtaatcgatggttgtaatcggtgatggttactttataatactccagcctgtggacaacaacgcttgcttgctctgattttgatgtgataaatttgagccagcctagagctgcgggagctgctccccgctgaatcctaggccgctgcgaggtgtcgtcaggccatggccaccaagatgcgcaagctgccgagcgccgttttgctgctcctcttggtcgcgaacctgggatgggcatgggcgctgatcccttcctcccccgcaggcctctccgccaggcgctacgactccatcttcagcttcggcgactcctacgccgaaaccggcaacaaccccgtcgtcttcgccgccaactccgtcttcaaccttgtcacgcgcccaccctacggctccaccttcttcggccgccccaccggccgcaactccgacggccgcctcatcatcgacttcatcgctcagcgcctcggcctgccgctcgtcccgccgtccctggcgcacaacgggagcttccgccaaggcgccaacttcgccgtcgggggcgccaccgctctggacgccgctttcttccacgacgggtccgatcccggcaacaagttccctctcaacaccagcttgggcgtccagctgcagtggttcgaggctctcaagccttccctctgccgcacgacccaagagtgcgaggccttcttcggcagatccctcttcttcgtgggcgaattcggggtcaacgactaccacttctccttccccaccaagagcctgcaagagatcacggcgttcgttccggaagtgatcagggccatctcaatggcaatcgagaggctgatcaagcacggggccacgagtttcgtcgttcccgggacaatcccgtcgggatgcacgccgcacattctcagctccttcgccaaagacgaccccgcggaatacaactccaccaccgactgcctggaagattacaacaagctagggatgcaccacaacctgctgctgcaggaggccctggagaagcttcggggcaggcacccggacgccatgatcgtctacgccgacctcttcggccccatcattgacatggttgagtcacctcgcaagtatgggtttgaagatgttcttaccaactgttgcggagggcctggggcacttatctgcggcgaccaaggtgcacatgtatgtgagaaaccggctgctcgtctgttctgggatgtcgcgcacttgacggaggcggcttaccgctacatcgccgatggctggctgggcagcatagactcccctgcaactgcaagagagagcaggtatcagttagtgaggtagcagaagctgccctgattcatggactgatagctatctgaagtctggcctgtctgaactgaaaaacactggaattgaaatggaagcatgcaagttt

SEQ ID NO: 67115 - protein, 381 aa, Triticum aestivum
  peptide (1)..(381): Ceres Seq. ID no. 14303072
  misc_feature (43)..(362): Pfam Name: GDSL-like Lipase/Acylhydrolase Pfam Description: GDSL-like Lipase/Acylhydrolase
  misc_feature (1)..(324): Homolog of NCBI NO: 33147015 NR Description: putative early nodulin 8 precursor
  misc_feature (40)..(324): Homolog of NCBI NO: 15234074 NR Description: acetylesterase, putative [Arabidopsis thaliana]
  misc_feature (10)..(381): Homolog of NCBI NO: 15232872 NR Description: early nodule-specific protein, putative
  misc_feature (120)..(359): Homolog of NCBI NO: 15237586 NR Description: GDSL-motif lipase/hydrolase protein [Arabidopsis
  misc_feature (40)..(378): Homolog of NCBI NO: 18390045 NR Description: Enod8.1 [Medicago truncatula]
  misc_feature (275)..(315): Homolog of NCBI NO: 34912612 NR Description: P0046B10.23 [Oryza sativa (japonica
  misc_feature (40)..(222): Homolog of NCBI NO: 34912612 NR Description: P0046B10.23 [Oryza sativa (japonica
  misc_feature (5)..(363): Homolog of NCBI NO: 34903994 NR Description: unnamed protein product [Oryza sativa (japonica
  misc_feature (27)..(367): Homolog of NCBI NO: 34903962 NR Description: OSJNBa0038J17.26 [Oryza sativa (japonica
  misc_feature (8)..(372): Homolog of NCBI NO: 34904124 NR Description: unnamed protein product [Oryza sativa (japonica
MATKMRKLPSAVLLLLLVANLGWAWALIPSSPAGLSARRYDSIFSFGDSYAETGNNPVVFAANSVFNLVTRPPYGSTFFGRPTGRNSDGRLIIDFIAQRLGLPLVPPSLAHNGSFRQGANFAVGGATALDAAFFHDGSDPGNKFPLNTSLGVQLQWFEALKPSLCRTTQECEAFFGRSLFFVGEFGVNDYHFSFPTKSLQEITAFVPEVIRAISMAIERLIKHGATSFVVPGTIPSGCTPHILSSFAKDDPAEYNSTTDCLEDYNKLGMHHNLLLQEALEKLRGRHPDAMIVYADLFGPIIDMVESPRKYGFEDVLTNCCGGPGALICGDQGAHVCEKPAARLFWDVAHLTEAAYRYIADGWLGSIDSPATARESRYQLVR

SEQ ID NO: 67116 - protein, 377 aa, Triticum aestivum
  peptide (1)..(377): Ceres Seq. ID no. 14303073
  misc_feature (39)..(358): Pfam Name: GDSL-like Lipase/Acylhydrolase Pfam Description: GDSL-like Lipase/Acylhydrolase
  misc_feature (1)..(320): Homolog of NCBI NO: 33147015 NR Description: putative early nodulin 8 precursor
  misc_feature (36)..(320): Homolog of NCBI NO: 15234074 NR Description: acetylesterase, putative [Arabidopsis thaliana]
  misc_feature (6)..(377): Homolog of NCBI NO: 15232872 NR Description: early nodule-specific protein, putative
  misc_feature (116)..(355): Homolog of NCBI NO: 15237586 NR Description: GDSL-motif lipase/hydrolase protein [Arabidopsis
  misc_feature (36)..(374): Homolog of NCBI NO: 18390045 NR Description: Enod8.1 [Medicago truncatula]
  misc_feature (271)..(311): Homolog of NCBI NO: 34912612 NR Description: P0046B10.23 [Oryza sativa (japonica
  misc_feature (36)..(218): Homolog of NCBI NO: 34912612 NR Description: P0046B10.23 [Oryza sativa (japonica
  misc_feature (1)..(359): Homolog of NCBI NO: 34903994 NR Description: unnamed protein product [Oryza sativa (japonica
  misc_feature (23)..(363): Homolog of NCBI NO: 34903962 NR Description: OSJNBa0038J17.26 [Oryza sativa (japonica
  misc_feature (4)..(368): Homolog of NCBI NO: 34904124 NR Description: unnamed protein product [Oryza sativa (japonica
MRKLPSAVLLLLLVANLGWAWALIPSSPAGLSARRYDSIFSFGDSYAETGNNPVVFAANSVFNLVTRPPYGSTFFGRPTGRNSDGRLIIDFIAQRLGLPLVPPSLAHNGSFRQGANFAVGGATALDAAFFHDGSDPGNKFPLNTSLGVQLQWFEALKPSLCRTTQECEAFFGRSLFFVGEFGVNDYHFSFPTKSLQEITAFVPEVIRAISMAIERLIKHGATSFVVPGTIPSGCTPHILSSFAKDDPAEYNSTTDCLEDYNKLGMHHNLLLQEALEKLRGRHPDAMIVYADLFGPIIDMVESPRKYGFEDVLTNCCGGPGALICGDQGAHVCEKPAARLFWDVAHLTEAAYRYIADGWLGSIDSPATARESRYQLVR

SEQ ID NO: 67117 - protein, 279 aa, Triticum aestivum
  peptide (1)..(279): Ceres Seq. ID no. 14303074
MGMGADPFLPRRPLRQALRLHLQLRRLLRRNRQQPRRLRRQLRLQPCHAPTLRLHLLRPPHRPQLRRPPHHRLHRSAPRPAARPAVPGAQRELPPRRQLRRRGRHRSGRRFLPRRVRSRQQVPSQHQLGRPAAVVRGSQAFPLPHDPRVRGLLRQIPLLRGRIRGQRLPLLLPHQEPARDHGVRSGSDQGHLNGNREADQARGHEFRRSRDNPVGMHAAHSQLLRQRRPRGIQLHHRLPGRLQQARDAPQPAAAGGPGEASGQAPGRHDRLRRPLRPHH

SEQ ID NO: 67118 - DNA, 1561 bp, Triticum aestivum
  misc_feature (1)..(1561): Ceres Seq. ID no. 13659644
cacgggtccgctacggataaacggtcgctactcgctagtcgtccggtgaagccgcgcaagcagctgccgccgggataaaccgtttgttggccaggtccctctatccggtttcacccctcaaattatatcgcccaagcagccgcgccgccgggcaaaaatgctctcgctgcgggcgccgccccgtactctgtcgccctcgccgtggcggagacggggccgcctcgacggtttcgccgcgccgcgttgtgtcagcgccgcgccacctgcgacaaccctagagacggctaccgcgcggccggcaggcgtctccttcccgattctggtgaatggctgcactggtaaaatgggggtatctgttgctgaggcagctacttcaaggggtcttcacctagttcctgtttcattcagtagtagagagaaccttgacaaaacaatacaaattggtgatatagatgttgagatatatggcccttctgcaagagaagatgttctttcatctgtcatcgacgaattcccagatgtcattgtggtggactacacggcgcctaattctgtgaactctaatgccgagctctattgcaagcttggtgtgccatttgtaatgggcacaactggtggcgatcagcagttactgtacaaatcagtgcaagattcaaataactacgcactaatatctccacaaatgggcaaacaggttgttgcatttcttgctgcaatggaaacaattgcggagcagtttcctggggccttttcaggctatcgtttggaggtactggaatcccatcaagcaggaaagctggacacatctggtacagctaaagctgtaattgcttgtttcgagaagttaggcgcggtctttgacatggaccggatggttaagatcagggatcctgagcaacagctttatatggtgggtgtccccgaagaacacattgaagggcatgcattccatctgtaccatctaacttctcccgatgacagcgtttcatttgagttccagcacaatgtttgtggccgttcaatctacgccgaagggtcagttgatgctgccgtatttctgtataagaaggtacaatcaatggatcctaagagaatttacaacatgattgatgtcttgcaagaaggcgatatgcggtgaagttaattgattacctcttaatggatctgagtgaaattttgaaacaaatcttcccatatcttgcggaaacacaggggattgggagggggtagtatttagtgagtagtgtggactgtggagtactagagttgatatatgtactgaactgcgaatagtttagtccagaaccttaaactgtacgaacagaagtggggcaggacgtcaatattgttcatgtgggtggtagcctggttggtactctgctccgttccataatgtaagacgttttttgaaactagtgtcaaaaaacgtgactaatgtagtgtcaaaaacatcttacaataactgttaagcaagtttttctgggcatcccgctcattcatctaaaaaaaaaaaaaaaaagctkatcgcagtaccgtcgacctygagggggggmycggtgat

SEQ ID NO: 67119 - protein, 326 aa, Triticum aestivum
  peptide (1)..(326): Ceres Seq. ID no. 15219978
  misc_feature (179)..(321): Pfam Name: Dihydrodipicolinate reductase, C-terminus Pfam Description: Dihydrodipicolinate reductase, C-terminus
  misc_feature (99)..(220): Homolog of NCBI NO: 282117 NR Description: dipicolinate reductase homolog - Coxiella
  misc_feature (50)..(320): Homolog of NCBI NO: 15668598 NR Description: dihydrodipicolinate reductase (dapB)
  misc_feature (54)..(320): Homolog of NCBI NO: 7531267 NR Description: DIHYDRODIPICOLINATE REDUCTASE (DHPR)
  misc_feature (49)..(305): Homolog of NCBI NO: 7486478 NR Description: hypothetical protein At2g44040 [imported] -
  misc_feature (28)..(304): Homolog of NCBI NO: 11357603 NR Description: hypothetical protein F24G16.160 - Arabidopsis
  misc_feature (49)..(326): Homolog of NCBI NO: 18406430 NR Description: expressed protein [Arabidopsis thaliana]
  misc_feature (28)..(326): Homolog of NCBI NO: 18411368 NR Description: expressed protein [Arabidopsis thaliana]
MLSLRAPPRTLSPSPWRRRGRLDGFAAPRCVSAAPPATTLETATARPAGVSFPILVNGCTGKMGVSVAEAATSRGLHLVPVSFSSRENLDKTIQIGDIDVEIYGPSAREDVLSSVIDEFPDVIVVDYTAPNSVNSNAELYCKLGVPFVMGTTGGDQQLLYKSVQDSNNYALISPQMGKQVVAFLAAMETIAEQFPGAFSGYRLEVLESHQAGKLDTSGTAKAVIACFEKLGAVFDMDRMVKIRDPEQQLYMVGVPEEHIEGHAFHLYHLTSPDDSVSFEFQHNVCGRSIYAEGSVDAAVFLYKKVQSMDPKRIYNMIDVLQEGDMR

SEQ ID NO: 67120 - protein, 264 aa, Triticum aestivum
  peptide (1)..(264): Ceres Seq. ID no. 15219979
  misc_feature (117)..(259): Pfam Name: Dihydrodipicolinate reductase, C-terminus Pfam Description: Dihydrodipicolinate reductase, C-terminus
  misc_feature (37)..(158): Homolog of NCBI NO: 282117 NR Description: dipicolinate reductase homolog - Coxiella
  misc_feature (1)..(258): Homolog of NCBI NO: 15668598 NR Description: dihydrodipicolinate reductase (dapB)
  misc_feature (1)..(258): Homolog of NCBI NO: 7531267 NR Description: DIHYDRODIPICOLINATE REDUCTASE (DHPR)
  misc_feature (1)..(243): Homolog of NCBI NO: 7486478 NR Description: hypothetical protein At2g44040 [imported] -
  misc_feature (1)..(242): Homolog of NCBI NO: 11357603 NR Description: hypothetical protein F24G16.160 - Arabidopsis
  misc_feature (1)..(264): Homolog of NCBI NO: 18406430 NR Description: expressed protein [Arabidopsis thaliana]
  misc_feature (1)..(264): Homolog of NCBI NO: 18411368 NR Description: expressed protein [Arabidopsis thaliana]
MGVSVAEAATSRGLHLVPVSFSSRENLDKTIQIGDIDVEIYGPSAREDVLSSVIDEFPDVIVVDYTAPNSVNSNAELYCKLGVPFVMGTTGGDQQLLYKSVQDSNNYALISPQMGKQVVAFLAAMETIAEQFPGAFSGYRLEVLESHQAGKLDTSGTAKAVIACFEKLGAVFDMDRMVKIRDPEQQLYMVGVPEEHIEGHAFHLYHLTSPDDSVSFEFQHNVCGRSIYAEGSVDAAVFLYKKVQSMDPKRIYNMIDVLQEGDMR

SEQ ID NO: 67121 - protein, 178 aa, Triticum aestivum
  peptide (1)..(178): Ceres Seq. ID no. 15219980
  misc_feature (31)..(173): Pfam Name: Dihydrodipicolinate reductase, C-terminus Pfam Description: Dihydrodipicolinate reductase, C-terminus
  misc_feature (1)..(72): Homolog of NCBI NO: 282117 NR Description: dipicolinate reductase homolog - Coxiella
  misc_feature (1)..(172): Homolog of NCBI NO: 15668598 NR Description: dihydrodipicolinate reductase (dapB)
  misc_feature (1)..(172): Homolog of NCBI NO: 7531267 NR Description: DIHYDRODIPICOLINATE REDUCTASE (DHPR)
  misc_feature (1)..(157): Homolog of NCBI NO: 7486478 NR Description: hypothetical protein At2g44040 [imported] -
  misc_feature (1)..(156): Homolog of NCBI NO: 11357603 NR Description: hypothetical protein F24G16.160 - Arabidopsis
  misc_feature (1)..(178): Homolog of NCBI NO: 18406430 NR Description: expressed protein [Arabidopsis thaliana]
  misc_feature (1)..(178): Homolog of NCBI NO: 18411368 NR Description: expressed protein [Arabidopsis thaliana]
MGTTGGDQQLLYKSVQDSNNYALISPQMGKQVVAFLAAMETIAEQFPGAFSGYRLEVLESHQAGKLDTSGTAKAVIACFEKLGAVFDMDRMVKIRDPEQQLYMVGVPEEHIEGHAFHLYHLTSPDDSVSFEFQHNVCGRSIYAEGSVDAAVFLYKKVQSMDPKRIYNMIDVLQEGDMR

SEQ ID NO: 67122 - DNA, 1961 bp, Triticum aestivum
  misc_feature (1)..(1961): Ceres Seq. ID no. 15170647
actctatactcaaccggattgcagcttctcatctcatctcatatatatacgcgccctcccaatctcttctccgagcgcgaaatctgacagagcagtgccagaccgttgttgagcagggagtggaaggggcaattcaattcgcaatggaatccctagccgccgccacgttctcgccctcgcgcctcgccgcccaccccgccccgcccgcggctgcggcggcgggcagatcgagggcggtggcggcacgagggaggaggaggagcagcagcggcctgaggtgctcgcctaccgctgcctcgtccccgaggacgacatggacacccccagcttcctcttcgagtccgtcgagcaggggctcgaggggaccaccaacgttggtcgttacagcatggtgggagcccacccggtgatggaggtggtggccaaggagaacaaggtcaccatcatggaccacgagaaggccgaggtgacggagaagatcatggatgatcctatgcaggttcccaggagcataatggagggatggcacccgcaggagatcgaccagctccctgaggccttcagcggtggatgggttgggttcttttcctatgatacagtccgctatgtcgaaaagaagaagatacctttctctggtgctccccacgacgataggaaccttcctgatgttcacttggggctttatgacgatgttcttgtctttgacaatgttgagaagaaagtttatgtcatccattgggtaagtgtggaccgacatgcatccactgaggaagcgtataaagatggcaggtcccggttgaagcggttgctttctaaagtttacaatgctaatgtccccaagctctctccaggatttgtgaagctacatactcggcagttcggtacacccttgaataaatcgaccatgacaagtgatgaatacaagagtgctgttatgcaggctaaggagcatattctggccggtaatattttccagattgttttaagccagcgttttgagaggcgaacttatgccactccatttgaggtttaccgtgctttacgaattgtcaacccaagcccgtacatggcttatgtgcaggcgagaggctgtatcctggtagcatctagtcctgaaattcttacaaaagttgagaagggaaaggttattaaccggccacttgctgggactacccgaaggggtaagacagagcatgaagataaattgcaagaggaacaactattgaatgatcaaaagcaatgtgctgaacacattatgcttgtagacttgggaaggaatgatgttggcagggtatccaaatctggatctgtgaaggtggagaagttgatgaacattgagcggtactcccatgttatgcacatcagctccacggttagtggagagttagatgatcatctcgaaagctgggatgcactacgagcagcattgcctgttggaacagtcagtggggcaccaaaggtaaaagccatggagctaatagatcagttggaagtcacaagacgaggaccatacagtggtggtttaggagggatatcatttgatggtgacatgcttattgctcttgctctccgcaccattgtattctcaacagctccaagccacaatacgatgtactcatacaaaagctcagataggcgccgagagtgggttgctcaccttcaggctggtgcgggcattgttgctgatagtatcccagacgatgagcaaaaagaatgtgagaataaggcggctgccctagctcgggcaattgatcttgcagagtcagcttttgtagacaaagaatagagtgcttattaaattatttttgttagttgttcatcatttttcatccagtttatgttggaaagttgttcatcatttcttcacccagtacatgttgggaagaaagaagcaataaccttctgctgtcctgtgaattgaataaatctggagctataataagatgtattttggttctcng

SEQ ID NO: 67123 - protein, 490 aa, Triticum aestivum
  peptide (1)..(490): Ceres Seq. ID no. 15170648
  misc_feature (199)..(479): Pfam Name: chorismate binding enzyme Pfam Description: chorismate binding enzyme
  misc_feature (1)..(489): Homolog of NCBI NO: 15239225 NR Description: anthranilate synthase, alpha subunit, component
  misc_feature (1)..(489): Homolog of NCBI NO: 320552 NR Description: anthranilate synthase (EC 4.1.3.27) alpha-1 chain
  misc_feature (1)..(488): Homolog of NCBI NO: 15227604 NR Description: anthranilate synthase, alpha subunit, component
  misc_feature (1)..(489): Homolog of NCBI NO: 5360657 NR Description: anthranilate synthase alpha 1 subunit
  misc_feature (1)..(489): Homolog of NCBI NO: 34897346 NR Description: anthranilate synthase alpha 1 subunit [Oryza
  misc_feature (1)..(489): Homolog of NCBI NO: 12830362 NR Description: anthranilate synthase alpha subunit [Catharanthus
  misc_feature (1)..(489): Homolog of NCBI NO: 960289 NR Description: anthranilate synthase alpha subunit
  misc_feature (1)..(489): Homolog of NCBI NO: 11268466 NR Description: anthranilate synthase (EC 4.1.3.27) alpha chain
  misc_feature (1)..(490): Homolog of NCBI NO: 34901980 NR Description: putative anthraniliate synthase alpha 2 subunit
  misc_feature (1)..(490): Homolog of NCBI NO: 5360659 NR Description: anthranilate synthase alpha 2 subunit
MDTPSFLFESVEQGLEGTTNVGRYSMVGAHPVMEVVAKENKVTIMDHEKAEVTEKIMDDPMQVPRSIMEGWHPQEIDQLPEAFSGGWVGFFSYDTVRYVEKKKIPFSGAPHDDRNLPDVHLGLYDDVLVFDNVEKKVYVIHWVSVDRHASTEEAYKDGRSRLKRLLSKVYNANVPKLSPGFVKLHTRQFGTPLNKSTMTSDEYKSAVMQAKEHILAGNIFQIVLSQRFERRTYATPFEVYRALRIVNPSPYMAYVQARGCILVASSPEILTKVEKGKVINRPLAGTTRRGKTEHEDKLQEEQLLNDQKQCAEHIMLVDLGRNDVGRVSKSGSVKVEKLMNIERYSHVMHISSTVSGELDDHLESWDALRAALPVGTVSGAPKVKAMELIDQLEVTRRGPYSGGLGGISFDGDMLIALALRTIVFSTAPSHNTMYSYKSSDRRREWVAHLQAGAGIVADSIPDDEQKECENKAAALARAIDLAESAFVDKE

SEQ ID NO: 67124 - protein, 465 aa, Triticum aestivum
  peptide (1)..(465): Ceres Seq. ID no. 15170649
  misc_feature (174)..(454): Pfam Name: chorismate binding enzyme Pfam Description: chorismate binding enzyme
  misc_feature (1)..(464): Homolog of NCBI NO: 15239225 NR Description: anthranilate synthase, alpha subunit, component
  misc_feature (1)..(464): Homolog of NCBI NO: 320552 NR Description: anthranilate synthase (EC 4.1.3.27) alpha-1 chain
  misc_feature (1)..(463): Homolog of NCBI NO: 15227604 NR Description: anthranilate synthase, alpha subunit, component
  misc_feature (1)..(464): Homolog of NCBI NO: 5360657 NR Description: anthranilate synthase alpha 1 subunit
  misc_feature (1)..(464): Homolog of NCBI NO: 34897346 NR Description: anthranilate synthase alpha 1 subunit [Oryza
  misc_feature (1)..(464): Homolog of NCBI NO: 12830362 NR Description: anthranilate synthase alpha subunit [Catharanthus
  misc_feature (1)..(464): Homolog of NCBI NO: 960289 NR Description: anthranilate synthase alpha subunit
  misc_feature (1)..(464): Homolog of NCBI NO: 11268466 NR Description: anthranilate synthase (EC 4.1.3.27) alpha chain
  misc_feature (1)..(465): Homolog of NCBI NO: 34901980 NR Description: putative anthraniliate synthase alpha 2 subunit
  misc_feature (1)..(465): Homolog of NCBI NO: 5360659 NR Description: anthranilate synthase alpha 2 subunit
MVGAHPVMEVVAKENKVTIMDHEKAEVTEKIMDDPMQVPRSIMEGWHPQEIDQLPEAFSGGWVGFFSYDTVRYVEKKKIPFSGAPHDDRNLPDVHLGLYDDVLVFDNVEKKVYVIHWVSVDRHASTEEAYKDGRSRLKRLLSKVYNANVPKLSPGFVKLHTRQFGTPLNKSTMTSDEYKSAVMQAKEHILAGNIFQIVLSQRFERRTYATPFEVYRALRIVNPSPYMAYVQARGCILVASSPEILTKVEKGKVINRPLAGTTRRGKTEHEDKLQEEQLLNDQKQCAEHIMLVDLGRNDVGRVSKSGSVKVEKLMNIERYSHVMHISSTVSGELDDHLESWDALRAALPVGTVSGAPKVKAMELIDQLEVTRRGPYSGGLGGISFDGDMLIALALRTIVFSTAPSHNTMYSYKSSDRRREWVAHLQAGAGIVADSIPDDEQKECENKAAALARAIDLAESAFVDKE

SEQ ID NO: 67125 - protein, 458 aa, Triticum aestivum
  peptide (1)..(458): Ceres Seq. ID no. 15170650
  misc_feature (167)..(447): Pfam Name: chorismate binding enzyme Pfam Description: chorismate binding enzyme
  misc_feature (1)..(457): Homolog of NCBI NO: 15239225 NR Description: anthranilate synthase, alpha subunit, component
  misc_feature (1)..(457): Homolog of NCBI NO: 320552 NR Description: anthranilate synthase (EC 4.1.3.27) alpha-1 chain
  misc_feature (1)..(456): Homolog of NCBI NO: 15227604 NR Description: anthranilate synthase, alpha subunit, component
  misc_feature (1)..(457): Homolog of NCBI NO: 5360657 NR Description: anthranilate synthase alpha 1 subunit
  misc_feature (1)..(457): Homolog of NCBI NO: 34897346 NR Description: anthranilate synthase alpha 1 subunit [Oryza
  misc_feature (1)..(457): Homolog of NCBI NO: 12830362 NR Description: anthranilate synthase alpha subunit [Catharanthus
  misc_feature (1)..(457): Homolog of NCBI NO: 960289 NR Description: anthranilate synthase alpha subunit
  misc_feature (1)..(457): Homolog of NCBI NO: 11268466 NR Description: anthranilate synthase (EC 4.1.3.27) alpha chain
  misc_feature (1)..(458): Homolog of NCBI NO: 34901980 NR Description: putative anthraniliate synthase alpha 2 subunit
  misc_feature (1)..(458): Homolog of NCBI NO: 5360659 NR Description: anthranilate synthase alpha 2 subunit
MEVVAKENKVTIMDHEKAEVTEKIMDDPMQVPRSIMEGWHPQEIDQLPEAFSGGWVGFFSYDTVRYVEKKKIPFSGAPHDDRNLPDVHLGLYDDVLVFDNVEKKVYVIHWVSVDRHASTEEAYKDGRSRLKRLLSKVYNANVPKLSPGFVKLHTRQFGTPLNKSTMTSDEYKSAVMQAKEHILAGNIFQIVLSQRFERRTYATPFEVYRALRIVNPSPYMAYVQARGCILVASSPEILTKVEKGKVINRPLAGTTRRGKTEHEDKLQEEQLLNDQKQCAEHIMLVDLGRNDVGRVSKSGSVKVEKLMNIERYSHVMHISSTVSGELDDHLESWDALRAALPVGTVSGAPKVKAMELIDQLEVTRRGPYSGGLGGISFDGDMLIALALRTIVFSTAPSHNTMYSYKSSDRRREWVAHLQAGAGIVADSIPDDEQKECENKAAALARAIDLAESAFVDKE

SEQ ID NO: 67126 - DNA, 1527 bp, Triticum aestivum
  misc_feature (1)..(1527): Ceres Seq. ID no. 14313381
accgcaaatctagcggagggtcagctcgggctcggcggcgaccagagaggaggagggaagtggcgtggttctctctcgcgcgcgcgcgtgcggcggagacggagaagggcgccggctgctccaggctgtaacctctggactggagtccttgtcgcgcctagatgctccgcgcctcctcgccacagcggcaagacggcgtcctgtgggccaaggctgcttcctcggccgccctccaccagtactatgccctcccaaagaagggcaagccgcagggccgcgagtccaccgtcctcgctgccttcctgctctcctctccagagaacccactgaaccccaccgtcctctccctcgccaccggcaccaagtgcctcggtgcagcacgcctcggacctcgcggtgacctcgtccatgacgcccacgccgaggtcgtcgcccgccgcgcgctgctccgcctcatttatgccgagattggcacagacaacccaccaagttggctggttgcatctggcgctgatgggcggtggaggctgagggacgggcatcagctgcatctctacatcacccagatcccctgtggggtcatgccggtgccgccgtcatccttggaggttcgaatggaacagctggataccatggtgaatggatgcagtgacgttggattcgtgcaaaggaagccagggcgtggtgatacaacattgtcggtgagctgttttgacaaaattactcgctggtgtgtcgttgggatccaaggtgcattgctgtcacacattcttgaacccttgtatttgtccaccattaccattggacaatcacctgatggtgcacctgacgggttttgtattgaaagtaatgttgtaaaagttcttggtgctcgcctgtcctgtctatccagaaaattccctgaccctttcaaactgaacaagccactattttttgaggcacctatcccccctcaagagtttcaacagacttcaggagatataccgcctttgacttgcgggtactcaatatgctggaataaatccggtttgcatgaagttgttttaggaacaactgggagaaaacaaggtacatcttcaaaggcagcatcctcaccctccactgagtcattgctctgcaagataagattggcagaggccttcgtatcacttgaacatccattagtcacaaaattccggcatgagaaactttcttatcgtgcaattaaggacatggcttgtgagtaccagcagatgcttgagcttcttagaaaggctccattttttggccggtggcgtgctaagccagcatccgttgatttgtttacagttccacggtgataaccaaatcttgaagttctatgctgtgtccgagaggctggttcttgaagttccttgatttcaccataattttagcagttttctgtaccagctctttcaacttatttgtagcatgtatgcttgtgcacaatactgaagtattgaacagtggtagcctgtaacaaacctataaagccctgtgatgtttcgcaccatgaggtggatgttt

SEQ ID NO: 67127 - protein, 385 aa, Triticum aestivum
  peptide (1)..(385): Ceres Seq. ID no. 14313382
  misc_feature (160)..(280): Pfam Name: Adenosine-deaminase (editase) domain Pfam Description: Adenosine-deaminase (editase) domain
  misc_feature (14)..(145): Homolog of NCBI NO: 6912230 NR Description: adenosine deaminase, tRNA-specific 1
  misc_feature (165)..(381): Homolog of NCBI NO: 6912230 NR Description: adenosine deaminase, tRNA-specific 1
  misc_feature (14)..(145): Homolog of NCBI NO: 12803835 NR Description: adenosine deaminase, tRNA-specific 1 [Homo
  misc_feature (165)..(381): Homolog of NCBI NO: 12803835 NR Description: adenosine deaminase, tRNA-specific 1 [Homo
  misc_feature (15)..(320): Homolog of NCBI NO: 15223473 NR Description: double-stranded RNA-specific editase -related
  misc_feature (272)..(349): Homolog of NCBI NO: 25513448 NR Description: T1N6.17 protein - Arabidopsis thaliana
  misc_feature (15)..(103): Homolog of NCBI NO: 25513448 NR Description: T1N6.17 protein - Arabidopsis thaliana
  misc_feature (160)..(280): Homolog of NCBI NO: 25513448 NR Description: T1N6.17 protein - Arabidopsis thaliana
  misc_feature (4)..(116): Homolog of NCBI NO: 38345564 NR Description: OSJNBa0032F06.25 [Oryza sativa (japonica
  misc_feature (139)..(385): Homolog of NCBI NO: 38345564 NR Description: OSJNBa0032F06.25 [Oryza sativa (japonica
MLRASSPQRQDGVLWAKAASSAALHQYYALPKKGKPQGRESTVLAAFLLSSPENPLNPTVLSLATGTKCLGAARLGPRGDLVHDAHAEVVARRALLRLIYAEIGTDNPPSWLVASGADGRWRLRDGHQLHLYITQIPCGVMPVPPSSLEVRMEQLDTMVNGCSDVGFVQRKPGRGDTTLSVSCFDKITRWCVVGIQGALLSHILEPLYLSTITIGQSPDGAPDGFCIESNVVKVLGARLSCLSRKFPDPFKLNKPLFFEAPIPPQEFQQTSGDIPPLTCGYSICWNKSGLHEVVLGTTGRKQGTSSKAASSPSTESLLCKIRLAEAFVSLEHPLVTKFRHEKLSYRAIKDMACEYQQMLELLRKAPFFGRWRAKPASVDLFTVPR

SEQ ID NO: 67128 - protein, 245 aa, Triticum aestivum
  peptide (1)..(245): Ceres Seq. ID no. 14313383
  misc_feature (20)..(140): Pfam Name: Adenosine-deaminase (editase) domain Pfam Description: Adenosine-deaminase (editase) domain
  misc_feature (1)..(42): Homolog of NCBI NO: 34851778 NR Description: similar to Adat1 protein [Rattus norvegicus]
  misc_feature (1)..(235): Homolog of NCBI NO: 19921270 NR Description: CG16889-PA [Drosophila melanogaster]
  misc_feature (1)..(45): Homolog of NCBI NO: 7304859 NR Description: adenosine deaminase, tRNA-specific 1 [Mus
  misc_feature (25)..(241): Homolog of NCBI NO: 7304859 NR Description: adenosine deaminase, tRNA-specific 1 [Mus
  misc_feature (25)..(241): Homolog of NCBI NO: 6912230 NR Description: adenosine deaminase, tRNA-specific 1
  misc_feature (25)..(241): Homolog of NCBI NO: 12803835 NR Description: adenosine deaminase, tRNA-specific 1 [Homo
  misc_feature (1)..(180): Homolog of NCBI NO: 15223473 NR Description: double-stranded RNA-specific editase -related
  misc_feature (132)..(209): Homolog of NCBI NO: 25513448 NR Description: T1N6.17 protein - Arabidopsis thaliana
  misc_feature (20)..(140): Homolog of NCBI NO: 25513448 NR Description: T1N6.17 protein - Arabidopsis thaliana
  misc_feature (1)..(245): Homolog of NCBI NO: 38345564 NR Description: OSJNBa0032F06.25 [Oryza sativa (japonica
MPVPPSSLEVRMEQLDTMVNGCSDVGFVQRKPGRGDTTLSVSCFDKITRWCVVGIQGALLSHILEPLYLSTITIGQSPDGAPDGFCIESNVVKVLGARLSCLSRKFPDPFKLNKPLFFEAPIPPQEFQQTSGDIPPLTCGYSICWNKSGLHEVVLGTTGRKQGTSSKAASSPSTESLLCKIRLAEAFVSLEHPLVTKFRHEKLSYRAIKDMACEYQQMLELLRKAPFFGRWRAKPASVDLFTVPR

SEQ ID NO: 67129 - protein, 234 aa, Triticum aestivum
  peptide (1)..(234): Ceres Seq. ID no. 14313384
  misc_feature (9)..(129): Pfam Name: Adenosine-deaminase (editase) domain Pfam Description: Adenosine-deaminase (editase) domain
  misc_feature (1)..(31): Homolog of NCBI NO: 34851778 NR Description: similar to Adat1 protein [Rattus norvegicus]
  misc_feature (1)..(224): Homolog of NCBI NO: 19921270 NR Description: CG16889-PA [Drosophila melanogaster]
  misc_feature (1)..(34): Homolog of NCBI NO: 7304859 NR Description: adenosine deaminase, tRNA-specific 1 [Mus
  misc_feature (14)..(230): Homolog of NCBI NO: 7304859 NR Description: adenosine deaminase, tRNA-specific 1 [Mus
  misc_feature (14)..(230): Homolog of NCBI NO: 6912230 NR Description: adenosine deaminase, tRNA-specific 1
  misc_feature (14)..(230): Homolog of NCBI NO: 12803835 NR Description: adenosine deaminase, tRNA-specific 1 [Homo
  misc_feature (1)..(169): Homolog of NCBI NO: 15223473 NR Description: double-stranded RNA-specific editase -related
  misc_feature (121)..(198): Homolog of NCBI NO: 25513448 NR Description: T1N6.17 protein - Arabidopsis thaliana
  misc_feature (9)..(129): Homolog of NCBI NO: 25513448 NR Description: T1N6.17 protein - Arabidopsis thaliana
  misc_feature (1)..(234): Homolog of NCBI NO: 38345564 NR Description: OSJNBa0032F06.25 [Oryza sativa (japonica
MEQLDTMVNGCSDVGFVQRKPGRGDTTLSVSCFDKITRWCVVGIQGALLSHILEPLYLSTITIGQSPDGAPDGFCIESNVVKVLGARLSCLSRKFPDPFKLNKPLFFEAPIPPQEFQQTSGDIPPLTCGYSICWNKSGLHEVVLGTTGRKQGTSSKAASSPSTESLLCKIRLAEAFVSLEHPLVTKFRHEKLSYRAIKDMACEYQQMLELLRKAPFFGRWRAKPASVDLFTVPR

SEQ ID NO: 67130 - DNA, 1292 bp, Triticum aestivum
  misc_feature (1)..(1292): Ceres Seq. ID no. 14316021
attgccaactccacgcatcatcgtctcggcaattagacaccacttccaagttccaactacaaacctccggcgagcggcggacaggttcacggccatggcttcttcttcttctccgaggacgatgagagccgtgcagtacgacaggtacggcggaggagccgaaggcctcaagcatgtggaggtgccgatcccgtcgcccaagaagggcgagctgctgctcaggatggaggcggccagcatcaaccgggtggactggaagttccagaacggcaaggcgcggcccttcctgcccagcaagttccccttcacccccgtctgcgagctcgccggcgaagtcgtggagctgggcgccggagtcagcggcttcagccagggcgacaaggtcatcgccgtcaacttcccgggtggcggcgggctggccgagtacgcggtggtgccggcgtcgcaagcagcgctgaggcctccagaggtgtccgcggtggagggcgcctgcctgccgatcgccgcgttcacggcgctcgccgcgctcagggcggccggggtcggcctcgacgccggcgacggccgtcccaagaacgtgctggtgaccgcggcctcgggcggcgtcggcaccttcgccgtgcagctggcgagcctcgcggggcaccaccacgtcacggccacctgcggcgcgcgcaacctggacctcatccggagcctgggggccgacgaggcgctggactatgacaccccggagggcgccgcgctgcgcgggccgtccggcccgaagcacgacgcggtggtgcactgcggggaggggttcccgtggtcggccttcaagccggcgctggccgacgccggcggcgtggtggtggacctcaccccgcgcctcgcgtccgtcgccgtcgcggtgctccattgggtgctcttctccaggaagaagctggtgccgctgatcgcgtctgccaaggaggaggacatggaggcgctgctgggcatggtgagtcaggggaagctccgggtggtgatcgactcgcggtacccgctgagcagggcgcacgagggctgggctaagagcatgagcggccacgccaccggcaaggtcgtcgtcgacatgggcgtcgccgatgacacagagtgatgatgctagtactactacaatacgtaaattcaaagtaaatagttgcagtgataccgattgccgaagatgatagagctgctcccatctgtccaagaatgtaaagaagcccattgcgatacatcatgtgattaatgacgtcttgataatcttcaacaggctgaagtttctacag

SEQ ID NO: 67131 - protein, 372 aa, Triticum aestivum
  peptide (1)..(372): Ceres Seq. ID no. 14316022
  misc_feature (39)..(319): Homolog of NCBI NO: 5701738 NR Description: LEDI-4 protein [Lithospermum erythrorhizon]
  misc_feature (32)..(365): Homolog of NCBI NO: 38346450 NR Description: OSJNBa0018J19.11 [Oryza sativa (japonica
  misc_feature (32)..(365): Homolog of NCBI NO: 38346442 NR Description: OSJNBa0018J19.3 [Oryza sativa (japonica
  misc_feature (41)..(364): Homolog of NCBI NO: 38016531 NR Description: fiber quinone-oxidoreductase [Gossypium
  misc_feature (33)..(365): Homolog of NCBI NO: 38346453 NR Description: OSJNBa0018J19.14 [Oryza sativa (japonica
  misc_feature (33)..(365): Homolog of NCBI NO: 32487602 NR Description: OSJNBa0034E24.2 [Oryza sativa (japonica
  misc_feature (39)..(364): Homolog of NCBI NO: 24370984 NR Description: quinone-oxidoreductase homologue [Spinacia
  misc_feature (39)..(364): Homolog of NCBI NO: 15235549 NR Description: oxidoreductase, zinc-binding dehydrogenase family
  misc_feature (39)..(364): Homolog of NCBI NO: 12484050 NR Description: quinone-oxidoreductase QR1 [Triphysaria
  misc_feature (31)..(365): Homolog of NCBI NO: 21742152 NR Description: OSJNBa0069D17.1 [Oryza sativa (japonica
LPTPRIIVSAIRHHFQVPTTNLRRAADRFTAMASSSSPRTMRAVQYDRYGGGAEGLKHVEVPIPSPKKGELLLRMEAASINRVDWKFQNGKARPFLPSKFPFTPVCELAGEVVELGAGVSGFSQGDKVIAVNFPGGGGLAEYAVVPASQAALRPPEVSAVEGACLPIAAFTALAALRAAGVGLDAGDGRPKNVLVTAASGGVGTFAVQLASLAGHHHVTATCGARNLDLIRSLGADEALDYDTPEGAALRGPSGPKHDAVVHCGEGFPWSAFKPALADAGGVVVDLTPRLASVAVAVLHWVLFSRKKLVPLIASAKEEDMEALLGMVSQGKLRVVIDSRYPLSRAHEGWAKSMSGHATGKVVVDMGVADDTE

SEQ ID NO: 67132 - protein, 341 aa, Triticum aestivum
  peptide (1)..(341): Ceres Seq. ID no. 14316023
  misc_feature (8)..(288): Homolog of NCBI NO: 5701738 NR Description: LEDI-4 protein [Lithospermum erythrorhizon]
  misc_feature (1)..(334): Homolog of NCBI NO: 38346450 NR Description: OSJNBa0018J19.11 [Oryza sativa (japonica
  misc_feature (1)..(334): Homolog of NCBI NO: 38346442 NR Description: OSJNBa0018J19.3 [Oryza sativa (japonica
  misc_feature (10)..(333): Homolog of NCBI NO: 38016531 NR Description: fiber quinone-oxidoreductase [Gossypium
  misc_feature (2)..(334): Homolog of NCBI NO: 38346453 NR Description: OSJNBa0018J19.14 [Oryza sativa (japonica
  misc_feature (2)..(334): Homolog of NCBI NO: 32487602 NR Description: OSJNBa0034E24.2 [Oryza sativa (japonica
  misc_feature (8)..(333): Homolog of NCBI NO: 24370984 NR Description: quinone-oxidoreductase homologue [Spinacia
  misc_feature (8)..(333): Homolog of NCBI NO: 15235549 NR Description: oxidoreductase, zinc-binding dehydrogenase family
  misc_feature (8)..(333): Homolog of NCBI NO: 12484050 NR Description: quinone-oxidoreductase QR1 [Triphysaria
  misc_feature (1)..(334): Homolog of NCBI NO: 21742152 NR Description: OSJNBa0069D17.1 [Oryza sativa (japonica
MASSSSPRTMRAVQYDRYGGGAEGLKHVEVPIPSPKKGELLLRMEAASINRVDWKFQNGKARPFLPSKFPFTPVCELAGEVVELGAGVSGFSQGDKVIAVNFPGGGGLAEYAVVPASQAALRPPEVSAVEGACLPIAAFTALAALRAAGVGLDAGDGRPKNVLVTAASGGVGTFAVQLASLAGHHHVTATCGARNLDLIRSLGADEALDYDTPEGAALRGPSGPKHDAVVHCGEGFPWSAFKPALADAGGVVVDLTPRLASVAVAVLHWVLFSRKKLVPLIASAKEEDMEALLGMVSQGKLRVVIDSRYPLSRAHEGWAKSMSGHATGKVVVDMGVADDTE

SEQ ID NO: 67133 - protein, 332 aa, Triticum aestivum
  peptide (1)..(332): Ceres Seq. ID no. 14316024
  misc_feature (1)..(279): Homolog of NCBI NO: 5701738 NR Description: LEDI-4 protein [Lithospermum erythrorhizon]
  misc_feature (1)..(325): Homolog of NCBI NO: 38346450 NR Description: OSJNBa0018J19.11 [Oryza sativa (japonica
  misc_feature (1)..(325): Homolog of NCBI NO: 38346442 NR Description: OSJNBa0018J19.3 [Oryza sativa (japonica
  misc_feature (1)..(324): Homolog of NCBI NO: 38016531 NR Description: fiber quinone-oxidoreductase [Gossypium
  misc_feature (1)..(325): Homolog of NCBI NO: 38346453 NR Description: OSJNBa0018J19.14 [Oryza sativa (japonica
  misc_feature (1)..(325): Homolog of NCBI NO: 32487602 NR Description: OSJNBa0034E24.2 [Oryza sativa (japonica
  misc_feature (1)..(324): Homolog of NCBI NO: 24370984 NR Description: quinone-oxidoreductase homologue [Spinacia
  misc_feature (1)..(324): Homolog of NCBI NO: 15235549 NR Description: oxidoreductase, zinc-binding dehydrogenase family
  misc_feature (1)..(324): Homolog of NCBI NO: 12484050 NR Description: quinone-oxidoreductase QR1 [Triphysaria
  misc_feature (1)..(325): Homolog of NCBI NO: 21742152 NR Description: OSJNBa0069D17.1 [Oryza sativa (japonica
MRAVQYDRYGGGAEGLKHVEVPIPSPKKGELLLRMEAASINRVDWKFQNGKARPFLPSKFPFTPVCELAGEVVELGAGVSGFSQGDKVIAVNFPGGGGLAEYAVVPASQAALRPPEVSAVEGACLPIAAFTALAALRAAGVGLDAGDGRPKNVLVTAASGGVGTFAVQLASLAGHHHVTATCGARNLDLIRSLGADEALDYDTPEGAALRGPSGPKHDAVVHCGEGFPWSAFKPALADAGGVVVDLTPRLASVAVAVLHWVLFSRKKLVPLIASAKEEDMEALLGMVSQGKLRVVIDSRYPLSRAHEGWAKSMSGHATGKVVVDMGVADDTE

SEQ ID NO: 67134 - DNA, 1652 bp, Triticum aestivum
  misc_feature (1)..(1652): Ceres Seq. ID no. 14313252
gcccgcccgcctccgcgaacgaaaggccaaacctctgcccccctccttggctcctcctcctcgtgactccctcctgcggcccctcccccctccctcgccggtcaaaccctaacgcgcgcacccacccacccacccgtcaatcccttctcccatggcggcgctctccgtgcctctccgcaccgcggcggccctgtcctcgtccggcgccggatcccgcgccgccgccgacccctccaaggtgtcatgcgtgaggagcacccgctccgctcattttgactgcagcttcccctccattgcggcttcctcttcatctgccaggaacattgagccacttagagctatagctacacaggcacccccggccgtcccacaatatttgagtggagagaagacgaaggttggcatcaatgggttcggacggattgggaggttggttctgagaattgcaaccagtagagatgatattgaagttgtggctgtcaatgatcctttcattgatgctaagtacatggcctatatgttcaagtatgactccactcatggcccctttaaaggatccatcaatgttgtggatgattcaaccctggagatcaatgggaagaaaatcactataacaagcaaaagagatcccgcagagattccttggggtaactttggagctgactatgttgttgaatcttctggtgtttttacaaccatcgataaagcatcggtacacttgaagggtggtgctaagaaagtggtgatatctgctccatccgcagatgctcccatgtttgtggttggagtaaatgagatgagctacgatcccaagatgaatgttgtttctaatgcaagttgtaccactaactgtcttgctcctcttgccaaggttgttcatgaagaatttggcattcttgaaggtctaatgacaactgttcacgccacaacagccacccaaaagactgttgatggtccttcaatgaaagattggagaggagggcgtggtgctggtcaaaacataattcctagctccactggtgcagcaaaggctgttgggaaagttctccctgagctaaatggaaagcttactggcatggctttccgagttccaacaccaaatgtctctgtggttgacttgacctgccggcttgagaaaagtgcctcttatgatgatgtgaaagcagccatcaaggcggcatcagagggtgcactgaaaggcattttaggctacacagatgaggatgtggtatccaacgattttgttggtgacacaaggtcaagtgtatttgatgctaatgctggcatggggctgagctcttccttcatgaagctcgtgtcgtggtacgacaacgagtggggctacagcaaccgggttcttgatctcatcgcccacatggctcttgtctccgccaagcactgatcacctccgagtgctactaataggctgcaattttgccggttctttttattttcagaatttattattgcctttgttgtgccttttgagcacaggcagaaatgggtactcggatctatgacttgcttgtagcagtggatgaaatttacaccgtagcgttatgagcacgtcgtgggatttgttgagcgaatctcatttgtatcggtggtttgatttgttgctaaagaaagaaatcacaaattgtcccctttgg

SEQ ID NO: 67135 - protein, 416 aa, Triticum aestivum
  peptide (1)..(416): Ceres Seq. ID no. 14313253
  misc_feature (231)..(392): Pfam Name: Glyceraldehyde 3-phosphate dehydrogenase, Pfam Description: Glyceraldehyde 3-phosphate dehydrogenase,
  misc_feature (61)..(414): Homolog of NCBI NO: 3059122 NR Description: glyeraldehyde-3-phosphate dehydrogenase [Marsilea
  misc_feature (3)..(414): Homolog of NCBI NO: 25284351 NR Description: hypothetical protein F3O9.10 - Arabidopsis
  misc_feature (54)..(415): Homolog of NCBI NO: 3059140 NR Description: NAD-dependent glyceraldehyde-3-phosphate
  misc_feature (49)..(415): Homolog of NCBI NO: 2129472 NR Description: glyceraldehyde-3-phosphate dehydrogenase
  misc_feature (49)..(415): Homolog of NCBI NO: 2129471 NR Description: glyceraldehyde-3-phosphate dehydrogenase
  misc_feature (47)..(414): Homolog of NCBI NO: 18072805 NR Description: glyceraldehyde-3-phosphate dehydrogenase
  misc_feature (3)..(414): Homolog of NCBI NO: 21618027 NR Description: putative glyceraldehyde-3-phosphate dehydrogenase
  misc_feature (3)..(414): Homolog of NCBI NO: 15219206 NR Description: glyceraldehyde-3-phosphate dehydrogenase -related
  misc_feature (3)..(414): Homolog of NCBI NO: 27754473 NR Description: putative glyceraldehyde-3-phosphate dehydrogenase
  misc_feature (3)..(416): Homolog of NCBI NO: 15219406 NR Description: glyceraldehyde-3-phosphate dehydrogenase -related
MAALSVPLRTAAALSSSGAGSRAAADPSKVSCVRSTRSAHFDCSFPSIAASSSSARNIEPLRAIATQAPPAVPQYLSGEKTKVGINGFGRIGRLVLRIATSRDDIEVVAVNDPFIDAKYMAYMFKYDSTHGPFKGSINVVDDSTLEINGKKITITSKRDPAEIPWGNFGADYVVESSGVFTTIDKASVHLKGGAKKVVISAPSADAPMFVVGVNEMSYDPKMNVVSNASCTTNCLAPLAKVVHEEFGILEGLMTTVHATTATQKTVDGPSMKDWRGGRGAGQNIIPSSTGAAKAVGKVLPELNGKLTGMAFRVPTPNVSVVDLTCRLEKSASYDDVKAAIKAASEGALKGILGYTDEDVVSNDFVGDTRSSVFDANAGMGLSSSFMKLVSWYDNEWGYSNRVLDLIAHMALVSAKH

SEQ ID NO: 67136 - protein, 297 aa, Triticum aestivum
  peptide (1)..(297): Ceres Seq. ID no. 14313254
  misc_feature (112)..(273): Pfam Name: Glyceraldehyde 3-phosphate dehydrogenase, Pfam Description: Glyceraldehyde 3-phosphate dehydrogenase,
  misc_feature (1)..(295): Homolog of NCBI NO: 3059122 NR Description: glyeraldehyde-3-phosphate dehydrogenase [Marsilea
  misc_feature (1)..(295): Homolog of NCBI NO: 25284351 NR Description: hypothetical protein F3O9.10 - Arabidopsis
  misc_feature (1)..(296): Homolog of NCBI NO: 3059140 NR Description: NAD-dependent glyceraldehyde-3-phosphate
  misc_feature (1)..(296): Homolog of NCBI NO: 2129472 NR Description: glyceraldehyde-3-phosphate dehydrogenase
  misc_feature (1)..(296): Homolog of NCBI NO: 2129471 NR Description: glyceraldehyde-3-phosphate dehydrogenase
  misc_feature (1)..(295): Homolog of NCBI NO: 18072805 NR Description: glyceraldehyde-3-phosphate dehydrogenase
  misc_feature (1)..(295): Homolog of NCBI NO: 21618027 NR Description: putative glyceraldehyde-3-phosphate dehydrogenase
  misc_feature (1)..(295): Homolog of NCBI NO: 15219206 NR Description: glyceraldehyde-3-phosphate dehydrogenase -related
  misc_feature (1)..(295): Homolog of NCBI NO: 27754473 NR Description: putative glyceraldehyde-3-phosphate dehydrogenase
  misc_feature (1)..(297): Homolog of NCBI NO: 15219406 NR Description: glyceraldehyde-3-phosphate dehydrogenase -related
MAYMFKYDSTHGPFKGSINVVDDSTLEINGKKITITSKRDPAEIPWGNFGADYVVESSGVFTTIDKASVHLKGGAKKVVISAPSADAPMFVVGVNEMSYDPKMNVVSNASCTTNCLAPLAKVVHEEFGILEGLMTTVHATTATQKTVDGPSMKDWRGGRGAGQNIIPSSTGAAKAVGKVLPELNGKLTGMAFRVPTPNVSVVDLTCRLEKSASYDDVKAAIKAASEGALKGILGYTDEDVVSNDFVGDTRSSVFDANAGMGLSSSFMKLVSWYDNEWGYSNRVLDLIAHMALVSAKH

SEQ ID NO: 67137 - protein, 294 aa, Triticum aestivum
  peptide (1)..(294): Ceres Seq. ID no. 14313255
  misc_feature (109)..(270): Pfam Name: Glyceraldehyde 3-phosphate dehydrogenase, Pfam Description: Glyceraldehyde 3-phosphate dehydrogenase,
  misc_feature (1)..(292): Homolog of NCBI NO: 3059122 NR Description: glyeraldehyde-3-phosphate dehydrogenase [Marsilea
  misc_feature (1)..(292): Homolog of NCBI NO: 25284351 NR Description: hypothetical protein F3O9.10 - Arabidopsis
  misc_feature (1)..(293): Homolog of NCBI NO: 3059140 NR Description: NAD-dependent glyceraldehyde-3-phosphate
  misc_feature (1)..(293): Homolog of NCBI NO: 2129472 NR Description: glyceraldehyde-3-phosphate dehydrogenase
  misc_feature (1)..(293): Homolog of NCBI NO: 2129471 NR Description: glyceraldehyde-3-phosphate dehydrogenase
  misc_feature (1)..(292): Homolog of NCBI NO: 18072805 NR Description: glyceraldehyde-3-phosphate dehydrogenase
  misc_feature (1)..(292): Homolog of NCBI NO: 21618027 NR Description: putative glyceraldehyde-3-phosphate dehydrogenase
  misc_feature (1)..(292): Homolog of NCBI NO: 15219206 NR Description: glyceraldehyde-3-phosphate dehydrogenase -related
  misc_feature (1)..(292): Homolog of NCBI NO: 27754473 NR Description: putative glyceraldehyde-3-phosphate dehydrogenase
  misc_feature (1)..(294): Homolog of NCBI NO: 15219406 NR Description: glyceraldehyde-3-phosphate dehydrogenase -related
MFKYDSTHGPFKGSINVVDDSTLEINGKKITITSKRDPAEIPWGNFGADYVVESSGVFTTIDKASVHLKGGAKKVVISAPSADAPMFVVGVNEMSYDPKMNVVSNASCTTNCLAPLAKVVHEEFGILEGLMTTVHATTATQKTVDGPSMKDWRGGRGAGQNIIPSSTGAAKAVGKVLPELNGKLTGMAFRVPTPNVSVVDLTCRLEKSASYDDVKAAIKAASEGALKGILGYTDEDVVSNDFVGDTRSSVFDANAGMGLSSSFMKLVSWYDNEWGYSNRVLDLIAHMALVSAKH

SEQ ID NO: 67138 - DNA, 1782 bp, Triticum aestivum
  misc_feature (1)..(1782): Ceres Seq. ID no. 15170175
aatgcacactcgttcagctagtagcccaacatctcttgacttttgagaaaaatggcttttgaccttgcagcggcggcagcggcagtgccatggagctacctcctgtacgggctcacgggctctgcgctcctgtggcaggcccgcctgctgctggaccggctgtggtggcgcccgcggcggcttgagcggacgctgcgcgcgcagggcgtcggcggcacgccgtaccgcttcctcatgggcgacctcaaggacttcggccggctcaacgacgaggcctgggccaagccattgccgctgcgctgccacgacatcgtcccccgcgtcatcccgttcctccacaacaacgtccgggacaacggcaagccgtgcttctcttggttcggaccggtggccaacgtggccatcactgaccctgagcttatcaaggacgtgctgtccaacaagtttggccacttccagaagccccagttcccggctctcaccaagctgctcgccaacggcctcacgacccatgagggggagaaatgggtcaagcacaggaggatcctcaatcccgctttccatcttgagaagctcaagctcatgctaccggctttttctgcaagctgtgaagagcttgtcaccagatggaaggagttgcattgttctggcggatcgtgcgaggtggatgtgtggccggagctccagaacctcaccggggatgtcatttctcgcacagctttcggcagcagttatctcgaaggaaggcggatattccaactgcagtccgagcaagctaagctctttgttggtgcggtccagaggattattattccgggttacctattcttgcccaccaagaacaatttgaaaatgcgcaaaaacaataaggaggttgaatcagttttacaaggtctaatcaataaaagaatgcgagctatggaagaaggtgaaaaatcggaaaatgatctgctaggcctgttgctagagtcaaatatgaaggacatggacgagaatggccaacctagccaaggaatggcaatggaagatgtcatcgaggagtgcaaactattctacttggcaggaatggagacaacgtcggtgctgctcacgtggacaatgattgtactaagcatgcatccggagtggcaagaccttgcgagggaggaggtcctaggtttatttaggaagaacaaacccgagtacgagggccttagccgactaaaaatggtgaccatgatccttcacgaggttcttcggttgtatccatcggctacagtttttagccgaaaaacatacaaggatatggatatcggaggggtcagatacccctcgggtgtgttcatcgaggtgccagttctatttatcaatcatgatccagacatatggggaagtgatgtcaatgagttcaaaccagaccgatttgcccaggggatttccaaggcatctaagcatccgggcgccttcttgtcatttggttgggggccacgggtgtgcatcggccagaactttgcaatgctcgaagccaagatggcactaagcatgatccttcagcatttcgagtttgagctcgcgccatcatatacgcatgcaccgcacaccgtgatgacattgcaaccaatgcatggtgcgcaaattaatctcagagctatctgactaggtacacatttaagccaatatttggttgttcttagttatcggtgtaaacaatgttggcttttgtaagatgaactctctattttaactattcgtgtaaacaatattgatttgtgtaagatgaactatgcatttgaattatctggc

SEQ ID NO: 67139 - protein, 527 aa, Triticum aestivum
  peptide (1)..(527): Ceres Seq. ID no. 15170176
  misc_feature (108)..(496): Homolog of NCBI NO: 27465575 NR Description: cytochrome P450 4F4 [Rattus norvegicus]
  misc_feature (109)..(496): Homolog of NCBI NO: 31239217 NR Description: ENSANGP00000010558 [Anopheles gambiae]
  misc_feature (26)..(65): Homolog of NCBI NO: 9294385 NR Description: cytochrome P450-like protein [Arabidopsis
  misc_feature (122)..(527): Homolog of NCBI NO: 9294385 NR Description: cytochrome P450-like protein [Arabidopsis
  misc_feature (6)..(527): Homolog of NCBI NO: 21805634 NR Description: cytochrome P450 monooxygenase CYP72A26 [Zea mays
  misc_feature (17)..(527): Homolog of NCBI NO: 34912888 NR Description: putative cytochrome P450 [Oryza sativa (japonica
  misc_feature (10)..(527): Homolog of NCBI NO: 34912896 NR Description: putative cytochrome P450 [Oryza sativa (japonica
  misc_feature (10)..(527): Homolog of NCBI NO: 34912894 NR Description: putative cytochrome P450 [Oryza sativa (japonica
  misc_feature (10)..(527): Homolog of NCBI NO: 19909879 NR Description: cytochrome P450 [Oryza sativa]
  misc_feature (8)..(527): Homolog of NCBI NO: 34912898 NR Description: putative cytochrome P450 [Oryza sativa (japonica
MAFDLAAAAAAVPWSYLLYGLTGSALLWQARLLLDRLWWRPRRLERTLRAQGVGGTPYRFLMGDLKDFGRLNDEAWAKPLPLRCHDIVPRVIPFLHNNVRDNGKPCFSWFGPVANVAITDPELIKDVLSNKFGHFQKPQFPALTKLLANGLTTHEGEKWVKHRRILNPAFHLEKLKLMLPAFSASCEELVTRWKELHCSGGSCEVDVWPELQNLTGDVISRTAFGSSYLEGRRIFQLQSEQAKLFVGAVQRIIIPGYLFLPTKNNLKMRKNNKEVESVLQGLINKRMRAMEEGEKSENDLLGLLLESNMKDMDENGQPSQGMAMEDVIEECKLFYLAGMETTSVLLTWTMIVLSMHPEWQDLAREEVLGLFRKNKPEYEGLSRLKMVTMILHEVLRLYPSATVFSRKTYKDMDIGGVRYPSGVFIEVPVLFINHDPDIWGSDVNEFKPDRFAQGISKASKHPGAFLSFGWGPRVCIGQNFAMLEAKMALSMILQHFEFELAPSYTHAPHTVMTLQPMHGAQINLRAI

SEQ ID NO: 67140 - protein, 466 aa, Triticum aestivum
  peptide (1)..(466): Ceres Seq. ID no. 15170177
  misc_feature (48)..(466): Homolog of NCBI NO: 29837648 NR Description: likely ortholog of rat cytochrome P450 4X1 [Homo
  misc_feature (47)..(435): Homolog of NCBI NO: 27465575 NR Description: cytochrome P450 4F4 [Rattus norvegicus]
  misc_feature (48)..(435): Homolog of NCBI NO: 31239217 NR Description: ENSANGP00000010558 [Anopheles gambiae]
  misc_feature (61)..(466): Homolog of NCBI NO: 9294385 NR Description: cytochrome P450-like protein [Arabidopsis
  misc_feature (1)..(466): Homolog of NCBI NO: 21805634 NR Description: cytochrome P450 monooxygenase CYP72A26 [Zea mays
  misc_feature (1)..(466): Homolog of NCBI NO: 34912888 NR Description: putative cytochrome P450 [Oryza sativa (japonica
  misc_feature (1)..(466): Homolog of NCBI NO: 34912896 NR Description: putative cytochrome P450 [Oryza sativa (japonica
  misc_feature (1)..(466): Homolog of NCBI NO: 34912894 NR Description: putative cytochrome P450 [Oryza sativa (japonica
  misc_feature (1)..(466): Homolog of NCBI NO: 19909879 NR Description: cytochrome P450 [Oryza sativa]
  misc_feature (1)..(466): Homolog of NCBI NO: 34912898 NR Description: putative cytochrome P450 [Oryza sativa (japonica
MGDLKDFGRLNDEAWAKPLPLRCHDIVPRVIPFLHNNVRDNGKPCFSWFGPVANVAITDPELIKDVLSNKFGHFQKPQFPALTKLLANGLTTHEGEKWVKHRRILNPAFHLEKLKLMLPAFSASCEELVTRWKELHCSGGSCEVDVWPELQNLTGDVISRTAFGSSYLEGRRIFQLQSEQAKLFVGAVQRIIIPGYLFLPTKNNLKMRKNNKEVESVLQGLINKRMRAMEEGEKSENDLLGLLLESNMKDMDENGQPSQGMAMEDVIEECKLFYLAGMETTSVLLTWTMIVLSMHPEWQDLAREEVLGLFRKNKPEYEGLSRLKMVTMILHEVLRLYPSATVFSRKTYKDMDIGGVRYPSGVFIEVPVLFINHDPDIWGSDVNEFKPDRFAQGISKASKHPGAFLSFGWGPRVCIGQNFAMLEAKMALSMILQHFEFELAPSYTHAPHTVMTLQPMHGAQINLRAI

SEQ ID NO: 67141 - protein, 350 aa, Triticum aestivum
  peptide (1)..(350): Ceres Seq. ID no. 15170178
  misc_feature (1)..(350): Homolog of NCBI NO: 29837648 NR Description: likely ortholog of rat cytochrome P450 4X1 [Homo
  misc_feature (1)..(319): Homolog of NCBI NO: 27465575 NR Description: cytochrome P450 4F4 [Rattus norvegicus]
  misc_feature (1)..(319): Homolog of NCBI NO: 31239217 NR Description: ENSANGP00000010558 [Anopheles gambiae]
  misc_feature (1)..(350): Homolog of NCBI NO: 9294385 NR Description: cytochrome P450-like protein [Arabidopsis
  misc_feature (1)..(350): Homolog of NCBI NO: 21805634 NR Description: cytochrome P450 monooxygenase CYP72A26 [Zea mays
  misc_feature (1)..(350): Homolog of NCBI NO: 34912888 NR Description: putative cytochrome P450 [Oryza sativa (japonica
  misc_feature (1)..(350): Homolog of NCBI NO: 34912896 NR Description: putative cytochrome P450 [Oryza sativa (japonica
  misc_feature (1)..(350): Homolog of NCBI NO: 34912894 NR Description: putative cytochrome P450 [Oryza sativa (japonica
  misc_feature (1)..(350): Homolog of NCBI NO: 19909879 NR Description: cytochrome P450 [Oryza sativa]
  misc_feature (1)..(350): Homolog of NCBI NO: 34912898 NR Description: putative cytochrome P450 [Oryza sativa (japonica
MLPAFSASCEELVTRWKELHCSGGSCEVDVWPELQNLTGDVISRTAFGSSYLEGRRIFQLQSEQAKLFVGAVQRIIIPGYLFLPTKNNLKMRKNNKEVESVLQGLINKRMRAMEEGEKSENDLLGLLLESNMKDMDENGQPSQGMAMEDVIEECKLFYLAGMETTSVLLTWTMIVLSMHPEWQDLAREEVLGLFRKNKPEYEGLSRLKMVTMILHEVLRLYPSATVFSRKTYKDMDIGGVRYPSGVFIEVPVLFINHDPDIWGSDVNEFKPDRFAQGISKASKHPGAFLSFGWGPRVCIGQNFAMLEAKMALSMILQHFEFELAPSYTHAPHTVMTLQPMHGAQINLRAI

SEQ ID NO: 67142 - DNA, 1549 bp, Triticum aestivum
  misc_feature (1)..(1549): Ceres Seq. ID no. 15169565
atctgcgcctactcgcaacgccgccgcatttctccaaccctctcaccgcttcctcaccacctccaaaagctcagcaggccatggctggatagacaagcatgtccgctgatcgagcagcttaagccctccatgccctgcgctcgtgcgtgattcgcatctatgactgctcagcagagttccttgttctgaaaattcggaattagttcgcgttccgaaggctccagatctgaagttaggaattggagggtattcgagcattagttggttcgatggatcgcaagtttctgaatatggtcctgcacgagtatggcagtagaatgtattcgctgtgccgcatcaagctctccactcatctcttctatccgacagcaaaagacgcaacaacagcccatgaagatgcaaatgcaaggaagaagaagcatgggggatggccatcaacgatctcgagctgcaagcgcccgccaagtactttggtcaacttctcggtgccacccagcactgctgccgccagtaacatgcgtttcttctccctcctgcctgagcagggagagtcctctgtcatgttcactgacccttcttgcaactccgcagtctacgatatggacatgaagtctttcgttctcgcacccagctcatacttctgcaaaccgtatgattccatcaccgtgtccattaggaaccgatgcagcagtggcaatttcttggaccacgaagatgatcacggcctctacgtcatgaacagcttggacgacagctttgagttcttcaattactgcaaggttggcttatctacctatccgttgctgtacaataagtggtactggagtcctctgccgtctccaccgtcccgcaccagtcctcttgttgcagcggcggtgattgacaactccaccatatgcgcgtcatccaagaacggcacatacacctttgatatttcgagggaggtgtggagccacactggcagctgggtgctgcccttccaccgcgcagcagagtatgtccctgagcttggactctggttcggcctccaggcccctggcacctggcaaaatcgcttatgtgcatttgacctttcatcctctgccatggcggaatctgctccttcacccctgcatgattgggaatacctcgatctcctccccgacgagttgctgccggtggggcgtgccttggtgaacctgggctcgggcaagttttgcatcgcgacccactgcaggaaggataggtctgcactccaggaggaggacgagctggagaatattaggagtttgggtggaaatgggggtgtgcaaactctcttgactggcgtggaggtggtccgctgcgccgacgggctccagcttatccaccacaagtcccaacgttacaacattgaaaacttaagtatccactgtgtgctctgactcgttttattacctatccgatcatcccaatctgagccatgtagtactagttagttagctttacctagtggctggatgcatcactctgttatgattacctgtaagtcgggacttacaaaataatactcctactactttatttaaag

SEQ ID NO: 67143 - protein, 377 aa, Triticum aestivum
  peptide (1)..(377): Ceres Seq. ID no. 15169566
  misc_feature (198)..(339): Homolog of NCBI NO: 34904128 NR Description: unnamed protein product [Oryza sativa (japonica
  misc_feature (94)..(316): Homolog of NCBI NO: 34902338 NR Description: Unknown protein [Oryza sativa (japonica
  misc_feature (161)..(369): Homolog of NCBI NO: 37531434 NR Description: hypothetical protein [Oryza sativa (japonica
  misc_feature (154)..(312): Homolog of NCBI NO: 32487803 NR Description: OSJNBa0035I04.14 [Oryza sativa (japonica
  misc_feature (161)..(376): Homolog of NCBI NO: 34902348 NR Description: Hypothetical protein [Oryza sativa (japonica
  misc_feature (131)..(366): Homolog of NCBI NO: 38344193 NR Description: OSJNBa0064G10.9 [Oryza sativa (japonica
  misc_feature (177)..(350): Homolog of NCBI NO: 15451605 NR Description: Hypothetical protein [Oryza sativa]
  misc_feature (1)..(350): Homolog of NCBI NO: 38345446 NR Description: OSJNBa0042L16.1 [Oryza sativa (japonica
  misc_feature (1)..(349): Homolog of NCBI NO: 15451604 NR Description: Hypothetical protein [Oryza sativa]
  misc_feature (1)..(377): Homolog of NCBI NO: 34897052 NR Description: hypothetical protein [Oryza sativa (japonica
MDRKFLNMVLHEYGSRMYSLCRIKLSTHLFYPTAKDATTAHEDANARKKKHGGWPSTISSCKRPPSTLVNFSVPPSTAAASNMRFFSLLPEQGESSVMFTDPSCNSAVYDMDMKSFVLAPSSYFCKPYDSITVSIRNRCSSGNFLDHEDDHGLYVMNSLDDSFEFFNYCKVGLSTYPLLYNKWYWSPLPSPPSRTSPLVAAAVIDNSTICASSKNGTYTFDISREVWSHTGSWVLPFHRAAEYVPELGLWFGLQAPGTWQNRLCAFDLSSSAMAESAPSPLHDWEYLDLLPDELLPVGRALVNLGSGKFCIATHCRKDRSALQEEDELENIRSLGGNGGVQTLLTGVEVVRCADGLQLIHHKSQRYNIENLSIHCVL

SEQ ID NO: 67144 - protein, 370 aa, Triticum aestivum
  peptide (1)..(370): Ceres Seq. ID no. 15169567
  misc_feature (191)..(332): Homolog of NCBI NO: 34904128 NR Description: unnamed protein product [Oryza sativa (japonica
  misc_feature (87)..(309): Homolog of NCBI NO: 34902338 NR Description: Unknown protein [Oryza sativa (japonica
  misc_feature (154)..(362): Homolog of NCBI NO: 37531434 NR Description: hypothetical protein [Oryza sativa (japonica
  misc_feature (147)..(305): Homolog of NCBI NO: 32487803 NR Description: OSJNBa0035I04.14 [Oryza sativa (japonica
  misc_feature (154)..(369): Homolog of NCBI NO: 34902348 NR Description: Hypothetical protein [Oryza sativa (japonica
  misc_feature (124)..(359): Homolog of NCBI NO: 38344193 NR Description: OSJNBa0064G10.9 [Oryza sativa (japonica
  misc_feature (170)..(343): Homolog of NCBI NO: 15451605 NR Description: Hypothetical protein [Oryza sativa]
  misc_feature (1)..(343): Homolog of NCBI NO: 38345446 NR Description: OSJNBa0042L16.1 [Oryza sativa (japonica
  misc_feature (1)..(342): Homolog of NCBI NO: 15451604 NR Description: Hypothetical protein [Oryza sativa]
  misc_feature (1)..(370): Homolog of NCBI NO: 34897052 NR Description: hypothetical protein [Oryza sativa (japonica
MVLHEYGSRMYSLCRIKLSTHLFYPTAKDATTAHEDANARKKKHGGWPSTISSCKRPPSTLVNFSVPPSTAAASNMRFFSLLPEQGESSVMFTDPSCNSAVYDMDMKSFVLAPSSYFCKPYDSITVSIRNRCSSGNFLDHEDDHGLYVMNSLDDSFEFFNYCKVGLSTYPLLYNKWYWSPLPSPPSRTSPLVAAAVIDNSTICASSKNGTYTFDISREVWSHTGSWVLPFHRAAEYVPELGLWFGLQAPGTWQNRLCAFDLSSSAMAESAPSPLHDWEYLDLLPDELLPVGRALVNLGSGKFCIATHCRKDRSALQEEDELENIRSLGGNGGVQTLLTGVEVVRCADGLQLIHHKSQRYNIENLSIHCVL

SEQ ID NO: 67145 - protein, 361 aa, Triticum aestivum
  peptide (1)..(361): Ceres Seq. ID no. 15169568
  misc_feature (182)..(323): Homolog of NCBI NO: 34904128 NR Description: unnamed protein product [Oryza sativa (japonica
  misc_feature (78)..(300): Homolog of NCBI NO: 34902338 NR Description: Unknown protein [Oryza sativa (japonica
  misc_feature (145)..(353): Homolog of NCBI NO: 37531434 NR Description: hypothetical protein [Oryza sativa (japonica
  misc_feature (138)..(296): Homolog of NCBI NO: 32487803 NR Description: OSJNBa0035I04.14 [Oryza sativa (japonica
  misc_feature (145)..(360): Homolog of NCBI NO: 34902348 NR Description: Hypothetical protein [Oryza sativa (japonica
  misc_feature (115)..(350): Homolog of NCBI NO: 38344193 NR Description: OSJNBa0064G10.9 [Oryza sativa (japonica
  misc_feature (161)..(334): Homolog of NCBI NO: 15451605 NR Description: Hypothetical protein [Oryza sativa]
  misc_feature (1)..(334): Homolog of NCBI NO: 38345446 NR Description: OSJNBa0042L16.1 [Oryza sativa (japonica
  misc_feature (1)..(333): Homolog of NCBI NO: 15451604 NR Description: Hypothetical protein [Oryza sativa]
  misc_feature (1)..(361): Homolog of NCBI NO: 34897052 NR Description: hypothetical protein [Oryza sativa (japonica
MYSLCRIKLSTHLFYPTAKDATTAHEDANARKKKHGGWPSTISSCKRPPSTLVNFSVPPSTAAASNMRFFSLLPEQGESSVMFTDPSCNSAVYDMDMKSFVLAPSSYFCKPYDSITVSIRNRCSSGNFLDHEDDHGLYVMNSLDDSFEFFNYCKVGLSTYPLLYNKWYWSPLPSPPSRTSPLVAAAVIDNSTICASSKNGTYTFDISREVWSHTGSWVLPFHRAAEYVPELGLWFGLQAPGTWQNRLCAFDLSSSAMAESAPSPLHDWEYLDLLPDELLPVGRALVNLGSGKFCIATHCRKDRSALQEEDELENIRSLGGNGGVQTLLTGVEVVRCADGLQLIHHKSQRYNIENLSIHCVL

SEQ ID NO: 67146 - DNA, 2707 bp, Triticum aestivum
  misc_feature (1)..(2707): Ceres Seq. ID no. 14313284
cgcccctaaacccaccctccaccattctatcccaagtataaaccctagcccagccccttatcctttcgtctccccctcccagacaccgcgccggaacccaaaccatccgaacgaccaaccaccagcgagcgccgcgacgtctgcctctcccatggcgcccgcgctgagcaggaccctgggcccgtcctcggtggcggcgctgcggccgagcccgtcgcgggggctgctgcgggccgcgctcgcgccgcaggggaggaggcccgccggcgccagaggagtcaggtgggaggccgggaggggccggctggtcggggccaggtgcgcctccgccgttgccgagaagaccgccggggaggaggaggaggccgccggcgagaagttcgagtaccaggccgaggttagccgcttgatggatttgattgttcacagcctctacagccataaggaagtgttccttcgggagcttgtaagtaatgcgagtgatgccttggataagctgagatttctcagtgtaactgacccgtccgtgctggctgatggtggtgacatggaaataaggattaaacctgaccctgatgctggcacaataactatcactgatagtggcattgggatgacaaaggatgagctcaaggactgccttggaactatcgcacaaagtggtacctccaaatttttgaaggctctgaaggagaacaaggagcttggtgcagataatggacttattggtcaatttggtgttggattttattcggcttttcttgttgcagagaaggttgtggtgtccactaagagtcccaagacagataagcagtatatatgggaagctgaggctaacagtagctcatacgttatcagggaagagactgatcctgagaaaatgctgacacgtggaacacagattactctctttttaagagaggatgataagtatgaatttgctgaccctacgaggattcaaggtctagttaagaactactcgcagtttgtttcgttccccatttttacatggcaggagaaatctagaacagttgaggttgaagaagaggagtcaaaagaagccgaagagacagcagagggtgagaaggagaagaagaagaaaactatcactgagaagtactgggattgggaattggcaaatgaaacaaagccaatatggatgagaaatccaaaggaagtcgaggaaaccgagtacaatgaattttacaagaaggcattcaatgagtttttggatcctctagctcatgcacactttacaacagagggtgaggtggaatttagaagtgttctctacatcccaggaatggcaccacttagcaatgaggagataatgaaccctaagaccaaaaatatcaggttgtatgtcaagagggttttcatttctgatgactttgatggcgagctgttccccaggtacttgagctttgtcaaaggtgttgttgactcgaatgatctccctctgaatgtttctcgtgagattcttcaagaaagtcgtattgtcaggatcatgcgcaagagacttgttaggaagacttttgatatgattcaggatattgctgacaaggataacaaggaggactacaagaaattttgggagagctttggcaaatttatgaaacttggttgcattgaggactcaggaaatcagaagcgccttgctcctttgctgcggttttattcctctaaaaatgaaacggatttgataagtctcgatcagtatgtggagaatatgcccgagacccaaaaggctatctattatattgccacagatagtcttcagagtgcaaagaccgctccattcttggaaaagctgcttcagaaagatattgaagttctataccttatcgaaccgattgatgaggtagctattcagaatctgcagacgtacaaagagaaaaagtttgttgatatcagcaaggaagacctagaattgggcgatgaggatgaggacaaggaagaaaccaagcaggaatacactcttctttgtgactggataaagcagcagctgggtgacaaagttgccaaggtccaaatttcaaagcgactcagctcttcaccatgtgttcttgtatctggcaagtttggttggtcggctaacatggaaaggcttatgaaagcacaaacgcttggtgacacatcaagcttggagttcatgagaggaagaagaatttttgaaatcaaccccgaccaccctattgtcaaggacttgagtgctgcttgcaagaacgagcctgagagcaccgaagccaagagggcagttgagttgctgtacgagactgccctgatctccagtggatacactcctgagagtccagcggagttggggggcaagatctacgagatgatgaccatcgcccttggcgggagatggggtagatccggcaccgaggaggctgagaccaatgccgacgtcgactcttctgaaggtgttgtaacggaggtcgttgagccatccgaagtcaggactgagaacgagaatgacccatggagagattagttagttctgtaggcatccattttttttaaataccctggaggtggatgagcaaaaaatagaagtatcactggagccagagtgatgatgacatcgagcgatggactgtctttgtaagaacactgagctccaaaatcttgtttgttatcgccaaaggctaaattttgtaggtgacttttttgacggccgtgaaataatttatctttattactg

SEQ ID NO: 67147 - protein, 831 aa, Triticum aestivum
  peptide (1)..(831): Ceres Seq. ID no. 14313285
  misc_feature (312)..(787): Pfam Name: Hsp90 protein Pfam Description: Hsp90 protein
  misc_feature (125)..(827): Homolog of NCBI NO: 4507677 NR Description: tumor rejection antigen (gp96) 1
  misc_feature (118)..(831): Homolog of NCBI NO: 119359 NR Description: Endoplasmin precursor (Heat shock 108 kDa
  misc_feature (510)..(825): Homolog of NCBI NO: 544242 NR Description: ENDOPLASMIN HOMOLOG PRECURSOR (GRP94 HOMOLOG)
  misc_feature (123)..(525): Homolog of NCBI NO: 544242 NR Description: ENDOPLASMIN HOMOLOG PRECURSOR (GRP94 HOMOLOG)
  misc_feature (118)..(831): Homolog of NCBI NO: 63509 NR Description: hsp 108 [Gallus gallus]
  misc_feature (114)..(400): Homolog of NCBI NO: 14041148 NR Description: heat shock protein 90 [Dendronephthya klunzingeri]
  misc_feature (338)..(808): Homolog of NCBI NO: 14041148 NR Description: heat shock protein 90 [Dendronephthya klunzingeri]
  misc_feature (122)..(820): Homolog of NCBI NO: 1708314 NR Description: Heat shock protein 83
  misc_feature (121)..(820): Homolog of NCBI NO: 1708316 NR Description: HEAT SHOCK COGNATE 90 KD PROTEIN
  misc_feature (103)..(820): Homolog of NCBI NO: 15231505 NR Description: heat shock protein -related [Arabidopsis
APKPTLHHSIPSINPSPAPYPFVSPSQTPRRNPNHPNDQPPASAATSASPMAPALSRTLGPSSVAALRPSPSRGLLRAALAPQGRRPAGARGVRWEAGRGRLVGARCASAVAEKTAGEEEEAAGEKFEYQAEVSRLMDLIVHSLYSHKEVFLRELVSNASDALDKLRFLSVTDPSVLADGGDMEIRIKPDPDAGTITITDSGIGMTKDELKDCLGTIAQSGTSKFLKALKENKELGADNGLIGQFGVGFYSAFLVAEKVVVSTKSPKTDKQYIWEAEANSSSYVIREETDPEKMLTRGTQITLFLREDDKYEFADPTRIQGLVKNYSQFVSFPIFTWQEKSRTVEVEEEESKEAEETAEGEKEKKKKTITEKYWDWELANETKPIWMRNPKEVEETEYNEFYKKAFNEFLDPLAHAHFTTEGEVEFRSVLYIPGMAPLSNEEIMNPKTKNIRLYVKRVFISDDFDGELFPRYLSFVKGVVDSNDLPLNVSREILQESRIVRIMRKRLVRKTFDMIQDIADKDNKEDYKKFWESFGKFMKLGCIEDSGNQKRLAPLLRFYSSKNETDLISLDQYVENMPETQKAIYYIATDSLQSAKTAPFLEKLLQKDIEVLYLIEPIDEVAIQNLQTYKEKKFVDISKEDLELGDEDEDKEETKQEYTLLCDWIKQQLGDKVAKVQISKRLSSSPCVLVSGKFGWSANMERLMKAQTLGDTSSLEFMRGRRIFEINPDHPIVKDLSAACKNEPESTEAKRAVELLYETALISSGYTPESPAELGGKIYEMMTIALGGRWGRSGTEEAETNADVDSSEGVVTEVVEPSEVRTENENDPWRD

SEQ ID NO: 67148 - protein, 781 aa, Triticum aestivum
  peptide (1)..(781): Ceres Seq. ID no. 14313286
  misc_feature (262)..(737): Pfam Name: Hsp90 protein Pfam Description: Hsp90 protein
  misc_feature (75)..(777): Homolog of NCBI NO: 4507677 NR Description: tumor rejection antigen (gp96) 1
  misc_feature (68)..(781): Homolog of NCBI NO: 119359 NR Description: Endoplasmin precursor (Heat shock 108 kDa
  misc_feature (460)..(775): Homolog of NCBI NO: 544242 NR Description: ENDOPLASMIN HOMOLOG PRECURSOR (GRP94 HOMOLOG)
  misc_feature (73)..(475): Homolog of NCBI NO: 544242 NR Description: ENDOPLASMIN HOMOLOG PRECURSOR (GRP94 HOMOLOG)
  misc_feature (68)..(781): Homolog of NCBI NO: 63509 NR Description: hsp 108 [Gallus gallus]
  misc_feature (64)..(350): Homolog of NCBI NO: 14041148 NR Description: heat shock protein 90 [Dendronephthya klunzingeri]
  misc_feature (288)..(758): Homolog of NCBI NO: 14041148 NR Description: heat shock protein 90 [Dendronephthya klunzingeri]
  misc_feature (72)..(770): Homolog of NCBI NO: 1708314 NR Description: Heat shock protein 83
  misc_feature (71)..(770): Homolog of NCBI NO: 1708316 NR Description: HEAT SHOCK COGNATE 90 KD PROTEIN
  misc_feature (53)..(770): Homolog of NCBI NO: 15231505 NR Description: heat shock protein -related [Arabidopsis
MAPALSRTLGPSSVAALRPSPSRGLLRAALAPQGRRPAGARGVRWEAGRGRLVGARCASAVAEKTAGEEEEAAGEKFEYQAEVSRLMDLIVHSLYSHKEVFLRELVSNASDALDKLRFLSVTDPSVLADGGDMEIRIKPDPDAGTITITDSGIGMTKDELKDCLGTIAQSGTSKFLKALKENKELGADNGLIGQFGVGFYSAFLVAEKVVVSTKSPKTDKQYIWEAEANSSSYVIREETDPEKMLTRGTQITLFLREDDKYEFADPTRIQGLVKNYSQFVSFPIFTWQEKSRTVEVEEEESKEAEETAEGEKEKKKKTITEKYWDWELANETKPIWMRNPKEVEETEYNEFYKKAFNEFLDPLAHAHFTTEGEVEFRSVLYIPGMAPLSNEEIMNPKTKNIRLYVKRVFISDDFDGELFPRYLSFVKGVVDSNDLPLNVSREILQESRIVRIMRKRLVRKTFDMIQDIADKDNKEDYKKFWESFGKFMKLGCIEDSGNQKRLAPLLRFYSSKNETDLISLDQYVENMPETQKAIYYIATDSLQSAKTAPFLEKLLQKDIEVLYLIEPIDEVAIQNLQTYKEKKFVDISKEDLELGDEDEDKEETKQEYTLLCDWIKQQLGDKVAKVQISKRLSSSPCVLVSGKFGWSANMERLMKAQTLGDTSSLEFMRGRRIFEINPDHPIVKDLSAACKNEPESTEAKRAVELLYETALISSGYTPESPAELGGKIYEMMTIALGGRWGRSGTEEAETNADVDSSEGVVTEVVEPSEVRTENENDPWRD

SEQ ID NO: 67149 - protein, 695 aa, Triticum aestivum
  peptide (1)..(695): Ceres Seq. ID no. 14313287
  misc_feature (176)..(651): Pfam Name: Hsp90 protein Pfam Description: Hsp90 protein
  misc_feature (1)..(691): Homolog of NCBI NO: 4507677 NR Description: tumor rejection antigen (gp96) 1
  misc_feature (1)..(695): Homolog of NCBI NO: 119359 NR Description: Endoplasmin precursor (Heat shock 108 kDa
  misc_feature (374)..(689): Homolog of NCBI NO: 544242 NR Description: ENDOPLASMIN HOMOLOG PRECURSOR (GRP94 HOMOLOG)
  misc_feature (1)..(389): Homolog of NCBI NO: 544242 NR Description: ENDOPLASMIN HOMOLOG PRECURSOR (GRP94 HOMOLOG)
  misc_feature (1)..(695): Homolog of NCBI NO: 63509 NR Description: hsp 108 [Gallus gallus]
  misc_feature (1)..(264): Homolog of NCBI NO: 14041148 NR Description: heat shock protein 90 [Dendronephthya klunzingeri]
  misc_feature (202)..(672): Homolog of NCBI NO: 14041148 NR Description: heat shock protein 90 [Dendronephthya klunzingeri]
  misc_feature (1)..(684): Homolog of NCBI NO: 1708314 NR Description: Heat shock protein 83
  misc_feature (1)..(684): Homolog of NCBI NO: 1708316 NR Description: HEAT SHOCK COGNATE 90 KD PROTEIN
  misc_feature (1)..(684): Homolog of NCBI NO: 15231505 NR Description: heat shock protein -related [Arabidopsis
MDLIVHSLYSHKEVFLRELVSNASDALDKLRFLSVTDPSVLADGGDMEIRIKPDPDAGTITITDSGIGMTKDELKDCLGTIAQSGTSKFLKALKENKELGADNGLIGQFGVGFYSAFLVAEKVVVSTKSPKTDKQYIWEAEANSSSYVIREETDPEKMLTRGTQITLFLREDDKYEFADPTRIQGLVKNYSQFVSFPIFTWQEKSRTVEVEEEESKEAEETAEGEKEKKKKTITEKYWDWELANETKPIWMRNPKEVEETEYNEFYKKAFNEFLDPLAHAHFTTEGEVEFRSVLYIPGMAPLSNEEIMNPKTKNIRLYVKRVFISDDFDGELFPRYLSFVKGVVDSNDLPLNVSREILQESRIVRIMRKRLVRKTFDMIQDIADKDNKEDYKKFWESFGKFMKLGCIEDSGNQKRLAPLLRFYSSKNETDLISLDQYVENMPETQKAIYYIATDSLQSAKTAPFLEKLLQKDIEVLYLIEPIDEVAIQNLQTYKEKKFVDISKEDLELGDEDEDKEETKQEYTLLCDWIKQQLGDKVAKVQISKRLSSSPCVLVSGKFGWSANMERLMKAQTLGDTSSLEFMRGRRIFEINPDHPIVKDLSAACKNEPESTEAKRAVELLYETALISSGYTPESPAELGGKIYEMMTIALGGRWGRSGTEEAETNADVDSSEGVVTEVVEPSEVRTENENDPWRD

SEQ ID NO: 67150 - DNA, 1326 bp, Triticum aestivum
  misc_feature (1)..(1326): Ceres Seq. ID no. 14301839
tcttcgccacccgctccccgctccagaccgccgccgccgccgccgccgtgcgccatggtgaggctcaacgccgacctgatatggaagagcccgcacttcttcaacgccatcaaggagcgcgagctcgacctccgaggcaacaagatcgccatcatcgagaacatcggcgccaccgaggaccagtttgacactattgacttgtcggacaacgagattgtcaagcttgagaacttccctttcatgaatcgccttggcactctgttaatcaacaacaacagaattacacgtatcaatcccaaccttggtgagtttttacccaagatgcatactttggtgctgacgaacaatcgccttacaagtcttgcggagattgaccccctggcctctcttccaaagctgcaatttctcagcttactggataataccgtaactaagcaaccagattaccggttatatgtgatccacaaactgaagcatctgcgtttgctggacttcaagaaagtgaaacaacaggagagagctgacgcagcacaaaagttccactcaaaggaggcagaggaggcggcaaagaaggttgctgccaaagcttataccccagtagtgatggatgctcaaggtaccacaaaagaccagggccctaaagtagtcgctccaacgcctgcacaaatcacagctatcaaggctgctatcattaactcgcagacgcttgacgaagttacaaggcttgagaaggcattgagcactggccaagttcctgctgagtttgcgctccccaagcctgacaccaacatggctgaggcgtcagaggaagctgaagctgagaagatggagacagatggccaggaccaggaggaggatggggctgatgagcagaagcaagcagatgaaagcaccccgattcaggaggattgatgtcatgcatacacctgaatctgcctgttctcgtggggggatgaaaccatgtgcggcgactcggcgatctcgtgggggaattctcgactcggcgatctagtgtcagtatattgattgatgtatcctgtggatgctaacaacgcttttcagtacatggtactgttgtccgagtcgaggaaggtttacgcccaggggacctagatgtgttggatgttttagaagacgatgcgttgcgcgctgaatgaatgttgctgagactctactcccgcggtgtgtcgacaacgccgacttgcttgggctccattgttgttaaatttgctacgctacctattgatagatggtttttcttggaatttggatcttgctggggttgtaattcatcaggagaggatgtatctccatcagatttttggt

SEQ ID NO: 67151 - protein, 303 aa, Triticum aestivum
  peptide (1)..(303): Ceres Seq. ID no. 14301840
  misc_feature (19)..(280): Homolog of NCBI NO: 7021537 NR Description: U2 small nuclear ribonucleoprotein A' [Mus
  misc_feature (19)..(270): Homolog of NCBI NO: 34857187 NR Description: similar to U2 small nuclear ribonucleoprotein
  misc_feature (19)..(280): Homolog of NCBI NO: 31981942 NR Description: U2 small nuclear ribonucleoprotein polypeptide
  misc_feature (19)..(280): Homolog of NCBI NO: 31077178 NR Description: U2 small nuclear ribonucleoprotein A' (U2
  misc_feature (19)..(270): Homolog of NCBI NO: 7263962 NR Description: bA395L14.12 (novel protein similar to small
  misc_feature (19)..(270): Homolog of NCBI NO: 4507121 NR Description: u2 small nuclear ribonucleoprotein polypeptide A'
  misc_feature (19)..(270): Homolog of NCBI NO: 31077165 NR Description: U2 small nuclear ribonucleoprotein A' (U2
  misc_feature (19)..(293): Homolog of NCBI NO: 3955033 NR Description: U2 snRNP-specific A' protein [Salmo salar]
  misc_feature (19)..(270): Homolog of NCBI NO: 15218274 NR Description: U2 small nuclear ribonucleoprotein A, putative
  misc_feature (19)..(270): Homolog of NCBI NO: 322619 NR Description: U2 snRNP protein A' - Arabidopsis thaliana
SSPPAPRSRPPPPPPPCAMVRLNADLIWKSPHFFNAIKERELDLRGNKIAIIENIGATEDQFDTIDLSDNEIVKLENFPFMNRLGTLLINNNRITRINPNLGEFLPKMHTLVLTNNRLTSLAEIDPLASLPKLQFLSLLDNTVTKQPDYRLYVIHKLKHLRLLDFKKVKQQERADAAQKFHSKEAEEAAKKVAAKAYTPVVMDAQGTTKDQGPKVVAPTPAQITAIKAAIINSQTLDEVTRLEKALSTGQVPAEFALPKPDTNMAEASEEAEAEKMETDGQDQEEDGADEQKQADESTPIQED

SEQ ID NO: 67152 - protein, 285 aa, Triticum aestivum
  peptide (1)..(285): Ceres Seq. ID no. 14301841
  misc_feature (1)..(262): Homolog of NCBI NO: 7021537 NR Description: U2 small nuclear ribonucleoprotein A' [Mus
  misc_feature (1)..(252): Homolog of NCBI NO: 34857187 NR Description: similar to U2 small nuclear ribonucleoprotein
  misc_feature (1)..(262): Homolog of NCBI NO: 31981942 NR Description: U2 small nuclear ribonucleoprotein polypeptide
  misc_feature (1)..(262): Homolog of NCBI NO: 31077178 NR Description: U2 small nuclear ribonucleoprotein A' (U2
  misc_feature (1)..(252): Homolog of NCBI NO: 7263962 NR Description: bA395L14.12 (novel protein similar to small
  misc_feature (1)..(252): Homolog of NCBI NO: 4507121 NR Description: u2 small nuclear ribonucleoprotein polypeptide A'
  misc_feature (1)..(252): Homolog of NCBI NO: 31077165 NR Description: U2 small nuclear ribonucleoprotein A' (U2
  misc_feature (1)..(275): Homolog of NCBI NO: 3955033 NR Description: U2 snRNP-specific A' protein [Salmo salar]
  misc_feature (1)..(252): Homolog of NCBI NO: 15218274 NR Description: U2 small nuclear ribonucleoprotein A, putative
  misc_feature (1)..(252): Homolog of NCBI NO: 322619 NR Description: U2 snRNP protein A' - Arabidopsis thaliana
MVRLNADLIWKSPHFFNAIKERELDLRGNKIAIIENIGATEDQFDTIDLSDNEIVKLENFPFMNRLGTLLINNNRITRINPNLGEFLPKMHTLVLTNNRLTSLAEIDPLASLPKLQFLSLLDNTVTKQPDYRLYVIHKLKHLRLLDFKKVKQQERADAAQKFHSKEAEEAAKKVAAKAYTPVVMDAQGTTKDQGPKVVAPTPAQITAIKAAIINSQTLDEVTRLEKALSTGQVPAEFALPKPDTNMAEASEEAEAEKMETDGQDQEEDGADEQKQADESTPIQED

SEQ ID NO: 67153 - protein, 223 aa, Triticum aestivum
  peptide (1)..(223): Ceres Seq. ID no. 14301842
  misc_feature (1)..(200): Homolog of NCBI NO: 7021537 NR Description: U2 small nuclear ribonucleoprotein A' [Mus
  misc_feature (1)..(190): Homolog of NCBI NO: 34857187 NR Description: similar to U2 small nuclear ribonucleoprotein
  misc_feature (1)..(200): Homolog of NCBI NO: 31981942 NR Description: U2 small nuclear ribonucleoprotein polypeptide
  misc_feature (1)..(200): Homolog of NCBI NO: 31077178 NR Description: U2 small nuclear ribonucleoprotein A' (U2
  misc_feature (1)..(190): Homolog of NCBI NO: 7263962 NR Description: bA395L14.12 (novel protein similar to small
  misc_feature (1)..(190): Homolog of NCBI NO: 4507121 NR Description: u2 small nuclear ribonucleoprotein polypeptide A'
  misc_feature (1)..(190): Homolog of NCBI NO: 31077165 NR Description: U2 small nuclear ribonucleoprotein A' (U2
  misc_feature (1)..(213): Homolog of NCBI NO: 3955033 NR Description: U2 snRNP-specific A' protein [Salmo salar]
  misc_feature (1)..(190): Homolog of NCBI NO: 15218274 NR Description: U2 small nuclear ribonucleoprotein A, putative
  misc_feature (1)..(190): Homolog of NCBI NO: 322619 NR Description: U2 snRNP protein A' - Arabidopsis thaliana
MNRLGTLLINNNRITRINPNLGEFLPKMHTLVLTNNRLTSLAEIDPLASLPKLQFLSLLDNTVTKQPDYRLYVIHKLKHLRLLDFKKVKQQERADAAQKFHSKEAEEAAKKVAAKAYTPVVMDAQGTTKDQGPKVVAPTPAQITAIKAAIINSQTLDEVTRLEKALSTGQVPAEFALPKPDTNMAEASEEAEAEKMETDGQDQEEDGADEQKQADESTPIQED

SEQ ID NO: 67154 - DNA, 1354 bp, Triticum aestivum
  misc_feature (1)..(1354): Ceres Seq. ID no. 13590307
aggtttgcagtagcgaggagtccatcccaccaagcttaaataacggccacccattcgcctcgtctcactatctctcccgttgtcgtcgcctcctcctaaaccactctccctatccccgtgtccagaagctaccccccggctccratggcggcgaaggaaccgatgcgcgtgctcgtcaccggcgccgcaggacaaatcggatatgctcttgttcccatgattgccaggggagttatgcttggtgcagaccagcctgttattctgcatatgctggatattgaatttgctgctgaagctcttaaaggcgtcaagatggagttgatcgatgccgcatttccacttctcaagggagttgttgcaacaactgatgttgtcgaggcctgcactggtgtgaatgttgcggttatggttggtggattccccaggaaggaaggaatggaaaggaaggatgttatgacgaaaaatgtttcaatctacaaagctcaagcatctgctcttgaagctcatgcagcccccaactgcaaggttttggttgttgccaacccagcaaacaccaatgctctcatcctgaaggagtttgctccatctatccctgagaagaacatcagttgtttgacccgcctagaccacaacagggcactcggtcagatttctgagagacttggtgtccaagtttctgacgtgaagaatgctattatctggggtaatcactcgtccagtcagtaccctgatgttaaccacgccactgtgaagacttccagtggagagaagcctgttcgtgaacttgttcaagatgatgaatggctaaacggggagttcattgccactgtccagcagcgtggtgctgcaatcatcaaagcgaggaagctctccagtgctctctctgctgccagctcagcttgtgatcacatccgtgactgggttctgggaaccgccgagggaacatttgtttccatgggtgtgtactctgatggttcatacggtgtgcctgctggtcttatctactccttcccagtaacgtgcagtggtggtgaatggacaattgttcaagggctcccgatcgatgagttctcgaggaagaagatggatgccaccgcccaggagctgtcggaggagaaggcgctggcctactcatgcctcgcgtaaatccacattcgaagggcagctgctcctctgatgttttgaataaatgaaaccttccgctccttagaaactctcgtctccacccagaacagccgcacatcgcgatgcatgctccttttcgctggttttcccagtgtgtatgaatgaggcttgtagctccccttttgcctgatgatttacaggacagtacatttgctggaggggggaaagg

SEQ ID NO: 67155 - protein, 333 aa, Triticum aestivum
  peptide (1)..(333): Ceres Seq. ID no. 15220958
  misc_feature (158)..(332): Pfam Name: lactate/malate dehydrogenase, alpha/beta Pfam Description: lactate/malate dehydrogenase, alpha/beta
  misc_feature (1)..(333): Homolog of NCBI NO: 24528075 NR Description: cytosolic malate dehydrogenase [Mantoniella
  misc_feature (3)..(332): Homolog of NCBI NO: 12229778 NR Description: Malate dehydrogenase, cytoplasmic
  misc_feature (3)..(333): Homolog of NCBI NO: 11133373 NR Description: Malate dehydrogenase, cytoplasmic
  misc_feature (3)..(333): Homolog of NCBI NO: 15982948 NR Description: NAD-dependent malate dehydrogenase [Prunus
  misc_feature (3)..(333): Homolog of NCBI NO: 10334493 NR Description: cytosolic malate dehydrogenase [Cicer arietinum]
  misc_feature (3)..(333): Homolog of NCBI NO: 15219721 NR Description: malate dehydrogenase, cytosolic, putative
  misc_feature (3)..(332): Homolog of NCBI NO: 10798652 NR Description: malate dehydrogenase [Nicotiana tabacum]
  misc_feature (3)..(333): Homolog of NCBI NO: 15239843 NR Description: malate dehydrogenase, cytosolic, putative
  misc_feature (3)..(333): Homolog of NCBI NO: 21593565 NR Description: cytosolic malate dehydrogenase [Arabidopsis
  misc_feature (3)..(332): Homolog of NCBI NO: 18202485 NR Description: Malate dehydrogenase, cytoplasmic
MAAKEPMRVLVTGAAGQIGYALVPMIARGVMLGADQPVILHMLDIEFAAEALKGVKMELIDAAFPLLKGVVATTDVVEACTGVNVAVMVGGFPRKEGMERKDVMTKNVSIYKAQASALEAHAAPNCKVLVVANPANTNALILKEFAPSIPEKNISCLTRLDHNRALGQISERLGVQVSDVKNAIIWGNHSSSQYPDVNHATVKTSSGEKPVRELVQDDEWLNGEFIATVQQRGAAIIKARKLSSALSAASSACDHIRDWVLGTAEGTFVSMGVYSDGSYGVPAGLIYSFPVTCSGGEWTIVQGLPIDEFSRKKMDATAQELSEEKALAYSCLA

SEQ ID NO: 67156 - protein, 327 aa, Triticum aestivum
  peptide (1)..(327): Ceres Seq. ID no. 15220959
  misc_feature (152)..(326): Pfam Name: lactate/malate dehydrogenase, alpha/beta Pfam Description: lactate/malate dehydrogenase, alpha/beta
  misc_feature (1)..(327): Homolog of NCBI NO: 24528075 NR Description: cytosolic malate dehydrogenase [Mantoniella
  misc_feature (1)..(326): Homolog of NCBI NO: 12229778 NR Description: Malate dehydrogenase, cytoplasmic
  misc_feature (1)..(327): Homolog of NCBI NO: 11133373 NR Description: Malate dehydrogenase, cytoplasmic
  misc_feature (1)..(327): Homolog of NCBI NO: 15982948 NR Description: NAD-dependent malate dehydrogenase [Prunus
  misc_feature (1)..(327): Homolog of NCBI NO: 10334493 NR Description: cytosolic malate dehydrogenase [Cicer arietinum]
  misc_feature (1)..(327): Homolog of NCBI NO: 15219721 NR Description: malate dehydrogenase, cytosolic, putative
  misc_feature (1)..(326): Homolog of NCBI NO: 10798652 NR Description: malate dehydrogenase [Nicotiana tabacum]
  misc_feature (1)..(327): Homolog of NCBI NO: 15239843 NR Description: malate dehydrogenase, cytosolic, putative
  misc_feature (1)..(327): Homolog of NCBI NO: 21593565 NR Description: cytosolic malate dehydrogenase [Arabidopsis
  misc_feature (1)..(326): Homolog of NCBI NO: 18202485 NR Description: Malate dehydrogenase, cytoplasmic
MRVLVTGAAGQIGYALVPMIARGVMLGADQPVILHMLDIEFAAEALKGVKMELIDAAFPLLKGVVATTDVVEACTGVNVAVMVGGFPRKEGMERKDVMTKNVSIYKAQASALEAHAAPNCKVLVVANPANTNALILKEFAPSIPEKNISCLTRLDHNRALGQISERLGVQVSDVKNAIIWGNHSSSQYPDVNHATVKTSSGEKPVRELVQDDEWLNGEFIATVQQRGAAIIKARKLSSALSAASSACDHIRDWVLGTAEGTFVSMGVYSDGSYGVPAGLIYSFPVTCSGGEWTIVQGLPIDEFSRKKMDATAQELSEEKALAYSCLA

SEQ ID NO: 67157 - protein, 309 aa, Triticum aestivum
  peptide (1)..(309): Ceres Seq. ID no. 15220960
  misc_feature (134)..(308): Pfam Name: lactate/malate dehydrogenase, alpha/beta Pfam Description: lactate/malate dehydrogenase, alpha/beta
  misc_feature (1)..(309): Homolog of NCBI NO: 24528075 NR Description: cytosolic malate dehydrogenase [Mantoniella
  misc_feature (1)..(308): Homolog of NCBI NO: 12229778 NR Description: Malate dehydrogenase, cytoplasmic
  misc_feature (1)..(309): Homolog of NCBI NO: 11133373 NR Description: Malate dehydrogenase, cytoplasmic
  misc_feature (1)..(309): Homolog of NCBI NO: 15982948 NR Description: NAD-dependent malate dehydrogenase [Prunus
  misc_feature (1)..(309): Homolog of NCBI NO: 10334493 NR Description: cytosolic malate dehydrogenase [Cicer arietinum]
  misc_feature (1)..(309): Homolog of NCBI NO: 15219721 NR Description: malate dehydrogenase, cytosolic, putative
  misc_feature (1)..(308): Homolog of NCBI NO: 10798652 NR Description: malate dehydrogenase [Nicotiana tabacum]
  misc_feature (1)..(309): Homolog of NCBI NO: 15239843 NR Description: malate dehydrogenase, cytosolic, putative
  misc_feature (1)..(309): Homolog of NCBI NO: 21593565 NR Description: cytosolic malate dehydrogenase [Arabidopsis
  misc_feature (1)..(308): Homolog of NCBI NO: 18202485 NR Description: Malate dehydrogenase, cytoplasmic
MIARGVMLGADQPVILHMLDIEFAAEALKGVKMELIDAAFPLLKGVVATTDVVEACTGVNVAVMVGGFPRKEGMERKDVMTKNVSIYKAQASALEAHAAPNCKVLVVANPANTNALILKEFAPSIPEKNISCLTRLDHNRALGQISERLGVQVSDVKNAIIWGNHSSSQYPDVNHATVKTSSGEKPVRELVQDDEWLNGEFIATVQQRGAAIIKARKLSSALSAASSACDHIRDWVLGTAEGTFVSMGVYSDGSYGVPAGLIYSFPVTCSGGEWTIVQGLPIDEFSRKKMDATAQELSEEKALAYSCLA

SEQ ID NO: 67158 - DNA, 1583 bp, Triticum aestivum
  misc_feature (1)..(1583): Ceres Seq. ID no. 13662164
atcctaatagaaaactaaatgctttaatgaaaatggacttccctcatgtactcacatttcgtcggtacaccattagttgtcctatgtacacatgattttcccacctcattagttacttattagcctgtccggttcatcatagttacatgattggtctcctctgtttgtcagtttcatgtggagattgttgtgtgcttctactcaaccaacatcattaacctgcaggaagtgctggtgatgttctagaagacaatcctgttggcaagttgaaggttttcgtctacgacttgccaagcaagtacaacaagaggcttgtcaccaaggatccccgatgcctcaaccacatgtttgccgctgagatattcatgcaccgtttcttgctctctagtgcagtgaggacggttaatcctgaagaggccgattggttctacgctcctgtttacactacttgtgatctaactcgtgctggacttccgttaccgttcaagtctccaaggatgatgagaagcgcgatccagttcatttcaaagaggtggcctttctggaatagaactgatggaggagatcatttctttgtcgctccacatgattttgcggcatgctttcactaccaggaagagaatgctattgcgcgtggaattcttccgttgctacgccgtgctacattggttcaaacatttggacagaagaatcatgtttgcttgaaagaggggtctattacaataccaccatttgcgccaccacagaaaatgcaggcccacttgattcctcctgatactccccgttcaatcttcgtttacttcagaggtttgttctatgacaatgggaacgaccctgagggtgggtattacgcaagaggtgctcgagcttcattgtgggagaacttcaagaataatcctctgtttgatatctccaccgaacaccctgccacttactacgaagatatgcagcgctccgtcttctgcttatgtccgttggggtgggcgccatggagtcctaggttggtggaggctgtggtttttggctgcattccagtcatcatagctgacgacatcgtgctgcctttcgcggatgcaatcccttgggacgaaattggtgtttttgttgatgaggaggatgtgccaaagcttgattcaattctgacatcgattccgattgatgatatcctaaggaagcaaagattgctcgccaacccatcaatgaagaaggccatgctgttcccgcagccagcgcaacctagagatgcattccatcagattctaaatggccttgctcgcaaactcccgcacccagagaccatatacttacaaccaggtgagaagcatctcaactggacagctgggcctgttggagacttgaagccttggtaacataaaagcttccttgcaagacctggctttgttgatcttgtgaaaagttctgtttcttttatcacctttctctgagaagtccgaagatccatagaattatacgatattgaagtgtgttatatcctctgatgtcactctaactaaaaatagtggatcttacataaacggttgtaacgttgtaactgtattaattgtataaagaagtaaagaaac

SEQ ID NO: 67159 - protein, 341 aa, Triticum aestivum
  peptide (1)..(341): Ceres Seq. ID no. 15220162
  misc_feature (1)..(281): Pfam Name: Exostosin family Pfam Description: Exostosin family
  misc_feature (1)..(313): Homolog of NCBI NO: 25407954 NR Description: hypothetical protein At2g28110 [imported] -
  misc_feature (1)..(313): Homolog of NCBI NO: 15237173 NR Description: expressed protein [Arabidopsis thaliana]
  misc_feature (1)..(341): Homolog of NCBI NO: 10176877 NR Description: gb|AAC80624.1~gene_id:MAC9.17~strong similarity
  misc_feature (1)..(341): Homolog of NCBI NO: 23821292 NR Description: pectin-glucuronyltransferase [Nicotiana
  misc_feature (1)..(341): Homolog of NCBI NO: 18642697 NR Description: Unknown protein [Oryza sativa]
  misc_feature (1)..(341): Homolog of NCBI NO: 34907044 NR Description: hypothetical protein~similar to Arabidopsis
  misc_feature (1)..(341): Homolog of NCBI NO: 15223522 NR Description: hypothetical protein [Arabidopsis thaliana]
  misc_feature (1)..(341): Homolog of NCBI NO: 21592991 NR Description: unknown [Arabidopsis thaliana]
  misc_feature (1)..(341): Homolog of NCBI NO: 18424516 NR Description: (AtGUT1) NpGUT1 homolog [Arabidopsis thaliana]
  misc_feature (1)..(341): Homolog of NCBI NO: 34907048 NR Description: contains EST D24978(R2878)~similar to Arabidopsis
MFAAEIFMHRFLLSSAVRTVNPEEADWFYAPVYTTCDLTRAGLPLPFKSPRMMRSAIQFISKRWPFWNRTDGGDHFFVAPHDFAACFHYQEENAIARGILPLLRRATLVQTFGQKNHVCLKEGSITIPPFAPPQKMQAHLIPPDTPRSIFVYFRGLFYDNGNDPEGGYYARGARASLWENFKNNPLFDISTEHPATYYEDMQRSVFCLCPLGWAPWSPRLVEAVVFGCIPVIIADDIVLPFADAIPWDEIGVFVDEEDVPKLDSILTSIPIDDILRKQRLLANPSMKKAMLFPQPAQPRDAFHQILNGLARKLPHPETIYLQPGEKHLNWTAGPVGDLKPW

SEQ ID NO: 67160 - protein, 334 aa, Triticum aestivum
  peptide (1)..(334): Ceres Seq. ID no. 15220163
  misc_feature (1)..(274): Pfam Name: Exostosin family Pfam Description: Exostosin family
  misc_feature (1)..(306): Homolog of NCBI NO: 25407954 NR Description: hypothetical protein At2g28110 [imported] -
  misc_feature (1)..(306): Homolog of NCBI NO: 15237173 NR Description: expressed protein [Arabidopsis thaliana]
  misc_feature (1)..(334): Homolog of NCBI NO: 10176877 NR Description: gb|AAC80624.1~gene_id:MAC9.17~strong similarity
  misc_feature (1)..(334): Homolog of NCBI NO: 23821292 NR Description: pectin-glucuronyltransferase [Nicotiana
  misc_feature (1)..(334): Homolog of NCBI NO: 18642697 NR Description: Unknown protein [Oryza sativa]
  misc_feature (1)..(334): Homolog of NCBI NO: 34907044 NR Description: hypothetical protein~similar to Arabidopsis
  misc_feature (1)..(334): Homolog of NCBI NO: 15223522 NR Description: hypothetical protein [Arabidopsis thaliana]
  misc_feature (1)..(334): Homolog of NCBI NO: 21592991 NR Description: unknown [Arabidopsis thaliana]
  misc_feature (1)..(334): Homolog of NCBI NO: 18424516 NR Description: (AtGUT1) NpGUT1 homolog [Arabidopsis thaliana]
  misc_feature (1)..(334): Homolog of NCBI NO: 34907048 NR Description: contains EST D24978(R2878)~similar to Arabidopsis
MHRFLLSSAVRTVNPEEADWFYAPVYTTCDLTRAGLPLPFKSPRMMRSAIQFISKRWPFWNRTDGGDHFFVAPHDFAACFHYQEENAIARGILPLLRRATLVQTFGQKNHVCLKEGSITIPPFAPPQKMQAHLIPPDTPRSIFVYFRGLFYDNGNDPEGGYYARGARASLWENFKNNPLFDISTEHPATYYEDMQRSVFCLCPLGWAPWSPRLVEAVVFGCIPVIIADDIVLPFADAIPWDEIGVFVDEEDVPKLDSILTSIPIDDILRKQRLLANPSMKKAMLFPQPAQPRDAFHQILNGLARKLPHPETIYLQPGEKHLNWTAGPVGDLKPW

SEQ ID NO: 67161 - protein, 290 aa, Triticum aestivum
  peptide (1)..(290): Ceres Seq. ID no. 15220164
  misc_feature (1)..(230): Pfam Name: Exostosin family Pfam Description: Exostosin family
  misc_feature (1)..(262): Homolog of NCBI NO: 25407954 NR Description: hypothetical protein At2g28110 [imported] -
  misc_feature (1)..(262): Homolog of NCBI NO: 15237173 NR Description: expressed protein [Arabidopsis thaliana]
  misc_feature (1)..(290): Homolog of NCBI NO: 10176877 NR Description: gb|AAC80624.1~gene_id:MAC9.17~strong similarity
  misc_feature (1)..(290): Homolog of NCBI NO: 23821292 NR Description: pectin-glucuronyltransferase [Nicotiana
  misc_feature (1)..(290): Homolog of NCBI NO: 18642697 NR Description: Unknown protein [Oryza sativa]
  misc_feature (1)..(290): Homolog of NCBI NO: 34907044 NR Description: hypothetical protein~similar to Arabidopsis
  misc_feature (1)..(290): Homolog of NCBI NO: 15223522 NR Description: hypothetical protein [Arabidopsis thaliana]
  misc_feature (1)..(290): Homolog of NCBI NO: 21592991 NR Description: unknown [Arabidopsis thaliana]
  misc_feature (1)..(290): Homolog of NCBI NO: 18424516 NR Description: (AtGUT1) NpGUT1 homolog [Arabidopsis thaliana]
  misc_feature (1)..(290): Homolog of NCBI NO: 34907048 NR Description: contains EST D24978(R2878)~similar to Arabidopsis
MMRSAIQFISKRWPFWNRTDGGDHFFVAPHDFAACFHYQEENAIARGILPLLRRATLVQTFGQKNHVCLKEGSITIPPFAPPQKMQAHLIPPDTPRSIFVYFRGLFYDNGNDPEGGYYARGARASLWENFKNNPLFDISTEHPATYYEDMQRSVFCLCPLGWAPWSPRLVEAVVFGCIPVIIADDIVLPFADAIPWDEIGVFVDEEDVPKLDSILTSIPIDDILRKQRLLANPSMKKAMLFPQPAQPRDAFHQILNGLARKLPHPETIYLQPGEKHLNWTAGPVGDLKPW

SEQ ID NO: 67162 - DNA, 795 bp, Triticum aestivum
  misc_feature (1)..(795): Ceres Seq. ID no. 12627322
acacttgattagctgaggaggaagagagaaaaaccatggcaataacactcaacaatggcttcaagatgcctatcattggattgggcgtgtggcgcatggaagatcttgtttcatcgggcttggttcgcagcatagggatcagcaactatgatatctttctgaccagagattgtttagcatattccaagataaagcctgctgtaaatcagattgaaactcatccatacttccagcgtgattctctagtcaaattttgtcagaagcatgggatttgtgtcactgcacacactccactaggaggtgctgcagcaaatgctgaatggtttggaacagtttcatgtttggatgaccaagttctcaaaggtctggctgaaaaatacaaaaagactgccgcccagatcagccttcgctggggaattcaaaggaacactgtggtcattcctaaatcgtcaaaactggagaggttgaaagagaactttcaggttttcgattttgagttgtctaaagaggacatggagctcattggaagtatagatagaaaatatcgaaccaatcaaccagctgtgttttggggcatagatttgtatgcgtgagaatgcccttcctaagtctgtatcatggctgtttgaccttgtgttaagattcagatttggtataagctgatctttcaggctccttagtagctcagtttatttgataatgtaaactttctttgttgatggttgaaaaatcatcttctcatcccatatccaatctcgtggactaaataagagagacttctgaatgttgttgctc

SEQ ID NO: 67163 - protein, 185 aa, Triticum aestivum
  peptide (1)..(185): Ceres Seq. ID no. 12627323
  misc_feature (19)..(185): Homolog of NCBI NO: 19310934 NR Description: NADP dependent sorbitol 6-phosphate dehydrogenase
  misc_feature (19)..(185): Homolog of NCBI NO: 19310926 NR Description: NADP dependent sorbitol 6-phosphate dehydrogenase
  misc_feature (19)..(185): Homolog of NCBI NO: 19310924 NR Description: NADP dependent sorbitol 6-phosphate dehydrogenase
  misc_feature (19)..(185): Homolog of NCBI NO: 134153 NR Description: NADP-dependent D-sorbitol-6-phosphate
  misc_feature (19)..(185): Homolog of NCBI NO: 1835701 NR Description: NADPH-dependent mannose 6-phosphate reductase
  misc_feature (19)..(185): Homolog of NCBI NO: 21554266 NR Description: putative NADPH dependent mannose 6-phosphate
  misc_feature (19)..(185): Homolog of NCBI NO: 21592829 NR Description: putative NADPH dependent mannose 6-phosphate
  misc_feature (19)..(185): Homolog of NCBI NO: 15226502 NR Description: mannose 6-phosphate reductase (NADPH-dependent),
  misc_feature (19)..(185): Homolog of NCBI NO: 10334991 NR Description: NADPH-dependent mannose 6-phosphate reductase
  misc_feature (19)..(185): Homolog of NCBI NO: 15226489 NR Description: mannose 6-phosphate reductase (NADPH-dependent),
MAITLNNGFKMPIIGLGVWRMEDLVSSGLVRSIGISNYDIFLTRDCLAYSKIKPAVNQIETHPYFQRDSLVKFCQKHGICVTAHTPLGGAAANAEWFGTVSCLDDQVLKGLAEKYKKTAAQISLRWGIQRNTVVIPKSSKLERLKENFQVFDFELSKEDMELIGSIDRKYRTNQPAVFWGIDLYA

SEQ ID NO: 67164 - protein, 175 aa, Triticum aestivum
  peptide (1)..(175): Ceres Seq. ID no. 12627324
  misc_feature (9)..(175): Homolog of NCBI NO: 19310934 NR Description: NADP dependent sorbitol 6-phosphate dehydrogenase
  misc_feature (9)..(175): Homolog of NCBI NO: 19310926 NR Description: NADP dependent sorbitol 6-phosphate dehydrogenase
  misc_feature (9)..(175): Homolog of NCBI NO: 19310924 NR Description: NADP dependent sorbitol 6-phosphate dehydrogenase
  misc_feature (9)..(175): Homolog of NCBI NO: 134153 NR Description: NADP-dependent D-sorbitol-6-phosphate
  misc_feature (9)..(175): Homolog of NCBI NO: 1835701 NR Description: NADPH-dependent mannose 6-phosphate reductase
  misc_feature (9)..(175): Homolog of NCBI NO: 21554266 NR Description: putative NADPH dependent mannose 6-phosphate
  misc_feature (9)..(175): Homolog of NCBI NO: 21592829 NR Description: putative NADPH dependent mannose 6-phosphate
  misc_feature (9)..(175): Homolog of NCBI NO: 15226502 NR Description: mannose 6-phosphate reductase (NADPH-dependent),
  misc_feature (9)..(175): Homolog of NCBI NO: 10334991 NR Description: NADPH-dependent mannose 6-phosphate reductase
  misc_feature (9)..(175): Homolog of NCBI NO: 15226489 NR Description: mannose 6-phosphate reductase (NADPH-dependent),
MPIIGLGVWRMEDLVSSGLVRSIGISNYDIFLTRDCLAYSKIKPAVNQIETHPYFQRDSLVKFCQKHGICVTAHTPLGGAAANAEWFGTVSCLDDQVLKGLAEKYKKTAAQISLRWGIQRNTVVIPKSSKLERLKENFQVFDFELSKEDMELIGSIDRKYRTNQPAVFWGIDLYA

SEQ ID NO: 67165 - protein, 165 aa, Triticum aestivum
  peptide (1)..(165): Ceres Seq. ID no. 12627325
  misc_feature (1)..(165): Homolog of NCBI NO: 19310934 NR Description: NADP dependent sorbitol 6-phosphate dehydrogenase
  misc_feature (1)..(165): Homolog of NCBI NO: 19310926 NR Description: NADP dependent sorbitol 6-phosphate dehydrogenase
  misc_feature (1)..(165): Homolog of NCBI NO: 19310924 NR Description: NADP dependent sorbitol 6-phosphate dehydrogenase
  misc_feature (1)..(165): Homolog of NCBI NO: 134153 NR Description: NADP-dependent D-sorbitol-6-phosphate
  misc_feature (1)..(165): Homolog of NCBI NO: 1835701 NR Description: NADPH-dependent mannose 6-phosphate reductase
  misc_feature (1)..(165): Homolog of NCBI NO: 21554266 NR Description: putative NADPH dependent mannose 6-phosphate
  misc_feature (1)..(165): Homolog of NCBI NO: 21592829 NR Description: putative NADPH dependent mannose 6-phosphate
  misc_feature (1)..(165): Homolog of NCBI NO: 15226502 NR Description: mannose 6-phosphate reductase (NADPH-dependent),
  misc_feature (1)..(165): Homolog of NCBI NO: 10334991 NR Description: NADPH-dependent mannose 6-phosphate reductase
  misc_feature (1)..(165): Homolog of NCBI NO: 15226489 NR Description: mannose 6-phosphate reductase (NADPH-dependent),
MEDLVSSGLVRSIGISNYDIFLTRDCLAYSKIKPAVNQIETHPYFQRDSLVKFCQKHGICVTAHTPLGGAAANAEWFGTVSCLDDQVLKGLAEKYKKTAAQISLRWGIQRNTVVIPKSSKLERLKENFQVFDFELSKEDMELIGSIDRKYRTNQPAVFWGIDLYA

SEQ ID NO: 67166 - DNA, 1601 bp, Triticum aestivum
  misc_feature (1)..(1601): Ceres Seq. ID no. 15174852
ctcctgagtcctgacctagagttgccgccgtgccgtagcttgtggcgtcaccgacgacgcctcacccccaatccccttagcttctcacacgcgccgccgctacggctgctacctccgctgccatcgccttccccgcgtgcctgcagtttccaccccgtccgcaacctcggacactgtttctcgaggtaaaccgaaagggaggaaatcatggccaagttcaagaagaatctgaaccctcaggtcttcttggaaatatccatcgatgggcgacctgccaagagaatcacgtttgagctctttgctgatgtagttccgaagacggcagagaacttccgagcgctttgtactggtgagaaaggcctcggagaatctacaaagaagccactttattttaaaggaacacacatccatcggattatcccaggatttatggctcaggctggtgatttttccagaggagatggacgtggtggagagagcatatatggtggaaaatttccagatgaaaacttcaagttaaagcatgatcaacctggtattctttccatggcaaactctggagaaaacaccaatggatcccaattttttataacattcaaggctgtgccacatcttgatgggtattacttatttgctttagtcattttactaattttttgggacgccgataactgccacacgtgtgggcgttaaggggtctgcccacacgttttgtgtggtgcctaagaggaccagcccacacgcctacgtgtgggcaaaacaactagcgcccacacgcctctttttttcccttgcggtccctctcacacgcctacatgtgggcgaaatgcataacgcccacacgacctctctcagccacctacctcacggtcccgcacgcccagcgtgacagtcaccacgcgtccccgcagttgccatggtccggaccctcttcaatgtccgtttacctgcagttgccatgtcgctgaactacagttgccatgtcggacaactacagttgccatggttgctcaactgcagttgccatctcaggttcaagtgtcagatgccattttggacaactgcagctgttgccatgtatggtctggtttactatagttgccatgatttgaaaactttagaggttgccacctactaacactaagcagttgccatgcatggtctggtttactacagttgccatgatttgaaaaccttaggagttgccacctactaacactaggcagttaccgtgtagcgctacaaagagacatggcaaaacaacatgttcgggtaaaagagagagttgccatctgcttacaagcacactagaggcagttgccgtgtaccctgcaaaacatatggcaactgacatgttcgggtaaaaaaaagagagagttgccatctgcttacaagcacactagggcagttgccatgtacactgcaaaacgcatggcaactggcagcttgggtgtgggagaggagacgggcgtgtgggcgagatggcaaatgcccacacaccagcccttgtgcgtgagtgaaaactggtgtgtgggcgaactgctaaacgcccacacaccggcccctccgtgtggtgaaacggacgtgtgggcgaccgggtg

SEQ ID NO: 67167 - protein, 161 aa, Triticum aestivum
  peptide (1)..(161): Ceres Seq. ID no. 15174853
  misc_feature (11)..(146): Homolog of NCBI NO: 16330433 NR Description: peptidyl-prolyl cis-trans isomerase
  misc_feature (9)..(146): Homolog of NCBI NO: 34857103 NR Description: similar to peptidylprolyl isomerase D
  misc_feature (2)..(146): Homolog of NCBI NO: 27806463 NR Description: peptidylprolyl isomerase D (cyclophilin D) [Bos
  misc_feature (2)..(146): Homolog of NCBI NO: 13385854 NR Description: peptidylprolyl isomerase D (cyclophilin D) [Mus
  misc_feature (2)..(146): Homolog of NCBI NO: 4826932 NR Description: peptidylprolyl isomerase D (cyclophilin D);
  misc_feature (9)..(146): Homolog of NCBI NO: 630464 NR Description: 20k cyclophilin - Toxoplasma gondii (fragment)
  misc_feature (9)..(146): Homolog of NCBI NO: 23394388 NR Description: peptidylprolyl isomerase [Phytophthora infestans]
  misc_feature (6)..(146): Homolog of NCBI NO: 30695789 NR Description: cyclophylin -related protein [Arabidopsis
  misc_feature (6)..(146): Homolog of NCBI NO: 15229425 NR Description: cyclophylin -related protein [Arabidopsis
  misc_feature (1)..(146): Homolog of NCBI NO: 37788310 NR Description: cyclophilin-like protein [Triticum aestivum]
MAKFKKNLNPQVFLEISIDGRPAKRITFELFADVVPKTAENFRALCTGEKGLGESTKKPLYFKGTHIHRIIPGFMAQAGDFSRGDGRGGESIYGGKFPDENFKLKHDQPGILSMANSGENTNGSQFFITFKAVPHLDGYYLFALVILLIFWDADNCHTCGR

SEQ ID NO: 67168 - protein, 87 aa, Triticum aestivum
  peptide (1)..(87): Ceres Seq. ID no. 15174854
  misc_feature (1)..(72): Homolog of NCBI NO: 16330433 NR Description: peptidyl-prolyl cis-trans isomerase
  misc_feature (1)..(72): Homolog of NCBI NO: 34857103 NR Description: similar to peptidylprolyl isomerase D
  misc_feature (1)..(72): Homolog of NCBI NO: 27806463 NR Description: peptidylprolyl isomerase D (cyclophilin D) [Bos
  misc_feature (1)..(72): Homolog of NCBI NO: 13385854 NR Description: peptidylprolyl isomerase D (cyclophilin D) [Mus
  misc_feature (1)..(72): Homolog of NCBI NO: 4826932 NR Description: peptidylprolyl isomerase D (cyclophilin D);
  misc_feature (1)..(72): Homolog of NCBI NO: 630464 NR Description: 20k cyclophilin - Toxoplasma gondii (fragment)
  misc_feature (1)..(72): Homolog of NCBI NO: 23394388 NR Description: peptidylprolyl isomerase [Phytophthora infestans]
  misc_feature (1)..(72): Homolog of NCBI NO: 30695789 NR Description: cyclophylin -related protein [Arabidopsis
  misc_feature (1)..(72): Homolog of NCBI NO: 15229425 NR Description: cyclophylin -related protein [Arabidopsis
  misc_feature (1)..(72): Homolog of NCBI NO: 37788310 NR Description: cyclophilin-like protein [Triticum aestivum]
MAQAGDFSRGDGRGGESIYGGKFPDENFKLKHDQPGILSMANSGENTNGSQFFITFKAVPHLDGYYLFALVILLIFWDADNCHTCGR

SEQ ID NO: 67169 - DNA, 1108 bp, Triticum aestivum
  misc_feature (1)..(1108): Ceres Seq. ID no. 13659645
ctctctctccaatccgtctccctaactgcagatgatcgccggcaccccgttcccgtacctgagctgcttcgtggccaggttccggcacgacgagcgcaaggccatcgtcctgcgcgccgtcaagtgcatcttcgcctccatcaaagcgatgagctcggtggagtaccagccgtcgaccatggcgctggcgtccatcctggtcgcgcgcggcggcagggaggggacggggacggccccgaacctagaggaggagctcaaggcgatcctgggctcatcatggcagcaattacacaccgggcatgtgtattcctgctacagcgtgatgattcaggaggaggacaggtccacgcagtcgggcagggaggtggcttcctccggcgtctctgccgccgcccccgccgggagcccgggcacctccgtcgccatggccatggtccgtggaggggtggttgaacaggaccccgtggagagggctggttgaacagtagccggtggaggagcggtggaggctagatgaacatgagtccgtggatgagaagggtccattcgcctcagggccagtaggcagccagtaggaggagctgtgtgaatgttggctggagttcagctcgcactctagctgctgctaatttctgtcaccccccctagccttagcccttttttttttcattagcttgagcagtgattttggtggtggtggtggctaaatagggggcaggacttgattcttgtgattgtgcaattattgcagctgattggtaagttaggatcggaaagattttggttttcaggagatctttcccatccaggctttaaaaggctgtgtaaagaggagaggtagagagagaaagtcccagcaggagtactgcactactgctgcaaagagctctcagctcagctcaaagtgaggtgaaaagaaaagagagcacaacaaagcctaggcatgatatgagtggggagccatttttttctccttcctttgtgtacgtgtgtgtgtttggatagtgtgcgagctagctggacctctatcctctcgtcctcttctggtcactccatcagtgacaagtaatacagtacgtaatagttaagcagatattcattcattcat

SEQ ID NO: 67170 - protein, 150 aa, Triticum aestivum
  peptide (1)..(150): Ceres Seq. ID no. 13659646
LSLQSVSLTADDRRHPVPVPELLRGQVPARRAQGHRPARRQVHLRLHQSDELGGVPAVDHGAGVHPGRARRQGGDGDGPEPRGGAQGDPGLIMAAITHRACVFLLQRDDSGGGQVHAVGQGGGFLRRLCRRPRREPGHLRRHGHGPWRGG

SEQ ID NO: 67171 - protein, 149 aa, Triticum aestivum
  peptide (1)..(149): Ceres Seq. ID no. 13659647
  misc_feature (1)..(128): Homolog of NCBI NO: 19070613 NR Description: D-type cyclin [Zea mays]
MIAGTPFPYLSCFVARFRHDERKAIVLRAVKCIFASIKAMSSVEYQPSTMALASILVARGGREGTGTAPNLEEELKAILGSSWQQLHTGHVYSCYSVMIQEEDRSTQSGREVASSGVSAAAPAGSPGTSVAMAMVRGGVVEQDPVERAG

SEQ ID NO: 67172 - protein, 110 aa, Triticum aestivum
  peptide (1)..(110): Ceres Seq. ID no. 13659648
  misc_feature (1)..(89): Homolog of NCBI NO: 19070613 NR Description: D-type cyclin [Zea mays]
MSSVEYQPSTMALASILVARGGREGTGTAPNLEEELKAILGSSWQQLHTGHVYSCYSVMIQEEDRSTQSGREVASSGVSAAAPAGSPGTSVAMAMVRGGVVEQDPVERAG

SEQ ID NO: 67173 - DNA, 1849 bp, Triticum aestivum
  misc_feature (1)..(1849): Ceres Seq. ID no. 15169631
acttactactagtacatacagtacatataaacatatcacgtctctgcaagctgcaagccaacaagctgcctgccatggaggggtggttaagcttgtgtttcatagccggatccacgctactggcaatttggtttctcgagctctcccgtcgcaaccccaataagaagctgcctccagggccatggactctccccatcgtcggcagcctcctccacgtcgttggcgccttcccgcaccgcaccattgcagaactgtctcgccggcacgggccgctgatgcacctcaggctaggcgaagtcgccaccatggtggtctccagcgccgaggtggcggcgctggtcttgaagaccaacgaccttacgttcgcggaccggcctcgcactgtgacgcagaacatcttcggcagtggcggcaaggacatcgcctttgccccctacggcgccgcgtggcgccagatgcgcaaggtgtgcgtcatggagatcctcggctccaagcaggcgaggcgcacggagcgcatcaggactgaggaggtcggcagcctccttcgctccatcgtcagcgcctcggccgtcggcggcgccggcgctacggttaacgtcagcgagaaggtggcgatgcttagcaacgacgtcgtttcgcgggcggttttcggcgggaaggtcgcgcagcgggacgagtacatccgcgagttgggcgaggccatggagctcgtgaccggcttctgcctcgtcgacatcttcccctcgtcgcggctggtgcggtggcttagcagcgtcgagaggcgtatgaggaggagctacggccgtatgcagagcatcatcgctgacatcctcgacgagcgcaaggccgcacgagctgccggcgatggctcctgcagcaccgacgatgaggacctgctggaagtgctgctcaggctgcaggccgaggactcgttggaattccctctaaccacagagattataggcgccgtcatgtttgacatgtttgctggtggcacggataccaccgcaaccgttttggagtgggctatgtcggaactcgtgaacaatcccgaagccatgactaaagcacaactagaggtccgagaggtgcttggtgaagaccgagttatcattaccaactgtgacattgctaaactcccctacatgaggatggtcatcaaggaggttctgaggttgcatccacccattcctctagtccctcgcatggctagagatgattgcacaattatgggttatgacatgcttaaaggcaccaatgtattagttaatgtcttcgcaatttccagagattcaagatattgggaaaatcctgaagagtttaagcccaagagatttgagaacaacaatatggattacaatgtgacgtattttgaatttattccctttggggctgggcgacggcagtgccctgggatgttttttggcatgtcgacagtacacatcacattggcaaacatgttgtatcacttcaattggatgcttcctgaaggggcttgtctgacttcatttgacatgtctgagaaatttgggttgacaataagacgaagatatgacctgcagctcagagctattacacgggtgggcgtcaaagatatactgtcgaagtgatgcaaacaacatggtatctatcttgtgatgtatgttcagatatattcctcttagcgtatgaatttattacattgcatatttgcacactagaataagaaaagctcgttgggactgtactacttttcacaaattacattactttgtactacaaggcatagatatcttaattgtattagttttgtgtttgtgaacatatgaatgatgcaatatgcataaggaagtaacatggtcttttatct

SEQ ID NO: 67174 - protein, 535 aa, Triticum aestivum
  peptide (1)..(535): Ceres Seq. ID no. 15169632
  misc_feature (57)..(521): Pfam Name: Cytochrome P450 Pfam Description: Cytochrome P450
  misc_feature (28)..(521): Homolog of NCBI NO: 30696845 NR Description: cytochrome P450 71B10 [Arabidopsis thaliana]
  misc_feature (28)..(515): Homolog of NCBI NO: 37531412 NR Description: putative cytochrome P450 [Oryza sativa (japonica
  misc_feature (15)..(533): Homolog of NCBI NO: 37531420 NR Description: putative cytochrome P450 [Oryza sativa (japonica
  misc_feature (23)..(519): Homolog of NCBI NO: 7430637 NR Description: cytochrome P450 - common tobacco
  misc_feature (29)..(531): Homolog of NCBI NO: 34914838 NR Description: putative cytochrome P450 [Oryza sativa (japonica
  misc_feature (43)..(527): Homolog of NCBI NO: 34896754 NR Description: putative cytochrome P450 [Oryza sativa (japonica
  misc_feature (29)..(532): Homolog of NCBI NO: 37534742 NR Description: putative cytochrome P450 [Oryza sativa (japonica
  misc_feature (55)..(527): Homolog of NCBI NO: 34897000 NR Description: putative cytochrome P450 [Oryza sativa (japonica
  misc_feature (31)..(531): Homolog of NCBI NO: 38174817 NR Description: putative cytochrome P450 [Hordeum vulgare subsp.
  misc_feature (25)..(527): Homolog of NCBI NO: 13516744 NR Description: cytochrome P450 [Triticum aestivum]
LLLVHTVHINISRLCKLQANKLPAMEGWLSLCFIAGSTLLAIWFLELSRRNPNKKLPPGPWTLPIVGSLLHVVGAFPHRTIAELSRRHGPLMHLRLGEVATMVVSSAEVAALVLKTNDLTFADRPRTVTQNIFGSGGKDIAFAPYGAAWRQMRKVCVMEILGSKQARRTERIRTEEVGSLLRSIVSASAVGGAGATVNVSEKVAMLSNDVVSRAVFGGKVAQRDEYIRELGEAMELVTGFCLVDIFPSSRLVRWLSSVERRMRRSYGRMQSIIADILDERKAARAAGDGSCSTDDEDLLEVLLRLQAEDSLEFPLTTEIIGAVMFDMFAGGTDTTATVLEWAMSELVNNPEAMTKAQLEVREVLGEDRVIITNCDIAKLPYMRMVIKEVLRLHPPIPLVPRMARDDCTIMGYDMLKGTNVLVNVFAISRDSRYWENPEEFKPKRFENNNMDYNVTYFEFIPFGAGRRQCPGMFFGMSTVHITLANMLYHFNWMLPEGACLTSFDMSEKFGLTIRRRYDLQLRAITRVGVKDILSK

SEQ ID NO: 67175 - protein, 511 aa, Triticum aestivum
  peptide (1)..(511): Ceres Seq. ID no. 15169633
  misc_feature (33)..(497): Pfam Name: Cytochrome P450 Pfam Description: Cytochrome P450
  misc_feature (4)..(497): Homolog of NCBI NO: 30696845 NR Description: cytochrome P450 71B10 [Arabidopsis thaliana]
  misc_feature (4)..(491): Homolog of NCBI NO: 37531412 NR Description: putative cytochrome P450 [Oryza sativa (japonica
  misc_feature (1)..(509): Homolog of NCBI NO: 37531420 NR Description: putative cytochrome P450 [Oryza sativa (japonica
  misc_feature (1)..(495): Homolog of NCBI NO: 7430637 NR Description: cytochrome P450 - common tobacco
  misc_feature (5)..(507): Homolog of NCBI NO: 34914838 NR Description: putative cytochrome P450 [Oryza sativa (japonica
  misc_feature (19)..(503): Homolog of NCBI NO: 34896754 NR Description: putative cytochrome P450 [Oryza sativa (japonica
  misc_feature (5)..(508): Homolog of NCBI NO: 37534742 NR Description: putative cytochrome P450 [Oryza sativa (japonica
  misc_feature (31)..(503): Homolog of NCBI NO: 34897000 NR Description: putative cytochrome P450 [Oryza sativa (japonica
  misc_feature (7)..(507): Homolog of NCBI NO: 38174817 NR Description: putative cytochrome P450 [Hordeum vulgare subsp.
  misc_feature (1)..(503): Homolog of NCBI NO: 13516744 NR Description: cytochrome P450 [Triticum aestivum]
MEGWLSLCFIAGSTLLAIWFLELSRRNPNKKLPPGPWTLPIVGSLLHVVGAFPHRTIAELSRRHGPLMHLRLGEVATMVVSSAEVAALVLKTNDLTFADRPRTVTQNIFGSGGKDIAFAPYGAAWRQMRKVCVMEILGSKQARRTERIRTEEVGSLLRSIVSASAVGGAGATVNVSEKVAMLSNDVVSRAVFGGKVAQRDEYIRELGEAMELVTGFCLVDIFPSSRLVRWLSSVERRMRRSYGRMQSIIADILDERKAARAAGDGSCSTDDEDLLEVLLRLQAEDSLEFPLTTEIIGAVMFDMFAGGTDTTATVLEWAMSELVNNPEAMTKAQLEVREVLGEDRVIITNCDIAKLPYMRMVIKEVLRLHPPIPLVPRMARDDCTIMGYDMLKGTNVLVNVFAISRDSRYWENPEEFKPKRFENNNMDYNVTYFEFIPFGAGRRQCPGMFFGMSTVHITLANMLYHFNWMLPEGACLTSFDMSEKFGLTIRRRYDLQLRAITRVGVKDILSK

SEQ ID NO: 67176 - protein, 444 aa, Triticum aestivum
  peptide (1)..(444): Ceres Seq. ID no. 15169634
  misc_feature (1)..(430): Pfam Name: Cytochrome P450 Pfam Description: Cytochrome P450
  misc_feature (1)..(430): Homolog of NCBI NO: 30696845 NR Description: cytochrome P450 71B10 [Arabidopsis thaliana]
  misc_feature (1)..(424): Homolog of NCBI NO: 37531412 NR Description: putative cytochrome P450 [Oryza sativa (japonica
  misc_feature (1)..(442): Homolog of NCBI NO: 37531420 NR Description: putative cytochrome P450 [Oryza sativa (japonica
  misc_feature (1)..(428): Homolog of NCBI NO: 7430637 NR Description: cytochrome P450 - common tobacco
  misc_feature (1)..(440): Homolog of NCBI NO: 34914838 NR Description: putative cytochrome P450 [Oryza sativa (japonica
  misc_feature (1)..(436): Homolog of NCBI NO: 34896754 NR Description: putative cytochrome P450 [Oryza sativa (japonica
  misc_feature (1)..(441): Homolog of NCBI NO: 37534742 NR Description: putative cytochrome P450 [Oryza sativa (japonica
  misc_feature (1)..(436): Homolog of NCBI NO: 34897000 NR Description: putative cytochrome P450 [Oryza sativa (japonica
  misc_feature (1)..(440): Homolog of NCBI NO: 38174817 NR Description: putative cytochrome P450 [Hordeum vulgare subsp.
  misc_feature (1)..(436): Homolog of NCBI NO: 13516744 NR Description: cytochrome P450 [Triticum aestivum]
MHLRLGEVATMVVSSAEVAALVLKTNDLTFADRPRTVTQNIFGSGGKDIAFAPYGAAWRQMRKVCVMEILGSKQARRTERIRTEEVGSLLRSIVSASAVGGAGATVNVSEKVAMLSNDVVSRAVFGGKVAQRDEYIRELGEAMELVTGFCLVDIFPSSRLVRWLSSVERRMRRSYGRMQSIIADILDERKAARAAGDGSCSTDDEDLLEVLLRLQAEDSLEFPLTTEIIGAVMFDMFAGGTDTTATVLEWAMSELVNNPEAMTKAQLEVREVLGEDRVIITNCDIAKLPYMRMVIKEVLRLHPPIPLVPRMARDDCTIMGYDMLKGTNVLVNVFAISRDSRYWENPEEFKPKRFENNNMDYNVTYFEFIPFGAGRRQCPGMFFGMSTVHITLANMLYHFNWMLPEGACLTSFDMSEKFGLTIRRRYDLQLRAITRVGVKDILSK

SEQ ID NO: 67177 - DNA, 1616 bp, Triticum aestivum
  misc_feature (1)..(1616): Ceres Seq. ID no. 14302384
ctttttcgtagcagcacctgttttatccaccacgacctcttctcctccgatcccacaagagagccgagcgaggactcgctcgaccccagccgccattgatggctcgtgccacctccgcagcgctcgcgctgctcatcttcctcctctgccggcacgcccacgccgacgcgggcacgacgctgtcgcaagggcagtcgctggcgggcaacgagaagctcctgtcagccaacggcgccttctcgctctccttcttctccccgcgcggcggcgacggctcgcgggtgtacctgggcgtcatgttcgccagggccgcggagccgaccgtgccgtgggtggccaaccgcgacgcgccggtgcgcgccacggccccgtcctactccgccaccgtcacggactccggggacctccgggtgctggagggggagcgcgtcgtgtggcggaccaacacgacctcgtcggcggggaacttcacgctgacgatccaggacacggggaacctcgtgctcgccggcggcagcggcgcgcaggcggtgcagctgtggcagagcttcgaccaccccgcggacaccttcctccccgggatgaacatcacgctggcccggcgcggcggcgccgtcgtcaggcagacgctgttccggtcgtggaggagccccgacgacccggcccccgggaacttcacgctggggcaggacccgctgggctcggcgcagctcttcatatggcgccgcggccaggacggcaaggacgtgacgcactggaggtccgggcagtgggccaagggcagcttcgtgggcatcccgtatcggccgctcaacctctacggcttccagctctccggcgacccgtcccagagcaacggcctgttctacaccttccagcgcttcaactcctcgcagtacaggttcgtgctccagcccaacggcacggagacgtgctaccagcttgtggacgccaccggcgcctgggaggtcgtctggtcgcagccgacgatgccgtgccaggcctacaacacgtgcggcccgaacgccgagtgctccgctgccgaccactgcacctgcctcagaggttttgagccgaaatccgaagaggagtacagcaacggggtgtggacgcaggggtgcgtgaggagcagccagctgacctgcagcgagaggaacgtgagcatgagcggcagcgacgcgttcgccgtcctctccggcgtgaagctgccggacctggcggcgtgggagtcggcggtcatcagcgcggacgcgtgcaggcagtggtgcctggccaactgcacgtgcaacgcgtacagctatagcggcggcaccgggtgcctgacctgggcccacgagttggtggacgtctaccagttccccagcggacagttccccaacggacaagggtttgacctgcacatcaaggtcccggcttctctattaggtaagctcatcaacgttgatgatttgttaacctttgaagttctaaattgggtttagaaaactgcagctaggaaacttctcggttgttgaggaaatgtcgataaacgcttagactgtagaaattgttgtttttgttgtgtgcttgtggcaagacttgcacgactgatttgggttgttacaacccgaaaatcc

SEQ ID NO: 67178 - protein, 460 aa, Triticum aestivum
  peptide (1)..(460): Ceres Seq. ID no. 14302385
  misc_feature (75)..(189): Pfam Name: D-mannose binding lectin Pfam Description: D-mannose binding lectin
  misc_feature (9)..(425): Homolog of NCBI NO: 18407151 NR Description: S-locus protein kinase, putative [Arabidopsis
  misc_feature (9)..(460): Homolog of NCBI NO: 25287698 NR Description: hypothetical protein [imported] - Arabidopsis
  misc_feature (9)..(460): Homolog of NCBI NO: 15220348 NR Description: receptor-related protein kinase [Arabidopsis
  misc_feature (3)..(443): Homolog of NCBI NO: 15220540 NR Description: S-locus protein kinase, putative [Arabidopsis
  misc_feature (3)..(444): Homolog of NCBI NO: 7434416 NR Description: serine/threonine kinase (EC 2.7.1.-) BRLK - wild
  misc_feature (3)..(444): Homolog of NCBI NO: 15234429 NR Description: serine/threonine kinase - like protein
  misc_feature (3)..(444): Homolog of NCBI NO: 4455151 NR Description: putative serine/threonine kinase (fragment)
  misc_feature (16)..(442): Homolog of NCBI NO: 7428022 NR Description: S-receptor kinase (EC 2.7.1.-) KIK1 precursor -
  misc_feature (1)..(442): Homolog of NCBI NO: 34898624 NR Description: putative S-receptor kinase
  misc_feature (1)..(444): Homolog of NCBI NO: 34898618 NR Description: putative S-receptor kinase
MARATSAALALLIFLLCRHAHADAGTTLSQGQSLAGNEKLLSANGAFSLSFFSPRGGDGSRVYLGVMFARAAEPTVPWVANRDAPVRATAPSYSATVTDSGDLRVLEGERVVWRTNTTSSAGNFTLTIQDTGNLVLAGGSGAQAVQLWQSFDHPADTFLPGMNITLARRGGAVVRQTLFRSWRSPDDPAPGNFTLGQDPLGSAQLFIWRRGQDGKDVTHWRSGQWAKGSFVGIPYRPLNLYGFQLSGDPSQSNGLFYTFQRFNSSQYRFVLQPNGTETCYQLVDATGAWEVVWSQPTMPCQAYNTCGPNAECSAADHCTCLRGFEPKSEEEYSNGVWTQGCVRSSQLTCSERNVSMSGSDAFAVLSGVKLPDLAAWESAVISADACRQWCLANCTCNAYSYSGGTGCLTWAHELVDVYQFPSGQFPNGQGFDLHIKVPASLLGKLINVDDLLTFEVLNWV

SEQ ID NO: 67179 - protein, 394 aa, Triticum aestivum
  peptide (1)..(394): Ceres Seq. ID no. 14302386
  misc_feature (9)..(123): Pfam Name: D-mannose binding lectin Pfam Description: D-mannose binding lectin
  misc_feature (1)..(359): Homolog of NCBI NO: 18407151 NR Description: S-locus protein kinase, putative [Arabidopsis
  misc_feature (1)..(394): Homolog of NCBI NO: 25287698 NR Description: hypothetical protein [imported] - Arabidopsis
  misc_feature (1)..(394): Homolog of NCBI NO: 15220348 NR Description: receptor-related protein kinase [Arabidopsis
  misc_feature (1)..(377): Homolog of NCBI NO: 15220540 NR Description: S-locus protein kinase, putative [Arabidopsis
  misc_feature (1)..(378): Homolog of NCBI NO: 7434416 NR Description: serine/threonine kinase (EC 2.7.1.-) BRLK - wild
  misc_feature (1)..(378): Homolog of NCBI NO: 15234429 NR Description: serine/threonine kinase - like protein
  misc_feature (1)..(378): Homolog of NCBI NO: 4455151 NR Description: putative serine/threonine kinase (fragment)
  misc_feature (1)..(376): Homolog of NCBI NO: 7428022 NR Description: S-receptor kinase (EC 2.7.1.-) KIK1 precursor -
  misc_feature (1)..(376): Homolog of NCBI NO: 34898624 NR Description: putative S-receptor kinase
  misc_feature (1)..(378): Homolog of NCBI NO: 34898618 NR Description: putative S-receptor kinase
MFARAAEPTVPWVANRDAPVRATAPSYSATVTDSGDLRVLEGERVVWRTNTTSSAGNFTLTIQDTGNLVLAGGSGAQAVQLWQSFDHPADTFLPGMNITLARRGGAVVRQTLFRSWRSPDDPAPGNFTLGQDPLGSAQLFIWRRGQDGKDVTHWRSGQWAKGSFVGIPYRPLNLYGFQLSGDPSQSNGLFYTFQRFNSSQYRFVLQPNGTETCYQLVDATGAWEVVWSQPTMPCQAYNTCGPNAECSAADHCTCLRGFEPKSEEEYSNGVWTQGCVRSSQLTCSERNVSMSGSDAFAVLSGVKLPDLAAWESAVISADACRQWCLANCTCNAYSYSGGTGCLTWAHELVDVYQFPSGQFPNGQGFDLHIKVPASLLGKLINVDDLLTFEVLNWV

SEQ ID NO: 67180 - protein, 356 aa, Triticum aestivum
  peptide (1)..(356): Ceres Seq. ID no. 14302387
FFVAAPVLSTTTSSPPIPQESRARTRSTPAAIDGSCHLRSARAAHLPPLPARPRRRGHDAVARAVAGGQREAPVSQRRLLALLLLPARRRRLAGVPGRHVRQGRGADRAVGGQPRRAGARHGPVLLRHRHGLRGPPGAGGGARRVADQHDLVGGELHADDPGHGEPRARRRQRRAGGAAVAELRPPRGHLPPRDEHHAGPARRRRRQADAVPVVEEPRRPGPRELHAGAGPAGLGAALHMAPRPGRQGRDALEVRAVGQGQLRGHPVSAAQPLRLPALRRPVPEQRPVLHLPALQLLAVQVRAPAQRHGDVLPACGRHRRLGGRLVAADDAVPGLQHVRPERRVLRCRPLHLPQRF

SEQ ID NO: 67181 - DNA, 1632 bp, Triticum aestivum
  misc_feature (1)..(1632): Ceres Seq. ID no. 14316013
aaaaaagaagcaaagctttcctcctccacacaacgcactcacaggctcacagcccaacacaatcaccatggccccaaccagcagcaccaaccgcggccgccgccgcgtggtcctcttaccgctgccataccaaggccacatcaaccccatgctgcgcctcgccgccgcgctgcactcccgcggcctcgcggtcactatcctccacccggagacccgcgcgccggaccgcgggaagctccctgcggactaccgcctggtcaccatcccggacagcataccgccggagctcgccgcgtccgaggacatcgcgtcgttcgtcttcgcgctgaacaagaactgtgcggcgccgttccgggactacctggccggcgcccttagagaggaggaggacggccacgtcgccttcgtggtcgccgacgtcgactggttcgcgccgctctccgtggccagggagctgggcgtggccgctctggccctcatgaccagcagcgccgccaggttcctggtgtacttggcgtacccaagcctgtgccacaagggctatttgcccgtccaagagtcgaatttcaacactacagttgaggagcttccccccttccttgtacgagacttggatcgcgtgatggacatggctcgacacctcgcgtacgccgatctcctcgctcacatcgtcgccggcgtgaggcaatcatccggcctaataatcaacacatccgaagacatggagggcatggagatcgagaggatccgcagcgagatcgcccgcccggtgttcgccgtcggccctctgcacatgatgacgccgtctctatccgtccatagcagcctactgacagaagatcgcagctgtttggactggttggacacacaacggccaaactctgtgctctacgtgagctttgggagcctggtgggcatcgacacagacgagttcttggagatggcctggggcctggccgacagccagcgcccgttcgtgtgggtggtccggccggggctggtgcacggctgtgagctcagcgcgctccctgaagagctgcaagagaagataggtagcataggtagagtagtcagttgggctccgcagcaggaggtgctgaagcatccgtctgtggtcgcttttctcacgcactgcggctggaactcggcgacggagagcatatccgaaggcgtgccgatgatatgcagaccgttgtccagcgatcagatgggcactagcaggtatgtgtgtgatgtgtggaaggtgggggttagggtggaggtggagaaccagctgaagagagggggcgtccaggcggccatcacaagactgatggaaggaaaggaaggtgaagaggtcagggaaagaatgaaagatctgaggcatgcgatgagcaagtgtactgatgaaggtgggacatctgatgttgctttgcaacgtttagtggatttcagtgtttaagctagcacttaactatttagactatggctagaaaacatgtccgtgaattgcaacagaagaaatgtctctagctcatggaccagtgcaatgcaacgggacgggagtcaagtgatgcttttttctttttgcggggacggtaaacatgctcagtgcggctcttcctcaatcatcaatgcaagatttctataaag

SEQ ID NO: 67182 - protein, 479 aa, Triticum aestivum
  peptide (1)..(479): Ceres Seq. ID no. 14316014
  misc_feature (35)..(469): Pfam Name: UDP-glucoronosyl and UDP-glucosyl transferase Pfam Description: UDP-glucoronosyl and UDP-glucosyl transferase
  misc_feature (36)..(477): Homolog of NCBI NO: 15229731 NR Description: glycosyltransferase family [Arabidopsis thaliana]
  misc_feature (25)..(477): Homolog of NCBI NO: 33146634 NR Description: putative UDP-glucosyltransferase
  misc_feature (33)..(476): Homolog of NCBI NO: 34900682 NR Description: glucuronosyl transferase-like protein
  misc_feature (24)..(476): Homolog of NCBI NO: 34900662 NR Description: glucuronosyl transferase-like protein
  misc_feature (23)..(476): Homolog of NCBI NO: 34395172 NR Description: putative UDP-glucosyltransferase
  misc_feature (33)..(471): Homolog of NCBI NO: 34900678 NR Description: glucuronosyl transferase-like protein
  misc_feature (33)..(479): Homolog of NCBI NO: 33146633 NR Description: putative UDP-glucosyltransferase
  misc_feature (7)..(475): Homolog of NCBI NO: 34897378 NR Description: putative UDP-glucosyltransferase
  misc_feature (35)..(459): Homolog of NCBI NO: 18033230 NR Description: UDP-glucosyltransferase BX9 [Zea mays]
  misc_feature (35)..(476): Homolog of NCBI NO: 18033228 NR Description: UDP-glucosyltransferase BX8 [Zea mays]
KKKQSFPPPHNALTGSQPNTITMAPTSSTNRGRRRVVLLPLPYQGHINPMLRLAAALHSRGLAVTILHPETRAPDRGKLPADYRLVTIPDSIPPELAASEDIASFVFALNKNCAAPFRDYLAGALREEEDGHVAFVVADVDWFAPLSVARELGVAALALMTSSAARFLVYLAYPSLCHKGYLPVQESNFNTTVEELPPFLVRDLDRVMDMARHLAYADLLAHIVAGVRQSSGLIINTSEDMEGMEIERIRSEIARPVFAVGPLHMMTPSLSVHSSLLTEDRSCLDWLDTQRPNSVLYVSFGSLVGIDTDEFLEMAWGLADSQRPFVWVVRPGLVHGCELSALPEELQEKIGSIGRVVSWAPQQEVLKHPSVVAFLTHCGWNSATESISEGVPMICRPLSSDQMGTSRYVCDVWKVGVRVEVENQLKRGGVQAAITRLMEGKEGEEVRERMKDLRHAMSKCTDEGGTSDVALQRLVDFSV

SEQ ID NO: 67183 - protein, 457 aa, Triticum aestivum
  peptide (1)..(457): Ceres Seq. ID no. 14316015
  misc_feature (13)..(447): Pfam Name: UDP-glucoronosyl and UDP-glucosyl transferase Pfam Description: UDP-glucoronosyl and UDP-glucosyl transferase
  misc_feature (14)..(455): Homolog of NCBI NO: 15229731 NR Description: glycosyltransferase family [Arabidopsis thaliana]
  misc_feature (3)..(455): Homolog of NCBI NO: 33146634 NR Description: putative UDP-glucosyltransferase
  misc_feature (11)..(454): Homolog of NCBI NO: 34900682 NR Description: glucuronosyl transferase-like protein
  misc_feature (2)..(454): Homolog of NCBI NO: 34900662 NR Description: glucuronosyl transferase-like protein
  misc_feature (1)..(454): Homolog of NCBI NO: 34395172 NR Description: putative UDP-glucosyltransferase
  misc_feature (11)..(449): Homolog of NCBI NO: 34900678 NR Description: glucuronosyl transferase-like protein
  misc_feature (11)..(457): Homolog of NCBI NO: 33146633 NR Description: putative UDP-glucosyltransferase
  misc_feature (1)..(453): Homolog of NCBI NO: 34897378 NR Description: putative UDP-glucosyltransferase
  misc_feature (13)..(437): Homolog of NCBI NO: 18033230 NR Description: UDP-glucosyltransferase BX9 [Zea mays]
  misc_feature (13)..(454): Homolog of NCBI NO: 18033228 NR Description: UDP-glucosyltransferase BX8 [Zea mays]
MAPTSSTNRGRRRVVLLPLPYQGHINPMLRLAAALHSRGLAVTILHPETRAPDRGKLPADYRLVTIPDSIPPELAASEDIASFVFALNKNCAAPFRDYLAGALREEEDGHVAFVVADVDWFAPLSVARELGVAALALMTSSAARFLVYLAYPSLCHKGYLPVQESNFNTTVEELPPFLVRDLDRVMDMARHLAYADLLAHIVAGVRQSSGLIINTSEDMEGMEIERIRSEIARPVFAVGPLHMMTPSLSVHSSLLTEDRSCLDWLDTQRPNSVLYVSFGSLVGIDTDEFLEMAWGLADSQRPFVWVVRPGLVHGCELSALPEELQEKIGSIGRVVSWAPQQEVLKHPSVVAFLTHCGWNSATESISEGVPMICRPLSSDQMGTSRYVCDVWKVGVRVEVENQLKRGGVQAAITRLMEGKEGEEVRERMKDLRHAMSKCTDEGGTSDVALQRLVDFSV

SEQ ID NO: 67184 - protein, 430 aa, Triticum aestivum
  peptide (1)..(430): Ceres Seq. ID no. 14316016
  misc_feature (1)..(420): Pfam Name: UDP-glucoronosyl and UDP-glucosyl transferase Pfam Description: UDP-glucoronosyl and UDP-glucosyl transferase
  misc_feature (1)..(428): Homolog of NCBI NO: 15229731 NR Description: glycosyltransferase family [Arabidopsis thaliana]
  misc_feature (1)..(428): Homolog of NCBI NO: 33146634 NR Description: putative UDP-glucosyltransferase
  misc_feature (1)..(427): Homolog of NCBI NO: 34900682 NR Description: glucuronosyl transferase-like protein
  misc_feature (1)..(427): Homolog of NCBI NO: 34900662 NR Description: glucuronosyl transferase-like protein
  misc_feature (1)..(427): Homolog of NCBI NO: 34395172 NR Description: putative UDP-glucosyltransferase
  misc_feature (1)..(422): Homolog of NCBI NO: 34900678 NR Description: glucuronosyl transferase-like protein
  misc_feature (1)..(430): Homolog of NCBI NO: 33146633 NR Description: putative UDP-glucosyltransferase
  misc_feature (1)..(426): Homolog of NCBI NO: 34897378 NR Description: putative UDP-glucosyltransferase
  misc_feature (1)..(410): Homolog of NCBI NO: 18033230 NR Description: UDP-glucosyltransferase BX9 [Zea mays]
  misc_feature (1)..(427): Homolog of NCBI NO: 18033228 NR Description: UDP-glucosyltransferase BX8 [Zea mays]
MLRLAAALHSRGLAVTILHPETRAPDRGKLPADYRLVTIPDSIPPELAASEDIASFVFALNKNCAAPFRDYLAGALREEEDGHVAFVVADVDWFAPLSVARELGVAALALMTSSAARFLVYLAYPSLCHKGYLPVQESNFNTTVEELPPFLVRDLDRVMDMARHLAYADLLAHIVAGVRQSSGLIINTSEDMEGMEIERIRSEIARPVFAVGPLHMMTPSLSVHSSLLTEDRSCLDWLDTQRPNSVLYVSFGSLVGIDTDEFLEMAWGLADSQRPFVWVVRPGLVHGCELSALPEELQEKIGSIGRVVSWAPQQEVLKHPSVVAFLTHCGWNSATESISEGVPMICRPLSSDQMGTSRYVCDVWKVGVRVEVENQLKRGGVQAAITRLMEGKEGEEVRERMKDLRHAMSKCTDEGGTSDVALQRLVDFSV

SEQ ID NO: 67185 - DNA, 1611 bp, Triticum aestivum
  misc_feature (1)..(1611): Ceres Seq. ID no. 13598067
agaacatcctaatcgaaaactcctccatttcgtttgtatctcatctgctctgctctgctgccgctctggtctgtagatctgggaggatcagagtcagacattggggttttgtgattagactagaagaggcgcgttaatgtcgcaagaactggtgcgtacggcaatggcggccgcgcccggtgatgttccgccgcctttggccactcctgctcttcttccgcaggccaaaagggttaaggaagacccaagttttccccaagcctcgccggtggttccggccatgacggcggaagactggtccaaatggtccacacttccgcccgacctcgtccgctgcatcggcgactccctcctgtccaccaacgacctcgactgctacattcacttccgcgccgtttgccccggctggcgcgccgccgccgacgaccccatgagcgacacctccgacccccgcttccacccgcgccggtggatcgtcctcaacgaggacttccagagcgaagggaagctgctcctgctgaacactgacaacggccgcttcgtccatagaaagctcccgctgctcagcgaccactacgtcgtagccacaactcgcaatggctacttggtcctggcggacaaaagccctcctcactctgcaagcgtcctcaaccctctgaccggcgtcgtcatccgtttcatggcgcctgtgccccctgaggtgggacacgctgctgtctcccttgccagctctgccctcgggctcaccttgtttggcgactcatctcacaagatttactcggcctatcccgacaacaagagttccgtcgtccacgaggctcagcaagcagcttatgttttcttccgtaatgcggtcgtgggcggtgtctactcagacactatagggcatgccgtgattgtccgtttatgcagatcgctgatgcctccagatgcaaaccacctttgttttccagtggctttgggtagagaaatgctgcttgtcgggactgcagagagatcgttctttatttttaaaacagacatcgagttaagtaagctggaggatgtggacaccatcaacaactatgccattttcattggtcatcagaggtgcctggctgtctatgctgataagttcataggcattgaggcaaactgcatctactacactgaaaatctgggttcgtccgctcgtatatgcaagtgcggcatcaaggacagaaaagtagagaagatctctgaaactgccgatttcatcaagaaggacaagaagtttgtcctcgttgctgaccgtccttcgacgatcatcgaccttctcgccagctacaccatcaacatcccggactctcggctggccttgcaacagattccataaggcgccggcagatcttcgttcaactctggggatctcgatgaccaactgacaaggctatgctttcgctaagtaattgctcctaattactgtctagtcccctgctttgttattttggatatgccttgccttgtagtaacatgtaagaagcaggttgatcctaggttagatcacctttagtggaactaccgtttttttgtcttaaaaaaaaaaaaaaaaaagcttatcgataccgtcgacctcgagggggggcmcggtrc

SEQ ID NO: 67186 - protein, 405 aa, Triticum aestivum
  peptide (1)..(405): Ceres Seq. ID no. 15222249
  misc_feature (53)..(187): Homolog of NCBI NO: 37536982 NR Description: hypothetical protein [Oryza sativa (japonica
  misc_feature (53)..(187): Homolog of NCBI NO: 19225009 NR Description: putative F-box domain containing protein
  misc_feature (41)..(183): Homolog of NCBI NO: 38175725 NR Description: hypothetical protein [Oryza sativa (japonica
  misc_feature (68)..(175): Homolog of NCBI NO: 34393515 NR Description: F-box domain containing protein-like
  misc_feature (55)..(193): Homolog of NCBI NO: 33146649 NR Description: F-box domain containing protein-like
  misc_feature (57)..(201): Homolog of NCBI NO: 34393457 NR Description: hypothetical protein [Oryza sativa (japonica
  misc_feature (56)..(201): Homolog of NCBI NO: 38346058 NR Description: OJ000223_09.12 [Oryza sativa (japonica
  misc_feature (84)..(165): Homolog of NCBI NO: 34897118 NR Description: hypothetical protein [Oryza sativa]
  misc_feature (301)..(404): Homolog of NCBI NO: 34897118 NR Description: hypothetical protein [Oryza sativa]
MSQELVRTAMAAAPGDVPPPLATPALLPQAKRVKEDPSFPQASPVVPAMTAEDWSKWSTLPPDLVRCIGDSLLSTNDLDCYIHFRAVCPGWRAAADDPMSDTSDPRFHPRRWIVLNEDFQSEGKLLLLNTDNGRFVHRKLPLLSDHYVVATTRNGYLVLADKSPPHSASVLNPLTGVVIRFMAPVPPEVGHAAVSLASSALGLTLFGDSSHKIYSAYPDNKSSVVHEAQQAAYVFFRNAVVGGVYSDTIGHAVIVRLCRSLMPPDANHLCFPVALGREMLLVGTAERSFFIFKTDIELSKLEDVDTINNYAIFIGHQRCLAVYADKFIGIEANCIYYTENLGSSARICKCGIKDRKVEKISETADFIKKDKKFVLVADRPSTIIDLLASYTINIPDSRLALQQIP

SEQ ID NO: 67187 - protein, 396 aa, Triticum aestivum
  peptide (1)..(396): Ceres Seq. ID no. 15222250
  misc_feature (44)..(178): Homolog of NCBI NO: 37536982 NR Description: hypothetical protein [Oryza sativa (japonica
  misc_feature (44)..(178): Homolog of NCBI NO: 19225009 NR Description: putative F-box domain containing protein
  misc_feature (32)..(174): Homolog of NCBI NO: 38175725 NR Description: hypothetical protein [Oryza sativa (japonica
  misc_feature (59)..(166): Homolog of NCBI NO: 34393515 NR Description: F-box domain containing protein-like
  misc_feature (46)..(184): Homolog of NCBI NO: 33146649 NR Description: F-box domain containing protein-like
  misc_feature (48)..(192): Homolog of NCBI NO: 34393457 NR Description: hypothetical protein [Oryza sativa (japonica
  misc_feature (47)..(192): Homolog of NCBI NO: 38346058 NR Description: OJ000223_09.12 [Oryza sativa (japonica
  misc_feature (75)..(156): Homolog of NCBI NO: 34897118 NR Description: hypothetical protein [Oryza sativa]
  misc_feature (292)..(395): Homolog of NCBI NO: 34897118 NR Description: hypothetical protein [Oryza sativa]
MAAAPGDVPPPLATPALLPQAKRVKEDPSFPQASPVVPAMTAEDWSKWSTLPPDLVRCIGDSLLSTNDLDCYIHFRAVCPGWRAAADDPMSDTSDPRFHPRRWIVLNEDFQSEGKLLLLNTDNGRFVHRKLPLLSDHYVVATTRNGYLVLADKSPPHSASVLNPLTGVVIRFMAPVPPEVGHAAVSLASSALGLTLFGDSSHKIYSAYPDNKSSVVHEAQQAAYVFFRNAVVGGVYSDTIGHAVIVRLCRSLMPPDANHLCFPVALGREMLLVGTAERSFFIFKTDIELSKLEDVDTINNYAIFIGHQRCLAVYADKFIGIEANCIYYTENLGSSARICKCGIKDRKVEKISETADFIKKDKKFVLVADRPSTIIDLLASYTINIPDSRLALQQIP

SEQ ID NO: 67188 - protein, 357 aa, Triticum aestivum
  peptide (1)..(357): Ceres Seq. ID no. 15222251
  misc_feature (5)..(139): Homolog of NCBI NO: 37536982 NR Description: hypothetical protein [Oryza sativa (japonica
  misc_feature (5)..(139): Homolog of NCBI NO: 19225009 NR Description: putative F-box domain containing protein
  misc_feature (1)..(135): Homolog of NCBI NO: 38175725 NR Description: hypothetical protein [Oryza sativa (japonica
  misc_feature (20)..(127): Homolog of NCBI NO: 34393515 NR Description: F-box domain containing protein-like
  misc_feature (7)..(145): Homolog of NCBI NO: 33146649 NR Description: F-box domain containing protein-like
  misc_feature (9)..(153): Homolog of NCBI NO: 34393457 NR Description: hypothetical protein [Oryza sativa (japonica
  misc_feature (8)..(153): Homolog of NCBI NO: 38346058 NR Description: OJ000223_09.12 [Oryza sativa (japonica
  misc_feature (36)..(117): Homolog of NCBI NO: 34897118 NR Description: hypothetical protein [Oryza sativa]
  misc_feature (253)..(356): Homolog of NCBI NO: 34897118 NR Description: hypothetical protein [Oryza sativa]
MTAEDWSKWSTLPPDLVRCIGDSLLSTNDLDCYIHFRAVCPGWRAAADDPMSDTSDPRFHPRRWIVLNEDFQSEGKLLLLNTDNGRFVHRKLPLLSDHYVVATTRNGYLVLADKSPPHSASVLNPLTGVVIRFMAPVPPEVGHAAVSLASSALGLTLFGDSSHKIYSAYPDNKSSVVHEAQQAAYVFFRNAVVGGVYSDTIGHAVIVRLCRSLMPPDANHLCFPVALGREMLLVGTAERSFFIFKTDIELSKLEDVDTINNYAIFIGHQRCLAVYADKFIGIEANCIYYTENLGSSARICKCGIKDRKVEKISETADFIKKDKKFVLVADRPSTIIDLLASYTINIPDSRLALQQIP

SEQ ID NO: 67189 - DNA, 1981 bp, Triticum aestivum
  misc_feature (1)..(1981): Ceres Seq. ID no. 14307908
gtagtcgcgtgcctccacctccactacaccgcaccgcgccatcagaaggccggccgggtcggtcggtgcaaggatattgcacacacacgctcgcagacacggtgtgacagcaattgcctccggcgatgtccgtttcttggccggcgccgtcgacgtgcgcggccgccggggccctcctggccgccgcgtggctgctgtgcttcaggctgttcccggccgtggcgaggccgagaaggcgggcgatgaagacgggggcgcagctccctcccggcatcttcgggtggccggtcgtcggcgagacgctggacttcgtctcctgcgcctactccccacgccccgaggcgttcgttgacaagcgccgcctccggtacggcagcgcggtgttccggtcgcacctgttcgggtcggcgacggtagtgacggcggacgcggaggtgaaccggttcgtgctgcagagcgacgcgcggtcgttcgtaccgtggtacccgcggtcgctgacggagctcatgggcaagtcctccatcctcgtcatcaacggcagcctgcagcgccgcgtccacggcctcgtcggcgccttcttcaagtcgccgcagctcaaggcgcaggtcaccgccgacatgcagcgccgcctcgccccggcgctcgccgcctggcgcgagcagggccccggcgcgcgcctccgcatccaggaccacgccaagacgattgtgttccagatcctggtgcgggctctgatcgggctggaggcaggcccagagatgcagcagctcaagcagcaattccaggaatttattgtcggactcatgtcccttcccattaagctgccagggactaggctctacagatccctccaggccaagaagaggatggcgagggtcgtacagaggatcatacaggagaagaggaggaggagggccctggacggcggcggcgcgccgagagacgccatcgacgtgctcatgggcgacggcagtgaggagctcaccgacgagctcatatccgacaacatgatcgacttcatgatccccgccgaggactccgtgccggtgctcatcacgctcgccgtcaagttcctcagcgagtgccccctcgccttgcaacagcttgaggaggagaacatgcagctcaagatgagaaaaaccgacctgggtgaaaccttgcaatggactgactacatgtccttgtcattcacgcagcatgtgataacggagacgctgcggattgggaatatcatcagtgggatcatgcgcaaggcggtccgcgacgtcgaagtgaaggggcatctcatccccaaaggatggcgtgtgttcatgtacttccggtcggtccacctcgacgacatgctctacgaggatccctgcaagttcaatccatggaggtggaagtgtgtcaatcaacaggagaaggacatgagcactagcagcttcaccccttttggtggtgggcagaggctgtgcccgggcctggatctggccaggctggaagcttccatctttctccaccacttggtcaccagcttcaggtgggtggccgaggaggaccacatcgtcaacttccccaccgtgcgcctcaagggaggcatgcccatcagggtcaccgccaaagactagctacccgttactcggaccatcgtccttgatcaactccccgcagcagccaagccagccaaaggctcaagttacatgtgcatatacataatgctactgctacaagtatgtggtgttatccatagcaaggttaaaagccccttcaaggagtaagctagctaggcaacatctgatgtgagtacataggggggtatgttgaagtgttgtaggggagcttaattagccaaggagtagtaggtgccactgatgatcactgtggctcgttaatcatagccgagggagactctgaccgatgatgcatgctgttatagtagtataagtagtagtatagtgctggtgtcacaaggaatagatatatcatctatgtatacatg

SEQ ID NO: 67190 - protein, 494 aa, Triticum aestivum
  peptide (1)..(494): Ceres Seq. ID no. 14307909
  misc_feature (39)..(490): Homolog of NCBI NO: 34902330 NR Description: Putative steroid 22-alpha-hydroxylase
  misc_feature (13)..(490): Homolog of NCBI NO: 27127269 NR Description: cytochrome P450 [Oryza sativa (japonica
  misc_feature (23)..(494): Homolog of NCBI NO: 9587211 NR Description: cytochrome P450 [Vigna radiata]
  misc_feature (18)..(494): Homolog of NCBI NO: 15239203 NR Description: cytochrome p450 90A1 [Arabidopsis thaliana]
  misc_feature (46)..(494): Homolog of NCBI NO: 25282635 NR Description: cytochrome P450 like protein [imported] -
  misc_feature (41)..(494): Homolog of NCBI NO: 18419825 NR Description: rotundifolia3 (rot3) [Arabidopsis thaliana]
  misc_feature (41)..(494): Homolog of NCBI NO: 13878393 NR Description: Cytochrome P450 90C1 (ROTUNDIFOLIA3)
  misc_feature (43)..(466): Homolog of NCBI NO: 9294019 NR Description: cytochrome P450-like protein [Arabidopsis
  misc_feature (43)..(488): Homolog of NCBI NO: 18400142 NR Description: cytochrome P450, putative (CYP90D) [Arabidopsis
  misc_feature (2)..(494): Homolog of NCBI NO: 34903584 NR Description: cytochrome P450-like protein
MSVSWPAPSTCAAAGALLAAAWLLCFRLFPAVARPRRRAMKTGAQLPPGIFGWPVVGETLDFVSCAYSPRPEAFVDKRRLRYGSAVFRSHLFGSATVVTADAEVNRFVLQSDARSFVPWYPRSLTELMGKSSILVINGSLQRRVHGLVGAFFKSPQLKAQVTADMQRRLAPALAAWREQGPGARLRIQDHAKTIVFQILVRALIGLEAGPEMQQLKQQFQEFIVGLMSLPIKLPGTRLYRSLQAKKRMARVVQRIIQEKRRRRALDGGGAPRDAIDVLMGDGSEELTDELISDNMIDFMIPAEDSVPVLITLAVKFLSECPLALQQLEEENMQLKMRKTDLGETLQWTDYMSLSFTQHVITETLRIGNIISGIMRKAVRDVEVKGHLIPKGWRVFMYFRSVHLDDMLYEDPCKFNPWRWKCVNQQEKDMSTSSFTPFGGGQRLCPGLDLARLEASIFLHHLVTSFRWVAEEDHIVNFPTVRLKGGMPIRVTAKD

SEQ ID NO: 67191 - protein, 455 aa, Triticum aestivum
  peptide (1)..(455): Ceres Seq. ID no. 14307910
  misc_feature (1)..(451): Homolog of NCBI NO: 34902330 NR Description: Putative steroid 22-alpha-hydroxylase
  misc_feature (1)..(451): Homolog of NCBI NO: 27127269 NR Description: cytochrome P450 [Oryza sativa (japonica
  misc_feature (1)..(455): Homolog of NCBI NO: 9587211 NR Description: cytochrome P450 [Vigna radiata]
  misc_feature (1)..(455): Homolog of NCBI NO: 15239203 NR Description: cytochrome p450 90A1 [Arabidopsis thaliana]
  misc_feature (7)..(455): Homolog of NCBI NO: 25282635 NR Description: cytochrome P450 like protein [imported] -
  misc_feature (2)..(455): Homolog of NCBI NO: 18419825 NR Description: rotundifolia3 (rot3) [Arabidopsis thaliana]
  misc_feature (2)..(455): Homolog of NCBI NO: 13878393 NR Description: Cytochrome P450 90C1 (ROTUNDIFOLIA3)
  misc_feature (4)..(427): Homolog of NCBI NO: 9294019 NR Description: cytochrome P450-like protein [Arabidopsis
  misc_feature (4)..(449): Homolog of NCBI NO: 18400142 NR Description: cytochrome P450, putative (CYP90D) [Arabidopsis
  misc_feature (1)..(455): Homolog of NCBI NO: 34903584 NR Description: cytochrome P450-like protein
MKTGAQLPPGIFGWPVVGETLDFVSCAYSPRPEAFVDKRRLRYGSAVFRSHLFGSATVVTADAEVNRFVLQSDARSFVPWYPRSLTELMGKSSILVINGSLQRRVHGLVGAFFKSPQLKAQVTADMQRRLAPALAAWREQGPGARLRIQDHAKTIVFQILVRALIGLEAGPEMQQLKQQFQEFIVGLMSLPIKLPGTRLYRSLQAKKRMARVVQRIIQEKRRRRALDGGGAPRDAIDVLMGDGSEELTDELISDNMIDFMIPAEDSVPVLITLAVKFLSECPLALQQLEEENMQLKMRKTDLGETLQWTDYMSLSFTQHVITETLRIGNIISGIMRKAVRDVEVKGHLIPKGWRVFMYFRSVHLDDMLYEDPCKFNPWRWKCVNQQEKDMSTSSFTPFGGGQRLCPGLDLARLEASIFLHHLVTSFRWVAEEDHIVNFPTVRLKGGMPIRVTAKD

SEQ ID NO: 67192 - protein, 367 aa, Triticum aestivum
  peptide (1)..(367): Ceres Seq. ID no. 14307911
  misc_feature (1)..(363): Homolog of NCBI NO: 34902330 NR Description: Putative steroid 22-alpha-hydroxylase
  misc_feature (1)..(363): Homolog of NCBI NO: 27127269 NR Description: cytochrome P450 [Oryza sativa (japonica
  misc_feature (1)..(367): Homolog of NCBI NO: 9587211 NR Description: cytochrome P450 [Vigna radiata]
  misc_feature (1)..(367): Homolog of NCBI NO: 15239203 NR Description: cytochrome p450 90A1 [Arabidopsis thaliana]
  misc_feature (1)..(367): Homolog of NCBI NO: 25282635 NR Description: cytochrome P450 like protein [imported] -
  misc_feature (1)..(367): Homolog of NCBI NO: 18419825 NR Description: rotundifolia3 (rot3) [Arabidopsis thaliana]
  misc_feature (1)..(367): Homolog of NCBI NO: 13878393 NR Description: Cytochrome P450 90C1 (ROTUNDIFOLIA3)
  misc_feature (1)..(339): Homolog of NCBI NO: 9294019 NR Description: cytochrome P450-like protein [Arabidopsis
  misc_feature (1)..(361): Homolog of NCBI NO: 18400142 NR Description: cytochrome P450, putative (CYP90D) [Arabidopsis
  misc_feature (1)..(367): Homolog of NCBI NO: 34903584 NR Description: cytochrome P450-like protein
MGKSSILVINGSLQRRVHGLVGAFFKSPQLKAQVTADMQRRLAPALAAWREQGPGARLRIQDHAKTIVFQILVRALIGLEAGPEMQQLKQQFQEFIVGLMSLPIKLPGTRLYRSLQAKKRMARVVQRIIQEKRRRRALDGGGAPRDAIDVLMGDGSEELTDELISDNMIDFMIPAEDSVPVLITLAVKFLSECPLALQQLEEENMQLKMRKTDLGETLQWTDYMSLSFTQHVITETLRIGNIISGIMRKAVRDVEVKGHLIPKGWRVFMYFRSVHLDDMLYEDPCKFNPWRWKCVNQQEKDMSTSSFTPFGGGQRLCPGLDLARLEASIFLHHLVTSFRWVAEEDHIVNFPTVRLKGGMPIRVTAKD

SEQ ID NO: 67193 - DNA, 964 bp, Triticum aestivum
  misc_feature (1)..(964): Ceres Seq. ID no. 15173087
aaccattccttggacaatcttcttcctcttcccctgctatacactctagcccttcttgtccgtgcatttctccctggctttgactggttgttgatgaagctgcaggagccagccccctagctatctgtctgtctagctgctccatcgcctccggactgtccttcgggtccacccccggctccgtcatggccacgctctgcttcttcatggccgtcttcatgctgggcctcgccttcccgtaccaccactggacgacgccggggaaccacatcgggttcgtggtgctgtacgcgctcaccttcttcttcgccaacttcgggcccaactccaccaccttcatcgtgccggcggagatcttcccggcgaggctccggtcgacgtgccacggcatctccgccgccgccgggaagctgggggccatcgttgggtcgttcgggttcctgtacctggcgcagaacaaggacccggccaaggtggaccacgggtacaaggccggcatcggggtgaggaactcgctcttcatcctcgccgcctgcaacttcctgggcatgggcttcaccttctgcgcgcccgagtccaacggcatctcgctcgaggagctctccggcgagaacgacgacggcgaggcggccgcgccggcgcacgccaggacggtgcccgtgtgagacagtcctcgtcagatagtatattctgcaggtttggatggatgtatggatcattttaatggttggagcgttcaaactcaggagtcagagtacaagaataatcgtgtgatgggtcgagttgtccaggttaattcattagagttgctggtcgggttagcagtaatagggagtgatacaagttaagagtgtagtagtgcatcaaagaggcacgcatatgtacgcgatatgatggaaaactttcatgcattttggcctgtgtggactggacaatatattatacagtactaaattctatcgct

SEQ ID NO: 67194 - protein, 159 aa, Triticum aestivum
  peptide (1)..(159): Ceres Seq. ID no. 15173088
  misc_feature (6)..(143): Pfam Name: Sugar (and other) transporter Pfam Description: Sugar (and other) transporter
  misc_feature (1)..(14): Homolog of NCBI NO: 37534814 NR Description: putative phosphate transporter
  misc_feature (6)..(150): Homolog of NCBI NO: 37534814 NR Description: putative phosphate transporter
  misc_feature (1)..(14): Homolog of NCBI NO: 38344620 NR Description: OSJNBb0003A12.6 [Oryza sativa (japonica
  misc_feature (1)..(14): Homolog of NCBI NO: 23600453 NR Description: putative phosphate transporter OsPT5
  misc_feature (6)..(158): Homolog of NCBI NO: 38344620 NR Description: OSJNBb0003A12.6 [Oryza sativa (japonica
  misc_feature (6)..(158): Homolog of NCBI NO: 23600453 NR Description: putative phosphate transporter OsPT5
  misc_feature (1)..(14): Homolog of NCBI NO: 20162455 NR Description: phosphate transporter [Oryza sativa]
  misc_feature (6)..(158): Homolog of NCBI NO: 20162455 NR Description: phosphate transporter [Oryza sativa]
  misc_feature (1)..(14): Homolog of NCBI NO: 23506605 NR Description: phosphate transporter 6 [Hordeum vulgare subsp.
  misc_feature (6)..(159): Homolog of NCBI NO: 23506605 NR Description: phosphate transporter 6 [Hordeum vulgare subsp.
MATLCFFMAVFMLGLAFPYHHWTTPGNHIGFVVLYALTFFFANFGPNSTTFIVPAEIFPARLRSTCHGISAAAGKLGAIVGSFGFLYLAQNKDPAKVDHGYKAGIGVRNSLFILAACNFLGMGFTFCAPESNGISLEELSGENDDGEAAAPAHARTVPV

SEQ ID NO: 67195 - protein, 152 aa, Triticum aestivum
  peptide (1)..(152): Ceres Seq. ID no. 15173089
  misc_feature (1)..(136): Pfam Name: Sugar (and other) transporter Pfam Description: Sugar (and other) transporter
  misc_feature (1)..(152): Homolog of NCBI NO: 12697484 NR Description: phosphate transporter [Sesbania rostrata]
  misc_feature (1)..(151): Homolog of NCBI NO: 15983299 NR Description: phosphate transporter [Oryza sativa subsp. indica]
  misc_feature (1)..(148): Homolog of NCBI NO: 29367127 NR Description: phosphate transporter HvPT5 [Hordeum vulgare
  misc_feature (1)..(144): Homolog of NCBI NO: 23600459 NR Description: putative phosphate transporter OsPT6
  misc_feature (1)..(144): Homolog of NCBI NO: 21429216 NR Description: putative high-affinity phosphate transporter HAPT
  misc_feature (1)..(143): Homolog of NCBI NO: 37534814 NR Description: putative phosphate transporter
  misc_feature (1)..(151): Homolog of NCBI NO: 38344620 NR Description: OSJNBb0003A12.6 [Oryza sativa (japonica
  misc_feature (1)..(151): Homolog of NCBI NO: 23600453 NR Description: putative phosphate transporter OsPT5
  misc_feature (1)..(151): Homolog of NCBI NO: 20162455 NR Description: phosphate transporter [Oryza sativa]
  misc_feature (1)..(152): Homolog of NCBI NO: 23506605 NR Description: phosphate transporter 6 [Hordeum vulgare subsp.
MAVFMLGLAFPYHHWTTPGNHIGFVVLYALTFFFANFGPNSTTFIVPAEIFPARLRSTCHGISAAAGKLGAIVGSFGFLYLAQNKDPAKVDHGYKAGIGVRNSLFILAACNFLGMGFTFCAPESNGISLEELSGENDDGEAAAPAHARTVPV

SEQ ID NO: 67196 - protein, 148 aa, Triticum aestivum
  peptide (1)..(148): Ceres Seq. ID no. 15173090
  misc_feature (1)..(132): Pfam Name: Sugar (and other) transporter Pfam Description: Sugar (and other) transporter
  misc_feature (1)..(148): Homolog of NCBI NO: 12697484 NR Description: phosphate transporter [Sesbania rostrata]
  misc_feature (1)..(147): Homolog of NCBI NO: 15983299 NR Description: phosphate transporter [Oryza sativa subsp. indica]
  misc_feature (1)..(144): Homolog of NCBI NO: 29367127 NR Description: phosphate transporter HvPT5 [Hordeum vulgare
  misc_feature (1)..(140): Homolog of NCBI NO: 23600459 NR Description: putative phosphate transporter OsPT6
  misc_feature (1)..(140): Homolog of NCBI NO: 21429216 NR Description: putative high-affinity phosphate transporter HAPT
  misc_feature (1)..(139): Homolog of NCBI NO: 37534814 NR Description: putative phosphate transporter
  misc_feature (1)..(147): Homolog of NCBI NO: 38344620 NR Description: OSJNBb0003A12.6 [Oryza sativa (japonica
  misc_feature (1)..(147): Homolog of NCBI NO: 23600453 NR Description: putative phosphate transporter OsPT5
  misc_feature (1)..(147): Homolog of NCBI NO: 20162455 NR Description: phosphate transporter [Oryza sativa]
  misc_feature (1)..(148): Homolog of NCBI NO: 23506605 NR Description: phosphate transporter 6 [Hordeum vulgare subsp.
MLGLAFPYHHWTTPGNHIGFVVLYALTFFFANFGPNSTTFIVPAEIFPARLRSTCHGISAAAGKLGAIVGSFGFLYLAQNKDPAKVDHGYKAGIGVRNSLFILAACNFLGMGFTFCAPESNGISLEELSGENDDGEAAAPAHARTVPV

SEQ ID NO: 67197 - DNA, 764 bp, Triticum aestivum
  misc_feature (1)..(764): Ceres Seq. ID no. 13659204
aacttctccttccgttgcctccgcttcgccttttcccgttccgtccaaataaaacgctcgagctaccaaaccctaggtagggctcctttcgatccgattcgagtcgatctcagttgggtgcgagattggactggagggggatgacgatacctagtgccgagggattcctcccggcggcgagctgcctgccgtgcacggcggaggaggaaagggcgaccgtcgacgcactcacgcgggaggccgacgcgaatgtcaaagacggcgatctccgctatctcatctcacaaagctggtggaccaactggcaatcttatgtgggcttactcagttatggggagaatgacactgacattcctcttcaacctgcaagtagacctggagagattgataacagaaagcttgttttggaggaaactagcagtggcagtgaagatacagagctccaaagaaccttaagagaaggggaggactacactttggtgccacaagatgtctggagaaaactatatgactggtatgcagttgcaacggcacgcaatatatgtttttcattgtttctttagccctgtttactgcactttgtagcaggaacttggctagacctataatatcacctccgccatcctgcttgttggcattagttgttgccttttatttttctctcgcctgccactagtagttttggaccacattatgtaaatacttctgtatatgtatatcccaccatttttggtgtgtgtttgctccttggtggttggtttgtg

SEQ ID NO: 67198 - protein, 140 aa, Triticum aestivum
  peptide (1)..(140): Ceres Seq. ID no. 15219954
  misc_feature (12)..(126): Homolog of NCBI NO: 18405549 NR Description: ubiquitin-specific protease 5 (UBP5), putative
  misc_feature (12)..(126): Homolog of NCBI NO: 7487236 NR Description: probable ubiquitin carboxyl terminal hydrolase
  misc_feature (19)..(126): Homolog of NCBI NO: 15223316 NR Description: hypothetical protein [Arabidopsis thaliana]
  misc_feature (1)..(127): Homolog of NCBI NO: 7487641 NR Description: hypothetical protein T4F9.50 - Arabidopsis
  misc_feature (1)..(124): Homolog of NCBI NO: 7487639 NR Description: hypothetical protein T4F9.30 - Arabidopsis
  misc_feature (1)..(127): Homolog of NCBI NO: 18413358 NR Description: expressed protein [Arabidopsis thaliana]
  misc_feature (1)..(127): Homolog of NCBI NO: 4115923 NR Description: contains similarity to ubiquitin
  misc_feature (1)..(127): Homolog of NCBI NO: 4115922 NR Description: contains similarity to ubiquitin
  misc_feature (1)..(127): Homolog of NCBI NO: 30681490 NR Description: expressed protein [Arabidopsis thaliana]
  misc_feature (1)..(126): Homolog of NCBI NO: 37531290 NR Description: putative ubiquitin carboxyl terminal hydrolase
MTIPSAEGFLPAASCLPCTAEEERATVDALTREADANVKDGDLRYLISQSWWTNWQSYVGLLSYGENDTDIPLQPASRPGEIDNRKLVLEETSSGSEDTELQRTLREGEDYTLVPQDVWRKLYDWYAVATARNICFSLFL

SEQ ID NO: 67199 - DNA, 1342 bp, Triticum aestivum
  misc_feature (1)..(1342): Ceres Seq. ID no. 14303129
attattcgatcttttttccttttgcccttgtcttcttcctcgccgctcgtccccttaaaccctcccatggcggcccgcccatgctcccgcggctgccccaagctccggcgcctcctctcctccgccgccgccgcgaacctccccctcctgtgatcctagaggcgcacggccaagggctccctggcggatttggatgaatgccaccggccggccgccccatctcctctccccagcgagatctaggctgcagccccaaagagaactaaatattctccctctccaactcgcgcgagcttcgatccggtgccctgcggccggcgtccccgagaccggccccggccccaaacgcggttcccaacccgacgcccccctcccgcacgcttgcggcctccgggagcatcgcgcggtcctacatttcgttgcgggtgactcctttccgctcagtgtttatggtgccgcctgtgtaccaggagcctagtatcatgccgatcaatacaagaacggagaaggagttggaagaaaaggaggtgttatgcacgcacaaaaagcccaaagctacagggtgtgttgcccaaccgcagcaggaaactgaactcgccattgagagtgagaataaagggcatggtgatccttcaccaaaagagtctgcttgtgttgtgctgagcaatggtgaagcaaatggttgcagtgaggggcatgttcttggcaaatgtcatgtccaaattccgaagacatgactcgggtagaaaggatcattacagttcaaatattccatacaggcggtgcaaatgaagaaccagaagcaaggtcgagactggctcaactctgcagtgcaattggctggaagagtccaacatatgagtttcaagaacatggacatggccatacaaaactgttcacatgcaaggtgagtgttcttgtggagacgttcacagacactgttgtggagtgcatcagtgagcccaaaccccagaagagagctgcccaggaacaaggtgctgaaggtgtgttatggaccctcaagcgccttggtcatgtgaaatagctctagacgtcctccatcaggcgtggcgcgacgtctgtgtaccctcttgttaccatccgatccatcataagagcggtatctgatctttcttgaatccatgactcaacctgcgatcatgttgtcagctgatgcttatgcacggttaaacttgttgctctgtcggtcgtgttctaattttatattgctttagatctctatacaaacgagtgaagtgaacccatctccaatagtccaataattcttatctttagaccattctgagccatttacgaacattacagcgaatatgatcaagac

SEQ ID NO: 67200 - protein, 111 aa, Triticum aestivum
  peptide (1)..(111): Ceres Seq. ID no. 14303130
  misc_feature (32)..(104): Pfam Name: Double-stranded RNA binding motif Pfam Description: Double-stranded RNA binding motif
  misc_feature (32)..(111): Homolog of NCBI NO: 15220196 NR Description: expressed protein [Arabidopsis thaliana]
  misc_feature (19)..(110): Homolog of NCBI NO: 32488296 NR Description: OSJNBb0065L13.5 [Oryza sativa (japonica
  misc_feature (28)..(111): Homolog of NCBI NO: 30678641 NR Description: expressed protein [Arabidopsis thaliana]
  misc_feature (28)..(111): Homolog of NCBI NO: 30678637 NR Description: expressed protein [Arabidopsis thaliana]
MSCPNSEDMTRVERIITVQIFHTGGANEEPEARSRLAQLCSAIGWKSPTYEFQEHGHGHTKLFTCKVSVLVETFTDTVVECISEPKPQKRAAQEQGAEGVLWTLKRLGHVK

SEQ ID NO: 67201 - protein, 103 aa, Triticum aestivum
  peptide (1)..(103): Ceres Seq. ID no. 14303131
  misc_feature (24)..(96): Pfam Name: Double-stranded RNA binding motif Pfam Description: Double-stranded RNA binding motif
  misc_feature (24)..(103): Homolog of NCBI NO: 15220196 NR Description: expressed protein [Arabidopsis thaliana]
  misc_feature (11)..(102): Homolog of NCBI NO: 32488296 NR Description: OSJNBb0065L13.5 [Oryza sativa (japonica
  misc_feature (20)..(103): Homolog of NCBI NO: 30678641 NR Description: expressed protein [Arabidopsis thaliana]
  misc_feature (20)..(103): Homolog of NCBI NO: 30678637 NR Description: expressed protein [Arabidopsis thaliana]
MTRVERIITVQIFHTGGANEEPEARSRLAQLCSAIGWKSPTYEFQEHGHGHTKLFTCKVSVLVETFTDTVVECISEPKPQKRAAQEQGAEGVLWTLKRLGHVK

SEQ ID NO: 67202 - protein, 95 aa, Triticum aestivum
  peptide (1)..(95): Ceres Seq. ID no. 14303132
MVPPVYQEPSIMPINTRTEKELEEKEVLCTHKKPKATGCVAQPQQETELAIESENKGHGDPSPKESACVVLSNGEANGCSEGHVLGKCHVQIPKT

SEQ ID NO: 67203 - DNA, 1582 bp, Triticum aestivum
  misc_feature (1)..(1582): Ceres Seq. ID no. 14303185
ctggccagaccgagctgctcttcctcctccagttcagacgtggcggtttgactttctgacctcggaaacgatcgaaggcgccttccgtgggaaaaatcccggggcgattcctggagaagaagccgcggattcaggggcggtagaggagagcgcgcctcgccgttaccaggattttcgcccccgccctcgctccgatcgaggagaactttattaactactgaagataactggtagcggaatgaaggcaccatcactgcttgttcagtgtttccctggcttgcttccaagcaaggccactagttgtgtgccgattatatcagagagggatctgcatctaccatcaccagctgttgaactaatcccttcaaagagtgctcatccttacaaatatgctggagagaaggtcgatgtccaaggtcttgatgttttcaaggggaaggtcagtgtagcagatatgatagccttttccccttctgaagtagcatcatcaaagcatgatggtagtctcaaatattgggagagttccatcactattgtgaatattattaagaatgagatccgtgatgggcagctgagcttcaggggcaagcgagttctagagcttggatgtggatctggccttgctgggatttttgcctgcttgaagggtgcgtctatagttcacttccaggacacaaatgcagaaaccataagatgcagaacaatgcccaatgtgcttgcgaatcttgagcaggctcgggacagacagaacagaccatcagagagcccagttacaccatccagacagttgttagctcccgttgtccatttctatgccggggagtgggatgagctccccacaattctctcagttgtgcatccacctgcacaaccaacaaaccttagcttctctgaggatgattttatggatggctgcagtagccatgacggaagcagtatagttggtcaggaccccaggcgatcgaggaagctttctggcagccgtgcatgggagagggccagtgagactgacccagcagatggaggatacgatgtaattttgatttctgagatccctaatgcggtgaactctctaaggaagctctatgcccttatcactaagtgcctacgccctccttatggagtcttgtatgtggcttcaaagaagaacttggttggttcaaacggcggcgcaaggcagcttaaaagtttgatggaggaggaaggtgtccttggtggtcacttcttgactgagatatctgaccgggagatatggaagttctttttcaagtaaaccggcaaatgttggagctgaaaaagatgatcctggccatggcctcgtatacaaaaagaattcgtttgtctactcgcagcgctgtacataccgcgaagcttagttcgattaattctttggtgataggtccaagtatgcgtctcagttgttaaacctgcaaatgtgttggcattttaacccttttgtagatctcctatctcctaggtaactgttgagcttttgcataccgaatctatggtgctggcctatcacagcacgctatcagcaatatgtacaaatggaaatggttactgtacttgcttgtcggcc

SEQ ID NO: 67204 - protein, 344 aa, Triticum aestivum
  peptide (1)..(344): Ceres Seq. ID no. 14303186
  misc_feature (27)..(150): Homolog of NCBI NO: 7485012 NR Description: hypothetical protein - Arabidopsis thaliana
  misc_feature (262)..(344): Homolog of NCBI NO: 18414120 NR Description: expressed protein [Arabidopsis thaliana]
  misc_feature (27)..(214): Homolog of NCBI NO: 18414120 NR Description: expressed protein [Arabidopsis thaliana]
  misc_feature (262)..(344): Homolog of NCBI NO: 21554662 NR Description: unknown [Arabidopsis thaliana]
  misc_feature (34)..(214): Homolog of NCBI NO: 21554662 NR Description: unknown [Arabidopsis thaliana]
  misc_feature (288)..(344): Homolog of NCBI NO: 25408858 NR Description: hypothetical protein At2g43320 [imported] -
  misc_feature (1)..(292): Homolog of NCBI NO: 25408858 NR Description: hypothetical protein At2g43320 [imported] -
  misc_feature (1)..(344): Homolog of NCBI NO: 18406207 NR Description: expressed protein [Arabidopsis thaliana]
  misc_feature (1)..(344): Homolog of NCBI NO: 16226903 NR Description: At2g43320/T1O24.6 [Arabidopsis thaliana]
  misc_feature (1)..(344): Homolog of NCBI NO: 38346224 NR Description: OJ990528_30.4 [Oryza sativa (japonica
MKAPSLLVQCFPGLLPSKATSCVPIISERDLHLPSPAVELIPSKSAHPYKYAGEKVDVQGLDVFKGKVSVADMIAFSPSEVASSKHDGSLKYWESSITIVNIIKNEIRDGQLSFRGKRVLELGCGSGLAGIFACLKGASIVHFQDTNAETIRCRTMPNVLANLEQARDRQNRPSESPVTPSRQLLAPVVHFYAGEWDELPTILSVVHPPAQPTNLSFSEDDFMDGCSSHDGSSIVGQDPRRSRKLSGSRAWERASETDPADGGYDVILISEIPNAVNSLRKLYALITKCLRPPYGVLYVASKKNLVGSNGGARQLKSLMEEEGVLGGHFLTEISDREIWKFFFK

SEQ ID NO: 67205 - protein, 272 aa, Triticum aestivum
  peptide (1)..(272): Ceres Seq. ID no. 14303187
  misc_feature (1)..(78): Homolog of NCBI NO: 7485012 NR Description: hypothetical protein - Arabidopsis thaliana
  misc_feature (190)..(272): Homolog of NCBI NO: 18414120 NR Description: expressed protein [Arabidopsis thaliana]
  misc_feature (1)..(142): Homolog of NCBI NO: 18414120 NR Description: expressed protein [Arabidopsis thaliana]
  misc_feature (190)..(272): Homolog of NCBI NO: 21554662 NR Description: unknown [Arabidopsis thaliana]
  misc_feature (1)..(142): Homolog of NCBI NO: 21554662 NR Description: unknown [Arabidopsis thaliana]
  misc_feature (216)..(272): Homolog of NCBI NO: 25408858 NR Description: hypothetical protein At2g43320 [imported] -
  misc_feature (1)..(220): Homolog of NCBI NO: 25408858 NR Description: hypothetical protein At2g43320 [imported] -
  misc_feature (1)..(272): Homolog of NCBI NO: 18406207 NR Description: expressed protein [Arabidopsis thaliana]
  misc_feature (1)..(272): Homolog of NCBI NO: 16226903 NR Description: At2g43320/T1O24.6 [Arabidopsis thaliana]
  misc_feature (1)..(272): Homolog of NCBI NO: 38346224 NR Description: OJ990528_30.4 [Oryza sativa (japonica
MIAFSPSEVASSKHDGSLKYWESSITIVNIIKNEIRDGQLSFRGKRVLELGCGSGLAGIFACLKGASIVHFQDTNAETIRCRTMPNVLANLEQARDRQNRPSESPVTPSRQLLAPVVHFYAGEWDELPTILSVVHPPAQPTNLSFSEDDFMDGCSSHDGSSIVGQDPRRSRKLSGSRAWERASETDPADGGYDVILISEIPNAVNSLRKLYALITKCLRPPYGVLYVASKKNLVGSNGGARQLKSLMEEEGVLGGHFLTEISDREIWKFFFK

SEQ ID NO: 67206 - protein, 189 aa, Triticum aestivum
  peptide (1)..(189): Ceres Seq. ID no. 14303188
  misc_feature (107)..(168): Homolog of NCBI NO: 7485012 NR Description: hypothetical protein - Arabidopsis thaliana
  misc_feature (107)..(189): Homolog of NCBI NO: 18414120 NR Description: expressed protein [Arabidopsis thaliana]
  misc_feature (1)..(59): Homolog of NCBI NO: 18414120 NR Description: expressed protein [Arabidopsis thaliana]
  misc_feature (107)..(189): Homolog of NCBI NO: 21554662 NR Description: unknown [Arabidopsis thaliana]
  misc_feature (1)..(59): Homolog of NCBI NO: 21554662 NR Description: unknown [Arabidopsis thaliana]
  misc_feature (133)..(189): Homolog of NCBI NO: 25408858 NR Description: hypothetical protein At2g43320 [imported] -
  misc_feature (1)..(137): Homolog of NCBI NO: 25408858 NR Description: hypothetical protein At2g43320 [imported] -
  misc_feature (1)..(189): Homolog of NCBI NO: 18406207 NR Description: expressed protein [Arabidopsis thaliana]
  misc_feature (1)..(189): Homolog of NCBI NO: 16226903 NR Description: At2g43320/T1O24.6 [Arabidopsis thaliana]
  misc_feature (1)..(189): Homolog of NCBI NO: 38346224 NR Description: OJ990528_30.4 [Oryza sativa (japonica
MPNVLANLEQARDRQNRPSESPVTPSRQLLAPVVHFYAGEWDELPTILSVVHPPAQPTNLSFSEDDFMDGCSSHDGSSIVGQDPRRSRKLSGSRAWERASETDPADGGYDVILISEIPNAVNSLRKLYALITKCLRPPYGVLYVASKKNLVGSNGGARQLKSLMEEEGVLGGHFLTEISDREIWKFFFK

SEQ ID NO: 67207 - DNA, 1838 bp, Triticum aestivum
  misc_feature (1)..(1838): Ceres Seq. ID no. 15178685
atactctctatcgctttgtcccctcgctccaaacccgccgccgccgccgccgccgcccacgctagggttcgctcgcacgccgccgtcgccgccccctaaccccacagcacgtcgccgatagccagccagcaatggaaaatctccccgatgaattgctcgcggacatcctccgcagttttcctccacggagtctcgcggtgtgccggagcgtctgcaagcactggtgcgctgtcgtcgatgcccgcgggctgctcctcgcggtcgcgcgtcaagttccgtgctctctgcacggcatctacgttaactacgccatgatgcgaaggtcctgattcttctcccgcgtcgctccgcggactactagcccaatcgatggcatgctcagtttcctgcctggccagctgatgcgctatcgtagcgtcctggaccaccgcaacggtctcctcctgtacgaaaacagtcaggggatgtatgtgtgcaacccagcgacacgacggtgggcgaccctgtcggagccgccgcgcacggaaacttcctacagccacctgtttttctaccgccatcgtatgtatctaatgttcgatccaactatgtctctgcactacaatgtattattcttccctgatgtgcctgagaagccaaagccaccccatcttcaacctggtgagtcacaaatttcaagagcagattacgagcatgagcgtaactctttgggatcaatggaatggccaccatacatctacccactgcaagtgttctcgtcaaaaactgggcggtgggaagagaaacaatttattcgtgaaggtgatgcagcagttactgtgtcggatgtgtggttagatgcattggcaccaagtagcagccgcaactcgcttcaacgacatgcagtccactggcgagcttcgttttatgtacattgtgactctggtttcatcatgaggttgttattggaaaaacaaaactatctagtgatcaaaacccccaaactagataccactgggtttggtgtcgatgcaactgggcgcgagacacatcttacgacatacgggtatttgggtaaatccaagcatggtgtctattacaccactttgtgtggatacacacttcaagtgtgggtattgtgcaaaacattagaatcatgtcaaacaccggagtgggagctgaagcatcaagctaaccttacaaatttaaatctacaccatgaccaacacttaagaggagaaaggtatgaaaagtgctggatcttaaatggtcggagtgaagaatccgagcatggatgggattctagtgatgacagtgccattgatttagaaggagggtcggacatggattacaaagattatcactttgccgtggacttcttgggataccatccttacaaagaaattgctttcttgggcaaccgctttcaaggatttgcttactacctggaaaactccaagttaaagtacttgggatcaccttatccaccatacctaggcaactgtgattatggtttgcgacccatactcgagtcattcatctacactccttgcatggatgatctgcttcctattcagaatgatgcatgatgagctgatacttcacttaatttgatattaagtgggcaatataggttcaaggtgggataataaccgtgcggtcgttgggatgctattttgatgattgaataatgttcttttcaacacatggacaatttggttgttgttacgttttcttttaggttctccgtattgttatgtgaacttctgagtgatgtgtttggtttcaggagttgtaaaagtcaattaatattttggttgaaacatgttaatacatacagtataattttttattgctcc

SEQ ID NO: 67208 - protein, 397 aa, Triticum aestivum
  peptide (1)..(397): Ceres Seq. ID no. 15178686
  misc_feature (1)..(82): Homolog of NCBI NO: 29150413 NR Description: hypothetical protein [Oryza sativa (japonica
  misc_feature (65)..(248): Homolog of NCBI NO: 29150413 NR Description: hypothetical protein [Oryza sativa (japonica
  misc_feature (317)..(386): Homolog of NCBI NO: 31126734 NR Description: hypothetical protein [Oryza sativa (japonica
  misc_feature (1)..(216): Homolog of NCBI NO: 31126734 NR Description: hypothetical protein [Oryza sativa (japonica
  misc_feature (1)..(331): Homolog of NCBI NO: 19881684 NR Description: Hypothetical protein with F-box domain [Oryza
  misc_feature (1)..(330): Homolog of NCBI NO: 37533730 NR Description: hypothetical protein [Oryza sativa (japonica
  misc_feature (1)..(65): Homolog of NCBI NO: 38345226 NR Description: OSJNBb0021I10.9 [Oryza sativa (japonica
  misc_feature (32)..(387): Homolog of NCBI NO: 38345226 NR Description: OSJNBb0021I10.9 [Oryza sativa (japonica
  misc_feature (1)..(152): Homolog of NCBI NO: 31126729 NR Description: hypothetical protein [Oryza sativa (japonica
  misc_feature (117)..(392): Homolog of NCBI NO: 31126729 NR Description: hypothetical protein [Oryza sativa (japonica
MLSFLPGQLMRYRSVLDHRNGLLLYENSQGMYVCNPATRRWATLSEPPRTETSYSHLFFYRHRMYLMFDPTMSLHYNVLFFPDVPEKPKPPHLQPGESQISRADYEHERNSLGSMEWPPYIYPLQVFSSKTGRWEEKQFIREGDAAVTVSDVWLDALAPSSSRNSLQRHAVHWRASFYVHCDSGFIMRLLLEKQNYLVIKTPKLDTTGFGVDATGRETHLTTYGYLGKSKHGVYYTTLCGYTLQVWVLCKTLESCQTPEWELKHQANLTNLNLHHDQHLRGERYEKCWILNGRSEESEHGWDSSDDSAIDLEGGSDMDYKDYHFAVDFLGYHPYKEIAFLGNRFQGFAYYLENSKLKYLGSPYPPYLGNCDYGLRPILESFIYTPCMDDLLPIQNDA

SEQ ID NO: 67209 - protein, 388 aa, Triticum aestivum
  peptide (1)..(388): Ceres Seq. ID no. 15178687
  misc_feature (1)..(73): Homolog of NCBI NO: 29150413 NR Description: hypothetical protein [Oryza sativa (japonica
  misc_feature (56)..(239): Homolog of NCBI NO: 29150413 NR Description: hypothetical protein [Oryza sativa (japonica
  misc_feature (308)..(377): Homolog of NCBI NO: 31126734 NR Description: hypothetical protein [Oryza sativa (japonica
  misc_feature (1)..(207): Homolog of NCBI NO: 31126734 NR Description: hypothetical protein [Oryza sativa (japonica
  misc_feature (1)..(322): Homolog of NCBI NO: 19881684 NR Description: Hypothetical protein with F-box domain [Oryza
  misc_feature (1)..(321): Homolog of NCBI NO: 37533730 NR Description: hypothetical protein [Oryza sativa (japonica
  misc_feature (1)..(56): Homolog of NCBI NO: 38345226 NR Description: OSJNBb0021I10.9 [Oryza sativa (japonica
  misc_feature (23)..(378): Homolog of NCBI NO: 38345226 NR Description: OSJNBb0021I10.9 [Oryza sativa (japonica
  misc_feature (1)..(143): Homolog of NCBI NO: 31126729 NR Description: hypothetical protein [Oryza sativa (japonica
  misc_feature (108)..(383): Homolog of NCBI NO: 31126729 NR Description: hypothetical protein [Oryza sativa (japonica
MRYRSVLDHRNGLLLYENSQGMYVCNPATRRWATLSEPPRTETSYSHLFFYRHRMYLMFDPTMSLHYNVLFFPDVPEKPKPPHLQPGESQISRADYEHERNSLGSMEWPPYIYPLQVFSSKTGRWEEKQFIREGDAAVTVSDVWLDALAPSSSRNSLQRHAVHWRASFYVHCDSGFIMRLLLEKQNYLVIKTPKLDTTGFGVDATGRETHLTTYGYLGKSKHGVYYTTLCGYTLQVWVLCKTLESCQTPEWELKHQANLTNLNLHHDQHLRGERYEKCWILNGRSEESEHGWDSSDDSAIDLEGGSDMDYKDYHFAVDFLGYHPYKEIAFLGNRFQGFAYYLENSKLKYLGSPYPPYLGNCDYGLRPILESFIYTPCMDDLLPIQNDA

SEQ ID NO: 67210 - protein, 367 aa, Triticum aestivum
  peptide (1)..(367): Ceres Seq. ID no. 15178688
  misc_feature (1)..(52): Homolog of NCBI NO: 29150413 NR Description: hypothetical protein [Oryza sativa (japonica
  misc_feature (35)..(218): Homolog of NCBI NO: 29150413 NR Description: hypothetical protein [Oryza sativa (japonica
  misc_feature (287)..(356): Homolog of NCBI NO: 31126734 NR Description: hypothetical protein [Oryza sativa (japonica
  misc_feature (1)..(186): Homolog of NCBI NO: 31126734 NR Description: hypothetical protein [Oryza sativa (japonica
  misc_feature (1)..(301): Homolog of NCBI NO: 19881684 NR Description: Hypothetical protein with F-box domain [Oryza
  misc_feature (1)..(300): Homolog of NCBI NO: 37533730 NR Description: hypothetical protein [Oryza sativa (japonica
  misc_feature (1)..(35): Homolog of NCBI NO: 38345226 NR Description: OSJNBb0021I10.9 [Oryza sativa (japonica
  misc_feature (2)..(357): Homolog of NCBI NO: 38345226 NR Description: OSJNBb0021I10.9 [Oryza sativa (japonica
  misc_feature (1)..(122): Homolog of NCBI NO: 31126729 NR Description: hypothetical protein [Oryza sativa (japonica
  misc_feature (87)..(362): Homolog of NCBI NO: 31126729 NR Description: hypothetical protein [Oryza sativa (japonica
MYVCNPATRRWATLSEPPRTETSYSHLFFYRHRMYLMFDPTMSLHYNVLFFPDVPEKPKPPHLQPGESQISRADYEHERNSLGSMEWPPYIYPLQVFSSKTGRWEEKQFIREGDAAVTVSDVWLDALAPSSSRNSLQRHAVHWRASFYVHCDSGFIMRLLLEKQNYLVIKTPKLDTTGFGVDATGRETHLTTYGYLGKSKHGVYYTTLCGYTLQVWVLCKTLESCQTPEWELKHQANLTNLNLHHDQHLRGERYEKCWILNGRSEESEHGWDSSDDSAIDLEGGSDMDYKDYHFAVDFLGYHPYKEIAFLGNRFQGFAYYLENSKLKYLGSPYPPYLGNCDYGLRPILESFIYTPCMDDLLPIQNDA

SEQ ID NO: 67211 - DNA, 1125 bp, Triticum aestivum
  misc_feature (1)..(1125): Ceres Seq. ID no. 14301707
atcttttgtcctcctcctccgttgcgcagttggctcgcttgcttgcttgctgtaggtgagtgctgctggagacgggagccgggccgaggcggatcggggagaaggtgggaggcgggcgggtggtagatccggcgggcgtggctcgcgagaaggttggtgcgaggttggtggaggaggggagagaaggaggggatggagcggaaggcggtggtggtgtgcgcgctcgtcggcttcctcggcgtcctctccgccgcgctaggcttcgccgccgagggcacccgcgtcaaggtttcagatgtgcaaaccgactcttctccaggtgaatgcatatacccaagaagccctgcgttaggccttgggttgatgtctgcagttgcccttatggtcgcacaggctattataaatacagttgctggttgcatctgttgtaagaggcatccggttccctcagacactaactggagtgtggctctgatctcattcatcgtatcttgggtcactttcataatcgcgttccttctcctgctgaccggagccgcgctgaacgaccaaaggggccaggagaacatgtacttcggcagcttctgctacgtcgtcaagccgggggtcttctccggaggggcggtgctctccctcgcgagcgtggccctggccatagtctactacgtggccctgacgtcgtcgaaagccccgccgagctggggcccacagcagaaccagggcatctccatgggccagcccgtgatcccgcagcagagcagcgagccggtgttcgtccatgaggacacctacaaccggcaacgtttcccatgagtgatcacagccatattcaagccagccatttcgagggtcgcccatgaggacacttgcaaccggcagcagttcccgtgatcgcagtcgtagtacctaagccgtttctacggcccgcatgaacgctatgttggcgagtttggtttgtatagccctgcaggttagaacaatagcagcagtttggttaccgttattattagctaggttcatcagtcttctctttttctttgtttgagacttgagaaaggcggcggcatgcctgtttcgtcggtatggatatttgaattttaaatgaactgggtaatgttgaggttg

SEQ ID NO: 67212 - protein, 206 aa, Triticum aestivum
  peptide (1)..(206): Ceres Seq. ID no. 14301708
  misc_feature (1)..(169): Homolog of NCBI NO: 18391509 NR Description: expressed protein [Arabidopsis thaliana]
  misc_feature (5)..(181): Homolog of NCBI NO: 18408976 NR Description: expressed protein [Arabidopsis thaliana]
  misc_feature (5)..(180): Homolog of NCBI NO: 21554630 NR Description: unknown [Arabidopsis thaliana]
  misc_feature (5)..(180): Homolog of NCBI NO: 18407003 NR Description: expressed protein [Arabidopsis thaliana]
  misc_feature (5)..(181): Homolog of NCBI NO: 34394069 NR Description: unknown protein [Oryza sativa (japonica
  misc_feature (30)..(205): Homolog of NCBI NO: 10177066 NR Description: dbj|BAA92731.1~gene_id:MKP11.6~similar to unknown
  misc_feature (1)..(205): Homolog of NCBI NO: 18418215 NR Description: expressed protein [Arabidopsis thaliana]
  misc_feature (1)..(32): Homolog of NCBI NO: 24413945 NR Description: contains ESTs
  misc_feature (103)..(206): Homolog of NCBI NO: 24413945 NR Description: contains ESTs
  misc_feature (1)..(206): Homolog of NCBI NO: 34897938 NR Description: ESTs AU082454(S3638),D41267(S3638) correspond to region of the predicted gene.~Similar to Arabidopsis thaliana DNA
MERKAVVVCALVGFLGVLSAALGFAAEGTRVKVSDVQTDSSPGECIYPRSPALGLGLMSAVALMVAQAIINTVAGCICCKRHPVPSDTNWSVALISFIVSWVTFIIAFLLLLTGAALNDQRGQENMYFGSFCYVVKPGVFSGGAVLSLASVALAIVYYVALTSSKAPPSWGPQQNQGISMGQPVIPQQSSEPVFVHEDTYNRQRFP

SEQ ID NO: 67213 - protein, 149 aa, Triticum aestivum
  peptide (1)..(149): Ceres Seq. ID no. 14301709
  misc_feature (1)..(124): Homolog of NCBI NO: 38016521 NR Description: fiber protein Fb34 [Gossypium barbadense]
  misc_feature (1)..(112): Homolog of NCBI NO: 18391509 NR Description: expressed protein [Arabidopsis thaliana]
  misc_feature (1)..(124): Homolog of NCBI NO: 18408976 NR Description: expressed protein [Arabidopsis thaliana]
  misc_feature (1)..(123): Homolog of NCBI NO: 21554630 NR Description: unknown [Arabidopsis thaliana]
  misc_feature (1)..(123): Homolog of NCBI NO: 18407003 NR Description: expressed protein [Arabidopsis thaliana]
  misc_feature (1)..(124): Homolog of NCBI NO: 34394069 NR Description: unknown protein [Oryza sativa (japonica
  misc_feature (1)..(148): Homolog of NCBI NO: 10177066 NR Description: dbj|BAA92731.1~gene_id:MKP11.6~similar to unknown
  misc_feature (1)..(148): Homolog of NCBI NO: 18418215 NR Description: expressed protein [Arabidopsis thaliana]
  misc_feature (46)..(149): Homolog of NCBI NO: 24413945 NR Description: contains ESTs
  misc_feature (1)..(149): Homolog of NCBI NO: 34897938 NR Description: ESTs AU082454(S3638),D41267(S3638) correspond to region of the predicted gene.~Similar to Arabidopsis thaliana DNA
MSAVALMVAQAIINTVAGCICCKRHPVPSDTNWSVALISFIVSWVTFIIAFLLLLTGAALNDQRGQENMYFGSFCYVVKPGVFSGGAVLSLASVALAIVYYVALTSSKAPPSWGPQQNQGISMGQPVIPQQSSEPVFVHEDTYNRQRFP

SEQ ID NO: 67214 - protein, 143 aa, Triticum aestivum
  peptide (1)..(143): Ceres Seq. ID no. 14301710
  misc_feature (1)..(118): Homolog of NCBI NO: 38016521 NR Description: fiber protein Fb34 [Gossypium barbadense]
  misc_feature (1)..(106): Homolog of NCBI NO: 18391509 NR Description: expressed protein [Arabidopsis thaliana]
  misc_feature (1)..(118): Homolog of NCBI NO: 18408976 NR Description: expressed protein [Arabidopsis thaliana]
  misc_feature (1)..(117): Homolog of NCBI NO: 21554630 NR Description: unknown [Arabidopsis thaliana]
  misc_feature (1)..(117): Homolog of NCBI NO: 18407003 NR Description: expressed protein [Arabidopsis thaliana]
  misc_feature (1)..(118): Homolog of NCBI NO: 34394069 NR Description: unknown protein [Oryza sativa (japonica
  misc_feature (1)..(142): Homolog of NCBI NO: 10177066 NR Description: dbj|BAA92731.1~gene_id:MKP11.6~similar to unknown
  misc_feature (1)..(142): Homolog of NCBI NO: 18418215 NR Description: expressed protein [Arabidopsis thaliana]
  misc_feature (40)..(143): Homolog of NCBI NO: 24413945 NR Description: contains ESTs
  misc_feature (1)..(143): Homolog of NCBI NO: 34897938 NR Description: ESTs AU082454(S3638),D41267(S3638) correspond to region of the predicted gene.~Similar to Arabidopsis thaliana DNA
MVAQAIINTVAGCICCKRHPVPSDTNWSVALISFIVSWVTFIIAFLLLLTGAALNDQRGQENMYFGSFCYVVKPGVFSGGAVLSLASVALAIVYYVALTSSKAPPSWGPQQNQGISMGQPVIPQQSSEPVFVHEDTYNRQRFP

SEQ ID NO: 67215 - DNA, 857 bp, Triticum aestivum
  misc_feature (1)..(857): Ceres Seq. ID no. 14301696
ctcccggtgcgctcctttgtgattggttgctgctgctcgggatcaatgggtactcctactccataccaccatctgtctccaagaaccatcgtcaccaagatcatcagcatgaagcggcaggagccagagccgccgccgccgcccaagatcatcctgcagccacggcaccggaccagccccgcgatgtggtgcgctgccatcgtctgcttcgccttcagcgtcctcctcatcctcgccggcctggtgatcctcgtcgtcttcctgacggtgaagccaaggacgccgtccttcgacgtcgcccacgcagccctcaacagcgtctacatcggctcgcccccgccctacttcaacggcgacatgacgctgacggccaacatctccaaccccaaccgcaagatcggcgtcgtgatccagtccggcgccgtcgagctcttctttcggggcaggctggtgtcggcccaggcgctgccgtcgtttgcgcagcggcgggggcagttcacagtcctcagcgtccacatgctgtctagccaggtcgtgctaccgccggaggtggccgtggagctgctgaaccagatgaagagcaacaagatcctcttcaccatcagagggaccttcaaggtccgggaaaggttctggtcttggcactacacctaccggatgactgccatttgtgacctggagctcaccgcgcctccctctggatttctcgtacataggagatgcacaacatcaacgtgattggtacctggatgctcttttcatcttcttttgttgcatcaaattttcaaggatgtatagcagtacgaaactattttggatgtattttttttatgtaaagtaaaacccaagtaaaccac

SEQ ID NO: 67216 - protein, 245 aa, Triticum aestivum
  peptide (1)..(245): Ceres Seq. ID no. 14301697
  misc_feature (57)..(241): Homolog of NCBI NO: 20804896 NR Description: P0497A05.21 [Oryza sativa (japonica
  misc_feature (42)..(226): Homolog of NCBI NO: 38344198 NR Description: OSJNBa0064G10.14 [Oryza sativa (japonica
  misc_feature (52)..(210): Homolog of NCBI NO: 15242362 NR Description: hypothetical protein [Arabidopsis thaliana]
  misc_feature (18)..(242): Homolog of NCBI NO: 20804932 NR Description: P0456E05.10 [Oryza sativa (japonica
  misc_feature (41)..(243): Homolog of NCBI NO: 15222151 NR Description: hypothetical protein [Arabidopsis thaliana]
  misc_feature (39)..(243): Homolog of NCBI NO: 15231546 NR Description: hypothetical protein [Arabidopsis thaliana]
  misc_feature (84)..(243): Homolog of NCBI NO: 15236740 NR Description: expressed protein [Arabidopsis thaliana]
  misc_feature (26)..(243): Homolog of NCBI NO: 15241117 NR Description: hypothetical protein [Arabidopsis thaliana]
LPVRSFVIGCCCSGSMGTPTPYHHLSPRTIVTKIISMKRQEPEPPPPPKIILQPRHRTSPAMWCAAIVCFAFSVLLILAGLVILVVFLTVKPRTPSFDVAHAALNSVYIGSPPPYFNGDMTLTANISNPNRKIGVVIQSGAVELFFRGRLVSAQALPSFAQRRGQFTVLSVHMLSSQVVLPPEVAVELLNQMKSNKILFTIRGTFKVRERFWSWHYTYRMTAICDLELTAPPSGFLVHRRCTTST

SEQ ID NO: 67217 - protein, 230 aa, Triticum aestivum
  peptide (1)..(230): Ceres Seq. ID no. 14301698
  misc_feature (42)..(226): Homolog of NCBI NO: 20804896 NR Description: P0497A05.21 [Oryza sativa (japonica
  misc_feature (27)..(211): Homolog of NCBI NO: 38344198 NR Description: OSJNBa0064G10.14 [Oryza sativa (japonica
  misc_feature (37)..(195): Homolog of NCBI NO: 15242362 NR Description: hypothetical protein [Arabidopsis thaliana]
  misc_feature (3)..(227): Homolog of NCBI NO: 20804932 NR Description: P0456E05.10 [Oryza sativa (japonica
  misc_feature (26)..(228): Homolog of NCBI NO: 15222151 NR Description: hypothetical protein [Arabidopsis thaliana]
  misc_feature (24)..(228): Homolog of NCBI NO: 15231546 NR Description: hypothetical protein [Arabidopsis thaliana]
  misc_feature (69)..(228): Homolog of NCBI NO: 15236740 NR Description: expressed protein [Arabidopsis thaliana]
  misc_feature (11)..(228): Homolog of NCBI NO: 15241117 NR Description: hypothetical protein [Arabidopsis thaliana]
MGTPTPYHHLSPRTIVTKIISMKRQEPEPPPPPKIILQPRHRTSPAMWCAAIVCFAFSVLLILAGLVILVVFLTVKPRTPSFDVAHAALNSVYIGSPPPYFNGDMTLTANISNPNRKIGVVIQSGAVELFFRGRLVSAQALPSFAQRRGQFTVLSVHMLSSQVVLPPEVAVELLNQMKSNKILFTIRGTFKVRERFWSWHYTYRMTAICDLELTAPPSGFLVHRRCTTST

SEQ ID NO: 67218 - protein, 209 aa, Triticum aestivum
  peptide (1)..(209): Ceres Seq. ID no. 14301699
  misc_feature (21)..(205): Homolog of NCBI NO: 20804896 NR Description: P0497A05.21 [Oryza sativa (japonica
  misc_feature (6)..(190): Homolog of NCBI NO: 38344198 NR Description: OSJNBa0064G10.14 [Oryza sativa (japonica
  misc_feature (16)..(174): Homolog of NCBI NO: 15242362 NR Description: hypothetical protein [Arabidopsis thaliana]
  misc_feature (1)..(206): Homolog of NCBI NO: 20804932 NR Description: P0456E05.10 [Oryza sativa (japonica
  misc_feature (5)..(207): Homolog of NCBI NO: 15222151 NR Description: hypothetical protein [Arabidopsis thaliana]
  misc_feature (3)..(207): Homolog of NCBI NO: 15231546 NR Description: hypothetical protein [Arabidopsis thaliana]
  misc_feature (48)..(207): Homolog of NCBI NO: 15236740 NR Description: expressed protein [Arabidopsis thaliana]
  misc_feature (1)..(207): Homolog of NCBI NO: 15241117 NR Description: hypothetical protein [Arabidopsis thaliana]
MKRQEPEPPPPPKIILQPRHRTSPAMWCAAIVCFAFSVLLILAGLVILVVFLTVKPRTPSFDVAHAALNSVYIGSPPPYFNGDMTLTANISNPNRKIGVVIQSGAVELFFRGRLVSAQALPSFAQRRGQFTVLSVHMLSSQVVLPPEVAVELLNQMKSNKILFTIRGTFKVRERFWSWHYTYRMTAICDLELTAPPSGFLVHRRCTTST

SEQ ID NO: 67219 - DNA, 1217 bp, Triticum aestivum
  misc_feature (1)..(1217): Ceres Seq. ID no. 14303126
tcacgagattttctaggctgaactgtacatgatatggcagaattagtagctcattagaagtacccttgtgattagagcaacactagcttcaaatgcatctttttctcaatcttttgtgcatagtaattaatgatgcaaaggccagggcccaaccttttctctaaaaaaatacataaaagaattctggggaacaaaaaattatcccattaaagtgcatctgaaccccattgtagtactactggttaatgaaactatcccattataataattatcacaagagctttacacacacacaaagagggctgattccttagacttatttccatcgaaacacatgaattaaaacttgcacgtaccagcttactagtatatataggatatcgcttggctgcagctttgcttttcccccggtttttataggctgtttctgggacagaaatgaccatctttgcattgcattgcattgcattgcattgcatactgaaatgaaatgaaacagggttcgatgtggaggagacttcggttgacggccccgacgacgtccaagggctggacgcatccgccgcacacatagcaaacctgctatcgtccgagccctctgatgtgaggcttgggataggcggtttcagcatgggagccgccactgcgctccactctgccgcatgttatgctcatggaaggttctcaaacggtgttgcctaccctattaccctcagcgctatcattgggttgagcggctggcttccctgctccaggaccctgaggaccaagattgagagctcacagactgctttcaggagggctgctgccttgccgataatgcttggccatggaagaggcgacgaggtagtcacgtacaggaacggcgagaggtcgtccgagtttctgcggaattcgggcttttcgtacctgaatttcaaagcctacaacggactgggccatcacaccatccctgaggaaatggacgatgtctccaagtggctcagggcaaggctcgggcttgatcgctcttgcggctaattaagtggagaagcttgtgccttggtggctgacacatgacatgagagaaatgtattgacactatagaggaggagaaggttgatatatataggttaatcatatgaagagatcacgaccggcatgtgttgatatataactcctcactactgaatttcatgttacacttatattgtactactaagagttgtaccccagct

SEQ ID NO: 67220 - protein, 129 aa, Triticum aestivum
  peptide (1)..(129): Ceres Seq. ID no. 14303127
  misc_feature (1)..(122): Pfam Name: Phospholipase/Carboxylesterase Pfam Description: Phospholipase/Carboxylesterase
  misc_feature (1)..(125): Homolog of NCBI NO: 25405554 NR Description: hypothetical protein F6D8.32 [imported] -
  misc_feature (1)..(127): Homolog of NCBI NO: 25405556 NR Description: F6D8.31 [imported] - Arabidopsis thaliana
  misc_feature (1)..(39): Homolog of NCBI NO: 5903036 NR Description: F6D8.5 [Arabidopsis thaliana]
  misc_feature (1)..(67): Homolog of NCBI NO: 15219072 NR Description: hypothetical protein [Arabidopsis thaliana]
  misc_feature (1)..(125): Homolog of NCBI NO: 28932772 NR Description: FPh1 [Gossypium hirsutum]
  misc_feature (1)..(127): Homolog of NCBI NO: 15232645 NR Description: lysophospholipase -related [Arabidopsis thaliana]
  misc_feature (1)..(125): Homolog of NCBI NO: 15241251 NR Description: expressed protein [Arabidopsis thaliana]
  misc_feature (1)..(127): Homolog of NCBI NO: 29409364 NR Description: biostress-resistance-related protein [Triticum
  misc_feature (1)..(127): Homolog of NCBI NO: 34910274 NR Description: OSJNBa0089K24.24 [Oryza sativa (japonica
  misc_feature (1)..(129): Homolog of NCBI NO: 34912598 NR Description: P0046B10.16 [Oryza sativa (japonica
MGAATALHSAACYAHGRFSNGVAYPITLSAIIGLSGWLPCSRTLRTKIESSQTAFRRAAALPIMLGHGRGDEVVTYRNGERSSEFLRNSGFSYLNFKAYNGLGHHTIPEEMDDVSKWLRARLGLDRSCG

SEQ ID NO: 67221 - protein, 66 aa, Triticum aestivum
  peptide (1)..(66): Ceres Seq. ID no. 14303128
  misc_feature (1)..(59): Pfam Name: Phospholipase/Carboxylesterase Pfam Description: Phospholipase/Carboxylesterase
  misc_feature (1)..(59): Homolog of NCBI NO: 32488391 NR Description: OSJNBa0043A12.21 [Oryza sativa (japonica
  misc_feature (1)..(61): Homolog of NCBI NO: 30695308 NR Description: phospholipase/carboxylesterase family
  misc_feature (1)..(62): Homolog of NCBI NO: 25405554 NR Description: hypothetical protein F6D8.32 [imported] -
  misc_feature (1)..(64): Homolog of NCBI NO: 25405556 NR Description: F6D8.31 [imported] - Arabidopsis thaliana
  misc_feature (1)..(62): Homolog of NCBI NO: 28932772 NR Description: FPh1 [Gossypium hirsutum]
  misc_feature (1)..(64): Homolog of NCBI NO: 15232645 NR Description: lysophospholipase -related [Arabidopsis thaliana]
  misc_feature (1)..(62): Homolog of NCBI NO: 15241251 NR Description: expressed protein [Arabidopsis thaliana]
  misc_feature (1)..(64): Homolog of NCBI NO: 29409364 NR Description: biostress-resistance-related protein [Triticum
  misc_feature (1)..(64): Homolog of NCBI NO: 34910274 NR Description: OSJNBa0089K24.24 [Oryza sativa (japonica
  misc_feature (1)..(66): Homolog of NCBI NO: 34912598 NR Description: P0046B10.16 [Oryza sativa (japonica
MLGHGRGDEVVTYRNGERSSEFLRNSGFSYLNFKAYNGLGHHTIPEEMDDVSKWLRARLGLDRSCG

SEQ ID NO: 67222 - DNA, 1819 bp, Triticum aestivum
  misc_feature (1)..(1819): Ceres Seq. ID no. 14307871
cccgttccgtgtcggcgagccctccaccaccaccaccacctcctttccccctcctcgccctcccgcggccaccaaccggccccgatcccggatccggcgcggcagatccggatcccggcgatggcgtccacggcggcgaggcggctcagggagctgcaggggcagcccgggaacaagacgtgcgtcgactgcgcgcagaggaacccgcagtgggccagcgtctcctacggcgtcttcatgtgcctcgagtgctccggcaagcaccggggcctcggcgtgcacatcagcttcgtccgctccgtcaccatggactcctggaccgagccgcagctccgcaagatggaggccgggggcaacgaccgcctcaacgccttcctcaccgcgcggggcgtgcccaaggacacgccccacatccccaagtacaactccaacgccgccgccgcctaccgcgaccgcatcgtcgccctcgccgagggccgcgcgtggaccgacccgcccgtcgttaaggagacgcccggatctggcgcccccgcccccgccaggaggccgcccttgcccgccggagtagggggcggaggcggtggcggtggcggtggatgggacgattgggacgacgaggtccgtccggatatgcgtaggaaccaatcggccggatcgtttgctggcgctggagcggattcggggagacagccgacgaggtccaagtccactcaggacatatacaccaagcaggagcttgaggcgtcggcggccagcaaggaggattttttcgctaggagaatggcggagaacgagtccaagcctcaggggatccctccctctcagggcggcaagtacgttggcttcggatccaccccgccgccgtcggcgaacaggaacaacaacggtgctgcccagggcgatgtcatgcaggtcgtttcccagggatttggacgcctttcgcttgttgcagcatctgctgcccaatctgctgctactgttgtccaagttggcacaaaagagattcaatcaaagatgagggaagggggttatgatcagaaggtgaatgaaactgtcaatgttgtaaccaataaaactgcagagataggaagcagaacctgggggattatgaaaggagtgatggcattggcgacacaaaaggtagaggaatatgccaaggaagggggagtgggtggtggctggggtgatgattggcaacaaagggagcagcagaacaacagcaacgagccttaccgcaggtatgatcaggagaccagcaacggcaacggctggaattctccgcaagatggatcagcgaagaaccagaaccacaattccaattcttgggatgattgggatgaccaagacaagaaggaagagcctgccaagacaagccagagcagcgactcgtgggccggctgggatgatgcgaaagatgacggttttgatagttacagccatcacagcccagccaacaagggtgggagcaatcagaatggaactgcgggggggtcatattgggccgacggcggcttccgctgatgctggtctctttgtgagagccatatactttgcagagttatatgccagaaaaatgtgagcgtggttattatttcaggatacctaagtgttggagagtaaaagagttttttttttgtaagttgtctacaattgttatgtctagcggcatgttcatatggccaagcctcatttgaaactgccatccccagctattaagaagcgtcgaattgaaattgtaatctacacatacatacttcccctgcagattctttattccttgtgctgatttgtcgtagttgcaagtggcaagaggggtggc

SEQ ID NO: 67223 - protein, 506 aa, Triticum aestivum
  peptide (1)..(506): Ceres Seq. ID no. 14307872
  misc_feature (46)..(162): Pfam Name: Putative GTPase activating protein for Arf Pfam Description: Putative GTPase activating protein for Arf
  misc_feature (214)..(337): Homolog of NCBI NO: 6319975 NR Description: Zn-finger-containing protein that functions as factor GTPase-activating protein and is involved in regulating
  misc_feature (41)..(199): Homolog of NCBI NO: 24663283 NR Description: GTPase-activating protein 69C CG4237-PA
  misc_feature (215)..(498): Homolog of NCBI NO: 24663283 NR Description: GTPase-activating protein 69C CG4237-PA
  misc_feature (41)..(199): Homolog of NCBI NO: 2286211 NR Description: putative ARF1 GTPase activating protein
  misc_feature (215)..(489): Homolog of NCBI NO: 2286211 NR Description: putative ARF1 GTPase activating protein
  misc_feature (41)..(497): Homolog of NCBI NO: 31217790 NR Description: ENSANGP00000004294 [Anopheles gambiae]
  misc_feature (193)..(506): Homolog of NCBI NO: 29367415 NR Description: ADP ribosylation GTPase-like protein
  misc_feature (45)..(505): Homolog of NCBI NO: 15224315 NR Description: arabidopsis pde1 suppressor 1 protein (Asp1)
  misc_feature (45)..(500): Homolog of NCBI NO: 10441356 NR Description: ARF GAP-like zinc finger-containing protein ZIGA2
  misc_feature (45)..(505): Homolog of NCBI NO: 15231865 NR Description: ARF GAP-like zinc finger-containing protein
PVPCRRALHHHHHLLSPSSPSRGHQPAPIPDPARQIRIPAMASTAARRLRELQGQPGNKTCVDCAQRNPQWASVSYGVFMCLECSGKHRGLGVHISFVRSVTMDSWTEPQLRKMEAGGNDRLNAFLTARGVPKDTPHIPKYNSNAAAAYRDRIVALAEGRAWTDPPVVKETPGSGAPAPARRPPLPAGVGGGGGGGGGGWDDWDDEVRPDMRRNQSAGSFAGAGADSGRQPTRSKSTQDIYTKQELEASAASKEDFFARRMAENESKPQGIPPSQGGKYVGFGSTPPPSANRNNNGAAQGDVMQVVSQGFGRLSLVAASAAQSAATVVQVGTKEIQSKMREGGYDQKVNETVNVVTNKTAEIGSRTWGIMKGVMALATQKVEEYAKEGGVGGGWGDDWQQREQQNNSNEPYRRYDQETSNGNGWNSPQDGSAKNQNHNSNSWDDWDDQDKKEEPAKTSQSSDSWAGWDDAKDDGFDSYSHHSPANKGGSNQNGTAGGSYWADGGFR

SEQ ID NO: 67224 - protein, 466 aa, Triticum aestivum
  peptide (1)..(466): Ceres Seq. ID no. 14307873
  misc_feature (6)..(122): Pfam Name: Putative GTPase activating protein for Arf Pfam Description: Putative GTPase activating protein for Arf
  misc_feature (174)..(297): Homolog of NCBI NO: 6319975 NR Description: Zn-finger-containing protein that functions as factor GTPase-activating protein and is involved in regulating
  misc_feature (1)..(159): Homolog of NCBI NO: 24663283 NR Description: GTPase-activating protein 69C CG4237-PA
  misc_feature (175)..(458): Homolog of NCBI NO: 24663283 NR Description: GTPase-activating protein 69C CG4237-PA
  misc_feature (1)..(159): Homolog of NCBI NO: 2286211 NR Description: putative ARF1 GTPase activating protein
  misc_feature (175)..(449): Homolog of NCBI NO: 2286211 NR Description: putative ARF1 GTPase activating protein
  misc_feature (1)..(457): Homolog of NCBI NO: 31217790 NR Description: ENSANGP00000004294 [Anopheles gambiae]
  misc_feature (153)..(466): Homolog of NCBI NO: 29367415 NR Description: ADP ribosylation GTPase-like protein
  misc_feature (5)..(465): Homolog of NCBI NO: 15224315 NR Description: arabidopsis pde1 suppressor 1 protein (Asp1)
  misc_feature (5)..(460): Homolog of NCBI NO: 10441356 NR Description: ARF GAP-like zinc finger-containing protein ZIGA2
  misc_feature (5)..(465): Homolog of NCBI NO: 15231865 NR Description: ARF GAP-like zinc finger-containing protein
MASTAARRLRELQGQPGNKTCVDCAQRNPQWASVSYGVFMCLECSGKHRGLGVHISFVRSVTMDSWTEPQLRKMEAGGNDRLNAFLTARGVPKDTPHIPKYNSNAAAAYRDRIVALAEGRAWTDPPVVKETPGSGAPAPARRPPLPAGVGGGGGGGGGGWDDWDDEVRPDMRRNQSAGSFAGAGADSGRQPTRSKSTQDIYTKQELEASAASKEDFFARRMAENESKPQGIPPSQGGKYVGFGSTPPPSANRNNNGAAQGDVMQVVSQGFGRLSLVAASAAQSAATVVQVGTKEIQSKMREGGYDQKVNETVNVVTNKTAEIGSRTWGIMKGVMALATQKVEEYAKEGGVGGGWGDDWQQREQQNNSNEPYRRYDQETSNGNGWNSPQDGSAKNQNHNSNSWDDWDDQDKKEEPAKTSQSSDSWAGWDDAKDDGFDSYSHHSPANKGGSNQNGTAGGSYWADGGFR

SEQ ID NO: 67225 - protein, 427 aa, Triticum aestivum
  peptide (1)..(427): Ceres Seq. ID no. 14307874
  misc_feature (1)..(83): Pfam Name: Putative GTPase activating protein for Arf Pfam Description: Putative GTPase activating protein for Arf
  misc_feature (135)..(258): Homolog of NCBI NO: 6319975 NR Description: Zn-finger-containing protein that functions as factor GTPase-activating protein and is involved in regulating
  misc_feature (1)..(120): Homolog of NCBI NO: 24663283 NR Description: GTPase-activating protein 69C CG4237-PA
  misc_feature (136)..(419): Homolog of NCBI NO: 24663283 NR Description: GTPase-activating protein 69C CG4237-PA
  misc_feature (1)..(120): Homolog of NCBI NO: 2286211 NR Description: putative ARF1 GTPase activating protein
  misc_feature (136)..(410): Homolog of NCBI NO: 2286211 NR Description: putative ARF1 GTPase activating protein
  misc_feature (1)..(418): Homolog of NCBI NO: 31217790 NR Description: ENSANGP00000004294 [Anopheles gambiae]
  misc_feature (114)..(427): Homolog of NCBI NO: 29367415 NR Description: ADP ribosylation GTPase-like protein
  misc_feature (1)..(426): Homolog of NCBI NO: 15224315 NR Description: arabidopsis pde1 suppressor 1 protein (Asp1)
  misc_feature (1)..(421): Homolog of NCBI NO: 10441356 NR Description: ARF GAP-like zinc finger-containing protein ZIGA2
  misc_feature (1)..(426): Homolog of NCBI NO: 15231865 NR Description: ARF GAP-like zinc finger-containing protein
MCLECSGKHRGLGVHISFVRSVTMDSWTEPQLRKMEAGGNDRLNAFLTARGVPKDTPHIPKYNSNAAAAYRDRIVALAEGRAWTDPPVVKETPGSGAPAPARRPPLPAGVGGGGGGGGGGWDDWDDEVRPDMRRNQSAGSFAGAGADSGRQPTRSKSTQDIYTKQELEASAASKEDFFARRMAENESKPQGIPPSQGGKYVGFGSTPPPSANRNNNGAAQGDVMQVVSQGFGRLSLVAASAAQSAATVVQVGTKEIQSKMREGGYDQKVNETVNVVTNKTAEIGSRTWGIMKGVMALATQKVEEYAKEGGVGGGWGDDWQQREQQNNSNEPYRRYDQETSNGNGWNSPQDGSAKNQNHNSNSWDDWDDQDKKEEPAKTSQSSDSWAGWDDAKDDGFDSYSHHSPANKGGSNQNGTAGGSYWADGGFR

SEQ ID NO: 67226 - DNA, 2552 bp, Triticum aestivum
  misc_feature (1)..(2552): Ceres Seq. ID no. 14303011
aaagaaccggaaggagtaggacacacctttggtcttcgctccgccgctcagttcgacgaaatgccgcattcgctccctcctcaggcaggctgtctccgcgtacacatcccacccctccccccacccttcccttcatatggatacggtggagccgtggaggtcctccggcgagacactacgatggcgctcaaagaagctctgctgcgcgtgccgcgtgcgatatggccctgggtcctctgcgccgtattccaggagaaagtatgaggatagaggcctaggtcaaggcgaaagcgcccacctacgaggctgcactcttgcccagtgatcagggtactatcggtattgggcgaacgtttggttgggcgctgctcgcaaggtgctcgaccaaatgcccaggtagagtgtgtcgactgaaatattttttatcttcttctttatctcacaatggtattaagcttgatgttgaagtttttaggatctaaatcatctacttttcatatgataattctgtgaaaaatatcaaaaagtttctaagttttgtcatgatattctgccatttattttctacttctgatggatcactatttgaaggctgaattgtagttcattatcttgctgcttgatgtatatggattagttgtaagaattgcttgtttccagtggcaatttcaaatattgtatagcaggattagcactaaatataaattcaagtgcacagtcactgtaaataaaatgaaaaatctacgccactccaaaagaaaaggttgcttctgtgctgctttaaaatgtctgaatcccatgctgaacaatttaaccagatcagaataacaagtctgctaatctagaaataataatgcctctgctagtgacaggttgttaattttattatttccactggatcccatgctaaacaatgtaacccgatcagaagaacaagtctgctaatctaatctgcgagtgacaggtttagtattatatccggatctgaatttgaccaacctttcagcctttccattgtctggtccgaagatagaaaataagaaagcatgctggccctactattgctgctgataagcagccagaagcccagaaacgacatccccgttgatcatagacaaaagaagtattgaacttccggtactttttcagcgttgtcatcctaatttgattcctgcagatccaagatctggtgtttagccttgctccaagtaaagccatagcctccaaacagatggtgcatatgaatcaaggacaaggggaaacaagctatgcacacaactccagtatccagaacgctcagcagaacaggatgaagcccctgatagaagcggccatcattgacttgtgcggcagcaaaagcaccttgttccccgaaaagatgctgattgcggacttgggctgctcttatggcccaaatgcgctagcactggtatcgactgccgtcaaggccatcatcaaccactgccttcagttccagcaaccaccacccgaagtgtgtgtgctcctcaatgaccttcctgacaatgacttcaacacggtggtgaagagcctggccacgctccgtcaaaataacaacaagcttgttgttgtgactggtgtagcaccggggtcattttacgagaggctcttcactagtgactccttgcatcttgtctgctcgtccaacagcttgcattggctctccatggtgtgaatttatcacccttcaatggatctatccattgcattacttatttattttgtaaaagaaaccttatcctcgcaggctcccgaagatctgacaatgaaccagatccctgcgtacgacatggatgagcatgctaggcgtgaaagactccctacggtccgtgaagcatatgcacgccagttcaggaaagatttcatacttttcctggagctgagagccaaagaattggttccaggaggccgaatggttgtttctcttgtagggcggccttctaatgtaaaagcctccaaattctttcacctttgggaaactctagttcagattctaagtgtcatggccttagagggtgtgatcgacaaagcgaagtttgattctttctatgtgccggtgtatggaccctctggtgaagagctgagggagatcatccaagacgagggctccttttctatcagggatatgcgggtatatgacgctacaactgatatggacagcatgctcttcaccccaagctcgtttgtgaattatctgagagccatatttgagccgataatagtcgagcattttggagaggtcatggatgaatttgtgaggaccgcggagcggcgctggagcctcgagggcagcatgcaaaacgagcgtgctaggaatccatgagctatgctggctgtatcccttgtaaaggcatgattatcaggtactttatagtacatcacatttggttaggtttattgctttatttgaggtgacaatgtgtgccaacttcattgtgtaaactacatcctgtatggtgttctgcgaagatatcgacgctcaagagattaagaatgaactatcatttatatagattagcagactgttgttgccc

SEQ ID NO: 67227 - protein, 210 aa, Triticum aestivum
  peptide (1)..(210): Ceres Seq. ID no. 14303012
  misc_feature (44)..(209): Pfam Name: SAM dependent carboxyl methyltransferase Pfam Description: SAM dependent carboxyl methyltransferase
  misc_feature (18)..(210): Homolog of NCBI NO: 15237695 NR Description: S-adenosyl-L-methionine:carboxyl
  misc_feature (45)..(189): Homolog of NCBI NO: 34809619 NR Description: Chain X, Crystal Structure Of Salicylic Acid
  misc_feature (9)..(210): Homolog of NCBI NO: 15239970 NR Description: S-adenosyl-L-methionine:carboxyl
  misc_feature (9)..(186): Homolog of NCBI NO: 23957318 NR Description: S-adenosyl-L-methionine:salicylic acid
  misc_feature (1)..(193): Homolog of NCBI NO: 15223601 NR Description: S-adenosyl-L-methionine:jasmonic acid carboxyl
  misc_feature (45)..(193): Homolog of NCBI NO: 13235641 NR Description: S-adenosyl-L-methionine:salicylic acid carboxyl
  misc_feature (9)..(186): Homolog of NCBI NO: 28629497 NR Description: S-adenosyl-L-methionine:benzoic acid/salicylic
  misc_feature (9)..(186): Homolog of NCBI NO: 28629495 NR Description: S-adenosyl-L-methionine:benzoic acid/salicylic
  misc_feature (1)..(193): Homolog of NCBI NO: 13676829 NR Description: S-adenosyl-L-methionine:jasmonic acid carboxyl
  misc_feature (44)..(209): Homolog of NCBI NO: 34911486 NR Description: putative S-adenosyl-L-methionine:salicylic acid
MDLSIALLIYFVKETLSSQAPEDLTMNQIPAYDMDEHARRERLPTVREAYARQFRKDFILFLELRAKELVPGGRMVVSLVGRPSNVKASKFFHLWETLVQILSVMALEGVIDKAKFDSFYVPVYGPSGEELREIIQDEGSFSIRDMRVYDATTDMDSMLFTPSSFVNYLRAIFEPIIVEHFGEVMDEFVRTAERRWSLEGSMQNERARNP

SEQ ID NO: 67228 - protein, 185 aa, Triticum aestivum
  peptide (1)..(185): Ceres Seq. ID no. 14303013
  misc_feature (19)..(184): Pfam Name: SAM dependent carboxyl methyltransferase Pfam Description: SAM dependent carboxyl methyltransferase
  misc_feature (1)..(185): Homolog of NCBI NO: 15237695 NR Description: S-adenosyl-L-methionine:carboxyl
  misc_feature (20)..(164): Homolog of NCBI NO: 34809619 NR Description: Chain X, Crystal Structure Of Salicylic Acid
  misc_feature (1)..(185): Homolog of NCBI NO: 15239970 NR Description: S-adenosyl-L-methionine:carboxyl
  misc_feature (1)..(161): Homolog of NCBI NO: 23957318 NR Description: S-adenosyl-L-methionine:salicylic acid
  misc_feature (1)..(168): Homolog of NCBI NO: 15223601 NR Description: S-adenosyl-L-methionine:jasmonic acid carboxyl
  misc_feature (20)..(168): Homolog of NCBI NO: 13235641 NR Description: S-adenosyl-L-methionine:salicylic acid carboxyl
  misc_feature (1)..(161): Homolog of NCBI NO: 28629497 NR Description: S-adenosyl-L-methionine:benzoic acid/salicylic
  misc_feature (1)..(161): Homolog of NCBI NO: 28629495 NR Description: S-adenosyl-L-methionine:benzoic acid/salicylic
  misc_feature (1)..(168): Homolog of NCBI NO: 13676829 NR Description: S-adenosyl-L-methionine:jasmonic acid carboxyl
  misc_feature (19)..(184): Homolog of NCBI NO: 34911486 NR Description: putative S-adenosyl-L-methionine:salicylic acid
MNQIPAYDMDEHARRERLPTVREAYARQFRKDFILFLELRAKELVPGGRMVVSLVGRPSNVKASKFFHLWETLVQILSVMALEGVIDKAKFDSFYVPVYGPSGEELREIIQDEGSFSIRDMRVYDATTDMDSMLFTPSSFVNYLRAIFEPIIVEHFGEVMDEFVRTAERRWSLEGSMQNERARNP

SEQ ID NO: 67229 - protein, 177 aa, Triticum aestivum
  peptide (1)..(177): Ceres Seq. ID no. 14303014
  misc_feature (11)..(176): Pfam Name: SAM dependent carboxyl methyltransferase Pfam Description: SAM dependent carboxyl methyltransferase
  misc_feature (1)..(177): Homolog of NCBI NO: 15237695 NR Description: S-adenosyl-L-methionine:carboxyl
  misc_feature (12)..(156): Homolog of NCBI NO: 34809619 NR Description: Chain X, Crystal Structure Of Salicylic Acid
  misc_feature (1)..(177): Homolog of NCBI NO: 15239970 NR Description: S-adenosyl-L-methionine:carboxyl
  misc_feature (1)..(153): Homolog of NCBI NO: 23957318 NR Description: S-adenosyl-L-methionine:salicylic acid
  misc_feature (1)..(160): Homolog of NCBI NO: 15223601 NR Description: S-adenosyl-L-methionine:jasmonic acid carboxyl
  misc_feature (12)..(160): Homolog of NCBI NO: 13235641 NR Description: S-adenosyl-L-methionine:salicylic acid carboxyl
  misc_feature (1)..(153): Homolog of NCBI NO: 28629497 NR Description: S-adenosyl-L-methionine:benzoic acid/salicylic
  misc_feature (1)..(153): Homolog of NCBI NO: 28629495 NR Description: S-adenosyl-L-methionine:benzoic acid/salicylic
  misc_feature (1)..(160): Homolog of NCBI NO: 13676829 NR Description: S-adenosyl-L-methionine:jasmonic acid carboxyl
  misc_feature (11)..(176): Homolog of NCBI NO: 34911486 NR Description: putative S-adenosyl-L-methionine:salicylic acid
MDEHARRERLPTVREAYARQFRKDFILFLELRAKELVPGGRMVVSLVGRPSNVKASKFFHLWETLVQILSVMALEGVIDKAKFDSFYVPVYGPSGEELREIIQDEGSFSIRDMRVYDATTDMDSMLFTPSSFVNYLRAIFEPIIVEHFGEVMDEFVRTAERRWSLEGSMQNERARNP

SEQ ID NO: 67230 - DNA, 1319 bp, Triticum aestivum
  misc_feature (1)..(1319): Ceres Seq. ID no. 13663665
aatcccgtgtgcgtcccgctgttcgcttctcccgcatcccgatagcaccagcaagcaaaacccccctcccctctccatccagttccccctccccctcccccgvccgccgtcccatggcgtctctcctccgcacggccgccgcgctcgcgcccccaccgtcgtccgcccgggagacgcggcggccgtcgtgcgccgcctccctcgcctgctcccggcgcgcgccggcgagtccgctgcgcgctccgcctctgcccgggccatggcgattggggcccgatgaggccgcgcgtacggccactcagtttctctgccgatacatgagaagagatgggcatgaaggtgatgggagaacgcaaggacaagacgaacctagtatgtttgsgccagatgatgacgatggtgcaaagattcctactcaggtggaaactcttgttagaggcactgcaatagttgatgctccagaatacaagccgctcccagatctcgattaccttcaggaattgctggctattcagcagcaaggaccccgatcaataggtttctttggtacccgcaacatggggtatatgcatcaacaacttattgagatcttgagttatgccatggtcataacaaaaaatcatatattcacatctggtgcttctgggactaacgcagctgttattaggggtgctttgagagctgagaagccagaattgcttaccgtaattttgcctcaaagtctaaagaagcaacctcctgaaagccaagagctattatccaaagtacaaaacttgattgagaaacctcagtatgaccatttaccactaattgaggctagcaggttatgcaacatggacatcatctcgaaggtccaacaggtgatatgctttgcgtttcatgacagcaggctgctgatggagacctgccaggaggcaaagaacatgcggaagatcgtaacgctcttctacttggattagctagcacctcggggcgcttctcccctttttgtccgtaggccggtgaacgggatgctgtcattcctgtatacactaaagctctggagtaggttcaggtttggggcataacagtgcgtcttcgggcattttgcccattattcaaattcttggtagaaaccaaataagcttgtcgatatgtctagtctgtcagtaaagaaaataattcaagttcttattactagtaatttcaaaggctacagtattgaaaaaactgtttccactctcaatcaaaaagaaaaaggaaaaactgtttccgaaaaaaaaaaaaaaaaaagcttaatcgataccgtcgaccntcgaaggggggggcccgggtaccca

SEQ ID NO: 67231 - protein, 318 aa, Triticum aestivum
  peptide (1)..(318): Ceres Seq. ID no. 15220250
  misc_feature (186)..(318): Homolog of NCBI NO: 17232156 NR Description: hypothetical protein [Nostoc sp. PCC 7120]
  misc_feature (182)..(318): Homolog of NCBI NO: 23043068 NR Description: hypothetical protein [Trichodesmium erythraeum
  misc_feature (168)..(318): Homolog of NCBI NO: 37522470 NR Description: hypothetical protein gll2901 [Gloeobacter
  misc_feature (158)..(318): Homolog of NCBI NO: 16331173 NR Description: unknown protein [Synechocystis sp. PCC 6803]
  misc_feature (164)..(318): Homolog of NCBI NO: 13812204 NR Description: hypothetical protein [Guillardia theta]
  misc_feature (100)..(259): Homolog of NCBI NO: 34894968 NR Description: B1088D01.6 [Oryza sativa (japonica
  misc_feature (37)..(294): Homolog of NCBI NO: 7486491 NR Description: hypothetical protein At2g43940 [imported] -
  misc_feature (108)..(318): Homolog of NCBI NO: 15232185 NR Description: expressed protein [Arabidopsis thaliana]
  misc_feature (108)..(318): Homolog of NCBI NO: 21537298 NR Description: unknown [Arabidopsis thaliana]
  misc_feature (37)..(318): Homolog of NCBI NO: 30689549 NR Description: predicted protein [Arabidopsis thaliana]
  misc_feature (34)..(34): Xaa is any aa, unknown or other
  misc_feature (127)..(127): Xaa is any aa, unknown or other
SRVRPAVRFSRIPIAPASKTPLPSPSSSPSPSPXRRPMASLLRTAAALAPPPSSARETRRPSCAASLACSRRAPASPLRAPPLPGPWRLGPDEAARTATQFLCRYMRRDGHEGDGRTQGQDEPSMFXPDDDDGAKIPTQVETLVRGTAIVDAPEYKPLPDLDYLQELLAIQQQGPRSIGFFGTRNMGYMHQQLIEILSYAMVITKNHIFTSGASGTNAAVIRGALRAEKPELLTVILPQSLKKQPPESQELLSKVQNLIEKPQYDHLPLIEASRLCNMDIISKVQQVICFAFHDSRLLMETCQEAKNMRKIVTLFYLD

SEQ ID NO: 67232 - protein, 281 aa, Triticum aestivum
  peptide (1)..(281): Ceres Seq. ID no. 15220251
  misc_feature (149)..(281): Homolog of NCBI NO: 17232156 NR Description: hypothetical protein [Nostoc sp. PCC 7120]
  misc_feature (145)..(281): Homolog of NCBI NO: 23043068 NR Description: hypothetical protein [Trichodesmium erythraeum
  misc_feature (131)..(281): Homolog of NCBI NO: 37522470 NR Description: hypothetical protein gll2901 [Gloeobacter
  misc_feature (121)..(281): Homolog of NCBI NO: 16331173 NR Description: unknown protein [Synechocystis sp. PCC 6803]
  misc_feature (127)..(281): Homolog of NCBI NO: 13812204 NR Description: hypothetical protein [Guillardia theta]
  misc_feature (63)..(222): Homolog of NCBI NO: 34894968 NR Description: B1088D01.6 [Oryza sativa (japonica
  misc_feature (1)..(257): Homolog of NCBI NO: 7486491 NR Description: hypothetical protein At2g43940 [imported] -
  misc_feature (71)..(281): Homolog of NCBI NO: 15232185 NR Description: expressed protein [Arabidopsis thaliana]
  misc_feature (71)..(281): Homolog of NCBI NO: 21537298 NR Description: unknown [Arabidopsis thaliana]
  misc_feature (1)..(281): Homolog of NCBI NO: 30689549 NR Description: predicted protein [Arabidopsis thaliana]
  misc_feature (90)..(90): Xaa is any aa, unknown or other
MASLLRTAAALAPPPSSARETRRPSCAASLACSRRAPASPLRAPPLPGPWRLGPDEAARTATQFLCRYMRRDGHEGDGRTQGQDEPSMFXPDDDDGAKIPTQVETLVRGTAIVDAPEYKPLPDLDYLQELLAIQQQGPRSIGFFGTRNMGYMHQQLIEILSYAMVITKNHIFTSGASGTNAAVIRGALRAEKPELLTVILPQSLKKQPPESQELLSKVQNLIEKPQYDHLPLIEASRLCNMDIISKVQQVICFAFHDSRLLMETCQEAKNMRKIVTLFYLD

SEQ ID NO: 67233 - protein, 213 aa, Triticum aestivum
  peptide (1)..(213): Ceres Seq. ID no. 15220252
  misc_feature (81)..(213): Homolog of NCBI NO: 17232156 NR Description: hypothetical protein [Nostoc sp. PCC 7120]
  misc_feature (77)..(213): Homolog of NCBI NO: 23043068 NR Description: hypothetical protein [Trichodesmium erythraeum
  misc_feature (63)..(213): Homolog of NCBI NO: 37522470 NR Description: hypothetical protein gll2901 [Gloeobacter
  misc_feature (53)..(213): Homolog of NCBI NO: 16331173 NR Description: unknown protein [Synechocystis sp. PCC 6803]
  misc_feature (59)..(213): Homolog of NCBI NO: 13812204 NR Description: hypothetical protein [Guillardia theta]
  misc_feature (1)..(154): Homolog of NCBI NO: 34894968 NR Description: B1088D01.6 [Oryza sativa (japonica
  misc_feature (1)..(189): Homolog of NCBI NO: 7486491 NR Description: hypothetical protein At2g43940 [imported] -
  misc_feature (3)..(213): Homolog of NCBI NO: 15232185 NR Description: expressed protein [Arabidopsis thaliana]
  misc_feature (3)..(213): Homolog of NCBI NO: 21537298 NR Description: unknown [Arabidopsis thaliana]
  misc_feature (1)..(213): Homolog of NCBI NO: 30689549 NR Description: predicted protein [Arabidopsis thaliana]
  misc_feature (22)..(22): Xaa is any aa, unknown or other
MRRDGHEGDGRTQGQDEPSMFXPDDDDGAKIPTQVETLVRGTAIVDAPEYKPLPDLDYLQELLAIQQQGPRSIGFFGTRNMGYMHQQLIEILSYAMVITKNHIFTSGASGTNAAVIRGALRAEKPELLTVILPQSLKKQPPESQELLSKVQNLIEKPQYDHLPLIEASRLCNMDIISKVQQVICFAFHDSRLLMETCQEAKNMRKIVTLFYLD

SEQ ID NO: 67234 - DNA, 2057 bp, Triticum aestivum
  misc_feature (1)..(2057): Ceres Seq. ID no. 14316029
gtgcagtgacagaatcacaaaaaatacagctctctgcgcactcgtccattcggcgactagtcgacgcagctgacgccaccacgcggcggcggcgcttgttcccatcgccgccaccggcatggccgagggcaccgacacggtgcgcgcgcccggcgacgcggaggagatggagaagggagagatcgcaggcgccgccgccggtgccgacggcgactccgccgcgccccagccggtggagcccacctgggctttctggatcggcaacggcaacccgcaggaggattccgccggccgggggaacaccgtccacaccttctccaccgtcgacgacttcttgagcctttacaataatatcctccaccctagtaaattgggtgtgggagctgacctccattgcttcaagaataagattgagccgaaatgcgaaggccccatatgtgctaatggaggtgcatggaccatcagttgtggcgaagggaaatcgcagccattgtggttggatacactactggcattgattggtggacaattcgaatatggtaatgaaatttgtggagcggtccttagcgtgtgtgggaagcaggaaacaatagctatatggattaaagatgctactaacgaagctgctcagctaagcattggcaagcagtggaaggaatttctggagtacaaggactcagttgagttcattgttcatgatagtgatgcaacggcagtacaatgctggtcttccacgtttcccgatgatccccttgacgtcatctacaacaaggtccccagtcactgcagccgcgtgcgctttgctgccgtctgcagatcgtggtgcactgcagcttcgcggcaccccgcgctgcctgaactcccgtggctgctcctctcaccacgcgaccgtgacacaacgaagcgcctctactgtcctgaggacagcaagatcctgtgcatctcgctcccgagcgatttcatcggcaactggttcgtcggctgtcatggtggtggctgggttgcatcattcgaaccaccaccgttcaggatcttgaacattttctccagtgttgaggttgcgctctccgagaaacagaaggggatcgtttgcccaggccgccttggccagatcatcatttggaaaatcatcttctccaaaccacccacctcaagtgactgtatcattgctgccatcaccgacaatcacggcatcgcgctctgcagggttgggtgtccgaacggtgggtggacaacaaaaggacatgtaagctacaccatggagcttgcagacatcgccttttgcaacggtaagctctatggtctcacacgggacagatgggaacttgtcaagtttgagatcggtgctgatgaagatggtgcgcccgtggtcacagccgttgatcggctagtggtcactgtcgagcaccagcagccccccagtgtctgggccaaccgggtggatgccagctacatttttgagctacacggcaagcttgcgacggcggtgaggtccccatggtcacccaacctcagacctttcttcaaagtgttcgaacttgttgacatcgacaccagcgaggggatggcacatggcacacacaaatggacagaggtgatgagcttgggtgactttgccctattcctgggtccaaacagctccaaggcggtgcatgtgtcagcagacaggcgcggcggtgtgaagagaaaccacatctactactcctaccatcgccgcttagcacagaaggaggtccttctcagcactgacctggtgttcctgacaagctccaacgctgatggtgattccgtgtactacagggaagatgaaagcttatccgcagccgtgggcggggttcataggattggggcagtaggatactatgtcaggggtagccctaatcctccagtgtggcttctccccctagcatagtggctttttatatacattgtattgcttagctgctgcacatgcctgaaaattgtaccgttagctgtataaccgtaaatgctctatggtttcaaccatgttgtatttagaacgaatgtacagcaattataattaatctgtactcatg

SEQ ID NO: 67235 - protein, 597 aa, Triticum aestivum
  peptide (1)..(597): Ceres Seq. ID no. 14316030
  misc_feature (13)..(197): Pfam Name: Eukaryotic initiation factor 4E Pfam Description: Eukaryotic initiation factor 4E
  misc_feature (15)..(197): Homolog of NCBI NO: 25176246 NR Description: eucaryotic initiation factor 4E [Capsicum annuum]
  misc_feature (13)..(197): Homolog of NCBI NO: 15236735 NR Description: translation initiation factor eIF4E [Arabidopsis
  misc_feature (15)..(197): Homolog of NCBI NO: 38565051 NR Description: eukaryotic translation initiation factor 4E
  misc_feature (15)..(197): Homolog of NCBI NO: 38565045 NR Description: eukaryotic translation initiation factor 4E
  misc_feature (15)..(197): Homolog of NCBI NO: 25176242 NR Description: eucaryotic initiation factor 4E [Capsicum annuum]
  misc_feature (15)..(197): Homolog of NCBI NO: 25176244 NR Description: eucaryotic initiation factor 4E [Capsicum annuum]
  misc_feature (19)..(197): Homolog of NCBI NO: 283021 NR Description: translation initiation factor eIF-4F chain p26 -
  misc_feature (10)..(197): Homolog of NCBI NO: 6016334 NR Description: EUKARYOTIC TRANSLATION INITIATION FACTOR 4E (EIF4E) (MRNA CAP-BINDING PROTEIN) (EIF-4F 25 KD SUBUNIT) (EIF-4F
  misc_feature (1)..(197): Homolog of NCBI NO: 30923212 NR Description: Eukaryotic translation initiation factor 4E (eIF4E) (mRNA cap-binding protein) (eIF-4F 25 kDa subunit)
  misc_feature (13)..(197): Homolog of NCBI NO: 34905982 NR Description: eukaryotic translation initiation factor 4E
MAEGTDTVRAPGDAEEMEKGEIAGAAAGADGDSAAPQPVEPTWAFWIGNGNPQEDSAGRGNTVHTFSTVDDFLSLYNNILHPSKLGVGADLHCFKNKIEPKCEGPICANGGAWTISCGEGKSQPLWLDTLLALIGGQFEYGNEICGAVLSVCGKQETIAIWIKDATNEAAQLSIGKQWKEFLEYKDSVEFIVHDSDATAVQCWSSTFPDDPLDVIYNKVPSHCSRVRFAAVCRSWCTAASRHPALPELPWLLLSPRDRDTTKRLYCPEDSKILCISLPSDFIGNWFVGCHGGGWVASFEPPPFRILNIFSSVEVALSEKQKGIVCPGRLGQIIIWKIIFSKPPTSSDCIIAAITDNHGIALCRVGCPNGGWTTKGHVSYTMELADIAFCNGKLYGLTRDRWELVKFEIGADEDGAPVVTAVDRLVVTVEHQQPPSVWANRVDASYIFELHGKLATAVRSPWSPNLRPFFKVFELVDIDTSEGMAHGTHKWTEVMSLGDFALFLGPNSSKAVHVSADRRGGVKRNHIYYSYHRRLAQKEVLLSTDLVFLTSSNADGDSVYYREDESLSAAVGGVHRIGAVGYYVRGSPNPPVWLLPLA

SEQ ID NO: 67236 - protein, 581 aa, Triticum aestivum
  peptide (1)..(581): Ceres Seq. ID no. 14316031
  misc_feature (1)..(181): Pfam Name: Eukaryotic initiation factor 4E Pfam Description: Eukaryotic initiation factor 4E
  misc_feature (1)..(181): Homolog of NCBI NO: 25176246 NR Description: eucaryotic initiation factor 4E [Capsicum annuum]
  misc_feature (1)..(181): Homolog of NCBI NO: 15236735 NR Description: translation initiation factor eIF4E [Arabidopsis
  misc_feature (1)..(181): Homolog of NCBI NO: 38565051 NR Description: eukaryotic translation initiation factor 4E
  misc_feature (1)..(181): Homolog of NCBI NO: 38565045 NR Description: eukaryotic translation initiation factor 4E
  misc_feature (1)..(181): Homolog of NCBI NO: 25176242 NR Description: eucaryotic initiation factor 4E [Capsicum annuum]
  misc_feature (1)..(181): Homolog of NCBI NO: 25176244 NR Description: eucaryotic initiation factor 4E [Capsicum annuum]
  misc_feature (3)..(181): Homolog of NCBI NO: 283021 NR Description: translation initiation factor eIF-4F chain p26 -
  misc_feature (1)..(181): Homolog of NCBI NO: 6016334 NR Description: EUKARYOTIC TRANSLATION INITIATION FACTOR 4E (EIF4E) (MRNA CAP-BINDING PROTEIN) (EIF-4F 25 KD SUBUNIT) (EIF-4F
  misc_feature (1)..(181): Homolog of NCBI NO: 30923212 NR Description: Eukaryotic translation initiation factor 4E (eIF4E) (mRNA cap-binding protein) (eIF-4F 25 kDa subunit)
  misc_feature (1)..(181): Homolog of NCBI NO: 34905982 NR Description: eukaryotic translation initiation factor 4E
MEKGEIAGAAAGADGDSAAPQPVEPTWAFWIGNGNPQEDSAGRGNTVHTFSTVDDFLSLYNNILHPSKLGVGADLHCFKNKIEPKCEGPICANGGAWTISCGEGKSQPLWLDTLLALIGGQFEYGNEICGAVLSVCGKQETIAIWIKDATNEAAQLSIGKQWKEFLEYKDSVEFIVHDSDATAVQCWSSTFPDDPLDVIYNKVPSHCSRVRFAAVCRSWCTAASRHPALPELPWLLLSPRDRDTTKRLYCPEDSKILCISLPSDFIGNWFVGCHGGGWVASFEPPPFRILNIFSSVEVALSEKQKGIVCPGRLGQIIIWKIIFSKPPTSSDCIIAAITDNHGIALCRVGCPNGGWTTKGHVSYTMELADIAFCNGKLYGLTRDRWELVKFEIGADEDGAPVVTAVDRLVVTVEHQQPPSVWANRVDASYIFELHGKLATAVRSPWSPNLRPFFKVFELVDIDTSEGMAHGTHKWTEVMSLGDFALFLGPNSSKAVHVSADRRGGVKRNHIYYSYHRRLAQKEVLLSTDLVFLTSSNADGDSVYYREDESLSAAVGGVHRIGAVGYYVRGSPNPPVWLLPLA

SEQ ID NO: 67237 - DNA, 1338 bp, Triticum aestivum
  misc_feature (1)..(1338): Ceres Seq. ID no. 15169519
aaagcaaagcccgcaacacgtaccaactctcctacgagctgagcgagcgaacgggagagagggtcggcgtcggagaaggaagatggatcacgcggcggacacgttccggacggacctgatgaccatcacgcggcacgtgctgaacgagcagagccggcacccggagtcgcgcggcgacctcaccatcctcctctcccacatcgtcctcggctgcaagttcgtcgcctccgccgtcaacaaggccggcctcgccaagctcaccggcctcgccggcgagaccaacgtccagggggaggagcagaagaagctggacgtgctctccaacgaggtgttcgtcaatgccctcgtcagcagcggccgcacctgcgttcttgtgtccgaggaggacgagaaggtgacgttcgtggaccctaagctccgtggaaagtactgtgtctgctttgaccccctggatggatcctccaacatcgactgcggcgtctccatcggaacgatctttgggatctacatgatcaagaaccaagacaccgtgactctggaggaagtactgcagcctgggaaggacatgattgctgccggatactgcatgtatgggagttcctgcacgcttgtcctgagcactggaaatggtgtcaacggcttcacgcttgacccctctctcggggagttcataatgactcatccagatatcaagataccgccgaaaggaaagatctattcggttaatgaagggaacgccaagaactgggacacgcctactgcaaagtacgtggagaagtgcaagtaccccacggatggttcatcacctaaatcccttagatacatcggcagcatggttgctgatgtgcaccgcaccttgctatacggcggcatatttctgtaccccgcggacaagaagagcccaagcggaaagctccgtgtgatgtatgaggtgttccccatgtcattcctgatggaggaggctggaggccagtctttcacaggcaaaggacggtcgctcgacctgatccccaccgacatccacgagagatcgccgatattcctcggcagcagcgacgacgtggaggagatcaaggcactgtacgcggaggaggccaagaaggcagggtctgcatgatgatcggcggccgtcgcgtgtgaatcgatggcgacccatgggcctttgctggcaatgtgattcgtatgtcaggcatttcttttctatacgtccgtgtcattcagtgtaatatagcgtgtggaggcctcgaacagcttcattcatgagcagccaaggcttctgcctctcacaacaatccactgatgatggcacgtaatatacctccataactacatgtttcc

SEQ ID NO: 67238 - protein, 371 aa, Triticum aestivum
  peptide (1)..(371): Ceres Seq. ID no. 15169520
  misc_feature (40)..(364): Pfam Name: Fructose-1-6-bisphosphatase Pfam Description: Fructose-1-6-bisphosphatase
  misc_feature (40)..(368): Homolog of NCBI NO: 5305145 NR Description: fructose-1,6-bisphosphatase [Pisum sativum]
  misc_feature (28)..(368): Homolog of NCBI NO: 11139718 NR Description: cytosolic fructose-1,6-bisphosphatase [Beta
  misc_feature (28)..(368): Homolog of NCBI NO: 20278691 NR Description: cytoplasmic fructose-1,6-bisphosphatase [Pisum
  misc_feature (28)..(368): Homolog of NCBI NO: 4741918 NR Description: cytosolic fructose-1,6-bisphosphatase [Musa
  misc_feature (28)..(368): Homolog of NCBI NO: 119748 NR Description: FRUCTOSE-1,6-BISPHOSPHATASE, CYTOSOLIC
  misc_feature (40)..(370): Homolog of NCBI NO: 2494417 NR Description: FRUCTOSE-1,6-BISPHOSPHATASE, CYTOSOLIC
  misc_feature (28)..(96): Homolog of NCBI NO: 34908588 NR Description: fructose-1,6-bisphosphatase
  misc_feature (89)..(365): Homolog of NCBI NO: 34908588 NR Description: fructose-1,6-bisphosphatase
  misc_feature (28)..(366): Homolog of NCBI NO: 3913640 NR Description: FRUCTOSE-1,6-BISPHOSPHATASE, CYTOSOLIC
  misc_feature (28)..(366): Homolog of NCBI NO: 6684169 NR Description: fructose-1,6-bisphosphatase [Porteresia coarctata]
KQSPQHVPTLLRAERANGREGRRRRRKMDHAADTFRTDLMTITRHVLNEQSRHPESRGDLTILLSHIVLGCKFVASAVNKAGLAKLTGLAGETNVQGEEQKKLDVLSNEVFVNALVSSGRTCVLVSEEDEKVTFVDPKLRGKYCVCFDPLDGSSNIDCGVSIGTIFGIYMIKNQDTVTLEEVLQPGKDMIAAGYCMYGSSCTLVLSTGNGVNGFTLDPSLGEFIMTHPDIKIPPKGKIYSVNEGNAKNWDTPTAKYVEKCKYPTDGSSPKSLRYIGSMVADVHRTLLYGGIFLYPADKKSPSGKLRVMYEVFPMSFLMEEAGGQSFTGKGRSLDLIPTDIHERSPIFLGSSDDVEEIKALYAEEAKKAGSA

SEQ ID NO: 67239 - protein, 344 aa, Triticum aestivum
  peptide (1)..(344): Ceres Seq. ID no. 15169521
  misc_feature (13)..(337): Pfam Name: Fructose-1-6-bisphosphatase Pfam Description: Fructose-1-6-bisphosphatase
  misc_feature (13)..(341): Homolog of NCBI NO: 5305145 NR Description: fructose-1,6-bisphosphatase [Pisum sativum]
  misc_feature (1)..(341): Homolog of NCBI NO: 11139718 NR Description: cytosolic fructose-1,6-bisphosphatase [Beta
  misc_feature (1)..(341): Homolog of NCBI NO: 20278691 NR Description: cytoplasmic fructose-1,6-bisphosphatase [Pisum
  misc_feature (1)..(341): Homolog of NCBI NO: 4741918 NR Description: cytosolic fructose-1,6-bisphosphatase [Musa
  misc_feature (1)..(341): Homolog of NCBI NO: 119748 NR Description: FRUCTOSE-1,6-BISPHOSPHATASE, CYTOSOLIC
  misc_feature (13)..(343): Homolog of NCBI NO: 2494417 NR Description: FRUCTOSE-1,6-BISPHOSPHATASE, CYTOSOLIC
  misc_feature (1)..(69): Homolog of NCBI NO: 34908588 NR Description: fructose-1,6-bisphosphatase
  misc_feature (62)..(338): Homolog of NCBI NO: 34908588 NR Description: fructose-1,6-bisphosphatase
  misc_feature (1)..(339): Homolog of NCBI NO: 3913640 NR Description: FRUCTOSE-1,6-BISPHOSPHATASE, CYTOSOLIC
  misc_feature (1)..(339): Homolog of NCBI NO: 6684169 NR Description: fructose-1,6-bisphosphatase [Porteresia coarctata]
MDHAADTFRTDLMTITRHVLNEQSRHPESRGDLTILLSHIVLGCKFVASAVNKAGLAKLTGLAGETNVQGEEQKKLDVLSNEVFVNALVSSGRTCVLVSEEDEKVTFVDPKLRGKYCVCFDPLDGSSNIDCGVSIGTIFGIYMIKNQDTVTLEEVLQPGKDMIAAGYCMYGSSCTLVLSTGNGVNGFTLDPSLGEFIMTHPDIKIPPKGKIYSVNEGNAKNWDTPTAKYVEKCKYPTDGSSPKSLRYIGSMVADVHRTLLYGGIFLYPADKKSPSGKLRVMYEVFPMSFLMEEAGGQSFTGKGRSLDLIPTDIHERSPIFLGSSDDVEEIKALYAEEAKKAGSA

SEQ ID NO: 67240 - protein, 332 aa, Triticum aestivum
  peptide (1)..(332): Ceres Seq. ID no. 15169522
  misc_feature (1)..(325): Pfam Name: Fructose-1-6-bisphosphatase Pfam Description: Fructose-1-6-bisphosphatase
  misc_feature (1)..(329): Homolog of NCBI NO: 5305145 NR Description: fructose-1,6-bisphosphatase [Pisum sativum]
  misc_feature (1)..(329): Homolog of NCBI NO: 11139718 NR Description: cytosolic fructose-1,6-bisphosphatase [Beta
  misc_feature (1)..(329): Homolog of NCBI NO: 20278691 NR Description: cytoplasmic fructose-1,6-bisphosphatase [Pisum
  misc_feature (1)..(329): Homolog of NCBI NO: 4741918 NR Description: cytosolic fructose-1,6-bisphosphatase [Musa
  misc_feature (1)..(329): Homolog of NCBI NO: 119748 NR Description: FRUCTOSE-1,6-BISPHOSPHATASE, CYTOSOLIC
  misc_feature (1)..(331): Homolog of NCBI NO: 2494417 NR Description: FRUCTOSE-1,6-BISPHOSPHATASE, CYTOSOLIC
  misc_feature (1)..(57): Homolog of NCBI NO: 34908588 NR Description: fructose-1,6-bisphosphatase
  misc_feature (50)..(326): Homolog of NCBI NO: 34908588 NR Description: fructose-1,6-bisphosphatase
  misc_feature (1)..(327): Homolog of NCBI NO: 3913640 NR Description: FRUCTOSE-1,6-BISPHOSPHATASE, CYTOSOLIC
  misc_feature (1)..(327): Homolog of NCBI NO: 6684169 NR Description: fructose-1,6-bisphosphatase [Porteresia coarctata]
MTITRHVLNEQSRHPESRGDLTILLSHIVLGCKFVASAVNKAGLAKLTGLAGETNVQGEEQKKLDVLSNEVFVNALVSSGRTCVLVSEEDEKVTFVDPKLRGKYCVCFDPLDGSSNIDCGVSIGTIFGIYMIKNQDTVTLEEVLQPGKDMIAAGYCMYGSSCTLVLSTGNGVNGFTLDPSLGEFIMTHPDIKIPPKGKIYSVNEGNAKNWDTPTAKYVEKCKYPTDGSSPKSLRYIGSMVADVHRTLLYGGIFLYPADKKSPSGKLRVMYEVFPMSFLMEEAGGQSFTGKGRSLDLIPTDIHERSPIFLGSSDDVEEIKALYAEEAKKAGSA

SEQ ID NO: 67241 - DNA, 1556 bp, Triticum aestivum
  misc_feature (1)..(1556): Ceres Seq. ID no. 13660024
attacctagaacatcctaatcgaaaagcaaagcagaggaaactaagcttggcagccaacggctattaatacctcaccaccttgttcgcaccatccaaagaaacagagttccagcagagaaaagtgagatctgccttcttcccccatcatggctgccatgtggtatccgatcatcggtctcctccttctcatgctcccactcgggccctcctccgccatcaagttcccactcataggcaacgtctaccctgatggccacttctatgctacgttgcagattggtaagcccttgaagccctacttcctggacatcgacactggcagcaacctcacttggctggagtgtgagcacccagatcacggctgcaagggctgcaaccagaggacaccacacccatattacaagccagcagctcataacttgatggtgagatgtgacagctggatatgtgctcaactgcgcaaagaccagcctggtagtcctcaatgccccaacagcgatccacatcgatgccactatgatatccaatatgtctccgggaggtcaaaaggcgaccttgccaacgacatgatctttatcaataggagagatgatatgaactacgttttcggatgtggatacgagcaggaggagccattagagcagccatcgccaccggcggtagatggcatccttggactcgggaggggaagcgtaggatttgtcgctcaactcaaggcacaaaagaagatagtcaggaatgtcattggacattgcctcagcatccatggaaatgggaacctgtacattggggacttcaggctgcccccaggcgacgtcacctgggcacccatgagtacatctttgccttactactcacccggcccagcaacactgctctatgacgaacagccgataagaggtagtccagcattcacgacagtatttgacagtggagccacctacacctacatgcctggccagatatacaatggccttgtttcaaaggttcaagacaccctccacaaatcatcacttaaagaggtgaaggatcgtgctctgcctcaatgctggaaaggaaaaatgccattcagatctgtcgacgatgtgaagaatgaattcaagtcactgtcgctaaaaattacccatgcccgcggcaccagcaacctggacatccctcctgaaaactacctcatcgtgacgaaagacgggaatgcgtgcttggccatcctcgatggctcgtcggatcgtgttctgaggcatctcatcttaattggagatgctatgatgcaggatctgtttgtgatatatgacaacgaggtcaaccgtatcggatgggtccgtgcacagtgcgacaggatgcaggaccttgagtctggcatcattgattcacgtctctgaataaagttcgaatcgacatagacaaaaaccttagcaacaacaaaagagtgctctcgtacggtattcaaaagattgtatggcgctcccgtttataatgaaacatgttgacatgttgaggaataaataaagtgtaaagagagaatcaagtggkaarggwtaaggggggatccagtggg

SEQ ID NO: 67242 - protein, 410 aa, Triticum aestivum
  peptide (1)..(410): Ceres Seq. ID no. 15219998
  misc_feature (22)..(403): Homolog of NCBI NO: 26452545 NR Description: putative nucellin [Arabidopsis thaliana]
  misc_feature (22)..(403): Homolog of NCBI NO: 18418224 NR Description: nucellin protein, putative [Arabidopsis thaliana]
  misc_feature (21)..(402): Homolog of NCBI NO: 25350204 NR Description: nucellin-like protein, 27671-25467
  misc_feature (21)..(401): Homolog of NCBI NO: 30699261 NR Description: nucellin protein, putative [Arabidopsis thaliana]
  misc_feature (21)..(402): Homolog of NCBI NO: 30699263 NR Description: nucellin protein, putative [Arabidopsis thaliana]
  misc_feature (20)..(398): Homolog of NCBI NO: 15219354 NR Description: nucellin protein, putative [Arabidopsis thaliana]
  misc_feature (1)..(410): Homolog of NCBI NO: 33340111 NR Description: nucellin-like protein [Oryza sativa]
  misc_feature (44)..(397): Homolog of NCBI NO: 21805926 NR Description: nucellin-like aspartic protease [Zea mays]
  misc_feature (1)..(410): Homolog of NCBI NO: 7489434 NR Description: protein EEA1 - barley
  misc_feature (1)..(410): Homolog of NCBI NO: 7489412 NR Description: probable aspartic proteinase (EC 3.4.23.-) -
MAAMWYPIIGLLLLMLPLGPSSAIKFPLIGNVYPDGHFYATLQIGKPLKPYFLDIDTGSNLTWLECEHPDHGCKGCNQRTPHPYYKPAAHNLMVRCDSWICAQLRKDQPGSPQCPNSDPHRCHYDIQYVSGRSKGDLANDMIFINRRDDMNYVFGCGYEQEEPLEQPSPPAVDGILGLGRGSVGFVAQLKAQKKIVRNVIGHCLSIHGNGNLYIGDFRLPPGDVTWAPMSTSLPYYSPGPATLLYDEQPIRGSPAFTTVFDSGATYTYMPGQIYNGLVSKVQDTLHKSSLKEVKDRALPQCWKGKMPFRSVDDVKNEFKSLSLKITHARGTSNLDIPPENYLIVTKDGNACLAILDGSSDRVLRHLILIGDAMMQDLFVIYDNEVNRIGWVRAQCDRMQDLESGIIDSRL

SEQ ID NO: 67243 - protein, 407 aa, Triticum aestivum
  peptide (1)..(407): Ceres Seq. ID no. 15219999
  misc_feature (19)..(400): Homolog of NCBI NO: 26452545 NR Description: putative nucellin [Arabidopsis thaliana]
  misc_feature (19)..(400): Homolog of NCBI NO: 18418224 NR Description: nucellin protein, putative [Arabidopsis thaliana]
  misc_feature (18)..(399): Homolog of NCBI NO: 25350204 NR Description: nucellin-like protein, 27671-25467
  misc_feature (18)..(398): Homolog of NCBI NO: 30699261 NR Description: nucellin protein, putative [Arabidopsis thaliana]
  misc_feature (18)..(399): Homolog of NCBI NO: 30699263 NR Description: nucellin protein, putative [Arabidopsis thaliana]
  misc_feature (17)..(395): Homolog of NCBI NO: 15219354 NR Description: nucellin protein, putative [Arabidopsis thaliana]
  misc_feature (1)..(407): Homolog of NCBI NO: 33340111 NR Description: nucellin-like protein [Oryza sativa]
  misc_feature (41)..(394): Homolog of NCBI NO: 21805926 NR Description: nucellin-like aspartic protease [Zea mays]
  misc_feature (1)..(407): Homolog of NCBI NO: 7489434 NR Description: protein EEA1 - barley
  misc_feature (1)..(407): Homolog of NCBI NO: 7489412 NR Description: probable aspartic proteinase (EC 3.4.23.-) -
MWYPIIGLLLLMLPLGPSSAIKFPLIGNVYPDGHFYATLQIGKPLKPYFLDIDTGSNLTWLECEHPDHGCKGCNQRTPHPYYKPAAHNLMVRCDSWICAQLRKDQPGSPQCPNSDPHRCHYDIQYVSGRSKGDLANDMIFINRRDDMNYVFGCGYEQEEPLEQPSPPAVDGILGLGRGSVGFVAQLKAQKKIVRNVIGHCLSIHGNGNLYIGDFRLPPGDVTWAPMSTSLPYYSPGPATLLYDEQPIRGSPAFTTVFDSGATYTYMPGQIYNGLVSKVQDTLHKSSLKEVKDRALPQCWKGKMPFRSVDDVKNEFKSLSLKITHARGTSNLDIPPENYLIVTKDGNACLAILDGSSDRVLRHLILIGDAMMQDLFVIYDNEVNRIGWVRAQCDRMQDLESGIIDSRL

SEQ ID NO: 67244 - protein, 396 aa, Triticum aestivum
  peptide (1)..(396): Ceres Seq. ID no. 15220000
  misc_feature (8)..(389): Homolog of NCBI NO: 26452545 NR Description: putative nucellin [Arabidopsis thaliana]
  misc_feature (8)..(389): Homolog of NCBI NO: 18418224 NR Description: nucellin protein, putative [Arabidopsis thaliana]
  misc_feature (7)..(388): Homolog of NCBI NO: 25350204 NR Description: nucellin-like protein, 27671-25467
  misc_feature (7)..(387): Homolog of NCBI NO: 30699261 NR Description: nucellin protein, putative [Arabidopsis thaliana]
  misc_feature (7)..(388): Homolog of NCBI NO: 30699263 NR Description: nucellin protein, putative [Arabidopsis thaliana]
  misc_feature (6)..(384): Homolog of NCBI NO: 15219354 NR Description: nucellin protein, putative [Arabidopsis thaliana]
  misc_feature (1)..(396): Homolog of NCBI NO: 33340111 NR Description: nucellin-like protein [Oryza sativa]
  misc_feature (30)..(383): Homolog of NCBI NO: 21805926 NR Description: nucellin-like aspartic protease [Zea mays]
  misc_feature (1)..(396): Homolog of NCBI NO: 7489434 NR Description: protein EEA1 - barley
  misc_feature (1)..(396): Homolog of NCBI NO: 7489412 NR Description: probable aspartic proteinase (EC 3.4.23.-) -
MLPLGPSSAIKFPLIGNVYPDGHFYATLQIGKPLKPYFLDIDTGSNLTWLECEHPDHGCKGCNQRTPHPYYKPAAHNLMVRCDSWICAQLRKDQPGSPQCPNSDPHRCHYDIQYVSGRSKGDLANDMIFINRRDDMNYVFGCGYEQEEPLEQPSPPAVDGILGLGRGSVGFVAQLKAQKKIVRNVIGHCLSIHGNGNLYIGDFRLPPGDVTWAPMSTSLPYYSPGPATLLYDEQPIRGSPAFTTVFDSGATYTYMPGQIYNGLVSKVQDTLHKSSLKEVKDRALPQCWKGKMPFRSVDDVKNEFKSLSLKITHARGTSNLDIPPENYLIVTKDGNACLAILDGSSDRVLRHLILIGDAMMQDLFVIYDNEVNRIGWVRAQCDRMQDLESGIIDSRL

SEQ ID NO: 67245 - DNA, 1621 bp, Triticum aestivum
  misc_feature (1)..(1621): Ceres Seq. ID no. 14307889
acgcacgcttccccaatcccatccagcaagcaagcagcagcgaggggtctccccgccgtcttccccgtcgccgtccgttaccgtcgtcgtcgccgcggtccagccctccggtcggcgctggttgctgacgcgtaggcgaaatccgtgcgagttctgcagatcgtcgccggcagacaatgtggggcgagagggctcatcacaggcatgggcaccatcacgaccacgttccgtccgggggttccaaggaccggcagcccaagttcatagcagacaactacagctcggtagatgaggtcattgctgcattgagagaagctgggcttgaatcatcaaatctaattcttggcatcgacttcaccaaaagcaatgaatggtcaggtaggcattcctttggaagaaaatctctgcatgccattagtggcactccaaatccatatgagcaagccatctctataattgggcgaacactatcaccttttgatgatgataacttgataccatgctttggatttggtgatgcttctacgcatgatcattctgtcttcagcttttaccaagaaaaccgtccttgccgtggttttgaggaggttcttgacagatacagacaaattgttccacatttgaacctttcaggaccaacttcttttgcacctcttatctacgcggcgatgtcagttgtcgaaagcagtaactgccaataccatgtcctcgtcatcatagctgatggacaggtgaccacttcaacttcaggtggaagattaagtccacaagaacaggcaactatacaagcgattgttgatgctagcttctatcctctttcaattgtgatggtgggggtgggcgatgggccatgggatgcaatgcagcattttgatgactgtattcctgacagagccttcgacaatttccagttcgtgaacttcactggtatcatgtcatcaagcaaggatatgtcaaagaaggaggccgcatttgcgcttgcagcgctgatggaaatacccacccaatacaaagcgactcaaggcctccgacctccagagaggcacgcacaaaacgccaaccctccgaggatccttccccctcccagcaaagttcttgaacgtgacaatattgtcgcagcttctcatactccagccgcaacctcgcagtcaaccgacgttggctacaccgtttcggatgaaaaggtatgtcccatctgcttaacgaatccaaaggacatggctttccaatgcggccatctgacatgcaaggaatgcgggccgacgctatcgacatgccccttgtgccgcgcgccaatcactgtccgtgtaaggctcttttcataaagatgatgcagacttctggaagtgaagaatcagccattcatgcaatatgttatcggcagtaatcaaggagcaagaagttgggcgggcaaggagatatgtacatgttcataaagctttactgtataacatgtccagcgccaactgtttcggctgtctgagtctgatgaataatttccatcacctcttgtgcagtttattcctgtcatcttgtaaaaaaagtagcagcagtagtcgtagttgaaaatcgtgttttcctgtaaaacctaaatgaatcaatacttcctccgtttttattg

SEQ ID NO: 67246 - protein, 382 aa, Triticum aestivum
  peptide (1)..(382): Ceres Seq. ID no. 14307890
  misc_feature (30)..(382): Homolog of NCBI NO: 18412353 NR Description: copine-related [Arabidopsis thaliana]
  misc_feature (29)..(355): Homolog of NCBI NO: 18481708 NR Description: hypothetical protein [Sorghum bicolor]
  misc_feature (317)..(360): Homolog of NCBI NO: 20804894 NR Description: P0497A05.19 [Oryza sativa (japonica
  misc_feature (20)..(303): Homolog of NCBI NO: 20804894 NR Description: P0497A05.19 [Oryza sativa (japonica
  misc_feature (1)..(381): Homolog of NCBI NO: 30697566 NR Description: copine-related [Arabidopsis thaliana]
  misc_feature (1)..(381): Homolog of NCBI NO: 18408863 NR Description: copine-related [Arabidopsis thaliana]
  misc_feature (23)..(354): Homolog of NCBI NO: 8777310 NR Description: gb|AAF01562.1~gene_id:MBM17.7~strong similarity
  misc_feature (24)..(381): Homolog of NCBI NO: 15232157 NR Description: copine-related [Arabidopsis thaliana]
  misc_feature (23)..(382): Homolog of NCBI NO: 22328041 NR Description: copine-related [Arabidopsis thaliana]
  misc_feature (1)..(382): Homolog of NCBI NO: 34905794 NR Description: P0401G10.23 [Oryza sativa (japonica
MWGERAHHRHGHHHDHVPSGGSKDRQPKFIADNYSSVDEVIAALREAGLESSNLILGIDFTKSNEWSGRHSFGRKSLHAISGTPNPYEQAISIIGRTLSPFDDDNLIPCFGFGDASTHDHSVFSFYQENRPCRGFEEVLDRYRQIVPHLNLSGPTSFAPLIYAAMSVVESSNCQYHVLVIIADGQVTTSTSGGRLSPQEQATIQAIVDASFYPLSIVMVGVGDGPWDAMQHFDDCIPDRAFDNFQFVNFTGIMSSSKDMSKKEAAFALAALMEIPTQYKATQGLRPPERHAQNANPPRILPPPSKVLERDNIVAASHTPAATSQSTDVGYTVSDEKVCPICLTNPKDMAFQCGHLTCKECGPTLSTCPLCRAPITVRVRLFS

SEQ ID NO: 67247 - protein, 218 aa, Triticum aestivum
  peptide (1)..(218): Ceres Seq. ID no. 14307891
  misc_feature (1)..(218): Homolog of NCBI NO: 18412353 NR Description: copine-related [Arabidopsis thaliana]
  misc_feature (1)..(191): Homolog of NCBI NO: 18481708 NR Description: hypothetical protein [Sorghum bicolor]
  misc_feature (153)..(196): Homolog of NCBI NO: 20804894 NR Description: P0497A05.19 [Oryza sativa (japonica
  misc_feature (1)..(139): Homolog of NCBI NO: 20804894 NR Description: P0497A05.19 [Oryza sativa (japonica
  misc_feature (1)..(217): Homolog of NCBI NO: 30697566 NR Description: copine-related [Arabidopsis thaliana]
  misc_feature (1)..(217): Homolog of NCBI NO: 18408863 NR Description: copine-related [Arabidopsis thaliana]
  misc_feature (1)..(190): Homolog of NCBI NO: 8777310 NR Description: gb|AAF01562.1~gene_id:MBM17.7~strong similarity
  misc_feature (1)..(217): Homolog of NCBI NO: 15232157 NR Description: copine-related [Arabidopsis thaliana]
  misc_feature (1)..(218): Homolog of NCBI NO: 22328041 NR Description: copine-related [Arabidopsis thaliana]
  misc_feature (1)..(218): Homolog of NCBI NO: 34905794 NR Description: P0401G10.23 [Oryza sativa (japonica
MSVVESSNCQYHVLVIIADGQVTTSTSGGRLSPQEQATIQAIVDASFYPLSIVMVGVGDGPWDAMQHFDDCIPDRAFDNFQFVNFTGIMSSSKDMSKKEAAFALAALMEIPTQYKATQGLRPPERHAQNANPPRILPPPSKVLERDNIVAASHTPAATSQSTDVGYTVSDEKVCPICLTNPKDMAFQCGHLTCKECGPTLSTCPLCRAPITVRVRLFS

SEQ ID NO: 67248 - DNA, 1766 bp, Triticum aestivum
  misc_feature (1)..(1766): Ceres Seq. ID no. 13659615
aaaaaatagaaactccccgacgacttgctcctcctccccctcacttccctcccccatcttggaccgttgcacaccgatctcgcgccggcccccaaatcgccggcgaagcccgcctccgcctccgtcccccgccgcgccgatctgctcgcaagattcgtaggccggaggaggaggacgaggaagggaggaagttgagttcttgttggtttcttccgcgggagccgaccgcacatgccaacaaccccccggagcagaagccaagctaggaccaccaggtcttggatcttgtcaggcatggacttcggtgacacgagacgcaagcctaatttcgccggaaagatcgcggtggctgctgccctcactgttatgtgcatacttgtgttgaagcagtctcctggttttggcggcactagcgtgttctctcgccatgaaactggggtgactcatgtgctggtgactggaggtgctggatacattggctcacatgctactcttcgtctccttacggacaactaccgagttaccattgtggataacctttcgagagggaacatgggagctgtcagagctctccagaggttgtttccagagcctgggaggcttcagtttatatacactgatttaggcgatccgaaagctgtgaacaaaatgttttcggagaacgcgtttgatgctgttatgcacttcgctgctgttgcttatgttggtgagagcacgcaggagccactaaggtactaccacaacataacatcaaatacgttgacagtgcttgaggcaatggcagcacataatgtaaaaactctgatttactcgagtacttgtgcaacatatggtgaacctgacacaatgcctattgtagaaacaactcctcagatacctatcaatccatacgggaaggcaaaaaagatgtccgaggacatcattctagatttctcaaagaaatcgaacatggctgtgatgatcttaagatacttcaatgtgattggatcggaccctgaggggcgccttggggaagctccaaggcctgaactgcgtgagcatggaaggatttctggtgcgtgttttgatgcagcatcaggaatcattccagggctaaaggttcgaggaacggactaccctaccgctgatggaacttgcgtaagggactacatcgatgtcacagatcttgttgatgcccatgtcaaagctcttggtaaagctgagcctagcaaagttggaatctacaatgtcggcacagggaaaggtaggtcagtgaaggagtttgtagaagcgtgcaagaaggcgactggagcaaccatcaaggttgactacctcgatcggagagctggggattacgccgaagtatacagcaacccggccaagatccgcgatgagctgaactggacagcccaacacacggacctccgtgagagccttgcgacggcctggaaatggcagaaggcgcacccgggcggatacgggtcggcctgatcccgtgctcggtaggttcaacgcaagttcgccaacacagacccacaggtccatgtgcagtgatatggccttgagaacactggtccttcaccgtagacacgtagcaggcagccacagaagtgtagtgatgttatttcgcagcacctggaagaagatacagagagaatggcctgcctggcttagaagaaatcatatatagttttcttttttcttttcttttcgtcagtgacatttaatttattttgctgttcgttggctgaggcataatatatgacacaaatacggagttgtgctgt

SEQ ID NO: 67249 - protein, 412 aa, Triticum aestivum
  peptide (1)..(412): Ceres Seq. ID no. 13659616
  misc_feature (73)..(405): Pfam Name: NAD dependent epimerase/dehydratase family Pfam Description: NAD dependent epimerase/dehydratase family
  misc_feature (19)..(188): Homolog of NCBI NO: 5852089 NR Description: zwh12.1 [Oryza sativa (indica cultivar-group)]
  misc_feature (35)..(412): Homolog of NCBI NO: 7437275 NR Description: probable UDPglucose 4-epimerase (EC 5.1.3.2)
  misc_feature (22)..(411): Homolog of NCBI NO: 15241503 NR Description: NAD-dependent epimerase/dehydratase family
  misc_feature (35)..(412): Homolog of NCBI NO: 15237098 NR Description: NAD-dependent epimerase/dehydratase family
  misc_feature (22)..(410): Homolog of NCBI NO: 27260937 NR Description: OJ1417_E01.21 [Oryza sativa (japonica
  misc_feature (1)..(410): Homolog of NCBI NO: 25553524 NR Description: UDP-galactose 4-epimerase-like protein
  misc_feature (6)..(410): Homolog of NCBI NO: 24417398 NR Description: unknown [Arabidopsis thaliana]
  misc_feature (6)..(410): Homolog of NCBI NO: 22329866 NR Description: NAD-dependent epimerase/dehydratase family
  misc_feature (21)..(411): Homolog of NCBI NO: 27529690 NR Description: UDP-galactose 4-epimerase-like protein
  misc_feature (22)..(412): Homolog of NCBI NO: 26106016 NR Description: UDP-galactose 4-epimerase-like protein
MPTTPRSRSQARTTRSWILSGMDFGDTRRKPNFAGKIAVAAALTVMCILVLKQSPGFGGTSVFSRHETGVTHVLVTGGAGYIGSHATLRLLTDNYRVTIVDNLSRGNMGAVRALQRLFPEPGRLQFIYTDLGDPKAVNKMFSENAFDAVMHFAAVAYVGESTQEPLRYYHNITSNTLTVLEAMAAHNVKTLIYSSTCATYGEPDTMPIVETTPQIPINPYGKAKKMSEDIILDFSKKSNMAVMILRYFNVIGSDPEGRLGEAPRPELREHGRISGACFDAASGIIPGLKVRGTDYPTADGTCVRDYIDVTDLVDAHVKALGKAEPSKVGIYNVGTGKGRSVKEFVEACKKATGATIKVDYLDRRAGDYAEVYSNPAKIRDELNWTAQHTDLRESLATAWKWQKAHPGGYGSA

SEQ ID NO: 67250 - protein, 391 aa, Triticum aestivum
  peptide (1)..(391): Ceres Seq. ID no. 13659617
  misc_feature (52)..(384): Pfam Name: NAD dependent epimerase/dehydratase family Pfam Description: NAD dependent epimerase/dehydratase family
  misc_feature (1)..(167): Homolog of NCBI NO: 5852089 NR Description: zwh12.1 [Oryza sativa (indica cultivar-group)]
  misc_feature (14)..(391): Homolog of NCBI NO: 7437275 NR Description: probable UDPglucose 4-epimerase (EC 5.1.3.2)
  misc_feature (1)..(390): Homolog of NCBI NO: 15241503 NR Description: NAD-dependent epimerase/dehydratase family
  misc_feature (14)..(391): Homolog of NCBI NO: 15237098 NR Description: NAD-dependent epimerase/dehydratase family
  misc_feature (1)..(389): Homolog of NCBI NO: 27260937 NR Description: OJ1417_E01.21 [Oryza sativa (japonica
  misc_feature (1)..(389): Homolog of NCBI NO: 25553524 NR Description: UDP-galactose 4-epimerase-like protein
  misc_feature (1)..(389): Homolog of NCBI NO: 24417398 NR Description: unknown [Arabidopsis thaliana]
  misc_feature (1)..(389): Homolog of NCBI NO: 22329866 NR Description: NAD-dependent epimerase/dehydratase family
  misc_feature (1)..(390): Homolog of NCBI NO: 27529690 NR Description: UDP-galactose 4-epimerase-like protein
  misc_feature (1)..(391): Homolog of NCBI NO: 26106016 NR Description: UDP-galactose 4-epimerase-like protein
MDFGDTRRKPNFAGKIAVAAALTVMCILVLKQSPGFGGTSVFSRHETGVTHVLVTGGAGYIGSHATLRLLTDNYRVTIVDNLSRGNMGAVRALQRLFPEPGRLQFIYTDLGDPKAVNKMFSENAFDAVMHFAAVAYVGESTQEPLRYYHNITSNTLTVLEAMAAHNVKTLIYSSTCATYGEPDTMPIVETTPQIPINPYGKAKKMSEDIILDFSKKSNMAVMILRYFNVIGSDPEGRLGEAPRPELREHGRISGACFDAASGIIPGLKVRGTDYPTADGTCVRDYIDVTDLVDAHVKALGKAEPSKVGIYNVGTGKGRSVKEFVEACKKATGATIKVDYLDRRAGDYAEVYSNPAKIRDELNWTAQHTDLRESLATAWKWQKAHPGGYGSA

SEQ ID NO: 67251 - protein, 367 aa, Triticum aestivum
  peptide (1)..(367): Ceres Seq. ID no. 13659618
  misc_feature (28)..(360): Pfam Name: NAD dependent epimerase/dehydratase family Pfam Description: NAD dependent epimerase/dehydratase family
  misc_feature (1)..(143): Homolog of NCBI NO: 5852089 NR Description: zwh12.1 [Oryza sativa (indica cultivar-group)]
  misc_feature (1)..(367): Homolog of NCBI NO: 7437275 NR Description: probable UDPglucose 4-epimerase (EC 5.1.3.2)
  misc_feature (1)..(366): Homolog of NCBI NO: 15241503 NR Description: NAD-dependent epimerase/dehydratase family
  misc_feature (1)..(367): Homolog of NCBI NO: 15237098 NR Description: NAD-dependent epimerase/dehydratase family
  misc_feature (1)..(365): Homolog of NCBI NO: 27260937 NR Description: OJ1417_E01.21 [Oryza sativa (japonica
  misc_feature (1)..(365): Homolog of NCBI NO: 25553524 NR Description: UDP-galactose 4-epimerase-like protein
  misc_feature (1)..(365): Homolog of NCBI NO: 24417398 NR Description: unknown [Arabidopsis thaliana]
  misc_feature (1)..(365): Homolog of NCBI NO: 22329866 NR Description: NAD-dependent epimerase/dehydratase family
  misc_feature (1)..(366): Homolog of NCBI NO: 27529690 NR Description: UDP-galactose 4-epimerase-like protein
  misc_feature (1)..(367): Homolog of NCBI NO: 26106016 NR Description: UDP-galactose 4-epimerase-like protein
MCILVLKQSPGFGGTSVFSRHETGVTHVLVTGGAGYIGSHATLRLLTDNYRVTIVDNLSRGNMGAVRALQRLFPEPGRLQFIYTDLGDPKAVNKMFSENAFDAVMHFAAVAYVGESTQEPLRYYHNITSNTLTVLEAMAAHNVKTLIYSSTCATYGEPDTMPIVETTPQIPINPYGKAKKMSEDIILDFSKKSNMAVMILRYFNVIGSDPEGRLGEAPRPELREHGRISGACFDAASGIIPGLKVRGTDYPTADGTCVRDYIDVTDLVDAHVKALGKAEPSKVGIYNVGTGKGRSVKEFVEACKKATGATIKVDYLDRRAGDYAEVYSNPAKIRDELNWTAQHTDLRESLATAWKWQKAHPGGYGSA

SEQ ID NO: 67252 - DNA, 870 bp, Triticum aestivum
  misc_feature (1)..(870): Ceres Seq. ID no. 14313370
gaaaccgaagctcggctttggaaatctggggaaggcgacgagcaatccgaggagctccgcccctcttcttctcccccacccccactggcgacggcgacggaggcgagggtgaaaattccccaccaaccggagcgcgtgcttgctgatggaggtctcggccaggctccgcccgccgcccgccgcctcgacggcgccgccccgccgcggcggagggcccctgcgactgcgacggctgctcccttcgtctcggcccgcctcccgcgcggtctccgccaagatcagagcaagtgcaattaatgacctgcaaagaagcaagagtagcctggaagcactgttctgctacgacaaagctgttccagaggagaatatcgggaaacctgctggcctagatttggaaaagaagaatgttgggaagaatcctccatgcgtgcgctgcgaaactaaaggtgctgtgctgtgcgcaacctgcgctggttcaggcttgtacgtcgactcgataatggaaagccaaggaattatcgtaaaagtcagatgcctaggctgcggaggaactggaagcatcatgtgctccacatgcggaggccgtggacacacctgaattgtctgttgatgtttctcacaaacaaggcaatgaaattcaagtagcatcctcttggtgtacgtccatcatcgccgggaactatcatttttgcagtaatctgtatacattttactgacgattcatagttgaacgatgttcagagcatgctgcgaacaatttcactgtactaaaggattcgatgctgagtcgggtgttgtaccttgagtctacttagttcagagcgtgtgacatcgttttgcttttgtatcaaaaattgtttcagttgtaac

SEQ ID NO: 67253 - protein, 150 aa, Triticum aestivum
  peptide (1)..(150): Ceres Seq. ID no. 14313371
  misc_feature (29)..(149): Homolog of NCBI NO: 21554941 NR Description: unknown [Arabidopsis thaliana]
  misc_feature (10)..(149): Homolog of NCBI NO: 15238662 NR Description: expressed protein [Arabidopsis thaliana]
MEVSARLRPPPAASTAPPRRGGGPLRLRRLLPSSRPASRAVSAKIRASAINDLQRSKSSLEALFCYDKAVPEENIGKPAGLDLEKKNVGKNPPCVRCETKGAVLCATCAGSGLYVDSIMESQGIIVKVRCLGCGGTGSIMCSTCGGRGHT

SEQ ID NO: 67254 - protein, 98 aa, Triticum aestivum
  peptide (1)..(98): Ceres Seq. ID no. 14313372
ETEARLWKSGEGDEQSEELRPSSSPPPPLATATEARVKIPHQPERVLADGGLGQAPPAARRLDGAAPPRRRAPATATAAPFVSARLPRGLRQDQSKCN

SEQ ID NO: 67255 - DNA, 1572 bp, Triticum aestivum
  misc_feature (1)..(1572): Ceres Seq. ID no. 14303205
acacaaacttgttttcgattcctgctgctgtaggctgtagctcccccaaatctcatccaccggccggccctaatggcgctcccagatgaacttctggaggagatcttcctccgcctccccgcggccgccgacctcgcccgcgcctccacggcctgcgtctccttccgccgcgtcatcaccggccatcccttcctccgccggttccgcaccctccacccgccgtccctcctcggcatcctctgcggcggcctcatccccgcccagccgccccacccttccgccgcagcggcagccacctacgccgacgccgacttgtcgtgctcctttatgcccccaccccgcgaccgctggcgccaccgcgacggccgcgcccttttctcccccgccctcgaggggatcggcggcgactacagccctagccacctggtcacggagttcgccgtctgcgaccccctgcaccgtcgttacctcctgctgcctgccctccccgaccttctagtcggtcaagtccataggccggacatcgtggactgcgaggccttcctcgctcctcctggccctgacgacgttggggctgactggtcgtcattcagagtcatgtacttggtgcgttgcacagccaagctcttgctcttcgtcttctccacctgcgccggacaatggctcgctaatcctgttacagttgacgtgtttcgatgcggggcggcgttgcaccgcttctacgcccatggctgcttctattgggaggttttccggtctaacaagttgctcgtgctcgatgcgcgcaggatagagttctccactgttgacctcccgcctccacctggccctgatgtgcgaaagatggccattgtagaggcaggaggaggaaggcttgggatgcttactatctctgagcatcctgaacctggtgcagatcatctcctgtatgccgtacagtctaaggatgtgaatggcagaaaccagtggcaatccaagtcagtaatttatttgccggaaaattatcgctatggcatcatgggtgtagctggtggatacttactcctaactgggtatccagaagacgacatgccaatcagctatttttcactgaatctccagaattttcaggttgagtgcttctgtcagactggtgataaagtcatttttggtgacctgtatgccgatctcccaccgtccttgtccccaccaactctttgaactggacctcccagagaatgcgctgatggcaaagactcgcaagcgtgactaatgtcatgttaaggagaataaatgtaagaacttttgaaagggtgaaagtggtttgcactcgacagcaacttgcagctaagagaagaagaaggcagaagttgttgatgaccggcgcatccaccattttttcttgttaaaattctcacgacgtttctgctttttgttgcagtacttttatgcctggcaagagactagactatcttattatgccgctttgtttgaactgagtgctaggtaagctttgcggcttcagcaaccctggaaatagtttgcttttggtggtgtatgattctagtatcagtatgtatgtatggcataccc

SEQ ID NO: 67256 - protein, 375 aa, Triticum aestivum
  peptide (1)..(375): Ceres Seq. ID no. 14303206
  misc_feature (1)..(46): Pfam Name: F-box domain Pfam Description: F-box domain
  misc_feature (1)..(277): Homolog of NCBI NO: 34914942 NR Description: B1096D03.38 [Oryza sativa (japonica
  misc_feature (1)..(359): Homolog of NCBI NO: 34914580 NR Description: P0455H0310.25 [Oryza sativa (japonica
  misc_feature (155)..(375): Homolog of NCBI NO: 34393354 NR Description: hypothetical protein [Oryza sativa (japonica
  misc_feature (1)..(199): Homolog of NCBI NO: 34393352 NR Description: hypothetical protein [Oryza sativa (japonica
  misc_feature (62)..(375): Homolog of NCBI NO: 32480316 NR Description: OSJNBa0042D13.1 [Oryza sativa (japonica
  misc_feature (1)..(199): Homolog of NCBI NO: 32480316 NR Description: OSJNBa0042D13.1 [Oryza sativa (japonica
  misc_feature (1)..(351): Homolog of NCBI NO: 37530888 NR Description: hypothetical protein [Oryza sativa (japonica
  misc_feature (1)..(348): Homolog of NCBI NO: 37530886 NR Description: hypothetical protein [Oryza sativa (japonica
  misc_feature (1)..(213): Homolog of NCBI NO: 34393351 NR Description: hypothetical protein [Oryza sativa (japonica
  misc_feature (1)..(251): Homolog of NCBI NO: 34393354 NR Description: hypothetical protein [Oryza sativa (japonica
MALPDELLEEIFLRLPAAADLARASTACVSFRRVITGHPFLRRFRTLHPPSLLGILCGGLIPAQPPHPSAAAAATYADADLSCSFMPPPRDRWRHRDGRALFSPALEGIGGDYSPSHLVTEFAVCDPLHRRYLLLPALPDLLVGQVHRPDIVDCEAFLAPPGPDDVGADWSSFRVMYLVRCTAKLLLFVFSTCAGQWLANPVTVDVFRCGAALHRFYAHGCFYWEVFRSNKLLVLDARRIEFSTVDLPPPPGPDVRKMAIVEAGGGRLGMLTISEHPEPGADHLLYAVQSKDVNGRNQWQSKSVIYLPENYRYGIMGVAGGYLLLTGYPEDDMPISYFSLNLQNFQVECFCQTGDKVIFGDLYADLPPSLSPPTL

SEQ ID NO: 67257 - protein, 290 aa, Triticum aestivum
  peptide (1)..(290): Ceres Seq. ID no. 14303207
  misc_feature (1)..(192): Homolog of NCBI NO: 34914942 NR Description: B1096D03.38 [Oryza sativa (japonica
  misc_feature (1)..(274): Homolog of NCBI NO: 34914580 NR Description: P0455H0310.25 [Oryza sativa (japonica
  misc_feature (70)..(290): Homolog of NCBI NO: 34393354 NR Description: hypothetical protein [Oryza sativa (japonica
  misc_feature (1)..(114): Homolog of NCBI NO: 34393352 NR Description: hypothetical protein [Oryza sativa (japonica
  misc_feature (1)..(290): Homolog of NCBI NO: 32480316 NR Description: OSJNBa0042D13.1 [Oryza sativa (japonica
  misc_feature (1)..(114): Homolog of NCBI NO: 32480316 NR Description: OSJNBa0042D13.1 [Oryza sativa (japonica
  misc_feature (1)..(266): Homolog of NCBI NO: 37530888 NR Description: hypothetical protein [Oryza sativa (japonica
  misc_feature (1)..(263): Homolog of NCBI NO: 37530886 NR Description: hypothetical protein [Oryza sativa (japonica
  misc_feature (1)..(128): Homolog of NCBI NO: 34393351 NR Description: hypothetical protein [Oryza sativa (japonica
  misc_feature (1)..(166): Homolog of NCBI NO: 34393354 NR Description: hypothetical protein [Oryza sativa (japonica
MPPPRDRWRHRDGRALFSPALEGIGGDYSPSHLVTEFAVCDPLHRRYLLLPALPDLLVGQVHRPDIVDCEAFLAPPGPDDVGADWSSFRVMYLVRCTAKLLLFVFSTCAGQWLANPVTVDVFRCGAALHRFYAHGCFYWEVFRSNKLLVLDARRIEFSTVDLPPPPGPDVRKMAIVEAGGGRLGMLTISEHPEPGADHLLYAVQSKDVNGRNQWQSKSVIYLPENYRYGIMGVAGGYLLLTGYPEDDMPISYFSLNLQNFQVECFCQTGDKVIFGDLYADLPPSLSPPTL

SEQ ID NO: 67258 - protein, 200 aa, Triticum aestivum
  peptide (1)..(200): Ceres Seq. ID no. 14303208
  misc_feature (1)..(102): Homolog of NCBI NO: 34914942 NR Description: B1096D03.38 [Oryza sativa (japonica
  misc_feature (1)..(184): Homolog of NCBI NO: 34914580 NR Description: P0455H0310.25 [Oryza sativa (japonica
  misc_feature (1)..(200): Homolog of NCBI NO: 34393354 NR Description: hypothetical protein [Oryza sativa (japonica
  misc_feature (1)..(24): Homolog of NCBI NO: 34393352 NR Description: hypothetical protein [Oryza sativa (japonica
  misc_feature (1)..(200): Homolog of NCBI NO: 32480316 NR Description: OSJNBa0042D13.1 [Oryza sativa (japonica
  misc_feature (1)..(24): Homolog of NCBI NO: 32480316 NR Description: OSJNBa0042D13.1 [Oryza sativa (japonica
  misc_feature (1)..(176): Homolog of NCBI NO: 37530888 NR Description: hypothetical protein [Oryza sativa (japonica
  misc_feature (1)..(173): Homolog of NCBI NO: 37530886 NR Description: hypothetical protein [Oryza sativa (japonica
  misc_feature (1)..(38): Homolog of NCBI NO: 34393351 NR Description: hypothetical protein [Oryza sativa (japonica
  misc_feature (1)..(76): Homolog of NCBI NO: 34393354 NR Description: hypothetical protein [Oryza sativa (japonica
MYLVRCTAKLLLFVFSTCAGQWLANPVTVDVFRCGAALHRFYAHGCFYWEVFRSNKLLVLDARRIEFSTVDLPPPPGPDVRKMAIVEAGGGRLGMLTISEHPEPGADHLLYAVQSKDVNGRNQWQSKSVIYLPENYRYGIMGVAGGYLLLTGYPEDDMPISYFSLNLQNFQVECFCQTGDKVIFGDLYADLPPSLSPPTL

SEQ ID NO: 67259 - DNA, 2315 bp, Triticum aestivum
  misc_feature (1)..(2315): Ceres Seq. ID no. 14303002
atgttgagctagggtttagtcttgtagtactagatacagggtttaggatccgggaggagcccggctcccctcccaaaccgctctcatgtcgtcttcctcccaagtaagggttgggactctggttccctttgttgaaggcaaatctgggtcaccgagtgcgtcgtcgctgccaatgccaagcattcccatcttcaagggctccaatgtcgtcgggaggagtaatttggtggctgttgacaagagggtcagccgcaagcatttgagcctgcgcgccttgcctgatggctctctcgaagtcgttgtggaggggccaaatcccattgttgtccgatcagagggtcagagaagaaaagtttgtgctcagcagagagccaagattatgcacgatgatgtcctggagctgattcccggtgaatattttatgaagtatgtgaatatgagtgatgagcgtaaaagttccacatcagtcgaatcacatgacttaaagaaagggaagaggcatagcgaggaagatagtgtagttgcaaagagaaatcgacaagttatggaagatgaggctttggcaagaacatcgcaggaaagctttgcagaagagagtacatctgttactgaggtagtaagttcacttgatagtgctggttcttccgagagaaacaaagagagaacacattctgtcggccctttgaaagatgtacttccgttgacttttcgactcatgcgtgtccaacgtcttccatcatggactaacacttcaacagttaccattccggatgtcatacagggtgaagtgcttcttgctgtactctcaaattatatggtggacatggattggttgcttactgcatgtccaagtctaaggaaagttccacatgtcctagttctgcatggagaagatggtgcttcattggagcgcttgaagaaaacgaagcctgcaaattggatccttcacaagcccccgctcccaatatcatttggaacacatcattcgaaggccatgctgcttgtatatcctcaagggattcgtgttgttgttcacactgcaaatttgatacatgttgactggaataacaaaagtcagggattatggacgcaagattttccatggaagaaagcaaatgatacgagtacaaatattggttttgagaatgacctggttgattatctcagggcacttaagtggcctgagttcagggtaaatctcccagttgccggtgatgtcaacatcaatgcagcattctttcggaaatttgattatagtagctcaacggtcaggttgatcggatctgttcctggttatcatgtcggtcccaatatgaaaaagtggggccatatgaagcttaggagtgttcttgaagagtgcgtatttgaaaagcagttttgcaagtcaccacttatttatcagttttcgtccttggggtcacttgatgagaaatggatgagtgagtttgcatgttcgttatcagctggtaaagcagatgatggatcacagttgggtattgggaaaccactgattgtatggccaacagtggaggatgttaggtgctcaatagagggctatgcagctggcagttgcattccaagtcctcaaaagaatgttgagaaagatttcttgcgaaaatattggtccaggtggaaagcagaccacgtaggccgttgccgtgctatgccgcacataaaaacttttactcgctacaatggtcaaaatattgcatggtttctgcttacctcatcaaatttaagcaaagctgcttggggagcactgcagaagaacaatacacagctgacgatacgatcatatgagttaggtgtattgttcttgcccaaaactctccagtctgttccacaattttcatgcacagacaagagccgctcaaacctggataaacttgcccttggtaagaacatcaagaccaagctggtgacactttgctggaaaggtgatgaagaaaaggatccatctgcagaagttgtgagattgccagtgccatatcaagtccctccacaactctacggcccggaagatgtcccatggtcgtgggatcggaggtacacgaagaaggatgtgtatggttcagtctggccacgccatggctagcttagctgagctgcgtgccgatgattattaagcgtgttcaggtccacaggaacctggtgtatgttgattgatcactggtggaatcatcggttataggacctgattgctcgtgcaccctgtttctaggcctctcgctctcagccaactgtgggagaaaccataagcaatggaacgaacatttggttgacagaattatttggaacgttggatattttgagct

SEQ ID NO: 67260 - protein, 669 aa, Triticum aestivum
  peptide (1)..(669): Ceres Seq. ID no. 14303003
  misc_feature (204)..(642): Pfam Name: Tyrosyl-DNA phosphodiesterase Pfam Description: Tyrosyl-DNA phosphodiesterase
  misc_feature (205)..(582): Homolog of NCBI NO: 28373796 NR Description: Chain A, Crystal Structure Of A Human Tyrosyl-Dna
  misc_feature (632)..(665): Homolog of NCBI NO: 20127586 NR Description: tyrosyl-DNA phosphodiesterase 1; tyrosyl-DNA
  misc_feature (205)..(579): Homolog of NCBI NO: 20127586 NR Description: tyrosyl-DNA phosphodiesterase 1; tyrosyl-DNA
  misc_feature (31)..(130): Homolog of NCBI NO: 11357893 NR Description: hypothetical protein F8M21.60 - Arabidopsis
  misc_feature (184)..(645): Homolog of NCBI NO: 11357893 NR Description: hypothetical protein F8M21.60 - Arabidopsis
  misc_feature (31)..(130): Homolog of NCBI NO: 17381098 NR Description: unknown protein [Arabidopsis thaliana]
  misc_feature (184)..(667): Homolog of NCBI NO: 17381098 NR Description: unknown protein [Arabidopsis thaliana]
  misc_feature (31)..(130): Homolog of NCBI NO: 22326821 NR Description: expressed protein [Arabidopsis thaliana]
  misc_feature (184)..(667): Homolog of NCBI NO: 22326821 NR Description: expressed protein [Arabidopsis thaliana]
  misc_feature (1)..(669): Homolog of NCBI NO: 33146648 NR Description: putative tyrosyl-DNA phosphodiesterase
MSSSSQVRVGTLVPFVEGKSGSPSASSLPMPSIPIFKGSNVVGRSNLVAVDKRVSRKHLSLRALPDGSLEVVVEGPNPIVVRSEGQRRKVCAQQRAKIMHDDVLELIPGEYFMKYVNMSDERKSSTSVESHDLKKGKRHSEEDSVVAKRNRQVMEDEALARTSQESFAEESTSVTEVVSSLDSAGSSERNKERTHSVGPLKDVLPLTFRLMRVQRLPSWTNTSTVTIPDVIQGEVLLAVLSNYMVDMDWLLTACPSLRKVPHVLVLHGEDGASLERLKKTKPANWILHKPPLPISFGTHHSKAMLLVYPQGIRVVVHTANLIHVDWNNKSQGLWTQDFPWKKANDTSTNIGFENDLVDYLRALKWPEFRVNLPVAGDVNINAAFFRKFDYSSSTVRLIGSVPGYHVGPNMKKWGHMKLRSVLEECVFEKQFCKSPLIYQFSSLGSLDEKWMSEFACSLSAGKADDGSQLGIGKPLIVWPTVEDVRCSIEGYAAGSCIPSPQKNVEKDFLRKYWSRWKADHVGRCRAMPHIKTFTRYNGQNIAWFLLTSSNLSKAAWGALQKNNTQLTIRSYELGVLFLPKTLQSVPQFSCTDKSRSNLDKLALGKNIKTKLVTLCWKGDEEKDPSAEVVRLPVPYQVPPQLYGPEDVPWSWDRRYTKKDVYGSVWPRHG

SEQ ID NO: 67261 - protein, 640 aa, Triticum aestivum
  peptide (1)..(640): Ceres Seq. ID no. 14303004
  misc_feature (175)..(613): Pfam Name: Tyrosyl-DNA phosphodiesterase Pfam Description: Tyrosyl-DNA phosphodiesterase
  misc_feature (176)..(553): Homolog of NCBI NO: 28373796 NR Description: Chain A, Crystal Structure Of A Human Tyrosyl-Dna
  misc_feature (603)..(636): Homolog of NCBI NO: 20127586 NR Description: tyrosyl-DNA phosphodiesterase 1; tyrosyl-DNA
  misc_feature (176)..(550): Homolog of NCBI NO: 20127586 NR Description: tyrosyl-DNA phosphodiesterase 1; tyrosyl-DNA
  misc_feature (2)..(101): Homolog of NCBI NO: 11357893 NR Description: hypothetical protein F8M21.60 - Arabidopsis
  misc_feature (155)..(616): Homolog of NCBI NO: 11357893 NR Description: hypothetical protein F8M21.60 - Arabidopsis
  misc_feature (2)..(101): Homolog of NCBI NO: 17381098 NR Description: unknown protein [Arabidopsis thaliana]
  misc_feature (155)..(638): Homolog of NCBI NO: 17381098 NR Description: unknown protein [Arabidopsis thaliana]
  misc_feature (2)..(101): Homolog of NCBI NO: 22326821 NR Description: expressed protein [Arabidopsis thaliana]
  misc_feature (155)..(638): Homolog of NCBI NO: 22326821 NR Description: expressed protein [Arabidopsis thaliana]
  misc_feature (1)..(640): Homolog of NCBI NO: 33146648 NR Description: putative tyrosyl-DNA phosphodiesterase
MPSIPIFKGSNVVGRSNLVAVDKRVSRKHLSLRALPDGSLEVVVEGPNPIVVRSEGQRRKVCAQQRAKIMHDDVLELIPGEYFMKYVNMSDERKSSTSVESHDLKKGKRHSEEDSVVAKRNRQVMEDEALARTSQESFAEESTSVTEVVSSLDSAGSSERNKERTHSVGPLKDVLPLTFRLMRVQRLPSWTNTSTVTIPDVIQGEVLLAVLSNYMVDMDWLLTACPSLRKVPHVLVLHGEDGASLERLKKTKPANWILHKPPLPISFGTHHSKAMLLVYPQGIRVVVHTANLIHVDWNNKSQGLWTQDFPWKKANDTSTNIGFENDLVDYLRALKWPEFRVNLPVAGDVNINAAFFRKFDYSSSTVRLIGSVPGYHVGPNMKKWGHMKLRSVLEECVFEKQFCKSPLIYQFSSLGSLDEKWMSEFACSLSAGKADDGSQLGIGKPLIVWPTVEDVRCSIEGYAAGSCIPSPQKNVEKDFLRKYWSRWKADHVGRCRAMPHIKTFTRYNGQNIAWFLLTSSNLSKAAWGALQKNNTQLTIRSYELGVLFLPKTLQSVPQFSCTDKSRSNLDKLALGKNIKTKLVTLCWKGDEEKDPSAEVVRLPVPYQVPPQLYGPEDVPWSWDRRYTKKDVYGSVWPRHG

SEQ ID NO: 67262 - protein, 571 aa, Triticum aestivum
  peptide (1)..(571): Ceres Seq. ID no. 14303005
  misc_feature (106)..(544): Pfam Name: Tyrosyl-DNA phosphodiesterase Pfam Description: Tyrosyl-DNA phosphodiesterase
  misc_feature (107)..(484): Homolog of NCBI NO: 28373796 NR Description: Chain A, Crystal Structure Of A Human Tyrosyl-Dna
  misc_feature (534)..(567): Homolog of NCBI NO: 20127586 NR Description: tyrosyl-DNA phosphodiesterase 1; tyrosyl-DNA
  misc_feature (107)..(481): Homolog of NCBI NO: 20127586 NR Description: tyrosyl-DNA phosphodiesterase 1; tyrosyl-DNA
  misc_feature (1)..(32): Homolog of NCBI NO: 11357893 NR Description: hypothetical protein F8M21.60 - Arabidopsis
  misc_feature (86)..(547): Homolog of NCBI NO: 11357893 NR Description: hypothetical protein F8M21.60 - Arabidopsis
  misc_feature (1)..(32): Homolog of NCBI NO: 17381098 NR Description: unknown protein [Arabidopsis thaliana]
  misc_feature (86)..(569): Homolog of NCBI NO: 17381098 NR Description: unknown protein [Arabidopsis thaliana]
  misc_feature (1)..(32): Homolog of NCBI NO: 22326821 NR Description: expressed protein [Arabidopsis thaliana]
  misc_feature (86)..(569): Homolog of NCBI NO: 22326821 NR Description: expressed protein [Arabidopsis thaliana]
  misc_feature (1)..(571): Homolog of NCBI NO: 33146648 NR Description: putative tyrosyl-DNA phosphodiesterase
MHDDVLELIPGEYFMKYVNMSDERKSSTSVESHDLKKGKRHSEEDSVVAKRNRQVMEDEALARTSQESFAEESTSVTEVVSSLDSAGSSERNKERTHSVGPLKDVLPLTFRLMRVQRLPSWTNTSTVTIPDVIQGEVLLAVLSNYMVDMDWLLTACPSLRKVPHVLVLHGEDGASLERLKKTKPANWILHKPPLPISFGTHHSKAMLLVYPQGIRVVVHTANLIHVDWNNKSQGLWTQDFPWKKANDTSTNIGFENDLVDYLRALKWPEFRVNLPVAGDVNINAAFFRKFDYSSSTVRLIGSVPGYHVGPNMKKWGHMKLRSVLEECVFEKQFCKSPLIYQFSSLGSLDEKWMSEFACSLSAGKADDGSQLGIGKPLIVWPTVEDVRCSIEGYAAGSCIPSPQKNVEKDFLRKYWSRWKADHVGRCRAMPHIKTFTRYNGQNIAWFLLTSSNLSKAAWGALQKNNTQLTIRSYELGVLFLPKTLQSVPQFSCTDKSRSNLDKLALGKNIKTKLVTLCWKGDEEKDPSAEVVRLPVPYQVPPQLYGPEDVPWSWDRRYTKKDVYGSVWPRHG

SEQ ID NO: 67263 - DNA, 1616 bp, Triticum aestivum
  misc_feature (1)..(1616): Ceres Seq. ID no. 15224908
aaactcctttttttcctgacacggctagctaagcttgaaccgactgctggacgacggagagggagaccaaggccgagcagacgccggcgggatcccaactgaattgtgaggggggccgccgaggcggcggatggcgccctcgttgctcgtctcggcgagccaaatcctcgccgttgccggccggggaggccgtaggcggcgtctggtcatcgccaactccggcggtgccggcgctcccccgaagctggtgactttcctcggcaagggaggctccggcaagaccacggcggccgccatcgccgctcagtattatgctagtgaaggcctgaagacatgcctggttatacagtcacaagacccgacagcagagcaattgatgggctgtaagatcgggaactcgctcacagaatgtgctgctaatctttcgaccattaagcttgagaccagtaaaatgctacttgagccccttgaccggttgaagaaagtagatgcccagagcaatctcactcaaggagttcttgaggggattgtaggggaggaacttggagtcttacctggaatggattcgatctgctcagtcttgtctcttcagaagctgctcaacttcttttcagttggaacgaatagtccacagggggaatttgatgtcgtagtgtatgactgcaataatacagaggaatttctacggctcactggtgctactgagagggcaagatcttacttgaagtatgtgagggagctagcagagaagactgacataggaagactggcgtcgccatcgttactgaaactgatttatgatgccgcgagaccaagtggtagaactggtgaagtaagaatgagtgcagagatatggaatgaaatcgaacaacttcttgagaaaatctcgctttggtttgctgatccctcaaaacttgcgtgcttcctcgtcatggacccgagaggatcaatctcggtgtcctctgcgctaagatactggggttgcaccatccaagctggcgcgcaaatatgtggagcatttggttatgctgaagacccttctgaaatgcaccaaggagttgctgagaagtttttgccattgtctttctcgtttctgccatttgtaccaactgattcttctgcggattggggcagagcgttaaattcattgaatcaaaatacaaaggggctgttgaggaatgcaagcaaggtttatccttcagttagttttgattctgcacagaagtcggtgacccttttcatgccaggatttgacaagtctgaaatcaaactatatcagtataggggcggttcggagctactgatcgaagccggcgaccagaggcgcgtaattaagctgccaccggcgatgcaggggaaggtcggtggcgccaagttcgtcgacaggaatcttgtcattaccatccggtaggcggcagcagggccttgggtgatccggaaatcggagcacaggctcgagaaaccaaaccggtggagaaccgtgcagcaccgtaatgtaaacccgatatagaccggttcctggtgatgtctgtcagcatcgtttttccattttgctgtaaacatggtgagatttctcacaacggcattatagaagtggaagaaaaagggcagtccac

SEQ ID NO: 67264 - protein, 426 aa, Triticum aestivum
  peptide (1)..(426): Ceres Seq. ID no. 15224909
  misc_feature (39)..(333): Pfam Name: Anion-transporting ATPase Pfam Description: Anion-transporting ATPase
  misc_feature (244)..(424): Homolog of NCBI NO: 23039777 NR Description: COG0003: Oxyanion-translocating ATPase
  misc_feature (39)..(295): Homolog of NCBI NO: 16329406 NR Description: hypothetical protein [Synechocystis sp. PCC 6803]
  misc_feature (38)..(423): Homolog of NCBI NO: 22970345 NR Description: hypothetical protein [Chloroflexus aurantiacus]
  misc_feature (41)..(295): Homolog of NCBI NO: 23039777 NR Description: COG0003: Oxyanion-translocating ATPase
  misc_feature (169)..(424): Homolog of NCBI NO: 17231973 NR Description: hypothetical protein [Nostoc sp. PCC 7120]
  misc_feature (39)..(327): Homolog of NCBI NO: 23125737 NR Description: COG0003: Oxyanion-translocating ATPase [Nostoc
  misc_feature (169)..(424): Homolog of NCBI NO: 23125737 NR Description: COG0003: Oxyanion-translocating ATPase [Nostoc
  misc_feature (108)..(426): Homolog of NCBI NO: 15222640 NR Description: hypothetical protein [Arabidopsis thaliana]
  misc_feature (38)..(59): Homolog of NCBI NO: 25518771 NR Description: hypothetical protein F14G11.6 - Arabidopsis
  misc_feature (99)..(426): Homolog of NCBI NO: 25518771 NR Description: hypothetical protein F14G11.6 - Arabidopsis
MAPSLLVSASQILAVAGRGGRRRRLVIANSGGAGAPPKLVTFLGKGGSGKTTAAAIAAQYYASEGLKTCLVIQSQDPTAEQLMGCKIGNSLTECAANLSTIKLETSKMLLEPLDRLKKVDAQSNLTQGVLEGIVGEELGVLPGMDSICSVLSLQKLLNFFSVGTNSPQGEFDVVVYDCNNTEEFLRLTGATERARSYLKYVRELAEKTDIGRLASPSLLKLIYDAARPSGRTGEVRMSAEIWNEIEQLLEKISLWFADPSKLACFLVMDPRGSISVSSALRYWGCTIQAGAQICGAFGYAEDPSEMHQGVAEKFLPLSFSFLPFVPTDSSADWGRALNSLNQNTKGLLRNASKVYPSVSFDSAQKSVTLFMPGFDKSEIKLYQYRGGSELLIEAGDQRRVIKLPPAMQGKVGGAKFVDRNLVITIR

SEQ ID NO: 67265 - protein, 344 aa, Triticum aestivum
  peptide (1)..(344): Ceres Seq. ID no. 15224910
  misc_feature (1)..(251): Pfam Name: Anion-transporting ATPase Pfam Description: Anion-transporting ATPase
  misc_feature (1)..(334): Homolog of NCBI NO: 21673808 NR Description: ArsA ATPase family protein [Chlorobium tepidum
  misc_feature (162)..(342): Homolog of NCBI NO: 23039777 NR Description: COG0003: Oxyanion-translocating ATPase
  misc_feature (1)..(213): Homolog of NCBI NO: 16329406 NR Description: hypothetical protein [Synechocystis sp. PCC 6803]
  misc_feature (1)..(341): Homolog of NCBI NO: 22970345 NR Description: hypothetical protein [Chloroflexus aurantiacus]
  misc_feature (1)..(213): Homolog of NCBI NO: 23039777 NR Description: COG0003: Oxyanion-translocating ATPase
  misc_feature (87)..(342): Homolog of NCBI NO: 17231973 NR Description: hypothetical protein [Nostoc sp. PCC 7120]
  misc_feature (1)..(245): Homolog of NCBI NO: 23125737 NR Description: COG0003: Oxyanion-translocating ATPase [Nostoc
  misc_feature (87)..(342): Homolog of NCBI NO: 23125737 NR Description: COG0003: Oxyanion-translocating ATPase [Nostoc
  misc_feature (26)..(344): Homolog of NCBI NO: 15222640 NR Description: hypothetical protein [Arabidopsis thaliana]
  misc_feature (17)..(344): Homolog of NCBI NO: 25518771 NR Description: hypothetical protein F14G11.6 - Arabidopsis
MGCKIGNSLTECAANLSTIKLETSKMLLEPLDRLKKVDAQSNLTQGVLEGIVGEELGVLPGMDSICSVLSLQKLLNFFSVGTNSPQGEFDVVVYDCNNTEEFLRLTGATERARSYLKYVRELAEKTDIGRLASPSLLKLIYDAARPSGRTGEVRMSAEIWNEIEQLLEKISLWFADPSKLACFLVMDPRGSISVSSALRYWGCTIQAGAQICGAFGYAEDPSEMHQGVAEKFLPLSFSFLPFVPTDSSADWGRALNSLNQNTKGLLRNASKVYPSVSFDSAQKSVTLFMPGFDKSEIKLYQYRGGSELLIEAGDQRRVIKLPPAMQGKVGGAKFVDRNLVITIR

SEQ ID NO: 67266 - protein, 319 aa, Triticum aestivum
  peptide (1)..(319): Ceres Seq. ID no. 15224911
  misc_feature (1)..(226): Pfam Name: Anion-transporting ATPase Pfam Description: Anion-transporting ATPase
  misc_feature (1)..(309): Homolog of NCBI NO: 21673808 NR Description: ArsA ATPase family protein [Chlorobium tepidum
  misc_feature (137)..(317): Homolog of NCBI NO: 23039777 NR Description: COG0003: Oxyanion-translocating ATPase
  misc_feature (1)..(188): Homolog of NCBI NO: 16329406 NR Description: hypothetical protein [Synechocystis sp. PCC 6803]
  misc_feature (1)..(316): Homolog of NCBI NO: 22970345 NR Description: hypothetical protein [Chloroflexus aurantiacus]
  misc_feature (1)..(188): Homolog of NCBI NO: 23039777 NR Description: COG0003: Oxyanion-translocating ATPase
  misc_feature (62)..(317): Homolog of NCBI NO: 17231973 NR Description: hypothetical protein [Nostoc sp. PCC 7120]
  misc_feature (1)..(220): Homolog of NCBI NO: 23125737 NR Description: COG0003: Oxyanion-translocating ATPase [Nostoc
  misc_feature (62)..(317): Homolog of NCBI NO: 23125737 NR Description: COG0003: Oxyanion-translocating ATPase [Nostoc
  misc_feature (1)..(319): Homolog of NCBI NO: 15222640 NR Description: hypothetical protein [Arabidopsis thaliana]
  misc_feature (1)..(319): Homolog of NCBI NO: 25518771 NR Description: hypothetical protein F14G11.6 - Arabidopsis
MLLEPLDRLKKVDAQSNLTQGVLEGIVGEELGVLPGMDSICSVLSLQKLLNFFSVGTNSPQGEFDVVVYDCNNTEEFLRLTGATERARSYLKYVRELAEKTDIGRLASPSLLKLIYDAARPSGRTGEVRMSAEIWNEIEQLLEKISLWFADPSKLACFLVMDPRGSISVSSALRYWGCTIQAGAQICGAFGYAEDPSEMHQGVAEKFLPLSFSFLPFVPTDSSADWGRALNSLNQNTKGLLRNASKVYPSVSFDSAQKSVTLFMPGFDKSEIKLYQYRGGSELLIEAGDQRRVIKLPPAMQGKVGGAKFVDRNLVITIR

SEQ ID NO: 67267 - DNA, 954 bp, Triticum aestivum
  misc_feature (1)..(954): Ceres Seq. ID no. 14301680
agcattttgagaaaataaaattggacagagaaccatcaacccaaaaattgaggagaagcagcaggtgctccgcctctgccgccgccggtgacccgccgtagcagccgctcgccccgccgcccctgaccctcttcaatctactgttccattccaccccgacccaaaccaaacacacactaaacaccggcgccgacctctcctaggtttcgtcccatctcaccggagatggccggggcagcgtcgtcggtagcgcccgttctcgtcatctgcttgctttctcttgctctcttcctccacaggtgccggagctgtgaggctgtggagagagagaggacgttggcaatgatcaagccggatggtttgtctggcaactacaaggaaaaaatcaaggaggccatcttggggtctggatttgatatcatagaagaggcagttgtccatctggatgcagagagggcatcactcttctatgctgaacatgccgatagaagcttcttcaacagcctagtgaagtacatgacgagtggtccagtttgtgctatggttctggaaagccctgatgccatttcacgctggcgaaatttgatagggccaactgatgcaagaaaggctaaaacttcacaccctgacagcattagagcaatgtgcggcttggactctgagaaaaattgtgtgcatggttcagattcaccgcaatctgcagccagagagatttcgtttttcttcagagatgataaatctgaagcgctggaacatgacgagctgtagacaattggcatgtatcctcaaaaggcagataatttttgaagtttgatttgccccttccagctattagttgatgaaaatgtctgtacatcacatatgttgatctgacatcaaacttctccagttgatagcttcatcccttggttgccaaaggctgtgacggtgaaatcaccacagcgaaattttgtc

SEQ ID NO: 67268 - protein, 180 aa, Triticum aestivum
  peptide (1)..(180): Ceres Seq. ID no. 14301681
  misc_feature (35)..(108): Pfam Name: Nucleoside diphosphate kinase Pfam Description: Nucleoside diphosphate kinase
  misc_feature (35)..(171): Homolog of NCBI NO: 27363898 NR Description: Nucleoside diphosphate kinase [Vibrio vulnificus
  misc_feature (35)..(167): Homolog of NCBI NO: 15606713 NR Description: nucleoside diphosphate kinase [Aquifex aeolicus]
  misc_feature (35)..(167): Homolog of NCBI NO: 32700087 NR Description: Nucleoside diphosphate kinase homolog 5 (NDK-H 5)
  misc_feature (35)..(167): Homolog of NCBI NO: 18079349 NR Description: expressed in non-metastatic cells 5 [Mus
  misc_feature (33)..(167): Homolog of NCBI NO: 38181932 NR Description: Unknown (protein for MGC:75677) [Silurana
  misc_feature (40)..(134): Homolog of NCBI NO: 9665132 NR Description: Unknown protein [Arabidopsis thaliana]
  misc_feature (40)..(169): Homolog of NCBI NO: 15220107 NR Description: hypothetical protein [Arabidopsis thaliana]
  misc_feature (136)..(169): Homolog of NCBI NO: 8778480 NR Description: F1L3.7 [Arabidopsis thaliana]
  misc_feature (97)..(134): Homolog of NCBI NO: 8778480 NR Description: F1L3.7 [Arabidopsis thaliana]
  misc_feature (8)..(108): Homolog of NCBI NO: 8778480 NR Description: F1L3.7 [Arabidopsis thaliana]
MAGAASSVAPVLVICLLSLALFLHRCRSCEAVERERTLAMIKPDGLSGNYKEKIKEAILGSGFDIIEEAVVHLDAERASLFYAEHADRSFFNSLVKYMTSGPVCAMVLESPDAISRWRNLIGPTDARKAKTSHPDSIRAMCGLDSEKNCVHGSDSPQSAAREISFFFRDDKSEALEHDEL

SEQ ID NO: 67269 - protein, 141 aa, Triticum aestivum
  peptide (1)..(141): Ceres Seq. ID no. 14301682
  misc_feature (1)..(69): Pfam Name: Nucleoside diphosphate kinase Pfam Description: Nucleoside diphosphate kinase
  misc_feature (1)..(132): Homolog of NCBI NO: 27363898 NR Description: Nucleoside diphosphate kinase [Vibrio vulnificus
  misc_feature (1)..(128): Homolog of NCBI NO: 15606713 NR Description: nucleoside diphosphate kinase [Aquifex aeolicus]
  misc_feature (1)..(128): Homolog of NCBI NO: 32700087 NR Description: Nucleoside diphosphate kinase homolog 5 (NDK-H 5)
  misc_feature (1)..(128): Homolog of NCBI NO: 18079349 NR Description: expressed in non-metastatic cells 5 [Mus
  misc_feature (1)..(128): Homolog of NCBI NO: 38181932 NR Description: Unknown (protein for MGC:75677) [Silurana
  misc_feature (1)..(95): Homolog of NCBI NO: 9665132 NR Description: Unknown protein [Arabidopsis thaliana]
  misc_feature (1)..(130): Homolog of NCBI NO: 15220107 NR Description: hypothetical protein [Arabidopsis thaliana]
  misc_feature (97)..(130): Homolog of NCBI NO: 8778480 NR Description: F1L3.7 [Arabidopsis thaliana]
  misc_feature (58)..(95): Homolog of NCBI NO: 8778480 NR Description: F1L3.7 [Arabidopsis thaliana]
  misc_feature (1)..(69): Homolog of NCBI NO: 8778480 NR Description: F1L3.7 [Arabidopsis thaliana]
MIKPDGLSGNYKEKIKEAILGSGFDIIEEAVVHLDAERASLFYAEHADRSFFNSLVKYMTSGPVCAMVLESPDAISRWRNLIGPTDARKAKTSHPDSIRAMCGLDSEKNCVHGSDSPQSAAREISFFFRDDKSEALEHDEL

SEQ ID NO: 67270 - DNA, 1619 bp, Triticum aestivum
  misc_feature (1)..(1619): Ceres Seq. ID no. 15170659
aggttagggaaacgctaccaaatccctccctccgctctcttcttcctcgccgcggtgattctttcctcactccccaccccagcccgctcggcgcttgctcactactgatctcacggggagggcccggcggccaatcgccgcctccagcatcgtcgagcctcgcgcctcacgcctcctcctctcactcccgagccggcaaccgcggcagcaggagcggcgagaggagggcaaggcgaagacccgagaggacgcaatggagtacagaagagtgaaggatcaggagagttatgacgccatatctcagaaggacatagaaagccctgatgggaggtctctttctagcactgcagcaacttccccccttggcaccgtaggaggttcgaagggcaagaatagctggaagcaaaagtctattgtaacaattgcattgacattactaacaagttcccaggcaatactgattgtgtggtcaaaaagagctggaaagtatgaatatagtgtcacaacagcaaatttttcggtggaagctttaaaatgtctattatcacttctagccctgtacagaacatggaacagtcaaggtgttacagaagataataggttaagtacatcatttgatgaagttagtgtttatcctatccctgccgtactttacatggtaaagaatctattgcagtattacatcttcgcctatgtggatgcaccagcttaccagatcctgaagaacctgaatattatcagcactggtgtcttataccgtatcattttaaagaaaaaattaagtgaaattcagtgggctgcatttattctcttatgtgctggctgcactacggctcagctaaacccctcatcagaccatgttcttcaaacgccaattcaaggttggatgatggccattgtgatggctcttctaagtggttttgctggggtatacacagaagctataataaaaaaacgtccttcgagaaacatcaatgtgcagaatttctggctgtacatttttggaatgctcttcaacttagttgccatttgtgttcaggactttgatgctgtcatgaacaaaggcttttttcatggctactcatttattacacttctgatgattcttaaccatgcactcagtggcattgctgtatcaatggtgatgaagtatgctgacaatattgtcaaggtgtattcaacttcagtcgcaatgcttctgacggcaattgtatcggtcttcttgttcggcttcaacctatcccttgcattcttcctcggatctacggtcgtttcaatctcggtgtatctgcattctgtcgggaagccacagcagcagaaatgagttcctcccccatctttctttccaagattggcagcgagcgcctcgatgcggcgtcgtggaacggattatggacggcacggcagcatcgaaggggaataggcttcgttctaggtcatggcactgttgttgaggcaaggcgattcgcccggtgacatattcaggttcaccatccgtttgaactgcttctttggtggcatacctggctcacttttgcttcgtgaccagggtggatgacatacgctagtttcttatctgggtaggccggcgagaatgcgagacgctggctatcttcttc

SEQ ID NO: 67271 - protein, 356 aa, Triticum aestivum
  peptide (1)..(356): Ceres Seq. ID no. 15170660
  misc_feature (115)..(336): Pfam Name: Nucleotide-sugar transporter Pfam Description: Nucleotide-sugar transporter
  misc_feature (59)..(356): Homolog of NCBI NO: 23559235 NR Description: CMP-sialic acid transporter [Oryzias latipes]
  misc_feature (29)..(348): Homolog of NCBI NO: 39579880 NR Description: Hypothetical protein CBG24372 [Caenorhabditis
  misc_feature (59)..(354): Homolog of NCBI NO: 18252814 NR Description: CMP-sialic acid transporter [Canis familiaris]
  misc_feature (59)..(354): Homolog of NCBI NO: 6755558 NR Description: solute carrier family 35 (CMP-sialic acid
  misc_feature (59)..(354): Homolog of NCBI NO: 5453621 NR Description: solute carrier family 35 (CMP-sialic acid
  misc_feature (252)..(351): Homolog of NCBI NO: 7488414 NR Description: UDP-galactose transport protein homolog
  misc_feature (66)..(347): Homolog of NCBI NO: 10177360 NR Description: CMP-sialic acid transporter-like protein
  misc_feature (55)..(347): Homolog of NCBI NO: 18422134 NR Description: CMP-sialic acid transporter-related protein
  misc_feature (1)..(289): Homolog of NCBI NO: 30690310 NR Description: hypothetical protein [Arabidopsis thaliana]
  misc_feature (1)..(356): Homolog of NCBI NO: 34393556 NR Description: putative CMP-sialic acid transporter
MEYRRVKDQESYDAISQKDIESPDGRSLSSTAATSPLGTVGGSKGKNSWKQKSIVTIALTLLTSSQAILIVWSKRAGKYEYSVTTANFSVEALKCLLSLLALYRTWNSQGVTEDNRLSTSFDEVSVYPIPAVLYMVKNLLQYYIFAYVDAPAYQILKNLNIISTGVLYRIILKKKLSEIQWAAFILLCAGCTTAQLNPSSDHVLQTPIQGWMMAIVMALLSGFAGVYTEAIIKKRPSRNINVQNFWLYIFGMLFNLVAICVQDFDAVMNKGFFHGYSFITLLMILNHALSGIAVSMVMKYADNIVKVYSTSVAMLLTAIVSVFLFGFNLSLAFFLGSTVVSISVYLHSVGKPQQQK

SEQ ID NO: 67272 - protein, 222 aa, Triticum aestivum
  peptide (1)..(222): Ceres Seq. ID no. 15170661
  misc_feature (1)..(202): Pfam Name: Nucleotide-sugar transporter Pfam Description: Nucleotide-sugar transporter
  misc_feature (1)..(222): Homolog of NCBI NO: 23559235 NR Description: CMP-sialic acid transporter [Oryzias latipes]
  misc_feature (1)..(214): Homolog of NCBI NO: 39579880 NR Description: Hypothetical protein CBG24372 [Caenorhabditis
  misc_feature (1)..(220): Homolog of NCBI NO: 18252814 NR Description: CMP-sialic acid transporter [Canis familiaris]
  misc_feature (1)..(220): Homolog of NCBI NO: 6755558 NR Description: solute carrier family 35 (CMP-sialic acid
  misc_feature (1)..(220): Homolog of NCBI NO: 5453621 NR Description: solute carrier family 35 (CMP-sialic acid
  misc_feature (118)..(217): Homolog of NCBI NO: 7488414 NR Description: UDP-galactose transport protein homolog
  misc_feature (1)..(213): Homolog of NCBI NO: 10177360 NR Description: CMP-sialic acid transporter-like protein
  misc_feature (1)..(213): Homolog of NCBI NO: 18422134 NR Description: CMP-sialic acid transporter-related protein
  misc_feature (1)..(155): Homolog of NCBI NO: 30690310 NR Description: hypothetical protein [Arabidopsis thaliana]
  misc_feature (1)..(222): Homolog of NCBI NO: 34393556 NR Description: putative CMP-sialic acid transporter
MVKNLLQYYIFAYVDAPAYQILKNLNIISTGVLYRIILKKKLSEIQWAAFILLCAGCTTAQLNPSSDHVLQTPIQGWMMAIVMALLSGFAGVYTEAIIKKRPSRNINVQNFWLYIFGMLFNLVAICVQDFDAVMNKGFFHGYSFITLLMILNHALSGIAVSMVMKYADNIVKVYSTSVAMLLTAIVSVFLFGFNLSLAFFLGSTVVSISVYLHSVGKPQQQK

SEQ ID NO: 67273 - DNA, 2061 bp, Triticum aestivum
  misc_feature (1)..(2061): Ceres Seq. ID no. 15169557
atcgtaggcccggcgcttcccccctcattctgttgtgcccaggatccttcgcgcctgctgcgatctggattcggatgatcaatcgagcagcttttcgtccggttcttcctggatgatcctctatctggttggggatttttcttcgatcggcttgtcctcttaagagaaagaacgctgcaatttctttgacacacatctccaagttcatcattctctgtctctgctcaaccaataatacagacttcagtcacacataaagaaatgggtcacaccattggagttgcagatgatgaaatagcagacataccatgttcagatgcttcaccaattctgaccgaatatcacatcacagtccctacccttcacgatggactaatgcaaggggcagaccagcacgagagacggcttctggatgtcctcaaagcaacgccttcagtgcaatggctgaaggacatcaacgtctgcggtccactgggaaaaattcagctgccatcgatcggcgtccaccgctacctccatgtccacttcatcagaacagtcgactggagctcactgctcgccatctgcaagaaccacctcaagcatcctctcaacatcgccctactcatctggctgctatgcgtcgccgccgccggcgccatgctaggactgctcctgttggggctgctgaacaaggcattcccttccagggccttgaggcaccactggatagagatcgacaaccagatcctcaacgccctcttcacgctcatgagcatctaccagcatcccatcctcgtccaccacctcgttctcctctgccggtggcggccggaggacgccgcccagctaaggaaggtgtactgcaagaatggcgcccgccgtcccaacgagcgagcgcacatgtccttcgtggtggccctcctccacgtcacctgcatctcgcagtacatggagtgcagcctctactggggctacccaagcaggtcgcgctccgagctcgcggagaacttcttcttcatcctcggcgtcgccgcgccggtcgtcgccggcgctcacgcggtgtacagccctctaggcagagacgacgacgccgccgccgcctcctgcgaagagaccaagcagctccacgcagccggagccgaagaatcgccggaagaaatgacggtggtcggcaacccgatgtgggcgggggagctgctggactgcggcgaggacccggcggcgtgctacctgtcgttcctctgcaccttctgcgtgttcggctggaacatggagcggctggggctgggcaacatgtacatgcacacggccatgttcctgctgctgtgcgtcgcgcccttctgggtgttcaacgtcacggcgctcagcatccacgactacgccctcagcgatgccttcggcgccgccggggtggtgctctgcttcctcgggctcctgtacgggggcttctggaggatgcagatgaggaagcggctcgggctgccccggagcaggtggtgctgcggctcgtcgtcgctgacggactacgcgcagtggctcctctgctggccgtgcgcgctcgcgcaggaggtgcgcacggcgaacctgtacgacccgaggggcgacggcggtttctacgggaagctggtggacggcggtgacccggagcgagggccggacgtgccggtctccgctgaagtgcaggaggtggtcggcggtgttgtcaatccgacggtggacggcgagatgatcccgcccgtgcagccggtggtggagtctggacggcagaggcaagccggccacgaagaaattgttgcaaatggcagtagcgtccagctcaaaagttgaccgcagctgttggatggtgactgatgctgtagagtattcgcaagctgacggatatattcttcctttttgggggatcgatgtcaccattttgacattgttatgctcctggtttgtcatgctctgcacgggactttaggtcgttataagtcattagttagtccagttttattcagatcagctaccttgacactccaacagatgtcatctttcatcgattcttttcgtattgcacgttactggaagaagaagaac

SEQ ID NO: 67274 - protein, 515 aa, Triticum aestivum
  peptide (1)..(515): Ceres Seq. ID no. 15169558
  misc_feature (299)..(432): Pfam Name: Protein of unknown function, DUF614 Pfam Description: Protein of unknown function, DUF614
  misc_feature (280)..(448): Homolog of NCBI NO: 18391271 NR Description: expressed protein [Arabidopsis thaliana]
  misc_feature (91)..(278): Homolog of NCBI NO: 15228414 NR Description: expressed protein [Arabidopsis thaliana]
  misc_feature (91)..(311): Homolog of NCBI NO: 10176747 NR Description: gb|AAF01523.1~gene_id:K18I23.15~strong similarity
  misc_feature (91)..(438): Homolog of NCBI NO: 15239077 NR Description: hypothetical protein [Arabidopsis thaliana]
  misc_feature (278)..(438): Homolog of NCBI NO: 17064778 NR Description: Unknown protein [Arabidopsis thaliana]
  misc_feature (91)..(281): Homolog of NCBI NO: 17064778 NR Description: Unknown protein [Arabidopsis thaliana]
  misc_feature (9)..(515): Homolog of NCBI NO: 34907898 NR Description: P0439E11.13 [Oryza sativa (japonica
MGHTIGVADDEIADIPCSDASPILTEYHITVPTLHDGLMQGADQHERRLLDVLKATPSVQWLKDINVCGPLGKIQLPSIGVHRYLHVHFIRTVDWSSLLAICKNHLKHPLNIALLIWLLCVAAAGAMLGLLLLGLLNKAFPSRALRHHWIEIDNQILNALFTLMSIYQHPILVHHLVLLCRWRPEDAAQLRKVYCKNGARRPNERAHMSFVVALLHVTCISQYMECSLYWGYPSRSRSELAENFFFILGVAAPVVAGAHAVYSPLGRDDDAAAASCEETKQLHAAGAEESPEEMTVVGNPMWAGELLDCGEDPAACYLSFLCTFCVFGWNMERLGLGNMYMHTAMFLLLCVAPFWVFNVTALSIHDYALSDAFGAAGVVLCFLGLLYGGFWRMQMRKRLGLPRSRWCCGSSSLTDYAQWLLCWPCALAQEVRTANLYDPRGDGGFYGKLVDGGDPERGPDVPVSAEVQEVVGGVVNPTVDGEMIPPVQPVVESGRQRQAGHEEIVANGSSVQLKS

SEQ ID NO: 67275 - protein, 477 aa, Triticum aestivum
  peptide (1)..(477): Ceres Seq. ID no. 15169559
  misc_feature (261)..(394): Pfam Name: Protein of unknown function, DUF614 Pfam Description: Protein of unknown function, DUF614
  misc_feature (242)..(410): Homolog of NCBI NO: 18391271 NR Description: expressed protein [Arabidopsis thaliana]
  misc_feature (53)..(240): Homolog of NCBI NO: 15228414 NR Description: expressed protein [Arabidopsis thaliana]
  misc_feature (53)..(273): Homolog of NCBI NO: 10176747 NR Description: gb|AAF01523.1~gene_id:K18I23.15~strong similarity
  misc_feature (53)..(400): Homolog of NCBI NO: 15239077 NR Description: hypothetical protein [Arabidopsis thaliana]
  misc_feature (240)..(400): Homolog of NCBI NO: 17064778 NR Description: Unknown protein [Arabidopsis thaliana]
  misc_feature (53)..(243): Homolog of NCBI NO: 17064778 NR Description: Unknown protein [Arabidopsis thaliana]
  misc_feature (1)..(477): Homolog of NCBI NO: 34907898 NR Description: P0439E11.13 [Oryza sativa (japonica
MQGADQHERRLLDVLKATPSVQWLKDINVCGPLGKIQLPSIGVHRYLHVHFIRTVDWSSLLAICKNHLKHPLNIALLIWLLCVAAAGAMLGLLLLGLLNKAFPSRALRHHWIEIDNQILNALFTLMSIYQHPILVHHLVLLCRWRPEDAAQLRKVYCKNGARRPNERAHMSFVVALLHVTCISQYMECSLYWGYPSRSRSELAENFFFILGVAAPVVAGAHAVYSPLGRDDDAAAASCEETKQLHAAGAEESPEEMTVVGNPMWAGELLDCGEDPAACYLSFLCTFCVFGWNMERLGLGNMYMHTAMFLLLCVAPFWVFNVTALSIHDYALSDAFGAAGVVLCFLGLLYGGFWRMQMRKRLGLPRSRWCCGSSSLTDYAQWLLCWPCALAQEVRTANLYDPRGDGGFYGKLVDGGDPERGPDVPVSAEVQEVVGGVVNPTVDGEMIPPVQPVVESGRQRQAGHEEIVANGSSVQLKS

SEQ ID NO: 67276 - protein, 437 aa, Triticum aestivum
  peptide (1)..(437): Ceres Seq. ID no. 15169560
MFRCFTNSDRISHHSPYPSRWTNARGRPARETASGCPQSNAFSAMAEGHQRLRSTGKNSAAIDRRPPLPPCPLHQNSRLELTARHLQEPPQASSQHRPTHLAAMRRRRRRHARTAPVGAAEQGIPFQGLEAPLDRDRQPDPQRPLHAHEHLPASHPRPPPRSPLPVAAGGRRPAKEGVLQEWRPPSQRASAHVLRGGPPPRHLHLAVHGVQPLLGLPKQVALRARGELLLHPRRRRAGRRRRSRGVQPSRQRRRRRRRLLRRDQAAPRSRSRRIAGRNDGGRQPDVGGGAAGLRRGPGGVLPVVPLHLLRVRLEHGAAGAGQHVHAHGHVPAAVRRALLGVQRHGAQHPRLRPQRCLRRRRGGALLPRAPVRGLLEDADEEAARAAPEQVVLRLVVADGLRAVAPLLAVRARAGGAHGEPVRPEGRRRFLREAGGRR

SEQ ID NO: 67277 - DNA, 1059 bp, Triticum aestivum
  misc_feature (1)..(1059): Ceres Seq. ID no. 14307883
acttgtagtggcccactgtgaaaggccagcgtctggctcctctgctcctcctcatcccctccgccgccgcgctgctgctcaaccagaacggagagcttgcaagatcagcgttgcggtccacacgctcggccccgcaaggtcgccgcctctgtgaaggccgccccaccgaataagaagaaggggaagaaaccaaacctcgtcatgaagagcttccctgtggccggcggccgcagcgtctccctcgccctcttctccgatgtctccaacagccgggagctcctagatctgatgcagtcagggaagctggagccggaggccgcttttctcaatgcatcactggtgccgggcgtgttcccggtcctcgcggcggcgcacaaagcgctgctctccaagtcgagggagtcgctgaccacgagaaccctgcactcggagcttgtctataattgctctggctcgaagcatataactgagtccctaaagcggtgcggtatcgctgatgacacgcagtatatccttgcggctcggtttgatgcttcagatgaagagatgaaagctctggaaaagctcatcagcggaaccgagattgatctgtcggaattggagacaagagcagaccaaccaaagattctgaagcaatacaaaataactccacaagaattatcaatatctacactgccagaggcaatcgtgtgcaggattgctgctcgagacgccctctgaggtcttaaaaacgatggccaggacgttctgcagctgtgtgtgtcaaattctttggacgatcaccgcatctgccgcacctcctgtcgatggtcaagctcgtggcggcaggatgtttcaactcatgaacttaggaattgcattacggtaacattcagtcctggatgctgtagcgacaactgaataatatgtatggtcacaggctcacggcttgagtgtttctaagatcacttcatcaagatttaatgcaagcaaccttcagttgatatcgcgatgttgactcggatctgttgtttcggtgacactgcagaacatgagtaaaatcagcgaaatatgtgtggc

SEQ ID NO: 67278 - protein, 172 aa, Triticum aestivum
  peptide (1)..(172): Ceres Seq. ID no. 14307884
  misc_feature (12)..(172): Homolog of NCBI NO: 12001980 NR Description: My019 protein [Homo sapiens]
  misc_feature (12)..(172): Homolog of NCBI NO: 27712192 NR Description: similar to RIKEN cDNA 1810034M08
  misc_feature (12)..(172): Homolog of NCBI NO: 7705590 NR Description: CGI-121 protein
  misc_feature (10)..(170): Homolog of NCBI NO: 17542786 NR Description: i-121 L1 (4F949) [Caenorhabditis elegans]
  misc_feature (10)..(170): Homolog of NCBI NO: 39588478 NR Description: Hypothetical protein CBG20111 [Caenorhabditis
  misc_feature (12)..(172): Homolog of NCBI NO: 28175286 NR Description: Unknown (protein for MGC:53277) [Xenopus laevis]
  misc_feature (13)..(172): Homolog of NCBI NO: 39794363 NR Description: Unknown (protein for MGC:75657) [Silurana
  misc_feature (1)..(133): Homolog of NCBI NO: 22329156 NR Description: hypothetical protein [Arabidopsis thaliana]
  misc_feature (1)..(172): Homolog of NCBI NO: 38454120 NR Description: At4g34412 [Arabidopsis thaliana]
  misc_feature (1)..(172): Homolog of NCBI NO: 34895710 NR Description: P0019D06.12 [Oryza sativa (japonica
MKSFPVAGGRSVSLALFSDVSNSRELLDLMQSGKLEPEAAFLNASLVPGVFPVLAAAHKALLSKSRESLTTRTLHSELVYNCSGSKHITESLKRCGIADDTQYILAARFDASDEEMKALEKLISGTEIDLSELETRADQPKILKQYKITPQELSISTLPEAIVCRIAARDAL

SEQ ID NO: 67279 - protein, 143 aa, Triticum aestivum
  peptide (1)..(143): Ceres Seq. ID no. 14307885
  misc_feature (1)..(143): Homolog of NCBI NO: 12001980 NR Description: My019 protein [Homo sapiens]
  misc_feature (1)..(143): Homolog of NCBI NO: 27712192 NR Description: similar to RIKEN cDNA 1810034M08
  misc_feature (1)..(143): Homolog of NCBI NO: 7705590 NR Description: CGI-121 protein
  misc_feature (1)..(141): Homolog of NCBI NO: 17542786 NR Description: i-121 L1 (4F949) [Caenorhabditis elegans]
  misc_feature (1)..(141): Homolog of NCBI NO: 39588478 NR Description: Hypothetical protein CBG20111 [Caenorhabditis
  misc_feature (1)..(143): Homolog of NCBI NO: 28175286 NR Description: Unknown (protein for MGC:53277) [Xenopus laevis]
  misc_feature (1)..(143): Homolog of NCBI NO: 39794363 NR Description: Unknown (protein for MGC:75657) [Silurana
  misc_feature (1)..(104): Homolog of NCBI NO: 22329156 NR Description: hypothetical protein [Arabidopsis thaliana]
  misc_feature (1)..(143): Homolog of NCBI NO: 38454120 NR Description: At4g34412 [Arabidopsis thaliana]
  misc_feature (1)..(143): Homolog of NCBI NO: 34895710 NR Description: P0019D06.12 [Oryza sativa (japonica
MQSGKLEPEAAFLNASLVPGVFPVLAAAHKALLSKSRESLTTRTLHSELVYNCSGSKHITESLKRCGIADDTQYILAARFDASDEEMKALEKLISGTEIDLSELETRADQPKILKQYKITPQELSISTLPEAIVCRIAARDAL

SEQ ID NO: 67280 - DNA, 2403 bp, Triticum aestivum
  misc_feature (1)..(2403): Ceres Seq. ID no. 15178728
aaaaagctaggagaggtccaagataccagctggaccttggttccctttttttttttcttggctcattgtaaggtcctgccagccatctgcgttcgtggcgaccggcgcaagagagcgtggggttttgggagcattagaatcaatcatctggttttatttccttggtgcgctggggcgaaattgtttcaggtgccgtgttcatggcccaagggtattgattggtggggatcccggcgcttgcgacggttttgtgcaaggcagcctgttgcttcctgtaaatcagaaaaaggcaagtcttggattttttgcgatcacaatctcaggtccctagaaatcaagagaagcaaccgtaatcgccggagttggtgaggcaaggggttgcctggattttcgcaagaacaggggcgttacagattgaggaatccctccggtcacttccagttgattattgggcttggacatggagaggcagaccagcttccgcctgggcgcgctggagaagctcaagagcttccgggggatggacaacttccggcggagcaaggacagccccggcaagcgcggtgacacgccgctccacctcgcggcgagggccggcaacgtctccaacgtccagaggatccttgccgaatccggccaggagatggccggcgagctggccgcccggccgaaccaggacggggagacggcgctgtacgtggccgccgacaaggggcacacggaggtggtgcgcgagatcttgaaggtgtctgatatgcagacggcggggatcaaggccagcaacagcttcgacgccttccacatcgcggcgaagcagggccatctggatgttctgaaggagctgctgcaggcctttcctgctcttgctatgactacaaactctgtaaacgccacagctttggaaactgctgccattcagggtcacattgatattgtcaacctcctactgaaaactgatgctagccttgccaaaattgcgagaaataatgggaaaacagttttgcattccgcggcgaggatgggccatgtggaagttgtaagatccttgttaaataaggatccagggattggtttaagaacagacaagaaggggcagacggcgctgcatatggcgtccaaaggaacgaatgctgaaattgtggttgagttgttgaagcctgatttctcagttagccatctagaagataacaaggggaacaggccactgcatgttgcgactcggaagggcaatatcgttatagtgcagactctactgtcagttgaggggattgatgtcaatgcagttaacaggtctggagagactgctcttgccattgctgagaagatgaacaaccaagaactcgtcaacattctgagagacgccggcggcgtcgtaactgcaaaagagccagtgcatcctgcaaacccggcaaagcagctgaagcaaaccgtgagtgatatcaggcacgacgtccagtcccagatcaagcagacacggcagaccaagatgcaggtccagaagatcaagagcaggctggagaagctccacatcggcggcctgaacaacgccatcaactccaacaccgtggtggcggtgctcatcgccaccgtcgccttcgctgccatattcaccgtgcccggcaacttcgtggaggacatgagccaggcgccccccggcatgtcgctggggcaggcgtacgtggccagcgaaccggccttcataatgttcctggtgttcgactcgctggcgctcttcatctcgctcgccgtcgtggtcgtccagacgtcgctgatcgtggtggagcagaaggccaagcggaggatggtcttcgtgatgaacaagctcatgtggctggcgtgcctcttcatctccgcggcgttcatagcgctgacctacgtcgtggtcggccgcggcgactggtggctggcctggtgcaccatggtgatcggcgcggtgatcatgctcaccaccctcggctccatgtgctactgcatcgtggcgcacaggatggaggagaagagcatgaggaagatcaggaaggcctccgcgagccagtcccggtcatggtccatgccggtcgactcggacccggagctgatcaacaccgagtacaagaagatgtacgcgttgtaggtcagggtgacgatcgcgtcgcggggatctgtacatagttattatcatcaaggcgctgtttcgctcgagtctcttcgatcgaatgatgaataacgttcagtggggttttgacattttgacatgaaccgaaggtacttttgctgctgaaacaatatcacctcagctgtgcttgtattgcagcctggatggagataaggcacctggatctgtctgttgcatgctgtatggactcgtggtagtccttgtaagtggcttcttgtggatgaaccaaacccaattctcaccggatc

SEQ ID NO: 67281 - protein, 550 aa, Triticum aestivum
  peptide (1)..(550): Ceres Seq. ID no. 15178729
  misc_feature (176)..(208): Pfam Name: Ankyrin repeat Pfam Description: Ankyrin repeat
  misc_feature (32)..(550): Homolog of NCBI NO: 34908074 NR Description: P0506B12.26 [Oryza sativa (japonica
  misc_feature (28)..(550): Homolog of NCBI NO: 21553618 NR Description: ankyrin-like protein [Arabidopsis thaliana]
  misc_feature (28)..(550): Homolog of NCBI NO: 15230470 NR Description: ankyrin repeat protein family [Arabidopsis
  misc_feature (27)..(550): Homolog of NCBI NO: 30679697 NR Description: ankyrin repeat protein family [Arabidopsis
  misc_feature (27)..(550): Homolog of NCBI NO: 11357168 NR Description: ankyrin-like protein - Arabidopsis thaliana
  misc_feature (27)..(550): Homolog of NCBI NO: 15238604 NR Description: ankyrin repeat protein family [Arabidopsis
  misc_feature (25)..(550): Homolog of NCBI NO: 24796797 NR Description: putative ankyrin repeat containing protein
  misc_feature (28)..(550): Homolog of NCBI NO: 15222993 NR Description: ankyrin repeat protein family [Arabidopsis
  misc_feature (1)..(550): Homolog of NCBI NO: 15220595 NR Description: ankyrin repeat protein family [Arabidopsis
  misc_feature (1)..(550): Homolog of NCBI NO: 15225141 NR Description: ankyrin repeat protein family [Arabidopsis
MERQTSFRLGALEKLKSFRGMDNFRRSKDSPGKRGDTPLHLAARAGNVSNVQRILAESGQEMAGELAARPNQDGETALYVAADKGHTEVVREILKVSDMQTAGIKASNSFDAFHIAAKQGHLDVLKELLQAFPALAMTTNSVNATALETAAIQGHIDIVNLLLKTDASLAKIARNNGKTVLHSAARMGHVEVVRSLLNKDPGIGLRTDKKGQTALHMASKGTNAEIVVELLKPDFSVSHLEDNKGNRPLHVATRKGNIVIVQTLLSVEGIDVNAVNRSGETALAIAEKMNNQELVNILRDAGGVVTAKEPVHPANPAKQLKQTVSDIRHDVQSQIKQTRQTKMQVQKIKSRLEKLHIGGLNNAINSNTVVAVLIATVAFAAIFTVPGNFVEDMSQAPPGMSLGQAYVASEPAFIMFLVFDSLALFISLAVVVVQTSLIVVEQKAKRRMVFVMNKLMWLACLFISAAFIALTYVVVGRGDWWLAWCTMVIGAVIMLTTLGSMCYCIVAHRMEEKSMRKIRKASASQSRSWSMPVDSDPELINTEYKKMYAL

SEQ ID NO: 67282 - protein, 530 aa, Triticum aestivum
  peptide (1)..(530): Ceres Seq. ID no. 15178730
  misc_feature (156)..(188): Pfam Name: Ankyrin repeat Pfam Description: Ankyrin repeat
  misc_feature (12)..(530): Homolog of NCBI NO: 34908074 NR Description: P0506B12.26 [Oryza sativa (japonica
  misc_feature (8)..(530): Homolog of NCBI NO: 21553618 NR Description: ankyrin-like protein [Arabidopsis thaliana]
  misc_feature (8)..(530): Homolog of NCBI NO: 15230470 NR Description: ankyrin repeat protein family [Arabidopsis
  misc_feature (7)..(530): Homolog of NCBI NO: 30679697 NR Description: ankyrin repeat protein family [Arabidopsis
  misc_feature (7)..(530): Homolog of NCBI NO: 11357168 NR Description: ankyrin-like protein - Arabidopsis thaliana
  misc_feature (7)..(530): Homolog of NCBI NO: 15238604 NR Description: ankyrin repeat protein family [Arabidopsis
  misc_feature (5)..(530): Homolog of NCBI NO: 24796797 NR Description: putative ankyrin repeat containing protein
  misc_feature (8)..(530): Homolog of NCBI NO: 15222993 NR Description: ankyrin repeat protein family [Arabidopsis
  misc_feature (1)..(530): Homolog of NCBI NO: 15220595 NR Description: ankyrin repeat protein family [Arabidopsis
  misc_feature (1)..(530): Homolog of NCBI NO: 15225141 NR Description: ankyrin repeat protein family [Arabidopsis
MDNFRRSKDSPGKRGDTPLHLAARAGNVSNVQRILAESGQEMAGELAARPNQDGETALYVAADKGHTEVVREILKVSDMQTAGIKASNSFDAFHIAAKQGHLDVLKELLQAFPALAMTTNSVNATALETAAIQGHIDIVNLLLKTDASLAKIARNNGKTVLHSAARMGHVEVVRSLLNKDPGIGLRTDKKGQTALHMASKGTNAEIVVELLKPDFSVSHLEDNKGNRPLHVATRKGNIVIVQTLLSVEGIDVNAVNRSGETALAIAEKMNNQELVNILRDAGGVVTAKEPVHPANPAKQLKQTVSDIRHDVQSQIKQTRQTKMQVQKIKSRLEKLHIGGLNNAINSNTVVAVLIATVAFAAIFTVPGNFVEDMSQAPPGMSLGQAYVASEPAFIMFLVFDSLALFISLAVVVVQTSLIVVEQKAKRRMVFVMNKLMWLACLFISAAFIALTYVVVGRGDWWLAWCTMVIGAVIMLTTLGSMCYCIVAHRMEEKSMRKIRKASASQSRSWSMPVDSDPELINTEYKKMYAL

SEQ ID NO: 67283 - protein, 489 aa, Triticum aestivum
  peptide (1)..(489): Ceres Seq. ID no. 15178731
  misc_feature (115)..(147): Pfam Name: Ankyrin repeat Pfam Description: Ankyrin repeat
  misc_feature (1)..(489): Homolog of NCBI NO: 34908074 NR Description: P0506B12.26 [Oryza sativa (japonica
  misc_feature (1)..(489): Homolog of NCBI NO: 21553618 NR Description: ankyrin-like protein [Arabidopsis thaliana]
  misc_feature (1)..(489): Homolog of NCBI NO: 15230470 NR Description: ankyrin repeat protein family [Arabidopsis
  misc_feature (1)..(489): Homolog of NCBI NO: 30679697 NR Description: ankyrin repeat protein family [Arabidopsis
  misc_feature (1)..(489): Homolog of NCBI NO: 11357168 NR Description: ankyrin-like protein - Arabidopsis thaliana
  misc_feature (1)..(489): Homolog of NCBI NO: 15238604 NR Description: ankyrin repeat protein family [Arabidopsis
  misc_feature (1)..(489): Homolog of NCBI NO: 24796797 NR Description: putative ankyrin repeat containing protein
  misc_feature (1)..(489): Homolog of NCBI NO: 15222993 NR Description: ankyrin repeat protein family [Arabidopsis
  misc_feature (1)..(489): Homolog of NCBI NO: 15220595 NR Description: ankyrin repeat protein family [Arabidopsis
  misc_feature (1)..(489): Homolog of NCBI NO: 15225141 NR Description: ankyrin repeat protein family [Arabidopsis
MAGELAARPNQDGETALYVAADKGHTEVVREILKVSDMQTAGIKASNSFDAFHIAAKQGHLDVLKELLQAFPALAMTTNSVNATALETAAIQGHIDIVNLLLKTDASLAKIARNNGKTVLHSAARMGHVEVVRSLLNKDPGIGLRTDKKGQTALHMASKGTNAEIVVELLKPDFSVSHLEDNKGNRPLHVATRKGNIVIVQTLLSVEGIDVNAVNRSGETALAIAEKMNNQELVNILRDAGGVVTAKEPVHPANPAKQLKQTVSDIRHDVQSQIKQTRQTKMQVQKIKSRLEKLHIGGLNNAINSNTVVAVLIATVAFAAIFTVPGNFVEDMSQAPPGMSLGQAYVASEPAFIMFLVFDSLALFISLAVVVVQTSLIVVEQKAKRRMVFVMNKLMWLACLFISAAFIALTYVVVGRGDWWLAWCTMVIGAVIMLTTLGSMCYCIVAHRMEEKSMRKIRKASASQSRSWSMPVDSDPELINTEYKKMYAL

SEQ ID NO: 67284 - DNA, 2162 bp, Triticum aestivum
  misc_feature (1)..(2162): Ceres Seq. ID no. 15170171
cccagatctccccgcccgcctctccctcgctccccaccccgcgccgcaatggccgacgagcccctcgacgcgtcgccggcgcccgcggcccccgctgcggcgtcggaccccgccccctcccccgtgcccgccccagcccccgcacccgcgcccgcggcgaccgcatccctggtcctccggccgcggcgggagtcgttcgagcacggcctcctgccgatccccaagctggtcttcccggagggcacgctcacgcaaaccctagcgcagctcagggcgaagctcgcggcgccgggggccgggcgcgtgggcgccgcggcgctcgcggaggcgctgcagatccccgccgaccaggccgcgctcgcgctcgggacgctcgccgcggtcctccccggcgaaggcgacggccccgccgcggacggcgcgtgggcggccgacctccgcgacgtgctcctcttcctctacatccagtcctacaagcgcctcgtgccgcgcgcccacaaggactcgccgtccgtcgccgacgtctggccctccacctccgccttcgacggctatctctccgcgctgtccccgatccagcttgtacgcagtaatagccgtcggtttatgccttcgcaagcagatgaagaagctcatcagttatcttatttacaaaagcatatggccaatgttttaactcttttggcagattctgttgatggagagggtgatgaatctatggtactgacaatggagacttttgagcaccttggattcttgttgcagttctccgaaggaactcctttaagccaagctgctccattttttgcgaattctgatccagacatgcctgctgctcctgttccggctactcaagttcatgactggattctgcagaatatagcttcttccttggaatatactgcagaaaaagctataaccaaggaaaacaatcaacggagtgtatctgatcctgatgtggcaatggctgatgctgtcacaaatacaagaatccagagcagctcatcaactggtgcttctgtgcaaaacaatcctggatactaccgaaatacatcttttgtggagggtatctccaaaacttctgttgtcaaacacgggtctgatattaaagggcattcaataaaggttttgaactgccatgattctgttatctacatcctagcccctctcaaatatgctacggtgtatggatgttctgacacaactgttgttcttggtgctattggcaaggtggtaaaagttgagcattgtgaacgtgtgcaaatagttgtggcttctaaaagaatttgtattgccaattgtcgagaatgtatcttctacttgggagtaaatcaccaaccacttatcgtgggggacaaccataaattacaagttgctccatttaatacttgttatccacaacttggggagcatttggcacaagttggtgtggaccctaacgtcaacaagtgggatcaaccttttgtgctgggagttgttgatccacacgattcattatctcatcctgcaggggtttctgatgtccaagccgagtctgccacttgtctagatcctgatctattcacagacttcatgattcctagttggtttgaggcagaaggtcctaccaaatacaatccatttacgttacctgaagtttactgggcatcacagaggaaaaagaatgcttccctggaagacattcaaaagaatatacgagagctggagcttgatgataaccggaaaaaagaattggcatgtgcccttcatgctcaattcaaggactggctatatgcttcaggaaatatccgccagctttactgtttgcaaggcgaataagcatatatgatcttcatccgtaagtgcttaggcacacctgtgaagattgtgcatcctttgcccggtccccttccatagtccagtcctgtccatccgaccgcatcatccacgctgacttctcgtcgactgagctgattcaaccatgtagtgtttgtcaatgtaaaagaaataatgtactgcccattttgtctattaattttgatcggcttccccttgtgttggttgtggttggtgcaaggatctaaatgggggtttggtagtttcatatttatatcctttgtaacatatacgaccatgaaagcggttactcgattctttagtggaaataaacatttttttgctcg

SEQ ID NO: 67285 - protein, 605 aa, Triticum aestivum
  peptide (1)..(605): Ceres Seq. ID no. 15170172
  misc_feature (4)..(61): Homolog of NCBI NO: 30387315 NR Description: unknown [Choristoneura fumiferana MNPV]
  misc_feature (278)..(593): Homolog of NCBI NO: 29250580 NR Description: GLP_254_3153_1495 [Giardia lamblia ATCC 50803]
  misc_feature (357)..(599): Homolog of NCBI NO: 34869310 NR Description: similar to hypothetical protein FLJ10560 [Rattus
  misc_feature (143)..(599): Homolog of NCBI NO: 8922517 NR Description: hypothetical protein FLJ10560 [Homo sapiens]
  misc_feature (198)..(605): Homolog of NCBI NO: 11280529 NR Description: hypothetical protein T10K17.100 - Arabidopsis
  misc_feature (44)..(134): Homolog of NCBI NO: 7452467 NR Description: hypothetical protein At2g42230 [imported] -
  misc_feature (194)..(591): Homolog of NCBI NO: 7452467 NR Description: hypothetical protein At2g42230 [imported] -
  misc_feature (44)..(134): Homolog of NCBI NO: 30688947 NR Description: expressed protein [Arabidopsis thaliana]
  misc_feature (194)..(605): Homolog of NCBI NO: 30688947 NR Description: expressed protein [Arabidopsis thaliana]
  misc_feature (36)..(605): Homolog of NCBI NO: 18410836 NR Description: expressed protein [Arabidopsis thaliana]
PRSPRPPLPRSPPRAAMADEPLDASPAPAAPAAASDPAPSPVPAPAPAPAPAATASLVLRPRRESFEHGLLPIPKLVFPEGTLTQTLAQLRAKLAAPGAGRVGAAALAEALQIPADQAALALGTLAAVLPGEGDGPAADGAWAADLRDVLLFLYIQSYKRLVPRAHKDSPSVADVWPSTSAFDGYLSALSPIQLVRSNSRRFMPSQADEEAHQLSYLQKHMANVLTLLADSVDGEGDESMVLTMETFEHLGFLLQFSEGTPLSQAAPFFANSDPDMPAAPVPATQVHDWILQNIASSLEYTAEKAITKENNQRSVSDPDVAMADAVTNTRIQSSSSTGASVQNNPGYYRNTSFVEGISKTSVVKHGSDIKGHSIKVLNCHDSVIYILAPLKYATVYGCSDTTVVLGAIGKVVKVEHCERVQIVVASKRICIANCRECIFYLGVNHQPLIVGDNHKLQVAPFNTCYPQLGEHLAQVGVDPNVNKWDQPFVLGVVDPHDSLSHPAGVSDVQAESATCLDPDLFTDFMIPSWFEAEGPTKYNPFTLPEVYWASQRKKNASLEDIQKNIRELELDDNRKKELACALHAQFKDWLYASGNIRQLYCLQGE

SEQ ID NO: 67286 - protein, 589 aa, Triticum aestivum
  peptide (1)..(589): Ceres Seq. ID no. 15170173
  misc_feature (1)..(45): Homolog of NCBI NO: 30387315 NR Description: unknown [Choristoneura fumiferana MNPV]
  misc_feature (262)..(577): Homolog of NCBI NO: 29250580 NR Description: GLP_254_3153_1495 [Giardia lamblia ATCC 50803]
  misc_feature (341)..(583): Homolog of NCBI NO: 34869310 NR Description: similar to hypothetical protein FLJ10560 [Rattus
  misc_feature (127)..(583): Homolog of NCBI NO: 8922517 NR Description: hypothetical protein FLJ10560 [Homo sapiens]
  misc_feature (182)..(589): Homolog of NCBI NO: 11280529 NR Description: hypothetical protein T10K17.100 - Arabidopsis
  misc_feature (28)..(118): Homolog of NCBI NO: 7452467 NR Description: hypothetical protein At2g42230 [imported] -
  misc_feature (178)..(575): Homolog of NCBI NO: 7452467 NR Description: hypothetical protein At2g42230 [imported] -
  misc_feature (28)..(118): Homolog of NCBI NO: 30688947 NR Description: expressed protein [Arabidopsis thaliana]
  misc_feature (178)..(589): Homolog of NCBI NO: 30688947 NR Description: expressed protein [Arabidopsis thaliana]
  misc_feature (20)..(589): Homolog of NCBI NO: 18410836 NR Description: expressed protein [Arabidopsis thaliana]
MADEPLDASPAPAAPAAASDPAPSPVPAPAPAPAPAATASLVLRPRRESFEHGLLPIPKLVFPEGTLTQTLAQLRAKLAAPGAGRVGAAALAEALQIPADQAALALGTLAAVLPGEGDGPAADGAWAADLRDVLLFLYIQSYKRLVPRAHKDSPSVADVWPSTSAFDGYLSALSPIQLVRSNSRRFMPSQADEEAHQLSYLQKHMANVLTLLADSVDGEGDESMVLTMETFEHLGFLLQFSEGTPLSQAAPFFANSDPDMPAAPVPATQVHDWILQNIASSLEYTAEKAITKENNQRSVSDPDVAMADAVTNTRIQSSSSTGASVQNNPGYYRNTSFVEGISKTSVVKHGSDIKGHSIKVLNCHDSVIYILAPLKYATVYGCSDTTVVLGAIGKVVKVEHCERVQIVVASKRICIANCRECIFYLGVNHQPLIVGDNHKLQVAPFNTCYPQLGEHLAQVGVDPNVNKWDQPFVLGVVDPHDSLSHPAGVSDVQAESATCLDPDLFTDFMIPSWFEAEGPTKYNPFTLPEVYWASQRKKNASLEDIQKNIRELELDDNRKKELACALHAQFKDWLYASGNIRQLYCLQGE

SEQ ID NO: 67287 - protein, 403 aa, Triticum aestivum
  peptide (1)..(403): Ceres Seq. ID no. 15170174
  misc_feature (76)..(391): Homolog of NCBI NO: 29250580 NR Description: GLP_254_3153_1495 [Giardia lamblia ATCC 50803]
  misc_feature (155)..(397): Homolog of NCBI NO: 34869310 NR Description: similar to hypothetical protein FLJ10560 [Rattus
  misc_feature (1)..(397): Homolog of NCBI NO: 8922517 NR Description: hypothetical protein FLJ10560 [Homo sapiens]
  misc_feature (1)..(403): Homolog of NCBI NO: 11280529 NR Description: hypothetical protein T10K17.100 - Arabidopsis
  misc_feature (1)..(389): Homolog of NCBI NO: 7452467 NR Description: hypothetical protein At2g42230 [imported] -
  misc_feature (1)..(403): Homolog of NCBI NO: 30688947 NR Description: expressed protein [Arabidopsis thaliana]
  misc_feature (1)..(403): Homolog of NCBI NO: 18410836 NR Description: expressed protein [Arabidopsis thaliana]
MPSQADEEAHQLSYLQKHMANVLTLLADSVDGEGDESMVLTMETFEHLGFLLQFSEGTPLSQAAPFFANSDPDMPAAPVPATQVHDWILQNIASSLEYTAEKAITKENNQRSVSDPDVAMADAVTNTRIQSSSSTGASVQNNPGYYRNTSFVEGISKTSVVKHGSDIKGHSIKVLNCHDSVIYILAPLKYATVYGCSDTTVVLGAIGKVVKVEHCERVQIVVASKRICIANCRECIFYLGVNHQPLIVGDNHKLQVAPFNTCYPQLGEHLAQVGVDPNVNKWDQPFVLGVVDPHDSLSHPAGVSDVQAESATCLDPDLFTDFMIPSWFEAEGPTKYNPFTLPEVYWASQRKKNASLEDIQKNIRELELDDNRKKELACALHAQFKDWLYASGNIRQLYCLQGE

SEQ ID NO: 67288 - DNA, 1640 bp, Triticum aestivum
  misc_feature (1)..(1640): Ceres Seq. ID no. 12784444
aagtttgacagtcgccacttctcaaagcgaagaaagaaacatcgagaaaagaaagcgagagaagcgctccaagtcgtgactcgtcggccatggcgcagccgtcggcggcggcgaggaagccctcggcagcgccaaccgtcgtcctgacacttgtcctggccctcgcctccgcgagcctcctcttcctcctagtccacctgtccccttcgtcgccatccgcgcacccgcacccccaccgccgcctccgcctgcgtggtgcccacctcaggcacggaggcgccaccccgcaccagatcccgttcgaccccgtcatcgccgacctcgagcaccgcctggacgaccgcgagtgggagcgcctggctgccgcggggctgcacgcgccgggcatggagtctgcccccgtcccagaggacctcgcagactatgaggacgagtacatcaatgacgccgcgcggttcaacatgacgctgcgcgtggcggcgctcttccccaagatcgacgtggaccccgccgacgacgccgtgacgggcgccgagctggccgcgtggaatctcgcgtccgcgcggcgggaggtgctgcaccgcaccgcccgggagctcgacctgcacgaccgcgaccacgacggccgcgtcgccttctccgagtacgagaggcccagctgggcttggcggttcgacgataataactcaaccagtgatgggatgggatggtggaaggaggggcacttcaatgctgcggatatggacggtgacggctttctaaatctgacggagtttaacaacttcttacatccagctgatactaccaacccaaagctaatacattggttgtgcaaagaagaagtcagggaaagagacaaagataatgacgggaagctcaatttccaagagttttataatggattgttttattcagttcgacattacgatgatgaaacttcaacagatgactccaatggctctgatgcaccggctagaaaatcgttttcacagcttgatctggataatgatgggcttttgtcagcagacgagctaaaacctatcatcggaaaactccatccagcagaaaacttctatgccaagcaacaagctgactatgtgatatcacaggctgacacaaacaaagatggacagctgagtttgaatgagatgattgagaacccctatgtattttacagtgctttattcacagaagatgattatgggtctcatgacgagctccggtagttccttcaagtaggtggtattcaggacctttcaacgcttggttagacatttgctgcagatatatatcttcaatgatctgttggccccatctactgccttgccaagcacatttcaggcgatttccatgtataacacaagcgtgcatttccacacgcctgttttagcaacagagcattcatttgttacattaagagttcttgaattagtttcatgttttgcatggcaagttagcattggttcttccatatatagtttttggtgtgcaaaagtaggttgttgttccaggatcacacacttgtaaactatgaaaaccaggaaggtgcagctgtagggcttgtatgtatgtaactggcattcctgaaccctatctgtaaacattgtgaagttatgttctatgaaagtgattctattctg

SEQ ID NO: 67289 - protein, 378 aa, Triticum aestivum
  peptide (1)..(378): Ceres Seq. ID no. 12784445
  misc_feature (208)..(236): Pfam Name: EF hand Pfam Description: EF hand
  misc_feature (128)..(376): Homolog of NCBI NO: 6680840 NR Description: calumenin [Mus musculus]
  misc_feature (128)..(376): Homolog of NCBI NO: 30583871 NR Description: Homo sapiens calumenin [synthetic construct]
  misc_feature (128)..(376): Homolog of NCBI NO: 4502551 NR Description: calumenin precursor [Homo sapiens]
  misc_feature (128)..(376): Homolog of NCBI NO: 2809324 NR Description: calumenin [Homo sapiens]
  misc_feature (114)..(377): Homolog of NCBI NO: 4506457 NR Description: reticulocalbin 2, EF-hand calcium binding domain
  misc_feature (67)..(234): Homolog of NCBI NO: 34914276 NR Description: B1151A10.4 [Oryza sativa (japonica
  misc_feature (203)..(378): Homolog of NCBI NO: 34914276 NR Description: B1151A10.4 [Oryza sativa (japonica
  misc_feature (21)..(378): Homolog of NCBI NO: 38345557 NR Description: OSJNBa0032F06.6 [Oryza sativa (japonica
  misc_feature (44)..(377): Homolog of NCBI NO: 15234272 NR Description: putative calcium binding protein; protein id:
  misc_feature (49)..(378): Homolog of NCBI NO: 18415883 NR Description: expressed protein
MAQPSAAARKPSAAPTVVLTLVLALASASLLFLLVHLSPSSPSAHPHPHRRLRLRGAHLRHGGATPHQIPFDPVIADLEHRLDDREWERLAAAGLHAPGMESAPVPEDLADYEDEYINDAARFNMTLRVAALFPKIDVDPADDAVTGAELAAWNLASARREVLHRTARELDLHDRDHDGRVAFSEYERPSWAWRFDDNNSTSDGMGWWKEGHFNAADMDGDGFLNLTEFNNFLHPADTTNPKLIHWLCKEEVRERDKDNDGKLNFQEFYNGLFYSVRHYDDETSTDDSNGSDAPARKSFSQLDLDNDGLLSADELKPIIGKLHPAENFYAKQQADYVISQADTNKDGQLSLNEMIENPYVFYSALFTEDDYGSHDELR

SEQ ID NO: 67290 - protein, 279 aa, Triticum aestivum
  peptide (1)..(279): Ceres Seq. ID no. 12784446
  misc_feature (109)..(137): Pfam Name: EF hand Pfam Description: EF hand
  misc_feature (29)..(277): Homolog of NCBI NO: 6680840 NR Description: calumenin [Mus musculus]
  misc_feature (29)..(277): Homolog of NCBI NO: 30583871 NR Description: Homo sapiens calumenin [synthetic construct]
  misc_feature (29)..(277): Homolog of NCBI NO: 4502551 NR Description: calumenin precursor [Homo sapiens]
  misc_feature (29)..(277): Homolog of NCBI NO: 2809324 NR Description: calumenin [Homo sapiens]
  misc_feature (15)..(278): Homolog of NCBI NO: 4506457 NR Description: reticulocalbin 2, EF-hand calcium binding domain
  misc_feature (1)..(135): Homolog of NCBI NO: 34914276 NR Description: B1151A10.4 [Oryza sativa (japonica
  misc_feature (104)..(279): Homolog of NCBI NO: 34914276 NR Description: B1151A10.4 [Oryza sativa (japonica
  misc_feature (1)..(279): Homolog of NCBI NO: 38345557 NR Description: OSJNBa0032F06.6 [Oryza sativa (japonica
  misc_feature (1)..(278): Homolog of NCBI NO: 15234272 NR Description: putative calcium binding protein; protein id:
  misc_feature (1)..(279): Homolog of NCBI NO: 18415883 NR Description: expressed protein
MESAPVPEDLADYEDEYINDAARFNMTLRVAALFPKIDVDPADDAVTGAELAAWNLASARREVLHRTARELDLHDRDHDGRVAFSEYERPSWAWRFDDNNSTSDGMGWWKEGHFNAADMDGDGFLNLTEFNNFLHPADTTNPKLIHWLCKEEVRERDKDNDGKLNFQEFYNGLFYSVRHYDDETSTDDSNGSDAPARKSFSQLDLDNDGLLSADELKPIIGKLHPAENFYAKQQADYVISQADTNKDGQLSLNEMIENPYVFYSALFTEDDYGSHDELR

SEQ ID NO: 67291 - protein, 254 aa, Triticum aestivum
  peptide (1)..(254): Ceres Seq. ID no. 12784447
  misc_feature (84)..(112): Pfam Name: EF hand Pfam Description: EF hand
  misc_feature (4)..(252): Homolog of NCBI NO: 6680840 NR Description: calumenin [Mus musculus]
  misc_feature (4)..(252): Homolog of NCBI NO: 30583871 NR Description: Homo sapiens calumenin [synthetic construct]
  misc_feature (4)..(252): Homolog of NCBI NO: 4502551 NR Description: calumenin precursor [Homo sapiens]
  misc_feature (4)..(252): Homolog of NCBI NO: 2809324 NR Description: calumenin [Homo sapiens]
  misc_feature (1)..(253): Homolog of NCBI NO: 4506457 NR Description: reticulocalbin 2, EF-hand calcium binding domain
  misc_feature (1)..(110): Homolog of NCBI NO: 34914276 NR Description: B1151A10.4 [Oryza sativa (japonica
  misc_feature (79)..(254): Homolog of NCBI NO: 34914276 NR Description: B1151A10.4 [Oryza sativa (japonica
  misc_feature (1)..(254): Homolog of NCBI NO: 38345557 NR Description: OSJNBa0032F06.6 [Oryza sativa (japonica
  misc_feature (1)..(253): Homolog of NCBI NO: 15234272 NR Description: putative calcium binding protein; protein id:
  misc_feature (1)..(254): Homolog of NCBI NO: 18415883 NR Description: expressed protein
MTLRVAALFPKIDVDPADDAVTGAELAAWNLASARREVLHRTARELDLHDRDHDGRVAFSEYERPSWAWRFDDNNSTSDGMGWWKEGHFNAADMDGDGFLNLTEFNNFLHPADTTNPKLIHWLCKEEVRERDKDNDGKLNFQEFYNGLFYSVRHYDDETSTDDSNGSDAPARKSFSQLDLDNDGLLSADELKPIIGKLHPAENFYAKQQADYVISQADTNKDGQLSLNEMIENPYVFYSALFTEDDYGSHDELR

SEQ ID NO: 67292 - DNA, 1334 bp, Triticum aestivum
  misc_feature (1)..(1334): Ceres Seq. ID no. 13659957
acggttcgcccaaacagggtatccccttatcctccttcgtcccagcccccaatccctagcccctcctttccaccgtccgtaccgccgccagcgaccagaagcgctcaaggacctcggcaatctcctgatccggtgggaaatcgtcaacgagccagaccagatccaccggagcaatcaagaatgtgagcaaaaagaatgtgccaagcgtgaggttgctcgctctcgtgataattacatgtcatggagtgatgattgtaccaagtatatgcttgagtggtatatcgagaagcaaagggacaagccaccaaccttcaagtggaaggcacaacaccatctacaatgtgctaatgatttgaatgacaagtttggaattacagctacagcgaaacaagttgatcgacactttaggtcattcaaggagaaatggaagtggataaagctagcaaaggggaggagtggatatggcttcgataaagtacttaacaaatttaacattgacaagtcagagaaatcaccaagcaagcttggcaaaataaaatttaactaccttactcattccatcaagttttatcatctcttggaagaactgtttagtgactcatctcatgcggatggctcacttgctattgatgtgaataatgcaagtgagaatgtggaatctgatggtagtagtgaaacaagcagccacacatccactgctgaacaaggtcttagtgattctgacatgattgcacccaacagtccagcagaaggcactagctcaaatctgaagcgcaagcatgttaaagcaccacataagaagaaaccaaaggtcaaggcgcgtcgagccagagtgttagatgatgatgtggcagcgagcattgtgagtcttgctgaaactgtgaaatctgccgcccctattcagccaatagcagctacagaccctaatgccaatctttggaagcacattgagtcgctaactctcccagcaaatgagaaaattgagttagcaacctatcttgctaagccagaacaagaagttttccgtggtttcctgaattgtgctagcgaccagacttttaatgcttgggtccttgattatttcgcgcacaagtacgacggcaaagatcccgcaactgctgatccatcaatctgaatgacatgtttggtggctttcttttggcaagtgcttttgtagtctacttagctgctttccatgcacttatgctaagtggattcctgtgctctaagggtgtttagagggtcttaccttttgtaatgcattgctgtagcacaaatctgaattaagctagtttgtaagaaattacttgatggtggatggccttgtgcatgct

SEQ ID NO: 67293 - protein, 377 aa, Triticum aestivum
  peptide (1)..(377): Ceres Seq. ID no. 13659958
  misc_feature (74)..(364): Homolog of NCBI NO: 38344112 NR Description: OSJNBb0050O03.9 [Oryza sativa (japonica
  misc_feature (42)..(364): Homolog of NCBI NO: 21397269 NR Description: Unknown protein [Oryza sativa (japonica
RFAQTGYPLILLRPSPQSLAPPFHRPYRRQRPEALKDLGNLLIRWEIVNEPDQIHRSNQECEQKECAKREVARSRDNYMSWSDDCTKYMLEWYIEKQRDKPPTFKWKAQHHLQCANDLNDKFGITATAKQVDRHFRSFKEKWKWIKLAKGRSGYGFDKVLNKFNIDKSEKSPSKLGKIKFNYLTHSIKFYHLLEELFSDSSHADGSLAIDVNNASENVESDGSSETSSHTSTAEQGLSDSDMIAPNSPAEGTSSNLKRKHVKAPHKKKPKVKARRARVLDDDVAASIVSLAETVKSAAPIQPIAATDPNANLWKHIESLTLPANEKIELATYLAKPEQEVFRGFLNCASDQTFNAWVLDYFAHKYDGKDPATADPSI

SEQ ID NO: 67294 - protein, 299 aa, Triticum aestivum
  peptide (1)..(299): Ceres Seq. ID no. 13659959
  misc_feature (1)..(286): Homolog of NCBI NO: 38344112 NR Description: OSJNBb0050O03.9 [Oryza sativa (japonica
  misc_feature (1)..(286): Homolog of NCBI NO: 21397269 NR Description: Unknown protein [Oryza sativa (japonica
MSWSDDCTKYMLEWYIEKQRDKPPTFKWKAQHHLQCANDLNDKFGITATAKQVDRHFRSFKEKWKWIKLAKGRSGYGFDKVLNKFNIDKSEKSPSKLGKIKFNYLTHSIKFYHLLEELFSDSSHADGSLAIDVNNASENVESDGSSETSSHTSTAEQGLSDSDMIAPNSPAEGTSSNLKRKHVKAPHKKKPKVKARRARVLDDDVAASIVSLAETVKSAAPIQPIAATDPNANLWKHIESLTLPANEKIELATYLAKPEQEVFRGFLNCASDQTFNAWVLDYFAHKYDGKDPATADPSI

SEQ ID NO: 67295 - protein, 289 aa, Triticum aestivum
  peptide (1)..(289): Ceres Seq. ID no. 13659960
  misc_feature (1)..(276): Homolog of NCBI NO: 38344112 NR Description: OSJNBb0050O03.9 [Oryza sativa (japonica
  misc_feature (1)..(276): Homolog of NCBI NO: 21397269 NR Description: Unknown protein [Oryza sativa (japonica
MLEWYIEKQRDKPPTFKWKAQHHLQCANDLNDKFGITATAKQVDRHFRSFKEKWKWIKLAKGRSGYGFDKVLNKFNIDKSEKSPSKLGKIKFNYLTHSIKFYHLLEELFSDSSHADGSLAIDVNNASENVESDGSSETSSHTSTAEQGLSDSDMIAPNSPAEGTSSNLKRKHVKAPHKKKPKVKARRARVLDDDVAASIVSLAETVKSAAPIQPIAATDPNANLWKHIESLTLPANEKIELATYLAKPEQEVFRGFLNCASDQTFNAWVLDYFAHKYDGKDPATADPSI

SEQ ID NO: 67296 - DNA, 2027 bp, Triticum aestivum
  misc_feature (1)..(2027): Ceres Seq. ID no. 14313366
tccgcccgatccccttccgccccctcccgacgatcgcccccgctcgtcccaccgcggtgggcgatcgctcctctcctccgtgcgcgcgattcctgaggcgaggcgaccgacaccagattccgccggccggcccacctcccccgcttcgccgatcggatcgcgtgctccatgaggtagaggtgacgataaagcatagttgttgacttagcttgcagtggttctttatcgaagctaaggcagataataattggcgttatggcatatcgaatggtatgcgctccccaagtcattgatctcgagtctgagcgagggcatcctcatgttcattctgaaagtttaattcacaatgggaatgatttgtccgaccaaggcagtcaatatactgtcagagttgtaggcaatgctatgaatgctggtctttctgatacacagggttactacaatatgagcatgaatcatccacatcagcctgttcatagttctccgccaaatttaggcgttgattcaggttttgtcttcccatcaaatatgtacaacccttgcatgtcaacatctatgaacagatatgtctctcatgctcagagctttggattgcctttaaaccaagttgtctcaggaagtatgtatggaagtactagaaatgaaaatgtcagcgaaactgctagaggattcattaaaaggaaaaatgccgcagtggcaggaacttgtcattttgttaatggatctgcaagctcaagctcatcctctcatacatctcaaaatcctacacataggccatgggatccttcttttgagtcaaatgtttttcctaatgtcacaccattcaacccatcagaatatcatagccacagcacttggccatctgtggaaggatcttccattactggatcaaatgggtttaatttgatggctgctcacccagaatcagcacagcatggtaactatacatttcaatcaagtcatgctagtcagtgctttcaacctgccagcactacttgggtttcccaggctgcaactggaattgtggaaggagtaccacagtggtcatacatcaatgcaatgtctagtgttccaggcagatttgcacattcaggggccacagaaatagtgaatggaggctttcatgaatatcagaatggcccttcaaccatttctcaagggcatttaccttattttcatcaacatgctgtgcatagcatgcaacctcataatccactggatcatacacgagtgcaagtcccttaccaacaaggccacaataatggcatcttgcatagtggggtaaatcattctggtaaccggttccacttgagtccaagaactccaggtctcttctctaattctgagcggtcttttgggcctccacagcatccgttcctggtgaacccagttaatcataggaacttaagaattttgccacctctgcagcatggtgcaatcatggatttttcgaggttgtatgaggggtcaaatgtagtagatgagcatagagatatgcgtctagatatagacagcatgacctatgaggagcttttagcattagaagagcacattggagacgtcaatacaggtctggcaaaaagccacattgtagataaattgaagactagcttatatgtgccaggagcaacctgcgtgtctaatcagtcatctgaaccttccacagagaatgaggcttgcataatatgccaggaggagtacgaggctgaggactgcgttggaatcctggattgtggccacagataccatgcggtgtgcttaaaacagtggctgacggtaaagaacctatgccccatctgcaagacaacagctttgtctgcgggtagaagaagttgataacaaacaggattaatctttatcagttatttgcttgacaaacattcagatcaattttgtacataagaagcggtagactattctgctacctgtatttgttgttcaccttgtgattgggagtaactcggcttccaaaaactgtacagacataacattgatcgttctattcaaatgtagaatgtttataaatt

SEQ ID NO: 67297 - protein, 526 aa, Triticum aestivum
  peptide (1)..(526): Ceres Seq. ID no. 14313367
  misc_feature (475)..(515): Pfam Name: Zinc finger, C3HC4 type (RING finger) Pfam Description: Zinc finger, C3HC4 type (RING finger)
  misc_feature (380)..(525): Homolog of NCBI NO: 11358785 NR Description: RING-H2 finger protein RHG1a
  misc_feature (22)..(526): Homolog of NCBI NO: 30687050 NR Description: zinc finger (C3HC4-type RING finger) protein
  misc_feature (69)..(525): Homolog of NCBI NO: 20466834 NR Description: unknown protein [Arabidopsis thaliana]
  misc_feature (69)..(525): Homolog of NCBI NO: 22330219 NR Description: zinc finger (C3HC4-type RING finger) protein
  misc_feature (152)..(520): Homolog of NCBI NO: 8777490 NR Description: RING-finger protein (C-terminal)-like
  misc_feature (152)..(520): Homolog of NCBI NO: 18400621 NR Description: zinc finger (C3HC4-type RING finger) protein
  misc_feature (366)..(496): Homolog of NCBI NO: 4768982 NR Description: hypothetical protein [Oryza sativa]
  misc_feature (91)..(123): Homolog of NCBI NO: 34910942 NR Description: putative U2 snRNP auxiliary factor
  misc_feature (212)..(526): Homolog of NCBI NO: 34910942 NR Description: putative U2 snRNP auxiliary factor
MAYRMVCAPQVIDLESERGHPHVHSESLIHNGNDLSDQGSQYTVRVVGNAMNAGLSDTQGYYNMSMNHPHQPVHSSPPNLGVDSGFVFPSNMYNPCMSTSMNRYVSHAQSFGLPLNQVVSGSMYGSTRNENVSETARGFIKRKNAAVAGTCHFVNGSASSSSSSHTSQNPTHRPWDPSFESNVFPNVTPFNPSEYHSHSTWPSVEGSSITGSNGFNLMAAHPESAQHGNYTFQSSHASQCFQPASTTWVSQAATGIVEGVPQWSYINAMSSVPGRFAHSGATEIVNGGFHEYQNGPSTISQGHLPYFHQHAVHSMQPHNPLDHTRVQVPYQQGHNNGILHSGVNHSGNRFHLSPRTPGLFSNSERSFGPPQHPFLVNPVNHRNLRILPPLQHGAIMDFSRLYEGSNVVDEHRDMRLDIDSMTYEELLALEEHIGDVNTGLAKSHIVDKLKTSLYVPGATCVSNQSSEPSTENEACIICQEEYEAEDCVGILDCGHRYHAVCLKQWLTVKNLCPICKTTALSAGRRS

SEQ ID NO: 67298 - protein, 522 aa, Triticum aestivum
  peptide (1)..(522): Ceres Seq. ID no. 14313368
  misc_feature (471)..(511): Pfam Name: Zinc finger, C3HC4 type (RING finger) Pfam Description: Zinc finger, C3HC4 type (RING finger)
  misc_feature (376)..(521): Homolog of NCBI NO: 11358785 NR Description: RING-H2 finger protein RHG1a
  misc_feature (18)..(522): Homolog of NCBI NO: 30687050 NR Description: zinc finger (C3HC4-type RING finger) protein
  misc_feature (65)..(521): Homolog of NCBI NO: 20466834 NR Description: unknown protein [Arabidopsis thaliana]
  misc_feature (65)..(521): Homolog of NCBI NO: 22330219 NR Description: zinc finger (C3HC4-type RING finger) protein
  misc_feature (148)..(516): Homolog of NCBI NO: 8777490 NR Description: RING-finger protein (C-terminal)-like
  misc_feature (148)..(516): Homolog of NCBI NO: 18400621 NR Description: zinc finger (C3HC4-type RING finger) protein
  misc_feature (362)..(492): Homolog of NCBI NO: 4768982 NR Description: hypothetical protein [Oryza sativa]
  misc_feature (87)..(119): Homolog of NCBI NO: 34910942 NR Description: putative U2 snRNP auxiliary factor
  misc_feature (208)..(522): Homolog of NCBI NO: 34910942 NR Description: putative U2 snRNP auxiliary factor
MVCAPQVIDLESERGHPHVHSESLIHNGNDLSDQGSQYTVRVVGNAMNAGLSDTQGYYNMSMNHPHQPVHSSPPNLGVDSGFVFPSNMYNPCMSTSMNRYVSHAQSFGLPLNQVVSGSMYGSTRNENVSETARGFIKRKNAAVAGTCHFVNGSASSSSSSHTSQNPTHRPWDPSFESNVFPNVTPFNPSEYHSHSTWPSVEGSSITGSNGFNLMAAHPESAQHGNYTFQSSHASQCFQPASTTWVSQAATGIVEGVPQWSYINAMSSVPGRFAHSGATEIVNGGFHEYQNGPSTISQGHLPYFHQHAVHSMQPHNPLDHTRVQVPYQQGHNNGILHSGVNHSGNRFHLSPRTPGLFSNSERSFGPPQHPFLVNPVNHRNLRILPPLQHGAIMDFSRLYEGSNVVDEHRDMRLDIDSMTYEELLALEEHIGDVNTGLAKSHIVDKLKTSLYVPGATCVSNQSSEPSTENEACIICQEEYEAEDCVGILDCGHRYHAVCLKQWLTVKNLCPICKTTALSAGRRS

SEQ ID NO: 67299 - protein, 476 aa, Triticum aestivum
  peptide (1)..(476): Ceres Seq. ID no. 14313369
  misc_feature (425)..(465): Pfam Name: Zinc finger, C3HC4 type (RING finger) Pfam Description: Zinc finger, C3HC4 type (RING finger)
  misc_feature (330)..(475): Homolog of NCBI NO: 11358785 NR Description: RING-H2 finger protein RHG1a
  misc_feature (1)..(476): Homolog of NCBI NO: 30687050 NR Description: zinc finger (C3HC4-type RING finger) protein
  misc_feature (19)..(475): Homolog of NCBI NO: 20466834 NR Description: unknown protein [Arabidopsis thaliana]
  misc_feature (19)..(475): Homolog of NCBI NO: 22330219 NR Description: zinc finger (C3HC4-type RING finger) protein
  misc_feature (102)..(470): Homolog of NCBI NO: 8777490 NR Description: RING-finger protein (C-terminal)-like
  misc_feature (102)..(470): Homolog of NCBI NO: 18400621 NR Description: zinc finger (C3HC4-type RING finger) protein
  misc_feature (316)..(446): Homolog of NCBI NO: 4768982 NR Description: hypothetical protein [Oryza sativa]
  misc_feature (41)..(73): Homolog of NCBI NO: 34910942 NR Description: putative U2 snRNP auxiliary factor
  misc_feature (162)..(476): Homolog of NCBI NO: 34910942 NR Description: putative U2 snRNP auxiliary factor
MNAGLSDTQGYYNMSMNHPHQPVHSSPPNLGVDSGFVFPSNMYNPCMSTSMNRYVSHAQSFGLPLNQVVSGSMYGSTRNENVSETARGFIKRKNAAVAGTCHFVNGSASSSSSSHTSQNPTHRPWDPSFESNVFPNVTPFNPSEYHSHSTWPSVEGSSITGSNGFNLMAAHPESAQHGNYTFQSSHASQCFQPASTTWVSQAATGIVEGVPQWSYINAMSSVPGRFAHSGATEIVNGGFHEYQNGPSTISQGHLPYFHQHAVHSMQPHNPLDHTRVQVPYQQGHNNGILHSGVNHSGNRFHLSPRTPGLFSNSERSFGPPQHPFLVNPVNHRNLRILPPLQHGAIMDFSRLYEGSNVVDEHRDMRLDIDSMTYEELLALEEHIGDVNTGLAKSHIVDKLKTSLYVPGATCVSNQSSEPSTENEACIICQEEYEAEDCVGILDCGHRYHAVCLKQWLTVKNLCPICKTTALSAGRRS

SEQ ID NO: 67300 - DNA, 1509 bp, Triticum aestivum
  misc_feature (1)..(1509): Ceres Seq. ID no. 14313264
aagagtctctgtgcacgttgccacccttttttctccctttcccatccccatctttcgtccagccctccccgccccctcccccctctcgccgcggaccccatccgccccccgccgccgccgccgccgccgttgacactacccgcgaatctccttcttccgagtggcggagaggaggcatggcactccggaggctgcttcaggggattgtcctaccgcggacgacgggccggcatgttggggcatcgttttccacggaggctggggagactatccgcgcaaccctgtttcccggtgatggcatcgggcctgagatcgccgagtcggtcaagcaggtattcaatgttgcaggtgtaccgatagaatgggaagaacattatgttggtacggaagttgatcccagaacagagagctttttgacatgggagagcctggagtctgtgcgtagaaacaaagttggcttgaaaggtcctatggctacacctattggaaaaggccaccgttctttgaatcttacattaaggaaagaacttggactctacgccaatgtcagaccttgcaacagcctcccaggctacaagactagatatgatgatgtgaaccttgtgacaatccgtgaaaatactgaaggagagtatagtggccttgagcatcaggttgtgaggggtgttgtggaaagtttgaaaattattacccgccaagcaagtttgagagtggcagagtatgctttccattatgccaaagccaatggcagggagagggtctctgcgatacataaagctaatatcatgaggaaaacagacggacttttcctcaagtgttgccgtgaagtagctgagaagtaccctgaaatcacatatgaggaagtcattattgacaattgctgcatgacactcgtgaagaatcctggtacatttgatgtattagtgatgccaaatctgtatggtgacattattagtgatctatgtgctggtttgatcggaggattgggcttaactcccagctgcaacattggtgaaggtggcatttgtctggcagaggctgttcatggttctgcacctgatatctctggcaagaaccttgcaaacccaactgctcttatgttgagtgctgttatgatgttgcgccacttgcaattcaatgaccaagcagaccggatccacaatgccatcctccagacaattgccgaggggaagtacagaaccgctgatcttggtgggaagtcatcaacatcagactacacaaaagcagtttgcgatcatatctgagcaccagctgctctttctctcgattatttgcctcccacctaattttgttgcataccaggagctttagcctgagtaggttaagtggcaggcacctcgatttccttgggtgttaagacaccatttaaggctcctgaataattctcgcattcttgtccttggaaaagttttaccagcattgcagtcaagctgaagaatcgtatgtaataatcattggcagcatcagcgcatataatttgttcgttct

SEQ ID NO: 67301 - protein, 420 aa, Triticum aestivum
  peptide (1)..(420): Ceres Seq. ID no. 14313265
  misc_feature (91)..(416): Pfam Name: Isocitrate/isopropylmalate dehydrogenase Pfam Description: Isocitrate/isopropylmalate dehydrogenase
  misc_feature (27)..(420): Homolog of NCBI NO: 31206479 NR Description: ENSANGP00000023556 [Anopheles gambiae]
  misc_feature (73)..(420): Homolog of NCBI NO: 30681023 NR Description: isocitrate dehydrogenase [NAD+], putative
  misc_feature (73)..(420): Homolog of NCBI NO: 21536667 NR Description: putative (NAD+) isocitrate dehydrogenase
  misc_feature (76)..(397): Homolog of NCBI NO: 7427677 NR Description: 3-isopropylmalate dehydrogenase (EC 1.1.1.85)
  misc_feature (76)..(397): Homolog of NCBI NO: 266463 NR Description: 3-isopropylmalate dehydrogenase, chloroplast
  misc_feature (90)..(420): Homolog of NCBI NO: 18414179 NR Description: isocitrate dehydrogenase [NAD+], putative
  misc_feature (90)..(420): Homolog of NCBI NO: 11251553 NR Description: 3-isopropylmalate dehydrogenase-like protein -
  misc_feature (92)..(420): Homolog of NCBI NO: 28974492 NR Description: NAD-dependent isocitrate dehydrogenase alpha
  misc_feature (62)..(420): Homolog of NCBI NO: 7431333 NR Description: probable isocitrate dehydrogenase (NAD) (EC
  misc_feature (59)..(420): Homolog of NCBI NO: 34903262 NR Description: unnamed protein product [Oryza sativa (japonica
ESLCTLPPFFLPFPSPSFVQPSPPPPPSRRGPHPPPAAAAAAVDTTRESPSSEWRRGGMALRRLLQGIVLPRTTGRHVGASFSTEAGETIRATLFPGDGIGPEIAESVKQVFNVAGVPIEWEEHYVGTEVDPRTESFLTWESLESVRRNKVGLKGPMATPIGKGHRSLNLTLRKELGLYANVRPCNSLPGYKTRYDDVNLVTIRENTEGEYSGLEHQVVRGVVESLKIITRQASLRVAEYAFHYAKANGRERVSAIHKANIMRKTDGLFLKCCREVAEKYPEITYEEVIIDNCCMTLVKNPGTFDVLVMPNLYGDIISDLCAGLIGGLGLTPSCNIGEGGICLAEAVHGSAPDISGKNLANPTALMLSAVMMLRHLQFNDQADRIHNAILQTIAEGKYRTADLGGKSSTSDYTKAVCDHI

SEQ ID NO: 67302 - protein, 362 aa, Triticum aestivum
  peptide (1)..(362): Ceres Seq. ID no. 14313266
  misc_feature (33)..(358): Pfam Name: Isocitrate/isopropylmalate dehydrogenase Pfam Description: Isocitrate/isopropylmalate dehydrogenase
  misc_feature (1)..(362): Homolog of NCBI NO: 31206479 NR Description: ENSANGP00000023556 [Anopheles gambiae]
  misc_feature (15)..(362): Homolog of NCBI NO: 30681023 NR Description: isocitrate dehydrogenase [NAD+], putative
  misc_feature (15)..(362): Homolog of NCBI NO: 21536667 NR Description: putative (NAD+) isocitrate dehydrogenase
  misc_feature (18)..(339): Homolog of NCBI NO: 7427677 NR Description: 3-isopropylmalate dehydrogenase (EC 1.1.1.85)
  misc_feature (18)..(339): Homolog of NCBI NO: 266463 NR Description: 3-isopropylmalate dehydrogenase, chloroplast
  misc_feature (32)..(362): Homolog of NCBI NO: 18414179 NR Description: isocitrate dehydrogenase [NAD+], putative
  misc_feature (32)..(362): Homolog of NCBI NO: 11251553 NR Description: 3-isopropylmalate dehydrogenase-like protein -
  misc_feature (34)..(362): Homolog of NCBI NO: 28974492 NR Description: NAD-dependent isocitrate dehydrogenase alpha
  misc_feature (4)..(362): Homolog of NCBI NO: 7431333 NR Description: probable isocitrate dehydrogenase (NAD) (EC
  misc_feature (1)..(362): Homolog of NCBI NO: 34903262 NR Description: unnamed protein product [Oryza sativa (japonica
MALRRLLQGIVLPRTTGRHVGASFSTEAGETIRATLFPGDGIGPEIAESVKQVFNVAGVPIEWEEHYVGTEVDPRTESFLTWESLESVRRNKVGLKGPMATPIGKGHRSLNLTLRKELGLYANVRPCNSLPGYKTRYDDVNLVTIRENTEGEYSGLEHQVVRGVVESLKIITRQASLRVAEYAFHYAKANGRERVSAIHKANIMRKTDGLFLKCCREVAEKYPEITYEEVIIDNCCMTLVKNPGTFDVLVMPNLYGDIISDLCAGLIGGLGLTPSCNIGEGGICLAEAVHGSAPDISGKNLANPTALMLSAVMMLRHLQFNDQADRIHNAILQTIAEGKYRTADLGGKSSTSDYTKAVCDHI

SEQ ID NO: 67303 - protein, 264 aa, Triticum aestivum
  peptide (1)..(264): Ceres Seq. ID no. 14313267
  misc_feature (1)..(260): Pfam Name: Isocitrate/isopropylmalate dehydrogenase Pfam Description: Isocitrate/isopropylmalate dehydrogenase
  misc_feature (1)..(264): Homolog of NCBI NO: 31206479 NR Description: ENSANGP00000023556 [Anopheles gambiae]
  misc_feature (1)..(264): Homolog of NCBI NO: 30681023 NR Description: isocitrate dehydrogenase [NAD+], putative
  misc_feature (1)..(264): Homolog of NCBI NO: 21536667 NR Description: putative (NAD+) isocitrate dehydrogenase
  misc_feature (1)..(241): Homolog of NCBI NO: 7427677 NR Description: 3-isopropylmalate dehydrogenase (EC 1.1.1.85)
  misc_feature (1)..(241): Homolog of NCBI NO: 266463 NR Description: 3-isopropylmalate dehydrogenase, chloroplast
  misc_feature (1)..(264): Homolog of NCBI NO: 18414179 NR Description: isocitrate dehydrogenase [NAD+], putative
  misc_feature (1)..(264): Homolog of NCBI NO: 11251553 NR Description: 3-isopropylmalate dehydrogenase-like protein -
  misc_feature (1)..(264): Homolog of NCBI NO: 28974492 NR Description: NAD-dependent isocitrate dehydrogenase alpha
  misc_feature (1)..(264): Homolog of NCBI NO: 7431333 NR Description: probable isocitrate dehydrogenase (NAD) (EC
  misc_feature (1)..(264): Homolog of NCBI NO: 34903262 NR Description: unnamed protein product [Oryza sativa (japonica
MATPIGKGHRSLNLTLRKELGLYANVRPCNSLPGYKTRYDDVNLVTIRENTEGEYSGLEHQVVRGVVESLKIITRQASLRVAEYAFHYAKANGRERVSAIHKANIMRKTDGLFLKCCREVAEKYPEITYEEVIIDNCCMTLVKNPGTFDVLVMPNLYGDIISDLCAGLIGGLGLTPSCNIGEGGICLAEAVHGSAPDISGKNLANPTALMLSAVMMLRHLQFNDQADRIHNAILQTIAEGKYRTADLGGKSSTSDYTKAVCDHI

SEQ ID NO: 67304 - DNA, 2019 bp, Triticum aestivum
  misc_feature (1)..(2019): Ceres Seq. ID no. 14303201
tttttttccttcttccctttctctgggtttcaagctctggttcgttctcgtcaggctcaggggtcagggcaagaggaagcaactggttggctggctgctgctgatccatgaacgtcccggtgggcttcatcgccaagctctggagcctcgtgtcattcttgcccttcttcgtcctcctcctgctgctcggctccgccaaagctcttttgatcggcccggtcgtcgcggccatcgttttcctcggcgattcagccgtcatcatcggcctgtggcctgcgcatttcgtctggacgtactgctgcgtgctagccacgaagcgaattgggccggttctgaagatccttgccgtggtattcctgccactgccgttgctcctgttgccggtgcttggcattgtagggagccttctggttggtatcggttatggagtgttcactcccctcatggcgacttttgaggctgttggcgagggtgtcgcggacaagctctctcattgctttttggatggtactgctagcacaataaggggagcttgtatggtggtgcgtgatgttaccgacttctgcttccactcatacttctccttcatggacgagctttccgagaaaatgggggatgacgaagaacctactgacatcaagttgtcttatctaccgcggagcttccttgttgcgctggttgccgttcctctggatgtattgatgattactggggtggcattgtggaaaagcccctgcatgttgttgaaaggatggcaaagactctgcgaggatctagtagggagggaagggccttttctagagactgtttgtgtccctttcgctggtttggccattatattgtggccgcttgccgtcattgcaggagtgattgcatcatttcttagcagcttcttctttggcctccatgctggattaattgcttatcaggaggcttcatttcaaatggggctatcatacatgatctctgcagtagcattgtatgatgaatacacaaatgatcttctttatttgagagaaggttcttgtttgccaaggcccaagtaccggaaagcgggttctgcgaagtatgagaccggccgcaacaaagatgagcacaacgttacagctgcatctgcagagaagcaacatcaaggccagcgtaagcataggagggttctacaccggtcaaagacattcatggaaactatccaaagactaagacccattcaaatatgggattggctcttccgatcttgcgagataaatgggaggatattactgagcgagggactgataagctctgaagatatagaggaatttataaccaaaggaaagggaaagaagctgagcataaaactacctgcctggtgcatccttcactgtctgatacgatccgcgaaacacgacacgcacggtttgctcatatctgatgacgttgaggtgaccaacttcaattggccaaaggacaaggtgttcgactggatgctcggaccactgctggttctgaaggagcagatgaagaaactggagctcaccgaagacgaggagctgtgcttgcagaagctcatcatgacgaacgcgaacgaaaaaccgtcggattgggacgactgcggtttcccgtcaagcgacggcgtgaagagagctcagctacaggcgatcatcagaaggttgcaagggatcgtggccaatatgtcccggataccgagcttcaggagacggttcatgagcctggccagggcactgtacctggaggcgatcgacgcgggcaccatcgacgggtcgcggaaggtggagcgcaaggtcaaggctgacatcgcctccgaggaacttcagagcagagatgtcggagatacgaagggttcatcgaatgggacgtctgtggacgttgacatggtctgatgttgttgtgctgtgcaaacatattcttttgcagaactctctacctgctgcgatgtgcattagttgttttattagacgttggtaacacacatcacgcaacgcgtggacacgatggatgactgtgcctgctgggatcaag

SEQ ID NO: 67305 - protein, 590 aa, Triticum aestivum
  peptide (1)..(590): Ceres Seq. ID no. 14303202
  misc_feature (367)..(583): Homolog of NCBI NO: 7939511 NR Description: emb|CAB40985.1~gene_id:K1G2.10~similar to unknown
  misc_feature (99)..(482): Homolog of NCBI NO: 7939511 NR Description: emb|CAB40985.1~gene_id:K1G2.10~similar to unknown
  misc_feature (15)..(514): Homolog of NCBI NO: 15234594 NR Description: hypothetical protein [Arabidopsis thaliana]
  misc_feature (4)..(545): Homolog of NCBI NO: 38344840 NR Description: OSJNBa0064H22.21 [Oryza sativa (japonica
  misc_feature (1)..(586): Homolog of NCBI NO: 9758091 NR Description: dbj|BAA95714.1~gene_id:MNF13.19~strong similarity
  misc_feature (1)..(586): Homolog of NCBI NO: 30693640 NR Description: expressed protein [Arabidopsis thaliana]
  misc_feature (1)..(583): Homolog of NCBI NO: 30688768 NR Description: expressed protein [Arabidopsis thaliana]
  misc_feature (1)..(583): Homolog of NCBI NO: 27311557 NR Description: Unknown protein [Arabidopsis thaliana]
  misc_feature (1)..(542): Homolog of NCBI NO: 38345330 NR Description: OSJNBa0081L15.3 [Oryza sativa (japonica
  misc_feature (1)..(553): Homolog of NCBI NO: 15235450 NR Description: hypothetical protein [Arabidopsis thaliana]
MNVPVGFIAKLWSLVSFLPFFVLLLLLGSAKALLIGPVVAAIVFLGDSAVIIGLWPAHFVWTYCCVLATKRIGPVLKILAVVFLPLPLLLLPVLGIVGSLLVGIGYGVFTPLMATFEAVGEGVADKLSHCFLDGTASTIRGACMVVRDVTDFCFHSYFSFMDELSEKMGDDEEPTDIKLSYLPRSFLVALVAVPLDVLMITGVALWKSPCMLLKGWQRLCEDLVGREGPFLETVCVPFAGLAIILWPLAVIAGVIASFLSSFFFGLHAGLIAYQEASFQMGLSYMISAVALYDEYTNDLLYLREGSCLPRPKYRKAGSAKYETGRNKDEHNVTAASAEKQHQGQRKHRRVLHRSKTFMETIQRLRPIQIWDWLFRSCEINGRILLSEGLISSEDIEEFITKGKGKKLSIKLPAWCILHCLIRSAKHDTHGLLISDDVEVTNFNWPKDKVFDWMLGPLLVLKEQMKKLELTEDEELCLQKLIMTNANEKPSDWDDCGFPSSDGVKRAQLQAIIRRLQGIVANMSRIPSFRRRFMSLARALYLEAIDAGTIDGSRKVERKVKADIASEELQSRDVGDTKGSSNGTSVDVDMV

SEQ ID NO: 67306 - protein, 478 aa, Triticum aestivum
  peptide (1)..(478): Ceres Seq. ID no. 14303203
  misc_feature (255)..(471): Homolog of NCBI NO: 7939511 NR Description: emb|CAB40985.1~gene_id:K1G2.10~similar to unknown
  misc_feature (1)..(370): Homolog of NCBI NO: 7939511 NR Description: emb|CAB40985.1~gene_id:K1G2.10~similar to unknown
  misc_feature (1)..(402): Homolog of NCBI NO: 15234594 NR Description: hypothetical protein [Arabidopsis thaliana]
  misc_feature (1)..(433): Homolog of NCBI NO: 38344840 NR Description: OSJNBa0064H22.21 [Oryza sativa (japonica
  misc_feature (1)..(474): Homolog of NCBI NO: 9758091 NR Description: dbj|BAA95714.1~gene_id:MNF13.19~strong similarity
  misc_feature (1)..(474): Homolog of NCBI NO: 30693640 NR Description: expressed protein [Arabidopsis thaliana]
  misc_feature (1)..(471): Homolog of NCBI NO: 30688768 NR Description: expressed protein [Arabidopsis thaliana]
  misc_feature (1)..(471): Homolog of NCBI NO: 27311557 NR Description: Unknown protein [Arabidopsis thaliana]
  misc_feature (1)..(430): Homolog of NCBI NO: 38345330 NR Description: OSJNBa0081L15.3 [Oryza sativa (japonica
  misc_feature (1)..(441): Homolog of NCBI NO: 15235450 NR Description: hypothetical protein [Arabidopsis thaliana]
MATFEAVGEGVADKLSHCFLDGTASTIRGACMVVRDVTDFCFHSYFSFMDELSEKMGDDEEPTDIKLSYLPRSFLVALVAVPLDVLMITGVALWKSPCMLLKGWQRLCEDLVGREGPFLETVCVPFAGLAIILWPLAVIAGVIASFLSSFFFGLHAGLIAYQEASFQMGLSYMISAVALYDEYTNDLLYLREGSCLPRPKYRKAGSAKYETGRNKDEHNVTAASAEKQHQGQRKHRRVLHRSKTFMETIQRLRPIQIWDWLFRSCEINGRILLSEGLISSEDIEEFITKGKGKKLSIKLPAWCILHCLIRSAKHDTHGLLISDDVEVTNFNWPKDKVFDWMLGPLLVLKEQMKKLELTEDEELCLQKLIMTNANEKPSDWDDCGFPSSDGVKRAQLQAIIRRLQGIVANMSRIPSFRRRFMSLARALYLEAIDAGTIDGSRKVERKVKADIASEELQSRDVGDTKGSSNGTSVDVDMV

SEQ ID NO: 67307 - protein, 447 aa, Triticum aestivum
  peptide (1)..(447): Ceres Seq. ID no. 14303204
  misc_feature (224)..(440): Homolog of NCBI NO: 7939511 NR Description: emb|CAB40985.1~gene_id:K1G2.10~similar to unknown
  misc_feature (1)..(339): Homolog of NCBI NO: 7939511 NR Description: emb|CAB40985.1~gene_id:K1G2.10~similar to unknown
  misc_feature (1)..(371): Homolog of NCBI NO: 15234594 NR Description: hypothetical protein [Arabidopsis thaliana]
  misc_feature (1)..(402): Homolog of NCBI NO: 38344840 NR Description: OSJNBa0064H22.21 [Oryza sativa (japonica
  misc_feature (1)..(443): Homolog of NCBI NO: 9758091 NR Description: dbj|BAA95714.1~gene_id:MNF13.19~strong similarity
  misc_feature (1)..(443): Homolog of NCBI NO: 30693640 NR Description: expressed protein [Arabidopsis thaliana]
  misc_feature (1)..(440): Homolog of NCBI NO: 30688768 NR Description: expressed protein [Arabidopsis thaliana]
  misc_feature (1)..(440): Homolog of NCBI NO: 27311557 NR Description: Unknown protein [Arabidopsis thaliana]
  misc_feature (1)..(399): Homolog of NCBI NO: 38345330 NR Description: OSJNBa0081L15.3 [Oryza sativa (japonica
  misc_feature (1)..(410): Homolog of NCBI NO: 15235450 NR Description: hypothetical protein [Arabidopsis thaliana]
MVVRDVTDFCFHSYFSFMDELSEKMGDDEEPTDIKLSYLPRSFLVALVAVPLDVLMITGVALWKSPCMLLKGWQRLCEDLVGREGPFLETVCVPFAGLAIILWPLAVIAGVIASFLSSFFFGLHAGLIAYQEASFQMGLSYMISAVALYDEYTNDLLYLREGSCLPRPKYRKAGSAKYETGRNKDEHNVTAASAEKQHQGQRKHRRVLHRSKTFMETIQRLRPIQIWDWLFRSCEINGRILLSEGLISSEDIEEFITKGKGKKLSIKLPAWCILHCLIRSAKHDTHGLLISDDVEVTNFNWPKDKVFDWMLGPLLVLKEQMKKLELTEDEELCLQKLIMTNANEKPSDWDDCGFPSSDGVKRAQLQAIIRRLQGIVANMSRIPSFRRRFMSLARALYLEAIDAGTIDGSRKVERKVKADIASEELQSRDVGDTKGSSNGTSVDVDMV

SEQ ID NO: 67308 - DNA, 1778 bp, Triticum aestivum
  misc_feature (1)..(1778): Ceres Seq. ID no. 15170139
ctagtttcccatcctgccgcatctcttttcgccgctgattctcgcgaaagcgcaccatggcttcaacgcccgtcgaccgccatctctctctacacgcggatcgtgaggagggcccgacaaggaacacggtgttcctggcgtagttaagctgctattggagacaccctccggcttcgcaattttctcttttgccgaggattacctcgacaaagatatccagatcatctggcttcacgacttccaaatgtttgaggacaaatccagtgccattaaccttactacccggcgattaggcgccaaactcgcccagatgatcatgaagtgctccttctatgatgacaaactagttgttggaaggtctgaatataaagaaataattgaagaatcactgggtctaacctgtgtgtacaatgatcatgtgatggaggtgatgtggggtctgcagaatctcatgcatacttcttttcctgaagaaaaatctaagatgtctagggatgaccagctcctcgtgagcaaaggattgtatatggtcttagatcgacacggcattaagatcaaggcagagatgcttaatgagcatattattaagaagacccgcgatgtacgtaatactgatttacgtgaagatgcagttgcaattgtgttgcacgaaatggttgatgcctatttcgaggagttttctaaaattgataccgaggaatggagtttattcaaactagcattagctttgaaagtaatgattgatcctcatggaggacttaaagctggtgacccttatgagatgttcacacatgacgagttaatagtgatggggcgtgacgcatctaaatatgaaggtactcttgataagaaaactgtcttggcaatgtacaatgacgctgttgttctccgtgaggacaagatggatttgctgtacgaattggactgcttggttgaggaggctaaaggagcactggaaactgaagaagtgctggagaagcttgcaacattaagtgttgactccaagcagcaaactgactgtacatcttcaacagcggtgagtctgacagtacccaaccaaagcagcatctataaggagcaacactgtcctatcacagcagatgcagatggcgcggagatctcgccaaccactccagatgaagttactgctgaaagggatgctgtccgggaaaatacacaggctcaagaaactactgctgaaggaagaaaggagatcggtactgctgaaggaagaatgaacctcggtactgctgaaggaagaatgaaccttggtactgctggaggaagaataaacctcggtactgctgaaggaagaaaggagctcagtcgcattattgctcagaaggtgcccccttgtcattatcaagaatggaagcctcttcacattccgcagctcattccaaccactccatatggtgcggagatcttgccaaccactccaaatgaagttactgctgaaaggaatgctgtccgggaaaatacgcaggctcaagaaactaccgctgaaggaagaaaggagatcggtcacattcttggtcagtagttagccctgcgttgttatcttgacagtggtaactctcttcacgactagtgtgttccacttcccgcaacagactgctagcgtctcccacttctactagtcgctacctaagttgtttaggcgcttccactgattacgttgataatggcatgccttctcaggagtgccaagcttctcctaattatgcccctcgacatttgtattgcctaggtacctatgaaatgctttttgttatttg

SEQ ID NO: 67309 - protein, 432 aa, Triticum aestivum
  peptide (1)..(432): Ceres Seq. ID no. 15170140
  misc_feature (76)..(235): Homolog of NCBI NO: 38175544 NR Description: hypothetical protein [Oryza sativa (japonica
  misc_feature (1)..(167): Homolog of NCBI NO: 33945887 NR Description: SAR DNA-binding protein-like protein
  misc_feature (1)..(93): Homolog of NCBI NO: 38175544 NR Description: hypothetical protein [Oryza sativa (japonica
MFEDKSSAINLTTRRLGAKLAQMIMKCSFYDDKLVVGRSEYKEIIEESLGLTCVYNDHVMEVMWGLQNLMHTSFPEEKSKMSRDDQLLVSKGLYMVLDRHGIKIKAEMLNEHIIKKTRDVRNTDLREDAVAIVLHEMVDAYFEEFSKIDTEEWSLFKLALALKVMIDPHGGLKAGDPYEMFTHDELIVMGRDASKYEGTLDKKTVLAMYNDAVVLREDKMDLLYELDCLVEEAKGALETEEVLEKLATLSVDSKQQTDCTSSTAVSLTVPNQSSIYKEQHCPITADADGAEISPTTPDEVTAERDAVRENTQAQETTAEGRKEIGTAEGRMNLGTAEGRMNLGTAGGRINLGTAEGRKELSRIIAQKVPPCHYQEWKPLHIPQLIPTTPYGAEILPTTPNEVTAERNAVRENTQAQETTAEGRKEIGHILGQ

SEQ ID NO: 67310 - protein, 410 aa, Triticum aestivum
  peptide (1)..(410): Ceres Seq. ID no. 15170141
  misc_feature (54)..(213): Homolog of NCBI NO: 38175544 NR Description: hypothetical protein [Oryza sativa (japonica
  misc_feature (1)..(145): Homolog of NCBI NO: 33945887 NR Description: SAR DNA-binding protein-like protein
  misc_feature (1)..(71): Homolog of NCBI NO: 38175544 NR Description: hypothetical protein [Oryza sativa (japonica
MIMKCSFYDDKLVVGRSEYKEIIEESLGLTCVYNDHVMEVMWGLQNLMHTSFPEEKSKMSRDDQLLVSKGLYMVLDRHGIKIKAEMLNEHIIKKTRDVRNTDLREDAVAIVLHEMVDAYFEEFSKIDTEEWSLFKLALALKVMIDPHGGLKAGDPYEMFTHDELIVMGRDASKYEGTLDKKTVLAMYNDAVVLREDKMDLLYELDCLVEEAKGALETEEVLEKLATLSVDSKQQTDCTSSTAVSLTVPNQSSIYKEQHCPITADADGAEISPTTPDEVTAERDAVRENTQAQETTAEGRKEIGTAEGRMNLGTAEGRMNLGTAGGRINLGTAEGRKELSRIIAQKVPPCHYQEWKPLHIPQLIPTTPYGAEILPTTPNEVTAERNAVRENTQAQETTAEGRKEIGHILGQ

SEQ ID NO: 67311 - protein, 408 aa, Triticum aestivum
  peptide (1)..(408): Ceres Seq. ID no. 15170142
  misc_feature (52)..(211): Homolog of NCBI NO: 38175544 NR Description: hypothetical protein [Oryza sativa (japonica
  misc_feature (1)..(143): Homolog of NCBI NO: 33945887 NR Description: SAR DNA-binding protein-like protein
  misc_feature (1)..(69): Homolog of NCBI NO: 38175544 NR Description: hypothetical protein [Oryza sativa (japonica
MKCSFYDDKLVVGRSEYKEIIEESLGLTCVYNDHVMEVMWGLQNLMHTSFPEEKSKMSRDDQLLVSKGLYMVLDRHGIKIKAEMLNEHIIKKTRDVRNTDLREDAVAIVLHEMVDAYFEEFSKIDTEEWSLFKLALALKVMIDPHGGLKAGDPYEMFTHDELIVMGRDASKYEGTLDKKTVLAMYNDAVVLREDKMDLLYELDCLVEEAKGALETEEVLEKLATLSVDSKQQTDCTSSTAVSLTVPNQSSIYKEQHCPITADADGAEISPTTPDEVTAERDAVRENTQAQETTAEGRKEIGTAEGRMNLGTAEGRMNLGTAGGRINLGTAEGRKELSRIIAQKVPPCHYQEWKPLHIPQLIPTTPYGAEILPTTPNEVTAERNAVRENTQAQETTAEGRKEIGHILGQ

SEQ ID NO: 67312 - DNA, 1988 bp, Triticum aestivum
  misc_feature (1)..(1988): Ceres Seq. ID no. 14313373
acacatctcaccacgccacaaacaccaaagagaggtgtactacgagggagtgagaggcgcccggctcgcctgcgtccgtctccacttctcgcgagcccggcgtcacccgccgccgggcacgcaccacgctcaacgccaaagaaaatagtgtaggtcgtgtaggcgaaggccgacctgcaaactaaacactagtcgatcaagatggtggtggagggatacgaagccgacaagaacatccagatatggaaggtgaagaagctgatcaaggggctggacggggcgaggggcaacggcacgagcatgatctcgctcatcataccgccgcgcgaccaggtgtcccgcgtcgccaagatgctgggcgacgagtacgggaccgcctccaacatcaagagccgggtgaaccgccagtccgtgctggccgccataacctccgcccagcagaggctcaagctctacagccgggtgccccccaacggcctcgtgctctacacgggcaccgtcgtcaccgacgacggcaaggagaagaaggtcaccttcgacttcgagcccttccggcccatcaacgcgtcgctctacctctgcgataacaagttccacaccgagccgctgaacgagctcctcgagtccgacgacaggttcggcttcatcgccatggacggcaacggcacgctctacggcacgctgagcggcaacagccgggaggtggtgtacaagttcagcgtggatctgcccaagaagcacgggcggggagggcagtcggcgctccggttcgcgcgcctgcgtatggagaagcggcacaactacctgcgcaaggcggccgagctggccacgcacttcttcaccaaccccgccaccaaccagcccaacgtggtcgggctcatcctggccggctccgccgatttcaagaccgagctgggcaagtccgagatgttcgaccagcggctccaggccaagataatcaagtcggtcgacgtgtcgtacggcggggagagcggcttcaaccaggccattgagatgtctgtggaggtcctctccgaggccaagttcgtccaggagaagaagctccttcgcaagtacttcgaggagataagccaggacaccgggaagtacgtcctgggcgtgcaggacaccatggcggccctcgagatgggcgcggtccacacgctgatcgtgtgggagaacctcgacgtcaggcggtacgagctgaagaactccgccacgggggagacggtggtgaagtacatcaacggcggccaggaggcggaccagagcaacctcggtgtcgacgaggcggcgtgcggggagctggacgtcgtcgacagggtgctgctgctggagtggttcgccgagaactaccagcaatacggctgcaagctggagttcgtcaccaacaggtcccaggaaggatcgcagttctgccggggcttcggcggcatcggcgggatcctccgctacccggcggacgtcgccgcctacaacgacgacgacgacgacgacatgctggatgacgacgtctatgaaggcctcgaatagcaatcaactgaagcttcactgcacacggtctgggaggagcctgcgctggccccgaccgcgccgccgggacgagaccctgctgaaacatccaaacgatcggtgcaagggaaacgaggaggtgggacagaagaaaggatctcagcaattatagttcggaccttgagcaaagcacgatgatggcgttgatggtttggagttgaaggtctcttcctctctggatccatcccttcaaatttggttatgctactaagcagccgtggctgccttctcttgctgcatcagagaatatgcttattagagtcgtattagttgcgagtgtgagagtggtgttccttataatctactcctgagtcgccttatgagcttatatgctactacaacaactgcttgaaataatgttgtgtattattgtgttcgattttatatgtgagatttattgctatggtaagatactg

SEQ ID NO: 67313 - protein, 443 aa, Triticum aestivum
  peptide (1)..(443): Ceres Seq. ID no. 14313374
  misc_feature (7)..(141): Pfam Name: eRF1 domain 1 Pfam Description: eRF1 domain 1
  misc_feature (8)..(439): Homolog of NCBI NO: 39594301 NR Description: Hypothetical protein CBG18934 [Caenorhabditis
  misc_feature (8)..(439): Homolog of NCBI NO: 38174104 NR Description: Unknown (protein for MGC:75958) [Silurana
  misc_feature (7)..(437): Homolog of NCBI NO: 18250310 NR Description: eukaryotic release factor 1 [Chlamydomonas
  misc_feature (9)..(437): Homolog of NCBI NO: 15215863 NR Description: AT5g47880/MCA23_22 [Arabidopsis thaliana]
  misc_feature (9)..(437): Homolog of NCBI NO: 1155261 NR Description: eukaryotic release factor 1 homolog
  misc_feature (9)..(437): Homolog of NCBI NO: 15238829 NR Description: eukaryotic release factor 1 homolog
  misc_feature (7)..(436): Homolog of NCBI NO: 15222115 NR Description: eukaryotic peptide chain release factor subunit 1
  misc_feature (7)..(436): Homolog of NCBI NO: 549010 NR Description: Eukaryotic peptide chain release factor subunit (eRF1-3) (Eukaryotic release factor 1-3) (Omnipotent suppressor
  misc_feature (4)..(437): Homolog of NCBI NO: 34393599 NR Description: putative eukaryotic peptide chain release factor
  misc_feature (2)..(440): Homolog of NCBI NO: 34907268 NR Description: putative peptide chain release factor subunit 1
MVVEGYEADKNIQIWKVKKLIKGLDGARGNGTSMISLIIPPRDQVSRVAKMLGDEYGTASNIKSRVNRQSVLAAITSAQQRLKLYSRVPPNGLVLYTGTVVTDDGKEKKVTFDFEPFRPINASLYLCDNKFHTEPLNELLESDDRFGFIAMDGNGTLYGTLSGNSREVVYKFSVDLPKKHGRGGQSALRFARLRMEKRHNYLRKAAELATHFFTNPATNQPNVVGLILAGSADFKTELGKSEMFDQRLQAKIIKSVDVSYGGESGFNQAIEMSVEVLSEAKFVQEKKLLRKYFEEISQDTGKYVLGVQDTMAALEMGAVHTLIVWENLDVRRYELKNSATGETVVKYINGGQEADQSNLGVDEAACGELDVVDRVLLLEWFAENYQQYGCKLEFVTNRSQEGSQFCRGFGGIGGILRYPADVAAYNDDDDDDMLDDDVYEGLE

SEQ ID NO: 67314 - protein, 410 aa, Triticum aestivum
  peptide (1)..(410): Ceres Seq. ID no. 14313375
  misc_feature (1)..(108): Pfam Name: eRF1 domain 1 Pfam Description: eRF1 domain 1
  misc_feature (1)..(406): Homolog of NCBI NO: 39594301 NR Description: Hypothetical protein CBG18934 [Caenorhabditis
  misc_feature (1)..(406): Homolog of NCBI NO: 38174104 NR Description: Unknown (protein for MGC:75958) [Silurana
  misc_feature (1)..(404): Homolog of NCBI NO: 18250310 NR Description: eukaryotic release factor 1 [Chlamydomonas
  misc_feature (1)..(404): Homolog of NCBI NO: 15215863 NR Description: AT5g47880/MCA23_22 [Arabidopsis thaliana]
  misc_feature (1)..(404): Homolog of NCBI NO: 1155261 NR Description: eukaryotic release factor 1 homolog
  misc_feature (1)..(404): Homolog of NCBI NO: 15238829 NR Description: eukaryotic release factor 1 homolog
  misc_feature (1)..(403): Homolog of NCBI NO: 15222115 NR Description: eukaryotic peptide chain release factor subunit 1
  misc_feature (1)..(403): Homolog of NCBI NO: 549010 NR Description: Eukaryotic peptide chain release factor subunit (eRF1-3) (Eukaryotic release factor 1-3) (Omnipotent suppressor
  misc_feature (1)..(404): Homolog of NCBI NO: 34393599 NR Description: putative eukaryotic peptide chain release factor
  misc_feature (1)..(407): Homolog of NCBI NO: 34907268 NR Description: putative peptide chain release factor subunit 1
MISLIIPPRDQVSRVAKMLGDEYGTASNIKSRVNRQSVLAAITSAQQRLKLYSRVPPNGLVLYTGTVVTDDGKEKKVTFDFEPFRPINASLYLCDNKFHTEPLNELLESDDRFGFIAMDGNGTLYGTLSGNSREVVYKFSVDLPKKHGRGGQSALRFARLRMEKRHNYLRKAAELATHFFTNPATNQPNVVGLILAGSADFKTELGKSEMFDQRLQAKIIKSVDVSYGGESGFNQAIEMSVEVLSEAKFVQEKKLLRKYFEEISQDTGKYVLGVQDTMAALEMGAVHTLIVWENLDVRRYELKNSATGETVVKYINGGQEADQSNLGVDEAACGELDVVDRVLLLEWFAENYQQYGCKLEFVTNRSQEGSQFCRGFGGIGGILRYPADVAAYNDDDDDDMLDDDVYEGLE

SEQ ID NO: 67315 - protein, 393 aa, Triticum aestivum
  peptide (1)..(393): Ceres Seq. ID no. 14313376
  misc_feature (1)..(91): Pfam Name: eRF1 domain 1 Pfam Description: eRF1 domain 1
  misc_feature (1)..(389): Homolog of NCBI NO: 39594301 NR Description: Hypothetical protein CBG18934 [Caenorhabditis
  misc_feature (1)..(389): Homolog of NCBI NO: 38174104 NR Description: Unknown (protein for MGC:75958) [Silurana
  misc_feature (1)..(387): Homolog of NCBI NO: 18250310 NR Description: eukaryotic release factor 1 [Chlamydomonas
  misc_feature (1)..(387): Homolog of NCBI NO: 15215863 NR Description: AT5g47880/MCA23_22 [Arabidopsis thaliana]
  misc_feature (1)..(387): Homolog of NCBI NO: 1155261 NR Description: eukaryotic release factor 1 homolog
  misc_feature (1)..(387): Homolog of NCBI NO: 15238829 NR Description: eukaryotic release factor 1 homolog
  misc_feature (1)..(386): Homolog of NCBI NO: 15222115 NR Description: eukaryotic peptide chain release factor subunit 1
  misc_feature (1)..(386): Homolog of NCBI NO: 549010 NR Description: Eukaryotic peptide chain release factor subunit (eRF1-3) (Eukaryotic release factor 1-3) (Omnipotent suppressor
  misc_feature (1)..(387): Homolog of NCBI NO: 34393599 NR Description: putative eukaryotic peptide chain release factor
  misc_feature (1)..(390): Homolog of NCBI NO: 34907268 NR Description: putative peptide chain release factor subunit 1
MLGDEYGTASNIKSRVNRQSVLAAITSAQQRLKLYSRVPPNGLVLYTGTVVTDDGKEKKVTFDFEPFRPINASLYLCDNKFHTEPLNELLESDDRFGFIAMDGNGTLYGTLSGNSREVVYKFSVDLPKKHGRGGQSALRFARLRMEKRHNYLRKAAELATHFFTNPATNQPNVVGLILAGSADFKTELGKSEMFDQRLQAKIIKSVDVSYGGESGFNQAIEMSVEVLSEAKFVQEKKLLRKYFEEISQDTGKYVLGVQDTMAALEMGAVHTLIVWENLDVRRYELKNSATGETVVKYINGGQEADQSNLGVDEAACGELDVVDRVLLLEWFAENYQQYGCKLEFVTNRSQEGSQFCRGFGGIGGILRYPADVAAYNDDDDDDMLDDDVYEGLE

SEQ ID NO: 67316 - DNA, 1736 bp, Triticum aestivum
  misc_feature (1)..(1736): Ceres Seq. ID no. 13660287
aatctctcttctcctagctaccaacccttacgagcatcatggctggcggggacgagcatgagcatgacgcgccgggtcggctggagagcatcctgacggacaagtcggcgccgctcgcggagcgcgcgtgggcggcgggagcggtcgagctccggctgctgtcgcggctggcggcgcccgcggtagtggtgtacatgatcaactacgtcatgtccatgtccacacagatcttctccggccacctcgggaacctggagctcgccaccgcctcgctcggcaacaccggcgtccagaccttcgcctacggcctcatgctaggtatgggcagtgcagtggagaccctctgcgggcaggcgtacggtgcacacaagtacgacatgctcggaatttacctacaacgctctatcgttctgttgggcttaactggcataccacttgctgtgatgtacgccttctcggagccactcctcttgttgatgggacagtcaccggagatagcccgtgccgcatcgatcttcgtttacggcctgattcctcagatcttcgcgtacgctgtcaacttcccgattcagaagttcctgcaggcgcagagcatcgtcctgccaagtgcttacatctcaacggcaacactcattctacatgtgttgatgagttgggtgctcatatacaaggttggccttgggctgctcggtgcctccttggtgctgagcgtgagctggtggatcatggtcgccgcgcaatttgtgtacatcatcgtcagcccgacatgccggcacacgtggacggggttcaattggcaggccttctccggtttgccgagtttcttcaagctctccgccgcgtctgcggtgatgttgtgccttgagacatggtactttcaggtgctggtgatcattgctggattgctccccaaccctgagattgccctggattccctctctatatgtatgacaatttatggttgggtgttcatgatctcagttgggttcaacgccgctgcaagtgtaagagtgagcaatgagcttggcgccggcaacccgaagtctgcatttttctctgtgtgggtcgtgaccgggatctctgcaacaatctctaccatccttgctgttgtgatcctttgccttcgcaaccacatcagctacttgttcacagatggtgaagcagtttcggatgcggtggcggatctctgcccatttctcgccgtcacactcgttctcggtggcatccaacctgtactaacaggtgttgctgttggatgtggatggcaacaatttgtttcttacgtgaacatcggctcttactacatcgtaggtgttccacttggtgttgttcttggatttttcttcaatcttggcgcaaagggtatttggggtggtttgattgggggaacggccttgcagacagtcattctattatgggtcaccataagaacggactggacgaaagaggtagaggaggcacataaaaggttgaacaagtgggatgataagaatgagcccctccttacaggcttcaaggacaataactaatgagtgggtcagtctagatgtcttttttcacctcaacagcacataagcatgctggtttcgagaatcgctgtcagcgtgggggtgggagggactggattcaggtgttttaaatctcacataaatttatgtcccgatttggatgacatgccaattataggcttattagtatatattgtagtcttggttaaarraaaaaaaaaaaaagct

SEQ ID NO: 67317 - protein, 496 aa, Triticum aestivum
  peptide (1)..(496): Ceres Seq. ID no. 15220690
  misc_feature (58)..(480): Homolog of NCBI NO: 15234633 NR Description: MATE efflux protein family [Arabidopsis thaliana]
  misc_feature (15)..(450): Homolog of NCBI NO: 7487826 NR Description: hypothetical protein T8O5.120 - Arabidopsis
  misc_feature (15)..(488): Homolog of NCBI NO: 21553843 NR Description: unknown [Arabidopsis thaliana]
  misc_feature (15)..(488): Homolog of NCBI NO: 18415793 NR Description: MATE efflux protein family [Arabidopsis thaliana]
  misc_feature (10)..(489): Homolog of NCBI NO: 22655139 NR Description: unknown protein [Arabidopsis thaliana]
  misc_feature (10)..(489): Homolog of NCBI NO: 15221073 NR Description: MATE efflux protein family [Arabidopsis thaliana]
  misc_feature (14)..(489): Homolog of NCBI NO: 15081773 NR Description: At1g61890/F8K4_9 [Arabidopsis thaliana]
  misc_feature (14)..(489): Homolog of NCBI NO: 18407368 NR Description: MATE efflux protein family [Arabidopsis thaliana]
  misc_feature (13)..(489): Homolog of NCBI NO: 20466556 NR Description: integral membrane protein, putative [Arabidopsis
  misc_feature (13)..(489): Homolog of NCBI NO: 15233127 NR Description: MATE efflux protein family [Arabidopsis thaliana]
MAGGDEHEHDAPGRLESILTDKSAPLAERAWAAGAVELRLLSRLAAPAVVVYMINYVMSMSTQIFSGHLGNLELATASLGNTGVQTFAYGLMLGMGSAVETLCGQAYGAHKYDMLGIYLQRSIVLLGLTGIPLAVMYAFSEPLLLLMGQSPEIARAASIFVYGLIPQIFAYAVNFPIQKFLQAQSIVLPSAYISTATLILHVLMSWVLIYKVGLGLLGASLVLSVSWWIMVAAQFVYIIVSPTCRHTWTGFNWQAFSGLPSFFKLSAASAVMLCLETWYFQVLVIIAGLLPNPEIALDSLSICMTIYGWVFMISVGFNAAASVRVSNELGAGNPKSAFFSVWVVTGISATISTILAVVILCLRNHISYLFTDGEAVSDAVADLCPFLAVTLVLGGIQPVLTGVAVGCGWQQFVSYVNIGSYYIVGVPLGVVLGFFFNLGAKGIWGGLIGGTALQTVILLWVTIRTDWTKEVEEAHKRLNKWDDKNEPLLTGFKDNN

SEQ ID NO: 67318 - protein, 444 aa, Triticum aestivum
  peptide (1)..(444): Ceres Seq. ID no. 15220691
  misc_feature (6)..(428): Homolog of NCBI NO: 15234633 NR Description: MATE efflux protein family [Arabidopsis thaliana]
  misc_feature (1)..(398): Homolog of NCBI NO: 7487826 NR Description: hypothetical protein T8O5.120 - Arabidopsis
  misc_feature (1)..(436): Homolog of NCBI NO: 21553843 NR Description: unknown [Arabidopsis thaliana]
  misc_feature (1)..(436): Homolog of NCBI NO: 18415793 NR Description: MATE efflux protein family [Arabidopsis thaliana]
  misc_feature (1)..(437): Homolog of NCBI NO: 22655139 NR Description: unknown protein [Arabidopsis thaliana]
  misc_feature (1)..(437): Homolog of NCBI NO: 15221073 NR Description: MATE efflux protein family [Arabidopsis thaliana]
  misc_feature (1)..(437): Homolog of NCBI NO: 15081773 NR Description: At1g61890/F8K4_9 [Arabidopsis thaliana]
  misc_feature (1)..(437): Homolog of NCBI NO: 18407368 NR Description: MATE efflux protein family [Arabidopsis thaliana]
  misc_feature (1)..(437): Homolog of NCBI NO: 20466556 NR Description: integral membrane protein, putative [Arabidopsis
  misc_feature (1)..(437): Homolog of NCBI NO: 15233127 NR Description: MATE efflux protein family [Arabidopsis thaliana]
MINYVMSMSTQIFSGHLGNLELATASLGNTGVQTFAYGLMLGMGSAVETLCGQAYGAHKYDMLGIYLQRSIVLLGLTGIPLAVMYAFSEPLLLLMGQSPEIARAASIFVYGLIPQIFAYAVNFPIQKFLQAQSIVLPSAYISTATLILHVLMSWVLIYKVGLGLLGASLVLSVSWWIMVAAQFVYIIVSPTCRHTWTGFNWQAFSGLPSFFKLSAASAVMLCLETWYFQVLVIIAGLLPNPEIALDSLSICMTIYGWVFMISVGFNAAASVRVSNELGAGNPKSAFFSVWVVTGISATISTILAVVILCLRNHISYLFTDGEAVSDAVADLCPFLAVTLVLGGIQPVLTGVAVGCGWQQFVSYVNIGSYYIVGVPLGVVLGFFFNLGAKGIWGGLIGGTALQTVILLWVTIRTDWTKEVEEAHKRLNKWDDKNEPLLTGFKDNN

SEQ ID NO: 67319 - protein, 439 aa, Triticum aestivum
  peptide (1)..(439): Ceres Seq. ID no. 15220692
  misc_feature (1)..(423): Homolog of NCBI NO: 15234633 NR Description: MATE efflux protein family [Arabidopsis thaliana]
  misc_feature (1)..(393): Homolog of NCBI NO: 7487826 NR Description: hypothetical protein T8O5.120 - Arabidopsis
  misc_feature (1)..(431): Homolog of NCBI NO: 21553843 NR Description: unknown [Arabidopsis thaliana]
  misc_feature (1)..(431): Homolog of NCBI NO: 18415793 NR Description: MATE efflux protein family [Arabidopsis thaliana]
  misc_feature (1)..(432): Homolog of NCBI NO: 22655139 NR Description: unknown protein [Arabidopsis thaliana]
  misc_feature (1)..(432): Homolog of NCBI NO: 15221073 NR Description: MATE efflux protein family [Arabidopsis thaliana]
  misc_feature (1)..(432): Homolog of NCBI NO: 15081773 NR Description: At1g61890/F8K4_9 [Arabidopsis thaliana]
  misc_feature (1)..(432): Homolog of NCBI NO: 18407368 NR Description: MATE efflux protein family [Arabidopsis thaliana]
  misc_feature (1)..(432): Homolog of NCBI NO: 20466556 NR Description: integral membrane protein, putative [Arabidopsis
  misc_feature (1)..(432): Homolog of NCBI NO: 15233127 NR Description: MATE efflux protein family [Arabidopsis thaliana]
MSMSTQIFSGHLGNLELATASLGNTGVQTFAYGLMLGMGSAVETLCGQAYGAHKYDMLGIYLQRSIVLLGLTGIPLAVMYAFSEPLLLLMGQSPEIARAASIFVYGLIPQIFAYAVNFPIQKFLQAQSIVLPSAYISTATLILHVLMSWVLIYKVGLGLLGASLVLSVSWWIMVAAQFVYIIVSPTCRHTWTGFNWQAFSGLPSFFKLSAASAVMLCLETWYFQVLVIIAGLLPNPEIALDSLSICMTIYGWVFMISVGFNAAASVRVSNELGAGNPKSAFFSVWVVTGISATISTILAVVILCLRNHISYLFTDGEAVSDAVADLCPFLAVTLVLGGIQPVLTGVAVGCGWQQFVSYVNIGSYYIVGVPLGVVLGFFFNLGAKGIWGGLIGGTALQTVILLWVTIRTDWTKEVEEAHKRLNKWDDKNEPLLTGFKDNN

SEQ ID NO: 67320 - DNA, 754 bp, Triticum aestivum
  misc_feature (1)..(754): Ceres Seq. ID no. 13598076
agcaagccttagctagttagctttacacagcctccattgaagtgcaagaaccaaatccttagcttacacgtccatcaaacacctcagttggctaccatccgttggagagatgaacacgttgtgcgccaagcccatggggttctctggtggcgtgaagtgccagcggcgggcgcgggtgagggtgtcggccgtggcggcggcgccggagagggtgacgatgtacgacgtgctggcggtggggaacgcggcggggccggaggagatcaaggcggcgtacaggcgcgccgcgcggcggtggcacccggacgcgtgcccgggcggcgccgaccggttcatgagggcgcgcgaggcctacgaggtgctctccgaccccgagcgcaggcggggctacgacatccagctgcgctgtggcgcgggcgcgggcgccgccgggtcccgctccagccccgcgccgcgcgcgggcttcgccgactgggaagcacagctggccgggctgcagtggcggatggcggacacgcgaggcgaaacgtgggggagcaggatgcgccgcggcgccgcgcagccgacattgttctaatctctaaaccgcagcgccggctcgtgctctgtgttttctactgtagtactgtatattctacgtagtttcgccttgttctctccttccattccattttacgcggtgggattcggttggtgatgaaactgtatagtgtagtacagacagtgtacaaaagtacggtagtttttttctttg

SEQ ID NO: 67321 - protein, 155 aa, Triticum aestivum
  peptide (1)..(155): Ceres Seq. ID no. 13598077
  misc_feature (38)..(96): Pfam Name: DnaJ domain Pfam Description: DnaJ domain
  misc_feature (38)..(135): Homolog of NCBI NO: 15607493 NR Description: dnaJ [Mycobacterium tuberculosis H37Rv]
  misc_feature (38)..(135): Homolog of NCBI NO: 44590 NR Description: DnaJ [Mycobacterium tuberculosis]
  misc_feature (38)..(119): Homolog of NCBI NO: 20805917 NR Description: DnaJ [Meiothermus ruber]
  misc_feature (38)..(151): Homolog of NCBI NO: 33864560 NR Description: DnaJ protein [Synechococcus sp. WH 8102]
  misc_feature (38)..(113): Homolog of NCBI NO: 9910416 NR Description: DnaJ homolog, subfamily B, member 8; DnaJ homolog
  misc_feature (33)..(145): Homolog of NCBI NO: 34894012 NR Description: P0672D08.16 [Oryza sativa (japonica
  misc_feature (38)..(108): Homolog of NCBI NO: 29840088 NR Description: dnaJ protein [Chlamydophila caviae GPIC]
  misc_feature (38)..(146): Homolog of NCBI NO: 22298332 NR Description: heat shock protein [Thermosynechococcus elongatus
  misc_feature (33)..(147): Homolog of NCBI NO: 6691127 NR Description: DnaJ-like protein [Arabidopsis thaliana]
  misc_feature (33)..(147): Homolog of NCBI NO: 15236355 NR Description: DnaJ protein family [Arabidopsis thaliana]
MNTLCAKPMGFSGGVKCQRRARVRVSAVAAAPERVTMYDVLAVGNAAGPEEIKAAYRRAARRWHPDACPGGADRFMRAREAYEVLSDPERRRGYDIQLRCGAGAGAAGSRSSPAPRAGFADWEAQLAGLQWRMADTRGETWGSRMRRGAAQPTLF

SEQ ID NO: 67322 - protein, 147 aa, Triticum aestivum
  peptide (1)..(147): Ceres Seq. ID no. 13598078
  misc_feature (30)..(88): Pfam Name: DnaJ domain Pfam Description: DnaJ domain
  misc_feature (30)..(127): Homolog of NCBI NO: 15607493 NR Description: dnaJ [Mycobacterium tuberculosis H37Rv]
  misc_feature (30)..(127): Homolog of NCBI NO: 44590 NR Description: DnaJ [Mycobacterium tuberculosis]
  misc_feature (30)..(111): Homolog of NCBI NO: 20805917 NR Description: DnaJ [Meiothermus ruber]
  misc_feature (30)..(143): Homolog of NCBI NO: 33864560 NR Description: DnaJ protein [Synechococcus sp. WH 8102]
  misc_feature (30)..(105): Homolog of NCBI NO: 9910416 NR Description: DnaJ homolog, subfamily B, member 8; DnaJ homolog
  misc_feature (25)..(137): Homolog of NCBI NO: 34894012 NR Description: P0672D08.16 [Oryza sativa (japonica
  misc_feature (30)..(100): Homolog of NCBI NO: 29840088 NR Description: dnaJ protein [Chlamydophila caviae GPIC]
  misc_feature (30)..(138): Homolog of NCBI NO: 22298332 NR Description: heat shock protein [Thermosynechococcus elongatus
  misc_feature (25)..(139): Homolog of NCBI NO: 6691127 NR Description: DnaJ-like protein [Arabidopsis thaliana]
  misc_feature (25)..(139): Homolog of NCBI NO: 15236355 NR Description: DnaJ protein family [Arabidopsis thaliana]
MGFSGGVKCQRRARVRVSAVAAAPERVTMYDVLAVGNAAGPEEIKAAYRRAARRWHPDACPGGADRFMRAREAYEVLSDPERRRGYDIQLRCGAGAGAAGSRSSPAPRAGFADWEAQLAGLQWRMADTRGETWGSRMRRGAAQPTLF

SEQ ID NO: 67323 - protein, 119 aa, Triticum aestivum
  peptide (1)..(119): Ceres Seq. ID no. 13598079
  misc_feature (2)..(60): Pfam Name: DnaJ domain Pfam Description: DnaJ domain
  misc_feature (2)..(99): Homolog of NCBI NO: 15607493 NR Description: dnaJ [Mycobacterium tuberculosis H37Rv]
  misc_feature (2)..(99): Homolog of NCBI NO: 44590 NR Description: DnaJ [Mycobacterium tuberculosis]
  misc_feature (2)..(83): Homolog of NCBI NO: 20805917 NR Description: DnaJ [Meiothermus ruber]
  misc_feature (2)..(115): Homolog of NCBI NO: 33864560 NR Description: DnaJ protein [Synechococcus sp. WH 8102]
  misc_feature (2)..(77): Homolog of NCBI NO: 9910416 NR Description: DnaJ homolog, subfamily B, member 8; DnaJ homolog
  misc_feature (1)..(109): Homolog of NCBI NO: 34894012 NR Description: P0672D08.16 [Oryza sativa (japonica
  misc_feature (2)..(72): Homolog of NCBI NO: 29840088 NR Description: dnaJ protein [Chlamydophila caviae GPIC]
  misc_feature (2)..(110): Homolog of NCBI NO: 22298332 NR Description: heat shock protein [Thermosynechococcus elongatus
  misc_feature (1)..(111): Homolog of NCBI NO: 6691127 NR Description: DnaJ-like protein [Arabidopsis thaliana]
  misc_feature (1)..(111): Homolog of NCBI NO: 15236355 NR Description: DnaJ protein family [Arabidopsis thaliana]
MYDVLAVGNAAGPEEIKAAYRRAARRWHPDACPGGADRFMRAREAYEVLSDPERRRGYDIQLRCGAGAGAAGSRSSPAPRAGFADWEAQLAGLQWRMADTRGETWGSRMRRGAAQPTLF

SEQ ID NO: 67324 - DNA, 775 bp, Triticum aestivum
  misc_feature (1)..(775): Ceres Seq. ID no. 13660635
atgtaaaatctaactacaccaattcattctactgggatactctcccagtaccaccatttctaggcgatgactatggaagaaccattgacatttgttcctccatgatgatcaatggctcgaccatatgcatatcctctgtcgagaagggcgctggcacctacaccttttgatatagtgacaaagttatggactcaggctgggaatttgggtgctgcccttctacggcaaagcagagtatgttcccgagctcaacctttcgttcgctctatctgctgacagcccccaccgcttgtgcgctttaacctgcacttcaatgcaccatgggggcccaccagcattgcagcatacttttgatgagctcgacctgccggagaattggtcgccatacaagtgccacctggttaacctgggctcaggcaacttttgcatcatttccttctgtaagaccatgaactgtgagtttgccgtcttcaccggcgtggaggtgaaaccctgcatcaatggcgacggtcctctccggatgatcaagcacctgtctaagagtttcagccttggatctcatagcatcaaaagtgtgctctgaaccatctaattgattgcctggatgccgatatggaacttagtctgtaatctgtgctattttgttttctgcctcttagctgttctaaagcccgctgctgtttatcggtcttgatatgctgcatttaatccgacagcgcatgactatgtaaagactatttgcttaaatgatttttaaacttgcttaagttcattg

SEQ ID NO: 67325 - protein, 89 aa, Triticum aestivum
  peptide (1)..(89): Ceres Seq. ID no. 13660636
  misc_feature (1)..(58): Homolog of NCBI NO: 37531434 NR Description: hypothetical protein [Oryza sativa (japonica
  misc_feature (1)..(66): Homolog of NCBI NO: 34907072 NR Description: OSJNBa0093F16.25 [Oryza sativa (japonica
  misc_feature (1)..(45): Homolog of NCBI NO: 34898928 NR Description: OJ1316_A04.17 [Oryza sativa (japonica
  misc_feature (1)..(66): Homolog of NCBI NO: 38345446 NR Description: OSJNBa0042L16.1 [Oryza sativa (japonica
  misc_feature (1)..(66): Homolog of NCBI NO: 15451604 NR Description: Hypothetical protein [Oryza sativa]
  misc_feature (1)..(42): Homolog of NCBI NO: 15451605 NR Description: Hypothetical protein [Oryza sativa]
  misc_feature (1)..(89): Homolog of NCBI NO: 38344193 NR Description: OSJNBa0064G10.9 [Oryza sativa (japonica
  misc_feature (1)..(76): Homolog of NCBI NO: 34897052 NR Description: hypothetical protein [Oryza sativa (japonica
  misc_feature (1)..(84): Homolog of NCBI NO: 34902348 NR Description: Hypothetical protein [Oryza sativa (japonica
MHHGGPPALQHTFDELDLPENWSPYKCHLVNLGSGNFCIISFCKTMNCEFAVFTGVEVKPCINGDGPLRMIKHLSKSFSLGSHSIKSVL

SEQ ID NO: 67326 - protein, 55 aa, Triticum aestivum
  peptide (1)..(55): Ceres Seq. ID no. 13660637
VKSNYTNSFYWDTLPVPPFLGDDYGRTIDICSSMMINGSTICISSVEKGAGTYTF

SEQ ID NO: 67327 - protein, 54 aa, Triticum aestivum
  peptide (1)..(54): Ceres Seq. ID no. 13660638
MARPYAYPLSRRALAPTPFDIVTKLWTQAGNLGAALLRQSRVCSRAQPFVRSIC

SEQ ID NO: 67328 - DNA, 1877 bp, Triticum aestivum
  misc_feature (1)..(1877): Ceres Seq. ID no. 14301689
tccaattcgagatagaagcgcgggatcccctccccgcgcgccctattctgtgtggacagatccattgagaggcgcccttgattcctggctgttgtatcatggggttgctagctctgaagatgctcatgtctaggcggcgggatagcaagcatctttgcggccagattcaagcccgtaatagattggttacttcagtggttaaaagaaagatctcttcatgccaacacaataacaatcaaggttgcaagagagtggcattttcaggggcagaccttccagaggacatctggcgccatatacattccctactgccgctgcgagatgctgcccgtgttgcctgcgtatctcatgcatttttacgttcctggaaatgccatcccaacctctccttcactaggaaagcactgggcctgaatagaattccacgtcaaagtgatgtaattgcaagggatctcactatgaaagtcgaccacattctcaaaaaacactcaggcaaaggagttaagaaattcaggatcgaattacacatgccagttgatccctgctatcttaatagctggcttcagattgctgctgaactacgggttgaggaactcgccgttgttctaccttcaacctgcaatgcaaatgactacgatttcccttgtgcactttttgttgatgatgggtgtagaaacgcaatagagcatctctgccttggcggttgtgccttccatcccacagctggatttggttacttgagaaagctgcggctgttttgggtgcatattacggtggatgaattagaatgccttatttccaaatctccagctttggagcacttggcactcaagtattgctatacgatcacttacctgaagatacctagcctgctacagcatctcagctacctgatggtagctgcatgcgctaatctgcagacaatagagtgtaaagctccaaatctctccactttttacttcagtggtcgacaagttgaacttctgtttggatgttcagttcaagtgaagaccatggaaatgcgttgttctactcagtgtaacaccatttataatgcttgtgccaacctgccatccattgtgccaaatattgaaactctcagcatatcttctgttagtgaggtggtcaatataccaatcgtgcctgtaaaattcctccacctcaagtatctgtctatttctcttgaaggaaatggggctttttccccagactatgattacttttctctggtttctttgctggatgcttgtcctgtcttggaaactttcaacttgtttgtgtcacaggatcgcatgaaacacgattcggttcttggagacccgtcgtcacgtcttaggcagatgcctgaataccgccacgacaacattaagaatgtgaggattattgggttttgctctgcgaagagcatggtcgagctggcatgccatattctcgagaatgcaacatcactcgagtgccttactttggacacgatacgtgctttcagtattgacagacacattcacaaaactggtgaatgtggccacataggcaggcatatgatcagagaagcacgtaaggcgctcttggctgtcaaaagatatatcgtgggaatagttccctccacggtcaagttaaatgtcttgcagccttgcaagctatgccatgctttggctgcttagatgtggcaatatcataaatttgtaaattacattgttgactgaacactgttgcatgagttgccacttgcagcaggaatgtccaaacgggtcacttaaacaccagcgtagaagtatagggacaagcaattatggtatttgatatataaaagaagatatcaggaactatttagtattgtagctgttgatatattttcttataaaattcggtcaggattt

SEQ ID NO: 67329 - protein, 520 aa, Triticum aestivum
  peptide (1)..(520): Ceres Seq. ID no. 14301690
  misc_feature (59)..(101): Pfam Name: F-box domain Pfam Description: F-box domain
  misc_feature (178)..(342): Homolog of NCBI NO: 37533804 NR Description: hypothetical protein [Oryza sativa (japonica
  misc_feature (59)..(465): Homolog of NCBI NO: 37536392 NR Description: hypothetical protein [Oryza sativa (japonica
  misc_feature (46)..(142): Homolog of NCBI NO: 39545843 NR Description: OSJNBb0060E08.14 [Oryza sativa (japonica
  misc_feature (224)..(516): Homolog of NCBI NO: 39545843 NR Description: OSJNBb0060E08.14 [Oryza sativa (japonica
  misc_feature (59)..(258): Homolog of NCBI NO: 39545842 NR Description: OSJNBb0060E08.13 [Oryza sativa (japonica
  misc_feature (262)..(516): Homolog of NCBI NO: 39545842 NR Description: OSJNBb0060E08.13 [Oryza sativa (japonica
  misc_feature (1)..(195): Homolog of NCBI NO: 38605781 NR Description: OSJNBa0044K18.24 [Oryza sativa (japonica
  misc_feature (300)..(516): Homolog of NCBI NO: 38605781 NR Description: OSJNBa0044K18.24 [Oryza sativa (japonica
  misc_feature (73)..(516): Homolog of NCBI NO: 5803254 NR Description: ESTs C97429(C60159),D22427(C11106), correspond to a region of the predicted gene.~hypothetical
  misc_feature (1)..(516): Homolog of NCBI NO: 38605785 NR Description: OSJNBa0044K18.28 [Oryza sativa (japonica
MGLLALKMLMSRRRDSKHLCGQIQARNRLVTSVVKRKISSCQHNNNQGCKRVAFSGADLPEDIWRHIHSLLPLRDAARVACVSHAFLRSWKCHPNLSFTRKALGLNRIPRQSDVIARDLTMKVDHILKKHSGKGVKKFRIELHMPVDPCYLNSWLQIAAELRVEELAVVLPSTCNANDYDFPCALFVDDGCRNAIEHLCLGGCAFHPTAGFGYLRKLRLFWVHITVDELECLISKSPALEHLALKYCYTITYLKIPSLLQHLSYLMVAACANLQTIECKAPNLSTFYFSGRQVELLFGCSVQVKTMEMRCSTQCNTIYNACANLPSIVPNIETLSISSVSEVVNIPIVPVKFLHLKYLSISLEGNGAFSPDYDYFSLVSLLDACPVLETFNLFVSQDRMKHDSVLGDPSSRLRQMPEYRHDNIKNVRIIGFCSAKSMVELACHILENATSLECLTLDTIRAFSIDRHIHKTGECGHIGRHMIREARKALLAVKRYIVGIVPSTVKLNVLQPCKLCHALAA

SEQ ID NO: 67330 - protein, 513 aa, Triticum aestivum
  peptide (1)..(513): Ceres Seq. ID no. 14301691
  misc_feature (52)..(94): Pfam Name: F-box domain Pfam Description: F-box domain
  misc_feature (171)..(335): Homolog of NCBI NO: 37533804 NR Description: hypothetical protein [Oryza sativa (japonica
  misc_feature (52)..(458): Homolog of NCBI NO: 37536392 NR Description: hypothetical protein [Oryza sativa (japonica
  misc_feature (39)..(135): Homolog of NCBI NO: 39545843 NR Description: OSJNBb0060E08.14 [Oryza sativa (japonica
  misc_feature (217)..(509): Homolog of NCBI NO: 39545843 NR Description: OSJNBb0060E08.14 [Oryza sativa (japonica
  misc_feature (52)..(251): Homolog of NCBI NO: 39545842 NR Description: OSJNBb0060E08.13 [Oryza sativa (japonica
  misc_feature (255)..(509): Homolog of NCBI NO: 39545842 NR Description: OSJNBb0060E08.13 [Oryza sativa (japonica
  misc_feature (1)..(188): Homolog of NCBI NO: 38605781 NR Description: OSJNBa0044K18.24 [Oryza sativa (japonica
  misc_feature (293)..(509): Homolog of NCBI NO: 38605781 NR Description: OSJNBa0044K18.24 [Oryza sativa (japonica
  misc_feature (66)..(509): Homolog of NCBI NO: 5803254 NR Description: ESTs C97429(C60159),D22427(C11106), correspond to a region of the predicted gene.~hypothetical
  misc_feature (1)..(509): Homolog of NCBI NO: 38605785 NR Description: OSJNBa0044K18.28 [Oryza sativa (japonica
MLMSRRRDSKHLCGQIQARNRLVTSVVKRKISSCQHNNNQGCKRVAFSGADLPEDIWRHIHSLLPLRDAARVACVSHAFLRSWKCHPNLSFTRKALGLNRIPRQSDVIARDLTMKVDHILKKHSGKGVKKFRIELHMPVDPCYLNSWLQIAAELRVEELAVVLPSTCNANDYDFPCALFVDDGCRNAIEHLCLGGCAFHPTAGFGYLRKLRLFWVHITVDELECLISKSPALEHLALKYCYTITYLKIPSLLQHLSYLMVAACANLQTIECKAPNLSTFYFSGRQVELLFGCSVQVKTMEMRCSTQCNTIYNACANLPSIVPNIETLSISSVSEVVNIPIVPVKFLHLKYLSISLEGNGAFSPDYDYFSLVSLLDACPVLETFNLFVSQDRMKHDSVLGDPSSRLRQMPEYRHDNIKNVRIIGFCSAKSMVELACHILENATSLECLTLDTIRAFSIDRHIHKTGECGHIGRHMIREARKALLAVKRYIVGIVPSTVKLNVLQPCKLCHALAA

SEQ ID NO: 67331 - protein, 511 aa, Triticum aestivum
  peptide (1)..(511): Ceres Seq. ID no. 14301692
  misc_feature (50)..(92): Pfam Name: F-box domain Pfam Description: F-box domain
  misc_feature (169)..(333): Homolog of NCBI NO: 37533804 NR Description: hypothetical protein [Oryza sativa (japonica
  misc_feature (50)..(456): Homolog of NCBI NO: 37536392 NR Description: hypothetical protein [Oryza sativa (japonica
  misc_feature (37)..(133): Homolog of NCBI NO: 39545843 NR Description: OSJNBb0060E08.14 [Oryza sativa (japonica
  misc_feature (215)..(507): Homolog of NCBI NO: 39545843 NR Description: OSJNBb0060E08.14 [Oryza sativa (japonica
  misc_feature (50)..(249): Homolog of NCBI NO: 39545842 NR Description: OSJNBb0060E08.13 [Oryza sativa (japonica
  misc_feature (253)..(507): Homolog of NCBI NO: 39545842 NR Description: OSJNBb0060E08.13 [Oryza sativa (japonica
  misc_feature (1)..(186): Homolog of NCBI NO: 38605781 NR Description: OSJNBa0044K18.24 [Oryza sativa (japonica
  misc_feature (291)..(507): Homolog of NCBI NO: 38605781 NR Description: OSJNBa0044K18.24 [Oryza sativa (japonica
  misc_feature (64)..(507): Homolog of NCBI NO: 5803254 NR Description: ESTs C97429(C60159),D22427(C11106), correspond to a region of the predicted gene.~hypothetical
  misc_feature (1)..(507): Homolog of NCBI NO: 38605785 NR Description: OSJNBa0044K18.28 [Oryza sativa (japonica
MSRRRDSKHLCGQIQARNRLVTSVVKRKISSCQHNNNQGCKRVAFSGADLPEDIWRHIHSLLPLRDAARVACVSHAFLRSWKCHPNLSFTRKALGLNRIPRQSDVIARDLTMKVDHILKKHSGKGVKKFRIELHMPVDPCYLNSWLQIAAELRVEELAVVLPSTCNANDYDFPCALFVDDGCRNAIEHLCLGGCAFHPTAGFGYLRKLRLFWVHITVDELECLISKSPALEHLALKYCYTITYLKIPSLLQHLSYLMVAACANLQTIECKAPNLSTFYFSGRQVELLFGCSVQVKTMEMRCSTQCNTIYNACANLPSIVPNIETLSISSVSEVVNIPIVPVKFLHLKYLSISLEGNGAFSPDYDYFSLVSLLDACPVLETFNLFVSQDRMKHDSVLGDPSSRLRQMPEYRHDNIKNVRIIGFCSAKSMVELACHILENATSLECLTLDTIRAFSIDRHIHKTGECGHIGRHMIREARKALLAVKRYIVGIVPSTVKLNVLQPCKLCHALAA

SEQ ID NO: 67332 - DNA, 1481 bp, Triticum aestivum
  misc_feature (1)..(1481): Ceres Seq. ID no. 15176966
ggcccactgcccacgcgcacccggtcgccgtcacgctagcctcgcttcgcctcctccgtccgccgcgccgtcgtttccgcggccgtcgcgctcccgcctccccacgacgacaaaacgccccacgcgccgtgcgcccgcgcgaatatacccaccacggcaccaccccaccattcccctcgccgccgagccgcgcccctctcgcacacactgccacatcccccagaccccgggcaaatatcgccatggccgcctccgcggcgccactccgggccgcgctcgcccgcagccccgcccccgccgccgcgcgcgctccgcccggcttcctcccactccctccccgcgcccgccgcgtccgcctcggtccggtcgccctcgtctccgggagggggaggaggatccgcgcggaggcgacggcgaggacgcggcaggagaaggagcagcaggaggccgaggtgtccgccgtcgaggactccttcgccgtcagggaggcggccgcagctcctcccccggaagaaggtggattcgatgaggagctcaccctcgccggcgaggacggcgactgggtcgtcaggttcgagcagtccttcaacgtattcctcacggatactgtcatctttatactcgatattctgtaccgcgaccgcgactacgccaggttcttcgtgctcgagacaatcgccagggtgccctatttcgcgtttatatcggtgcttcacttgtacgagacctttggctggtcgagaagagctgataacatcaaagtgcactttgctgaaagcatgaatgagttccatcacctcttaatcatggaagcattgggtggcaactctgtatggcttgatcgctttcttgcgcggtttagcgcctttttttactacttcgtcactgttggcatgtacatgctgagcccaagaatggcataccacttttctgaatgtgttgagaggcatgcatactcaacttatgacaagttccttaagctcaacggagaggagttgaaaaaactaccagctccagaggtggctgtaaactattacatgaatgaggatctctacatgtttgatgagtttcaaacatcaagagctccaaattctaggaggcctaaagttgataacttgtatgatgtattcgtgaatgtacgggacgatgaggcggagcattgcaagacaatgaaggcttgtcaaacgcatgaaaccctccgttctcctcatgccgtgcagagctcagtagaagctgatgcagaatgattctgtcaagaagtcccttggaaatgaagactgaccggttgtacgtacctccgtgctatagcgtcgtagagtatcatactaaattttggtgatatattgtattccatcctttttctcccttctcttcgtatgtagacattagccagactttcttacttgtgaatcttacatagggaatataggtttataaatgcatcacatatttacaatgagagacgtgcattgtttgtcagg

SEQ ID NO: 67333 - protein, 414 aa, Triticum aestivum
  peptide (1)..(414): Ceres Seq. ID no. 15176967
  misc_feature (167)..(380): Pfam Name: Alternative oxidase Pfam Description: Alternative oxidase
  misc_feature (182)..(399): Homolog of NCBI NO: 20149254 NR Description: quinol-to-oxygen oxidoreductase [Chlamydomonas
  misc_feature (199)..(403): Homolog of NCBI NO: 17229588 NR Description: oxidase [Nostoc sp. PCC 7120]
  misc_feature (198)..(412): Homolog of NCBI NO: 37520170 NR Description: oxidase [Gloeobacter violaceus]
  misc_feature (130)..(414): Homolog of NCBI NO: 7486836 NR Description: hypothetical protein T10I14.90 - Arabidopsis
  misc_feature (121)..(403): Homolog of NCBI NO: 9937099 NR Description: plastid terminal oxidase [Lycopersicon
  misc_feature (133)..(403): Homolog of NCBI NO: 9937103 NR Description: plastid terminal oxidase [Capsicum annuum]
  misc_feature (130)..(414): Homolog of NCBI NO: 18415888 NR Description: alternative oxidase, putative (IMMUTANS)
  misc_feature (130)..(414): Homolog of NCBI NO: 3929647 NR Description: Immutans protein [Arabidopsis thaliana]
  misc_feature (88)..(414): Homolog of NCBI NO: 21105122 NR Description: oxidase [Oryza sativa (japonica cultivar-group)]
  misc_feature (167)..(383): Homolog of NCBI NO: 9837152 NR Description: oxidase [Triticum aestivum]
PTAHAHPVAVTLASLRLLRPPRRRFRGRRAPASPRRQNAPRAVRPREYTHHGTTPPFPSPPSRAPLAHTATSPRPRANIAMAASAAPLRAALARSPAPAAARAPPGFLPLPPRARRVRLGPVALVSGRGRRIRAEATARTRQEKEQQEAEVSAVEDSFAVREAAAAPPPEEGGFDEELTLAGEDGDWVVRFEQSFNVFLTDTVIFILDILYRDRDYARFFVLETIARVPYFAFISVLHLYETFGWSRRADNIKVHFAESMNEFHHLLIMEALGGNSVWLDRFLARFSAFFYYFVTVGMYMLSPRMAYHFSECVERHAYSTYDKFLKLNGEELKKLPAPEVAVNYYMNEDLYMFDEFQTSRAPNSRRPKVDNLYDVFVNVRDDEAEHCKTMKACQTHETLRSPHAVQSSVEADAE

SEQ ID NO: 67334 - protein, 334 aa, Triticum aestivum
  peptide (1)..(334): Ceres Seq. ID no. 15176968
  misc_feature (87)..(300): Pfam Name: Alternative oxidase Pfam Description: Alternative oxidase
  misc_feature (102)..(319): Homolog of NCBI NO: 20149254 NR Description: quinol-to-oxygen oxidoreductase [Chlamydomonas
  misc_feature (119)..(323): Homolog of NCBI NO: 17229588 NR Description: oxidase [Nostoc sp. PCC 7120]
  misc_feature (118)..(332): Homolog of NCBI NO: 37520170 NR Description: oxidase [Gloeobacter violaceus]
  misc_feature (50)..(334): Homolog of NCBI NO: 7486836 NR Description: hypothetical protein T10I14.90 - Arabidopsis
  misc_feature (41)..(323): Homolog of NCBI NO: 9937099 NR Description: plastid terminal oxidase [Lycopersicon
  misc_feature (53)..(323): Homolog of NCBI NO: 9937103 NR Description: plastid terminal oxidase [Capsicum annuum]
  misc_feature (50)..(334): Homolog of NCBI NO: 18415888 NR Description: alternative oxidase, putative (IMMUTANS)
  misc_feature (50)..(334): Homolog of NCBI NO: 3929647 NR Description: Immutans protein [Arabidopsis thaliana]
  misc_feature (8)..(334): Homolog of NCBI NO: 21105122 NR Description: oxidase [Oryza sativa (japonica cultivar-group)]
  misc_feature (87)..(303): Homolog of NCBI NO: 9837152 NR Description: oxidase [Triticum aestivum]
MAASAAPLRAALARSPAPAAARAPPGFLPLPPRARRVRLGPVALVSGRGRRIRAEATARTRQEKEQQEAEVSAVEDSFAVREAAAAPPPEEGGFDEELTLAGEDGDWVVRFEQSFNVFLTDTVIFILDILYRDRDYARFFVLETIARVPYFAFISVLHLYETFGWSRRADNIKVHFAESMNEFHHLLIMEALGGNSVWLDRFLARFSAFFYYFVTVGMYMLSPRMAYHFSECVERHAYSTYDKFLKLNGEELKKLPAPEVAVNYYMNEDLYMFDEFQTSRAPNSRRPKVDNLYDVFVNVRDDEAEHCKTMKACQTHETLRSPHAVQSSVEADAE

SEQ ID NO: 67335 - DNA, 856 bp, Triticum aestivum
  misc_feature (1)..(856): Ceres Seq. ID no. 13659500
actagtgcctaccggaagtccacaacacacctttgccgtctcccctctccttttatatttgtctcatgcaagcttataatcgctcaaagacaagacgagaagagcaagaagagaagcatatgacgcagatggaggagctcgtgcaccagtgcgacatggaggtcatgaagatggccatgctcaagcacgagcagacattcaggcagcaggtgcatgatctacaccggctgtaccgagtccagaagcagctcatgggcgaccagagcgggcgcccgtcggtgccaccctgccatcaggtgcagcggcgcagggagcacccccgccggccggagctgagcctgcagctccctgtcgacgacgacgagtacgccgtcgtcagcggcggcacaggccgcctagcgacgccgccgtccatggagagcgaggacgagctggagctgacgctggccgtcggcggcggcggcgggaacggcggcagcagccggagccagaggaggaggcgggagagtgcgacggactgctccggcagaagaagcccacagacgccgtcttcgtcgaccgactccgacgacgcgctccgcacggtgccgcaccaccagagggcgacggcgtgtgatctccggggaggggtgatggtgtcgaagcagccgcaatggctggtgcgctgtctcagccttaggatggcttgatcgatttcacgacgagacctctactgtagacttttgttaaattgctaccggtttccccgcgtggttactggtactccctcctctgtcccataatagcgttttttacactacactagtgtcaaaaacactcttatattataagacggagggaatagtaaattagattg

SEQ ID NO: 67336 - protein, 207 aa, Triticum aestivum
  peptide (1)..(207): Ceres Seq. ID no. 13659501
  misc_feature (22)..(65): Homolog of NCBI NO: 17027268 NR Description: hypothetical protein [Oryza sativa (japonica
  misc_feature (22)..(169): Homolog of NCBI NO: 15240736 NR Description: expressed protein [Arabidopsis thaliana]
MQAYNRSKTRREEQEEKHMTQMEELVHQCDMEVMKMAMLKHEQTFRQQVHDLHRLYRVQKQLMGDQSGRPSVPPCHQVQRRREHPRRPELSLQLPVDDDEYAVVSGGTGRLATPPSMESEDELELTLAVGGGGGNGGSSRSQRRRRESATDCSGRRSPQTPSSSTDSDDALRTVPHHQRATACDLRGGVMVSKQPQWLVRCLSLRMA

SEQ ID NO: 67337 - protein, 189 aa, Triticum aestivum
  peptide (1)..(189): Ceres Seq. ID no. 13659502
  misc_feature (4)..(47): Homolog of NCBI NO: 17027268 NR Description: hypothetical protein [Oryza sativa (japonica
  misc_feature (4)..(151): Homolog of NCBI NO: 15240736 NR Description: expressed protein [Arabidopsis thaliana]
MTQMEELVHQCDMEVMKMAMLKHEQTFRQQVHDLHRLYRVQKQLMGDQSGRPSVPPCHQVQRRREHPRRPELSLQLPVDDDEYAVVSGGTGRLATPPSMESEDELELTLAVGGGGGNGGSSRSQRRRRESATDCSGRRSPQTPSSSTDSDDALRTVPHHQRATACDLRGGVMVSKQPQWLVRCLSLRMA

SEQ ID NO: 67338 - protein, 186 aa, Triticum aestivum
  peptide (1)..(186): Ceres Seq. ID no. 13659503
  misc_feature (1)..(44): Homolog of NCBI NO: 17027268 NR Description: hypothetical protein [Oryza sativa (japonica
  misc_feature (1)..(148): Homolog of NCBI NO: 15240736 NR Description: expressed protein [Arabidopsis thaliana]
MEELVHQCDMEVMKMAMLKHEQTFRQQVHDLHRLYRVQKQLMGDQSGRPSVPPCHQVQRRREHPRRPELSLQLPVDDDEYAVVSGGTGRLATPPSMESEDELELTLAVGGGGGNGGSSRSQRRRRESATDCSGRRSPQTPSSSTDSDDALRTVPHHQRATACDLRGGVMVSKQPQWLVRCLSLRMA

SEQ ID NO: 67339 - DNA, 1476 bp, Triticum aestivum
  misc_feature (1)..(1476): Ceres Seq. ID no. 13664061
cgcgttgcgtttgcgttgcccaccccccgccgcaactctctcatccatcgcatccccgcgcctcctaccgccatcccatccaactcctcttccccacgcacgcgcttcgcgcctcaaatagcacgaacggggcaatggcagcggcgcggccctgttgcagcagcagccaccggcaatcgcgcctcctcgtcctcgccgcctgcgcgtcgcccacgccgctgctgctgctttagccgtccccgacttccgctccgaggtgatcgctcccccggccggatgggtgatctgggcgtccgggttgtgggcagaggctgcgccgcgccgatggagccgcgcaaggagatggtggcgccgtcgctggagcagcaggggcagcagcagcatcctcccctcttcatggatttctcccgacgagatggagtcgcagatggcggcaacgggcggaagcggccgcgcgagaccgtggcgccgccggcacgcctcttctccctacaggcgccgcagggttctcccgggcacaaggtgatacacctggcgcagctgcaccggcggccggcggcgacgggcctgcggctcgacttcgacgagggaggctcggagcacgtggcgtgcacgtcgtcgacgtcgtcccttctccccggcgagctcgccgctcagtgcgggcggcacaacaacgagatcgaccggctgctccaggaacacgcggagagactccggcttgcgctggccgacacgaggcgtcggcagaaccgctcgctgctgggcgccgcagaggcgctggccgccggcgggtcagggaggtggaggcggagaccttcaaggcggcacggcgcggcgtcgagctggaggagcggctggccaggctgagggcggaggcggcgtcgtggcaagccaaggcaatgtccgaccagtccacggcggccgcgctgcacgcgcagttgcagcaggaagcggccacagcgcaggcgaggagtggcaaggccgccgaggaggccgagggagcggcggacgacgccgagtccggcttcatcgaccctgacagggtggtggaggtggtggccccgccaccggccaggccgtgccgcgcgtgccggctccggccggccaccaccgtgctgctcccctgcaggcacctctgcgtgtgcgccgcgtgcgatcccggcgcctctgcctcccaagccggcaccgccgccgccgcggcctgccccgcgtgccgctgccccatcaccggcaccgtgcaggtcttcttcgcgtgaaacgggtccccgccggatcatgaaatcagaaccatggaaaagctgtagtagatcagatcagacagggtgcataattccttcctctcttttctcccgtgctagtgaactgatccctccatgatcgcttcacctcttttgctggtgatctagtaaatctttactaatttgatttgaatcttgcgtgacagtttttactgctagcaacgcgttgattaggtgg

SEQ ID NO: 67340 - protein, 288 aa, Triticum aestivum
  peptide (1)..(288): Ceres Seq. ID no. 13664062
  misc_feature (215)..(258): Homolog of NCBI NO: 21617976 NR Description: unknown [Arabidopsis thaliana]
  misc_feature (215)..(258): Homolog of NCBI NO: 18399792 NR Description: expressed protein [Arabidopsis thaliana]
  misc_feature (203)..(258): Homolog of NCBI NO: 30694690 NR Description: expressed protein [Arabidopsis thaliana]
  misc_feature (203)..(258): Homolog of NCBI NO: 30694694 NR Description: expressed protein [Arabidopsis thaliana]
  misc_feature (216)..(263): Homolog of NCBI NO: 38346144 NR Description: OSJNBb0118P14.4 [Oryza sativa (japonica
  misc_feature (216)..(263): Homolog of NCBI NO: 21740631 NR Description: OSJNBb0012E08.13 [Oryza sativa (japonica
  misc_feature (146)..(258): Homolog of NCBI NO: 18398566 NR Description: expressed protein [Arabidopsis thaliana]
  misc_feature (125)..(260): Homolog of NCBI NO: 30684141 NR Description: conserved hypothetical protein [Arabidopsis
  misc_feature (125)..(260): Homolog of NCBI NO: 7485189 NR Description: hypothetical protein - Arabidopsis thaliana
  misc_feature (94)..(279): Homolog of NCBI NO: 37536932 NR Description: hypothetical protein [Oryza sativa (japonica
RVAFALPTPRRNSLIHRIPAPPTAIPSNSSSPRTRFAPQIARTGQWQRRGPVAAAATGNRASSSSPPARRPRRCCCFSRPRLPLRGDRSPGRMGDLGVRVVGRGCAAPMEPRKEMVAPSLEQQGQQQHPPLFMDFSRRDGVADGGNGRKRPRETVAPPARLFSLQAPQGSPGHKVIHLAQLHRRPAATGLRLDFDEGGSEHVACTSSTSSLLPGELAAQCGRHNNEIDRLLQEHAERLRLALADTRRRQNRSLLGAAEALAAGGSGRWRRRPSRRHGAASSWRSGWPG

SEQ ID NO: 67341 - protein, 196 aa, Triticum aestivum
  peptide (1)..(196): Ceres Seq. ID no. 13664063
  misc_feature (123)..(166): Homolog of NCBI NO: 21617976 NR Description: unknown [Arabidopsis thaliana]
  misc_feature (123)..(166): Homolog of NCBI NO: 18399792 NR Description: expressed protein [Arabidopsis thaliana]
  misc_feature (111)..(166): Homolog of NCBI NO: 30694690 NR Description: expressed protein [Arabidopsis thaliana]
  misc_feature (111)..(166): Homolog of NCBI NO: 30694694 NR Description: expressed protein [Arabidopsis thaliana]
  misc_feature (124)..(171): Homolog of NCBI NO: 38346144 NR Description: OSJNBb0118P14.4 [Oryza sativa (japonica
  misc_feature (124)..(171): Homolog of NCBI NO: 21740631 NR Description: OSJNBb0012E08.13 [Oryza sativa (japonica
  misc_feature (54)..(166): Homolog of NCBI NO: 18398566 NR Description: expressed protein [Arabidopsis thaliana]
  misc_feature (33)..(168): Homolog of NCBI NO: 30684141 NR Description: conserved hypothetical protein [Arabidopsis
  misc_feature (33)..(168): Homolog of NCBI NO: 7485189 NR Description: hypothetical protein - Arabidopsis thaliana
  misc_feature (2)..(187): Homolog of NCBI NO: 37536932 NR Description: hypothetical protein [Oryza sativa (japonica
MGDLGVRVVGRGCAAPMEPRKEMVAPSLEQQGQQQHPPLFMDFSRRDGVADGGNGRKRPRETVAPPARLFSLQAPQGSPGHKVIHLAQLHRRPAATGLRLDFDEGGSEHVACTSSTSSLLPGELAAQCGRHNNEIDRLLQEHAERLRLALADTRRRQNRSLLGAAEALAAGGSGRWRRRPSRRHGAASSWRSGWPG

SEQ ID NO: 67342 - protein, 180 aa, Triticum aestivum
  peptide (1)..(180): Ceres Seq. ID no. 13664064
  misc_feature (107)..(150): Homolog of NCBI NO: 21617976 NR Description: unknown [Arabidopsis thaliana]
  misc_feature (107)..(150): Homolog of NCBI NO: 18399792 NR Description: expressed protein [Arabidopsis thaliana]
  misc_feature (95)..(150): Homolog of NCBI NO: 30694690 NR Description: expressed protein [Arabidopsis thaliana]
  misc_feature (95)..(150): Homolog of NCBI NO: 30694694 NR Description: expressed protein [Arabidopsis thaliana]
  misc_feature (108)..(155): Homolog of NCBI NO: 38346144 NR Description: OSJNBb0118P14.4 [Oryza sativa (japonica
  misc_feature (108)..(155): Homolog of NCBI NO: 21740631 NR Description: OSJNBb0012E08.13 [Oryza sativa (japonica
  misc_feature (38)..(150): Homolog of NCBI NO: 18398566 NR Description: expressed protein [Arabidopsis thaliana]
  misc_feature (17)..(152): Homolog of NCBI NO: 30684141 NR Description: conserved hypothetical protein [Arabidopsis
  misc_feature (17)..(152): Homolog of NCBI NO: 7485189 NR Description: hypothetical protein - Arabidopsis thaliana
  misc_feature (1)..(171): Homolog of NCBI NO: 37536932 NR Description: hypothetical protein [Oryza sativa (japonica
MEPRKEMVAPSLEQQGQQQHPPLFMDFSRRDGVADGGNGRKRPRETVAPPARLFSLQAPQGSPGHKVIHLAQLHRRPAATGLRLDFDEGGSEHVACTSSTSSLLPGELAAQCGRHNNEIDRLLQEHAERLRLALADTRRRQNRSLLGAAEALAAGGSGRWRRRPSRRHGAASSWRSGWPG

SEQ ID NO: 67343 - DNA, 1735 bp, Triticum aestivum
  misc_feature (1)..(1735): Ceres Seq. ID no. 14302343
tcaatttgggctctggtgtttaatttcgttagccttcttcctccgctcgtgtcgtcgtctccaccacttcctagccacgtctctgtcttcctctccctctcgttctccatctcgttacctctctgctgccaacccgacccaaggttgttcgtcgccagcatgggtctggcgaaggatggcgccgagatggaggagggcacattggagattggcatagagtataggactgtctccggtgtggcagggccattggttattttggacaaagtaaagggcccaaagtatcaggagattgtgaacatccgattgggagatggcaccactcgtcgtggtcaagtcctcgaagttgatggtgaaaaagctgttgtgcaggtatttgaaggtacttcagggatagacaacaagtatactactgtgcagttcacaggcgaggttttgaaaactcctgtctcacttgatatgcttggacgcatttttaatggttctggaaaacctattgataatggcccccctatattgcccgaggcttacttggatatttctggaagttctatcaacccaagtgagagaacctatccagaagagatgattcanacaggaatatccaccattgatgtcatgaactcgattgctcgagggcaaaaaattcctcttttctctgctgctggacttcctcataatgaaattgctgctcaaatttgtcgtcaagctggcctcgttaaaaggttggagcaaagcaagcatgcagcagaggaaggtgaagaagacaatttcgcaattgtgtttgctgctatgggagtaaacatggaaacggcacaatttttcaagcgtgacttcgaagaaaatggttcgatggagcgggtcacacttttcctgaatttggcaaatgaccccactattgagcgtattatcactcctcgaattgccctaacgactgctgaatatttggcatatgaatgtgggaagcatgttcttgtgattctgacagatatgagctcatatgccgatgcacttcgtgaggtctcagcagcacgagaagaggtacctggtaggcgtggttatcctgggtatatgtatactgatctggccaccatatatgagcgagctgggcgtatcgagggaagaaaaggatcaattactcaaattcctattcttacaatgcctaatgatgatatcactcatccaactcctgatcttacgggatacattaccgaagggcagatatatattgacagacagcttcataatagacagatatacccacccatcaacgtcctgccatctctttctcgtctgatgaagagtgctattggtgaaggtatgacacgccgggatcattcagatgtgtccaatcagctgtatgccaactacgccattgggaaggatgttcaagccatgaaagcagttgtcggagaggaggctctttcatctgaggacctgctctatttagaattcctcgacaagtttgagaggaaatttgtagcgcaaggagcatatgatactcggaacatttttcagtcacttgatctggcatggacattgctacgcatattcccccgtgaacttctccaccgtattcctgcgaagaccttggatcagttctacagcagagatgccacccattgatccattttgttcataaaaattcatttttttcatgatgaacagcttgaataagagaagaatccaaacttgtatcattttgctacgttatatagtcagatcctattcttcc

SEQ ID NO: 67344 - protein, 541 aa, Triticum aestivum
  peptide (1)..(541): Ceres Seq. ID no. 14302344
  misc_feature (257)..(436): Pfam Name: ATP synthase alpha/beta family, Pfam Description: ATP synthase alpha/beta family,
  misc_feature (47)..(541): Homolog of NCBI NO: 162723 NR Description: vacuolar H+-ATPase
  misc_feature (56)..(540): Homolog of NCBI NO: 17065080 NR Description: Unknown protein [Arabidopsis thaliana]
  misc_feature (54)..(541): Homolog of NCBI NO: 11266665 NR Description: H+-transporting two-sector ATPase (EC 3.6.3.14)
  misc_feature (53)..(540): Homolog of NCBI NO: 81637 NR Description: H+-exporting ATPase (EC 3.6.3.6) 57K chain -
  misc_feature (54)..(541): Homolog of NCBI NO: 26986106 NR Description: vacuolar ATPase subunit B [Mesembryanthemum
  misc_feature (54)..(539): Homolog of NCBI NO: 2493129 NR Description: Vacuolar ATP synthase subunit B isoform 1
  misc_feature (54)..(541): Homolog of NCBI NO: 15233891 NR Description: probable H+-transporting ATPase [Arabidopsis
  misc_feature (54)..(541): Homolog of NCBI NO: 14150751 NR Description: vacuolar ATPase B subunit [Oryza sativa]
  misc_feature (54)..(541): Homolog of NCBI NO: 2493131 NR Description: Vacuolar ATP synthase subunit B isoform 1
  misc_feature (62)..(541): Homolog of NCBI NO: 2493132 NR Description: Vacuolar ATP synthase subunit B isoform 2
  misc_feature (198)..(198): Xaa is any aa, unknown or other
SIWALVFNFVSLLPPLVSSSPPLPSHVSVFLSLSFSISLPLCCQPDPRLFVASMGLAKDGAEMEEGTLEIGIEYRTVSGVAGPLVILDKVKGPKYQEIVNIRLGDGTTRRGQVLEVDGEKAVVQVFEGTSGIDNKYTTVQFTGEVLKTPVSLDMLGRIFNGSGKPIDNGPPILPEAYLDISGSSINPSERTYPEEMIXTGISTIDVMNSIARGQKIPLFSAAGLPHNEIAAQICRQAGLVKRLEQSKHAAEEGEEDNFAIVFAAMGVNMETAQFFKRDFEENGSMERVTLFLNLANDPTIERIITPRIALTTAEYLAYECGKHVLVILTDMSSYADALREVSAAREEVPGRRGYPGYMYTDLATIYERAGRIEGRKGSITQIPILTMPNDDITHPTPDLTGYITEGQIYIDRQLHNRQIYPPINVLPSLSRLMKSAIGEGMTRRDHSDVSNQLYANYAIGKDVQAMKAVVGEEALSSEDLLYLEFLDKFERKFVAQGAYDTRNIFQSLDLAWTLLRIFPRELLHRIPAKTLDQFYSRDATH

SEQ ID NO: 67345 - protein, 488 aa, Triticum aestivum
  peptide (1)..(488): Ceres Seq. ID no. 14302345
  misc_feature (204)..(383): Pfam Name: ATP synthase alpha/beta family, Pfam Description: ATP synthase alpha/beta family,
  misc_feature (1)..(488): Homolog of NCBI NO: 162723 NR Description: vacuolar H+-ATPase
  misc_feature (3)..(487): Homolog of NCBI NO: 17065080 NR Description: Unknown protein [Arabidopsis thaliana]
  misc_feature (1)..(488): Homolog of NCBI NO: 11266665 NR Description: H+-transporting two-sector ATPase (EC 3.6.3.14)
  misc_feature (1)..(487): Homolog of NCBI NO: 81637 NR Description: H+-exporting ATPase (EC 3.6.3.6) 57K chain -
  misc_feature (1)..(488): Homolog of NCBI NO: 26986106 NR Description: vacuolar ATPase subunit B [Mesembryanthemum
  misc_feature (1)..(486): Homolog of NCBI NO: 2493129 NR Description: Vacuolar ATP synthase subunit B isoform 1
  misc_feature (1)..(488): Homolog of NCBI NO: 15233891 NR Description: probable H+-transporting ATPase [Arabidopsis
  misc_feature (1)..(488): Homolog of NCBI NO: 14150751 NR Description: vacuolar ATPase B subunit [Oryza sativa]
  misc_feature (1)..(488): Homolog of NCBI NO: 2493131 NR Description: Vacuolar ATP synthase subunit B isoform 1
  misc_feature (9)..(488): Homolog of NCBI NO: 2493132 NR Description: Vacuolar ATP synthase subunit B isoform 2
  misc_feature (145)..(145): Xaa is any aa, unknown or other
MGLAKDGAEMEEGTLEIGIEYRTVSGVAGPLVILDKVKGPKYQEIVNIRLGDGTTRRGQVLEVDGEKAVVQVFEGTSGIDNKYTTVQFTGEVLKTPVSLDMLGRIFNGSGKPIDNGPPILPEAYLDISGSSINPSERTYPEEMIXTGISTIDVMNSIARGQKIPLFSAAGLPHNEIAAQICRQAGLVKRLEQSKHAAEEGEEDNFAIVFAAMGVNMETAQFFKRDFEENGSMERVTLFLNLANDPTIERIITPRIALTTAEYLAYECGKHVLVILTDMSSYADALREVSAAREEVPGRRGYPGYMYTDLATIYERAGRIEGRKGSITQIPILTMPNDDITHPTPDLTGYITEGQIYIDRQLHNRQIYPPINVLPSLSRLMKSAIGEGMTRRDHSDVSNQLYANYAIGKDVQAMKAVVGEEALSSEDLLYLEFLDKFERKFVAQGAYDTRNIFQSLDLAWTLLRIFPRELLHRIPAKTLDQFYSRDATH

SEQ ID NO: 67346 - protein, 479 aa, Triticum aestivum
  peptide (1)..(479): Ceres Seq. ID no. 14302346
  misc_feature (195)..(374): Pfam Name: ATP synthase alpha/beta family, Pfam Description: ATP synthase alpha/beta family,
  misc_feature (1)..(479): Homolog of NCBI NO: 162723 NR Description: vacuolar H+-ATPase
  misc_feature (1)..(478): Homolog of NCBI NO: 17065080 NR Description: Unknown protein [Arabidopsis thaliana]
  misc_feature (1)..(479): Homolog of NCBI NO: 11266665 NR Description: H+-transporting two-sector ATPase (EC 3.6.3.14)
  misc_feature (1)..(478): Homolog of NCBI NO: 81637 NR Description: H+-exporting ATPase (EC 3.6.3.6) 57K chain -
  misc_feature (1)..(479): Homolog of NCBI NO: 26986106 NR Description: vacuolar ATPase subunit B [Mesembryanthemum
  misc_feature (1)..(477): Homolog of NCBI NO: 2493129 NR Description: Vacuolar ATP synthase subunit B isoform 1
  misc_feature (1)..(479): Homolog of NCBI NO: 15233891 NR Description: probable H+-transporting ATPase [Arabidopsis
  misc_feature (1)..(479): Homolog of NCBI NO: 14150751 NR Description: vacuolar ATPase B subunit [Oryza sativa]
  misc_feature (1)..(479): Homolog of NCBI NO: 2493131 NR Description: Vacuolar ATP synthase subunit B isoform 1
  misc_feature (1)..(479): Homolog of NCBI NO: 2493132 NR Description: Vacuolar ATP synthase subunit B isoform 2
  misc_feature (136)..(136): Xaa is any aa, unknown or other
MEEGTLEIGIEYRTVSGVAGPLVILDKVKGPKYQEIVNIRLGDGTTRRGQVLEVDGEKAVVQVFEGTSGIDNKYTTVQFTGEVLKTPVSLDMLGRIFNGSGKPIDNGPPILPEAYLDISGSSINPSERTYPEEMIXTGISTIDVMNSIARGQKIPLFSAAGLPHNEIAAQICRQAGLVKRLEQSKHAAEEGEEDNFAIVFAAMGVNMETAQFFKRDFEENGSMERVTLFLNLANDPTIERIITPRIALTTAEYLAYECGKHVLVILTDMSSYADALREVSAAREEVPGRRGYPGYMYTDLATIYERAGRIEGRKGSITQIPILTMPNDDITHPTPDLTGYITEGQIYIDRQLHNRQIYPPINVLPSLSRLMKSAIGEGMTRRDHSDVSNQLYANYAIGKDVQAMKAVVGEEALSSEDLLYLEFLDKFERKFVAQGAYDTRNIFQSLDLAWTLLRIFPRELLHRIPAKTLDQFYSRDATH

SEQ ID NO: 67347 - DNA, 1218 bp, Triticum aestivum
  misc_feature (1)..(1218): Ceres Seq. ID no. 14313358
acacaagcactgccttccttccctagtcattgggaaggagaagaacacacagttagatacatccatctgatctgcttagttaccgtgctctgtactcctgatcaggatggcagaagggctcttctccatggctcacccgtgggcctccgcctttggcatcctaggcaacatcatatccttcctggtgttcctcgcgcccacgccgacgttcctgcgggtgtaccggaagaagtcgacggaggggttcagcgcggtgccgtacgtggtggcgctcttcagctgcatgctgtggatcttctacgcgctggtcaagaccaactccagcccgctgctcaccatcaacgcctttggctgcgtcgtcgagggcttctacatcctgctctacgtggtgtacgcgcccaggcacgccaggcaccgcgccctcgccttcttcctcctcctcgacgtcgccgccttcgccctcatcgtcgccgtcaccgtgttcctcgtgccccagcccagccgcgtcaaggtcctcggcagcgtctgcctcgccttctccatggccgtcttcgtcgccccgctcagcgtcatcttcgtggtgatcaagaccaagagcgccgagtacatgcccttctcgctctccttcttcctcaccctcagcgccgtcgcctggttcttctatggcctcttcaccaaggacatctacgtcaccctcccgaacgtgggcgggttcttctttggggtggcccagatgacgctctacttctgctaccgcaagccggacacgtcggccctggtgctgccgacggggatccacgacgtgtccacggagccggcggcgcagcaggaggtggagctgccggagggcacccacccggcggtggccatgctgacggtgagcacgctgccgatgctggcggagctgcagaagatggagcaggagatcagctcgcccaccccgcgcaagggctacatcaaggctttctgatccgatcgagatgaccgatgcacgcacgggcgcatgcattcaggagatgaatcaatcgctaatgattggcgaaccgaccgccagcagagatacgtttatatagttcttaatttcagtcgttcgtttgtaatggtctgtactagtagcacagtcgtgtgtgtgttgtcgtccaagggtctgatataccggccggccgggcaagtaattcatctaccaatccacgtgccctgggaaataaagttataaac

SEQ ID NO: 67348 - protein, 327 aa, Triticum aestivum
  peptide (1)..(327): Ceres Seq. ID no. 14313359
  misc_feature (232)..(315): Pfam Name: Glycoprotein GG/GX Pfam Description: Glycoprotein GG/GX
TQALPSFPSHWEGEEHTVRYIHLICLVTVLCTPDQDGRRALLHGSPVGLRLWHPRQHHILPGVPRAHADVPAGVPEEVDGGVQRGAVRGGALQLHAVDLLRAGQDQLQPAAHHQRLWLRRRGLLHPALRGVRAQARQAPRPRLLPPPRRRRLRPHRRRHRVPRAPAQPRQGPRQRLPRLLHGRLRRPAQRHLRGDQDQERRVHALLALLLPHPQRRRLVLLWPLHQGHLRHPPERGRVLLWGGPDDALLLLPQAGHVGPGAADGDPRRVHGAGGAAGGGAAGGHPPGGGHADGEHAADAGGAAEDGAGDQLAHPAQGLHQGFLIRSR

SEQ ID NO: 67349 - protein, 287 aa, Triticum aestivum
  peptide (1)..(287): Ceres Seq. ID no. 14313360
  misc_feature (16)..(101): Pfam Name: MtN3/saliva family Pfam Description: MtN3/saliva family
  misc_feature (13)..(225): Homolog of NCBI NO: 15234863 NR Description: nodulin MtN3 family protein [Arabidopsis
  misc_feature (12)..(217): Homolog of NCBI NO: 14715258 NR Description: N3 like protein [Medicago truncatula]
  misc_feature (5)..(258): Homolog of NCBI NO: 15237803 NR Description: nodulin MtN3 family protein [Arabidopsis
  misc_feature (5)..(222): Homolog of NCBI NO: 15229019 NR Description: nodulin MtN3 family protein [Arabidopsis
  misc_feature (12)..(217): Homolog of NCBI NO: 21593109 NR Description: MtN3-like protein [Arabidopsis thaliana]
  misc_feature (12)..(217): Homolog of NCBI NO: 15241278 NR Description: nodulin MtN3 family protein [Arabidopsis
  misc_feature (13)..(224): Homolog of NCBI NO: 1619602 NR Description: MtN3 [Medicago truncatula]
  misc_feature (13)..(234): Homolog of NCBI NO: 15241265 NR Description: nodulin MtN3 family protein [Arabidopsis
  misc_feature (4)..(250): Homolog of NCBI NO: 21593422 NR Description: senescence-associated protein (SAG29)
  misc_feature (4)..(250): Homolog of NCBI NO: 15240040 NR Description: nodulin MtN3 family protein [Arabidopsis
MAEGLFSMAHPWASAFGILGNIISFLVFLAPTPTFLRVYRKKSTEGFSAVPYVVALFSCMLWIFYALVKTNSSPLLTINAFGCVVEGFYILLYVVYAPRHARHRALAFFLLLDVAAFALIVAVTVFLVPQPSRVKVLGSVCLAFSMAVFVAPLSVIFVVIKTKSAEYMPFSLSFFLTLSAVAWFFYGLFTKDIYVTLPNVGGFFFGVAQMTLYFCYRKPDTSALVLPTGIHDVSTEPAAQQEVELPEGTHPAVAMLTVSTLPMLAELQKMEQEISSPTPRKGYIKAF

SEQ ID NO: 67350 - protein, 280 aa, Triticum aestivum
  peptide (1)..(280): Ceres Seq. ID no. 14313361
  misc_feature (9)..(94): Pfam Name: MtN3/saliva family Pfam Description: MtN3/saliva family
  misc_feature (6)..(218): Homolog of NCBI NO: 15234863 NR Description: nodulin MtN3 family protein [Arabidopsis
  misc_feature (5)..(210): Homolog of NCBI NO: 14715258 NR Description: N3 like protein [Medicago truncatula]
  misc_feature (1)..(251): Homolog of NCBI NO: 15237803 NR Description: nodulin MtN3 family protein [Arabidopsis
  misc_feature (1)..(215): Homolog of NCBI NO: 15229019 NR Description: nodulin MtN3 family protein [Arabidopsis
  misc_feature (5)..(210): Homolog of NCBI NO: 21593109 NR Description: MtN3-like protein [Arabidopsis thaliana]
  misc_feature (5)..(210): Homolog of NCBI NO: 15241278 NR Description: nodulin MtN3 family protein [Arabidopsis
  misc_feature (6)..(217): Homolog of NCBI NO: 1619602 NR Description: MtN3 [Medicago truncatula]
  misc_feature (6)..(227): Homolog of NCBI NO: 15241265 NR Description: nodulin MtN3 family protein [Arabidopsis
  misc_feature (1)..(243): Homolog of NCBI NO: 21593422 NR Description: senescence-associated protein (SAG29)
  misc_feature (1)..(243): Homolog of NCBI NO: 15240040 NR Description: nodulin MtN3 family protein [Arabidopsis
MAHPWASAFGILGNIISFLVFLAPTPTFLRVYRKKSTEGFSAVPYVVALFSCMLWIFYALVKTNSSPLLTINAFGCVVEGFYILLYVVYAPRHARHRALAFFLLLDVAAFALIVAVTVFLVPQPSRVKVLGSVCLAFSMAVFVAPLSVIFVVIKTKSAEYMPFSLSFFLTLSAVAWFFYGLFTKDIYVTLPNVGGFFFGVAQMTLYFCYRKPDTSALVLPTGIHDVSTEPAAQQEVELPEGTHPAVAMLTVSTLPMLAELQKMEQEISSPTPRKGYIKAF

SEQ ID NO: 67351 - DNA, 1677 bp, Triticum aestivum
  misc_feature (1)..(1677): Ceres Seq. ID no. 13598075
actacaataagcggcgcctttttcgtctagcatccctcgtgtgtgtgtctccacggtcaaatcgggataaagcaacggcgacgtcatggcctcgccggcgacgccgaggccggcgctgatccggccgcgggcctcgcgcagccgctcccagttgggcgccgtcagcctcgcttccgaccacgccgccgccacggcctcctcgggccgccgccgcgacttcgtcttcgtcgtcaacccctccggcgccaatggccggacgggcaagcagtggaagcagctgctccccttcctccacacccgcctcgccgaccaatgcaacatttgcgagtgcatcacatcgggcccgtcgcacgccatagatgtcacgagggaggctataaaggacggcgctgatgctgtgatcgccgttggcggggatgggacgcttcatgaggtggtgaatggcttcttttggaaaggaagcccggtccgtgctcttgatcgagggcctgaccacttgacggcgcttggtctcatcccacttggaactggctcagactttgctaggacatttggctggtcaaatgatccccatcaggcgattgatcgaattgtgagaggagttaaatcaaaactagacattggcatgatggaaggtccaaatggagatccacatttctttataaatgttgctgatatccatctgagtgccaaggcaggttattttgcttctatgtacaagagatttggcaacttatgttatgttctgggagctttaagaggcttttggggacatagtaatcgagatttgagaataaaggtgaatggaggggaatggagaacagttgataaagtcactgctctatgcgtaggaaatgccaagtactttggaggtggcatgaagattactccaacagttgatccttttagcggtgaccttcaggttgttattatacaagatttcaagtggtacagttttcttcttaagctacataggctttatggaggcacacacttaacggtgaatggcgtgtcatcaataagagttcaatcaattgaagtggtagaggtggtgcctaacggcgacgtctttgtgcaatctgacggggagcatttcggttttcttccgaccaaattctcagttctgcctggtgcagtagatttcttcagctagatcgctgtgctgtttcttcctgttggatgttgacagacagaagatgcatgatccttggccgacttgctctgttcacctagatcacgacgttcttcctcctgttacgctagcttaagatgacgcggcaatcaggttgctccactcactcatcttctggtctgatatggtagtacggacatgaaacaaattactgctgtgcagcggcacccaccatgtatttctatgcctgcatgcagcatacagtagccgagtcgtcgatgttcatagacaagccgtagagtcacagcacagcggccatgagtgtaaatttcacaattgtttcttcagtcttgtgagtaccgtgtgcaatgatacggctgcttgttgttcgaacagctgaagtgcctgcagatccagtgtgaagttgatgcatttcccaacctccaaggtaaatgctgtcgcgaaagctctgtaacttttactctgccccctggttgagtgtactccacaagtgtgagaaaataatctagtgcttcttttggagt

SEQ ID NO: 67352 - protein, 355 aa, Triticum aestivum
  peptide (1)..(355): Ceres Seq. ID no. 15222252
  misc_feature (44)..(183): Pfam Name: Diacylglycerol kinase catalytic domain (presumed) Pfam Description: Diacylglycerol kinase catalytic domain
  misc_feature (47)..(351): Homolog of NCBI NO: 27365613 NR Description: Conserved hypothetical protein [Vibrio vulnificus
  misc_feature (81)..(354): Homolog of NCBI NO: 22964447 NR Description: hypothetical protein [Rhodopseudomonas palustris]
  misc_feature (48)..(351): Homolog of NCBI NO: 15614516 NR Description: BH1953~unknown conserved protein [Bacillus
  misc_feature (79)..(351): Homolog of NCBI NO: 17230373 NR Description: hypothetical protein [Nostoc sp. PCC 7120]
  misc_feature (47)..(335): Homolog of NCBI NO: 20809116 NR Description: conserved hypothetical protein
  misc_feature (48)..(351): Homolog of NCBI NO: 13472344 NR Description: hypothetical protein [Mesorhizobium loti]
  misc_feature (46)..(351): Homolog of NCBI NO: 15643126 NR Description: conserved hypothetical protein [Thermotoga
  misc_feature (36)..(351): Homolog of NCBI NO: 33413155 NR Description: hypothetical protein [Thermotoga sp. RQ2]
  misc_feature (33)..(202): Homolog of NCBI NO: 14423554 NR Description: Unknown protein [Arabidopsis thaliana]
  misc_feature (33)..(355): Homolog of NCBI NO: 18406971 NR Description: expressed protein [Arabidopsis thaliana]
MASPATPRPALIRPRASRSRSQLGAVSLASDHAAATASSGRRRDFVFVVNPSGANGRTGKQWKQLLPFLHTRLADQCNICECITSGPSHAIDVTREAIKDGADAVIAVGGDGTLHEVVNGFFWKGSPVRALDRGPDHLTALGLIPLGTGSDFARTFGWSNDPHQAIDRIVRGVKSKLDIGMMEGPNGDPHFFINVADIHLSAKAGYFASMYKRFGNLCYVLGALRGFWGHSNRDLRIKVNGGEWRTVDKVTALCVGNAKYFGGGMKITPTVDPFSGDLQVVIIQDFKWYSFLLKLHRLYGGTHLTVNGVSSIRVQSIEVVEVVPNGDVFVQSDGEHFGFLPTKFSVLPGAVDFFS

SEQ ID NO: 67353 - DNA, 1638 bp, Triticum aestivum
  misc_feature (1)..(1638): Ceres Seq. ID no. 13660029
acctagaacatcctaatcgaaaaagcaaacacttccccgtcctcgacgcaaactagcaacctcaagagaacagaccagcttcttctccaagtccagttccttctacccattggccggccgccattgagagtttgcttcctccgctccgtgtcatctctgcaggaaatccgccatcgctcgcccgggtgtactgaccatgtctgccatgcaatcatcgtatcttcctgctaccactgagtcaattgcaatggctcaggaagctaaggatgcttcagagtccattttaatcctctaccgtgtgcttgaagacccgtcttcttcttcagatgcagttagaacaaaagaagttgccattacaaatctgacaaactatctcacaaaagagaacagagccgaggagcttaggaatctgttgacccagctcaggccatttttcgcactgattcccaaggcaaagaccgcaaagattgtacgtggcatcattgatgccgtttccaagatacctggaacatctgatcttcagatctcactctgcaaggagatggtggaatggacacgggcagagaaacgtaccttcctcaggcagcgtgtggaagcaagactagcagcccttcttttggaaagtcaggagtacactgaagctcttacccttcttcctggtcttatcaaggaagtgaggaggctggatgacaggttgcttcttgttgacattgaccttctggagagcaaactccatttctctctaaggaaccttccaaaggccaaggcttctctgactgccgcaagaactgcagcgaatgccatttatgttccgccagcgcagcagggcactattgacctgcagagtggaatccttcatgccgaagagaaggattacaagaccgcctacagttacttctttgaagcgtttgaagggtttaatgcactggacgaccctaaggccatcttctgcttgaagtacatgcttctgtgcaagataatggtcaaccaagctgatgatgttgcaggagtaatctcgtctaaggcaggcctgaagtatgttggtcctgatgtggatgctatgaaagctgttgcggatgcctactcgaaacgatctctcaagtactttgaaaccgctcttggtgactacaaggcccagctggaggaggatcctattgtccacaggcacctctcgtctctgtatgataccctcctggagcagaacctgtgcaggctgattgaagcctactcaagggtggagattgcgcacgtagcagagatgatcgagctgccaatcgagcatgttgagaagaagctgtcacagatgatcctggacaagaaattcgcagggactctggatcagggtgcgggctgcctcatcatcttcgaagacgccaagacggaggcgatcttccctgctacgctcgaaacaatttcgaatgtggggaaggttgtcgagagcctttacatgaggtcagcaaagatcatggcttgaggagatgttttgttccccagttaaatcttacacttgagctctgctagagtctccaggacatgaaatgcctgtgtgttgccattatttattgcttgcaaattgtcttctgttagctctataaaatgtctatgtctgcgtgatggaaatacagttagcacttgctg

SEQ ID NO: 67354 - protein, 425 aa, Triticum aestivum
  peptide (1)..(425): Ceres Seq. ID no. 15220004
  misc_feature (287)..(391): Pfam Name: PCI domain Pfam Description: PCI domain
  misc_feature (24)..(423): Homolog of NCBI NO: 28872725 NR Description: proteasome 26S non-ATPase subunit 11
  misc_feature (24)..(423): Homolog of NCBI NO: 2150046 NR Description: 26S proteasome subunit 9 [Homo sapiens]
  misc_feature (24)..(423): Homolog of NCBI NO: 33585718 NR Description: Unknown (protein for IMAGE:3964625) [Mus musculus]
  misc_feature (24)..(423): Homolog of NCBI NO: 26342168 NR Description: unnamed protein product [Mus musculus]
  misc_feature (34)..(423): Homolog of NCBI NO: 31242521 NR Description: ENSANGP00000015227 [Anopheles gambiae]
  misc_feature (17)..(423): Homolog of NCBI NO: 17137740 NR Description: Proteasome p44.5 subunit CG10149-PB [Drosophila
  misc_feature (116)..(425): Homolog of NCBI NO: 38093742 NR Description: putative proteosome subunit
  misc_feature (11)..(418): Homolog of NCBI NO: 25332510 NR Description: 19S proteosome subunit 9 [imported] - Arabidopsis
  misc_feature (11)..(425): Homolog of NCBI NO: 15218845 NR Description: 26S proteasome regulatory subunit (RPN6),
  misc_feature (1)..(425): Homolog of NCBI NO: 38344536 NR Description: OSJNBa0027P08.4 [Oryza sativa (japonica
MSAMQSSYLPATTESIAMAQEAKDASESILILYRVLEDPSSSSDAVRTKEVAITNLTNYLTKENRAEELRNLLTQLRPFFALIPKAKTAKIVRGIIDAVSKIPGTSDLQISLCKEMVEWTRAEKRTFLRQRVEARLAALLLESQEYTEALTLLPGLIKEVRRLDDRLLLVDIDLLESKLHFSLRNLPKAKASLTAARTAANAIYVPPAQQGTIDLQSGILHAEEKDYKTAYSYFFEAFEGFNALDDPKAIFCLKYMLLCKIMVNQADDVAGVISSKAGLKYVGPDVDAMKAVADAYSKRSLKYFETALGDYKAQLEEDPIVHRHLSSLYDTLLEQNLCRLIEAYSRVEIAHVAEMIELPIEHVEKKLSQMILDKKFAGTLDQGAGCLIIFEDAKTEAIFPATLETISNVGKVVESLYMRSAKIMA

SEQ ID NO: 67355 - protein, 422 aa, Triticum aestivum
  peptide (1)..(422): Ceres Seq. ID no. 15220005
  misc_feature (284)..(388): Pfam Name: PCI domain Pfam Description: PCI domain
  misc_feature (21)..(420): Homolog of NCBI NO: 28872725 NR Description: proteasome 26S non-ATPase subunit 11
  misc_feature (21)..(420): Homolog of NCBI NO: 2150046 NR Description: 26S proteasome subunit 9 [Homo sapiens]
  misc_feature (21)..(420): Homolog of NCBI NO: 33585718 NR Description: Unknown (protein for IMAGE:3964625) [Mus musculus]
  misc_feature (21)..(420): Homolog of NCBI NO: 26342168 NR Description: unnamed protein product [Mus musculus]
  misc_feature (31)..(420): Homolog of NCBI NO: 31242521 NR Description: ENSANGP00000015227 [Anopheles gambiae]
  misc_feature (14)..(420): Homolog of NCBI NO: 17137740 NR Description: Proteasome p44.5 subunit CG10149-PB [Drosophila
  misc_feature (113)..(422): Homolog of NCBI NO: 38093742 NR Description: putative proteosome subunit
  misc_feature (8)..(415): Homolog of NCBI NO: 25332510 NR Description: 19S proteosome subunit 9 [imported] - Arabidopsis
  misc_feature (8)..(422): Homolog of NCBI NO: 15218845 NR Description: 26S proteasome regulatory subunit (RPN6),
  misc_feature (1)..(422): Homolog of NCBI NO: 38344536 NR Description: OSJNBa0027P08.4 [Oryza sativa (japonica
MQSSYLPATTESIAMAQEAKDASESILILYRVLEDPSSSSDAVRTKEVAITNLTNYLTKENRAEELRNLLTQLRPFFALIPKAKTAKIVRGIIDAVSKIPGTSDLQISLCKEMVEWTRAEKRTFLRQRVEARLAALLLESQEYTEALTLLPGLIKEVRRLDDRLLLVDIDLLESKLHFSLRNLPKAKASLTAARTAANAIYVPPAQQGTIDLQSGILHAEEKDYKTAYSYFFEAFEGFNALDDPKAIFCLKYMLLCKIMVNQADDVAGVISSKAGLKYVGPDVDAMKAVADAYSKRSLKYFETALGDYKAQLEEDPIVHRHLSSLYDTLLEQNLCRLIEAYSRVEIAHVAEMIELPIEHVEKKLSQMILDKKFAGTLDQGAGCLIIFEDAKTEAIFPATLETISNVGKVVESLYMRSAKIMA

SEQ ID NO: 67356 - protein, 408 aa, Triticum aestivum
  peptide (1)..(408): Ceres Seq. ID no. 15220006
  misc_feature (270)..(374): Pfam Name: PCI domain Pfam Description: PCI domain
  misc_feature (7)..(406): Homolog of NCBI NO: 28872725 NR Description: proteasome 26S non-ATPase subunit 11
  misc_feature (7)..(406): Homolog of NCBI NO: 2150046 NR Description: 26S proteasome subunit 9 [Homo sapiens]
  misc_feature (7)..(406): Homolog of NCBI NO: 33585718 NR Description: Unknown (protein for IMAGE:3964625) [Mus musculus]
  misc_feature (7)..(406): Homolog of NCBI NO: 26342168 NR Description: unnamed protein product [Mus musculus]
  misc_feature (17)..(406): Homolog of NCBI NO: 31242521 NR Description: ENSANGP00000015227 [Anopheles gambiae]
  misc_feature (1)..(406): Homolog of NCBI NO: 17137740 NR Description: Proteasome p44.5 subunit CG10149-PB [Drosophila
  misc_feature (99)..(408): Homolog of NCBI NO: 38093742 NR Description: putative proteosome subunit
  misc_feature (1)..(401): Homolog of NCBI NO: 25332510 NR Description: 19S proteosome subunit 9 [imported] - Arabidopsis
  misc_feature (1)..(408): Homolog of NCBI NO: 15218845 NR Description: 26S proteasome regulatory subunit (RPN6),
  misc_feature (1)..(408): Homolog of NCBI NO: 38344536 NR Description: OSJNBa0027P08.4 [Oryza sativa (japonica
MAQEAKDASESILILYRVLEDPSSSSDAVRTKEVAITNLTNYLTKENRAEELRNLLTQLRPFFALIPKAKTAKIVRGIIDAVSKIPGTSDLQISLCKEMVEWTRAEKRTFLRQRVEARLAALLLESQEYTEALTLLPGLIKEVRRLDDRLLLVDIDLLESKLHFSLRNLPKAKASLTAARTAANAIYVPPAQQGTIDLQSGILHAEEKDYKTAYSYFFEAFEGFNALDDPKAIFCLKYMLLCKIMVNQADDVAGVISSKAGLKYVGPDVDAMKAVADAYSKRSLKYFETALGDYKAQLEEDPIVHRHLSSLYDTLLEQNLCRLIEAYSRVEIAHVAEMIELPIEHVEKKLSQMILDKKFAGTLDQGAGCLIIFEDAKTEAIFPATLETISNVGKVVESLYMRSAKIMA

SEQ ID NO: 67357 - DNA, 1866 bp, Triticum aestivum
  misc_feature (1)..(1866): Ceres Seq. ID no. 15174867
atcagtcgacatcgccacaggttgccgctagcagcagttaatcactactcagctggcctattaactcactgatccttctgctaagctgcttgatagttcgactgcattaattccctcgcaccccaccccacgcatggctccaccgtcgcagtgcttcgacgccatgcacagcgcggccaacaatggcgccgccccggcggtggctgacgcaaagccgcagtgccccgccgtgctcgacgccgacgtgttccggcgccagggacacgaggtcatcgacttcattgccgagtactacggcggcatgggggactaccccgtgcaccccagcgtcacgcccggcttccttcgcaatgtgctccccgcggaggcgccgtcccgcccggagcccgacgcgttcggctccgcgctgcgggacgtccgcgacctcatcctcccgggcatgacgcactggcagagcccccgccacttcgcgcacttcccggcgtccagcagcaccgtcggggccctcggggaggcgctcattgccggcatcaacgtggtgcccttcacgtgggccgcctcgccggccgccaccgagctggagatggtggtcgtggactggctcggcaaggcgctgcatttgccggagagcctcctgttcgccggcggcggcgggggcacgcttctgggcacctcgtgcgaggccatactctgcgccctcgtcgccgccagggacaagaagctcgccgagatcggcgagaggaggatcggcgaccttgtcgtctactgctccgaccagacccatttcgccttccgcaaggctgcgcgcatcgccgggatcccgcgggaccactgccgcgcgatacacacgtgccgcgaagacatgttcgcgctctcgcccacggagctgcaggccgccatgcaggccgacgtggacgccgggctggtgccgctgttcctgtgcgcgaccgtcgggaccacccagacgaccgccgttgaccccatcggcaagctctgcaccgtggcggcgtcccacggcgtgtgggtccacgtcgacgcggcctacaccggctcggcgctggtctgcccggagttccggcacgtgatcgacggcgtagaggccgtggactcgttcagcatgaacgcccacaagtggctcctggccaacaacgactgctgcgcgatgtgggtgaagaggccgagcgagctcgtggcggcgctgggcacggagcaggagtacatcctcaaggacgcggcgtcgaaggggcacgacgtggtggactacaaggactggaccatgacgctgacccgccggtttcgcgcgctcaagatgtggctcgtgctccgctgctacggcgtggacggcctgcgcgaccacatccgctcccacgtgcgcatggccgaggcgttcgaggacatggtgcgggccgacgagaggttcgaggtggtgacggacaggcagttcgcgctggtgtgcttccggctccggtcgccggagaggttcggcggcgagaagacggccaacgagctcaaccggggcctgctcgaggaggtgaacgcggtcggcccgggcccgtacatgagctccgcgaacgtgggcggcgtctacatgctcaggtgcgccgtcgggagcacgctcacggaggagcaccacgtcgctgacgcatggaaggtggtccaggatcgggcctcggtaatcctccggaaaatggaaattatttacagcgtgcttggttaaagttcgggcgaggtgaatatatatgtttctctatgtaaaatctacctgcagacattacttgatcctaattaagtctcgacctcaattaggtcgtcggaaccatgcggatttgtatttgatatttatatatatgaagcaatttactggtt

SEQ ID NO: 67358 - protein, 527 aa, Triticum aestivum
  peptide (1)..(527): Ceres Seq. ID no. 15174868
  misc_feature (68)..(445): Pfam Name: Pyridoxal-dependent decarboxylase conserved domain Pfam Description: Pyridoxal-dependent decarboxylase conserved
  misc_feature (15)..(520): Homolog of NCBI NO: 3282527 NR Description: tyrosine/dopa decarboxylase [Papaver somniferum]
  misc_feature (456)..(520): Homolog of NCBI NO: 22261822 NR Description: Tyrosine/DOPA decarboxylase 3
  misc_feature (34)..(492): Homolog of NCBI NO: 22261822 NR Description: Tyrosine/DOPA decarboxylase 3
  misc_feature (456)..(518): Homolog of NCBI NO: 3282525 NR Description: tyrosine/dopa decarboxylase [Papaver somniferum]
  misc_feature (34)..(492): Homolog of NCBI NO: 3282525 NR Description: tyrosine/dopa decarboxylase [Papaver somniferum]
  misc_feature (34)..(516): Homolog of NCBI NO: 12620328 NR Description: tyrosine/dopa decarboxylase [Thalictrum flavum
  misc_feature (456)..(518): Homolog of NCBI NO: 1717826 NR Description: Tyrosine/DOPA decarboxylase 2
  misc_feature (34)..(492): Homolog of NCBI NO: 1717826 NR Description: Tyrosine/DOPA decarboxylase 2
  misc_feature (1)..(522): Homolog of NCBI NO: 37533712 NR Description: putative Tyrosine/DOPA decarboxylase 2
  misc_feature (1)..(518): Homolog of NCBI NO: 34909906 NR Description: putative tyrosine/DOPA decarboxylase
MAPPSQCFDAMHSAANNGAAPAVADAKPQCPAVLDADVFRRQGHEVIDFIAEYYGGMGDYPVHPSVTPGFLRNVLPAEAPSRPEPDAFGSALRDVRDLILPGMTHWQSPRHFAHFPASSSTVGALGEALIAGINVVPFTWAASPAATELEMVVVDWLGKALHLPESLLFAGGGGGTLLGTSCEAILCALVAARDKKLAEIGERRIGDLVVYCSDQTHFAFRKAARIAGIPRDHCRAIHTCREDMFALSPTELQAAMQADVDAGLVPLFLCATVGTTQTTAVDPIGKLCTVAASHGVWVHVDAAYTGSALVCPEFRHVIDGVEAVDSFSMNAHKWLLANNDCCAMWVKRPSELVAALGTEQEYILKDAASKGHDVVDYKDWTMTLTRRFRALKMWLVLRCYGVDGLRDHIRSHVRMAEAFEDMVRADERFEVVTDRQFALVCFRLRSPERFGGEKTANELNRGLLEEVNAVGPGPYMSSANVGGVYMLRCAVGSTLTEEHHVADAWKVVQDRASVILRKMEIIYSVLG

SEQ ID NO: 67359 - protein, 517 aa, Triticum aestivum
  peptide (1)..(517): Ceres Seq. ID no. 15174869
  misc_feature (58)..(435): Pfam Name: Pyridoxal-dependent decarboxylase conserved domain Pfam Description: Pyridoxal-dependent decarboxylase conserved
  misc_feature (5)..(510): Homolog of NCBI NO: 3282527 NR Description: tyrosine/dopa decarboxylase [Papaver somniferum]
  misc_feature (446)..(510): Homolog of NCBI NO: 22261822 NR Description: Tyrosine/DOPA decarboxylase 3
  misc_feature (24)..(482): Homolog of NCBI NO: 22261822 NR Description: Tyrosine/DOPA decarboxylase 3
  misc_feature (446)..(508): Homolog of NCBI NO: 3282525 NR Description: tyrosine/dopa decarboxylase [Papaver somniferum]
  misc_feature (24)..(482): Homolog of NCBI NO: 3282525 NR Description: tyrosine/dopa decarboxylase [Papaver somniferum]
  misc_feature (24)..(506): Homolog of NCBI NO: 12620328 NR Description: tyrosine/dopa decarboxylase [Thalictrum flavum
  misc_feature (446)..(508): Homolog of NCBI NO: 1717826 NR Description: Tyrosine/DOPA decarboxylase 2
  misc_feature (24)..(482): Homolog of NCBI NO: 1717826 NR Description: Tyrosine/DOPA decarboxylase 2
  misc_feature (1)..(512): Homolog of NCBI NO: 37533712 NR Description: putative Tyrosine/DOPA decarboxylase 2
  misc_feature (1)..(508): Homolog of NCBI NO: 34909906 NR Description: putative tyrosine/DOPA decarboxylase
MHSAANNGAAPAVADAKPQCPAVLDADVFRRQGHEVIDFIAEYYGGMGDYPVHPSVTPGFLRNVLPAEAPSRPEPDAFGSALRDVRDLILPGMTHWQSPRHFAHFPASSSTVGALGEALIAGINVVPFTWAASPAATELEMVVVDWLGKALHLPESLLFAGGGGGTLLGTSCEAILCALVAARDKKLAEIGERRIGDLVVYCSDQTHFAFRKAARIAGIPRDHCRAIHTCREDMFALSPTELQAAMQADVDAGLVPLFLCATVGTTQTTAVDPIGKLCTVAASHGVWVHVDAAYTGSALVCPEFRHVIDGVEAVDSFSMNAHKWLLANNDCCAMWVKRPSELVAALGTEQEYILKDAASKGHDVVDYKDWTMTLTRRFRALKMWLVLRCYGVDGLRDHIRSHVRMAEAFEDMVRADERFEVVTDRQFALVCFRLRSPERFGGEKTANELNRGLLEEVNAVGPGPYMSSANVGGVYMLRCAVGSTLTEEHHVADAWKVVQDRASVILRKMEIIYSVLG

SEQ ID NO: 67360 - protein, 471 aa, Triticum aestivum
  peptide (1)..(471): Ceres Seq. ID no. 15174870
  misc_feature (12)..(389): Pfam Name: Pyridoxal-dependent decarboxylase conserved domain Pfam Description: Pyridoxal-dependent decarboxylase conserved
  misc_feature (1)..(464): Homolog of NCBI NO: 3282527 NR Description: tyrosine/dopa decarboxylase [Papaver somniferum]
  misc_feature (400)..(464): Homolog of NCBI NO: 22261822 NR Description: Tyrosine/DOPA decarboxylase 3
  misc_feature (1)..(436): Homolog of NCBI NO: 22261822 NR Description: Tyrosine/DOPA decarboxylase 3
  misc_feature (400)..(462): Homolog of NCBI NO: 3282525 NR Description: tyrosine/dopa decarboxylase [Papaver somniferum]
  misc_feature (1)..(436): Homolog of NCBI NO: 3282525 NR Description: tyrosine/dopa decarboxylase [Papaver somniferum]
  misc_feature (1)..(460): Homolog of NCBI NO: 12620328 NR Description: tyrosine/dopa decarboxylase [Thalictrum flavum
  misc_feature (400)..(462): Homolog of NCBI NO: 1717826 NR Description: Tyrosine/DOPA decarboxylase 2
  misc_feature (1)..(436): Homolog of NCBI NO: 1717826 NR Description: Tyrosine/DOPA decarboxylase 2
  misc_feature (1)..(466): Homolog of NCBI NO: 37533712 NR Description: putative Tyrosine/DOPA decarboxylase 2
  misc_feature (1)..(462): Homolog of NCBI NO: 34909906 NR Description: putative tyrosine/DOPA decarboxylase
MGDYPVHPSVTPGFLRNVLPAEAPSRPEPDAFGSALRDVRDLILPGMTHWQSPRHFAHFPASSSTVGALGEALIAGINVVPFTWAASPAATELEMVVVDWLGKALHLPESLLFAGGGGGTLLGTSCEAILCALVAARDKKLAEIGERRIGDLVVYCSDQTHFAFRKAARIAGIPRDHCRAIHTCREDMFALSPTELQAAMQADVDAGLVPLFLCATVGTTQTTAVDPIGKLCTVAASHGVWVHVDAAYTGSALVCPEFRHVIDGVEAVDSFSMNAHKWLLANNDCCAMWVKRPSELVAALGTEQEYILKDAASKGHDVVDYKDWTMTLTRRFRALKMWLVLRCYGVDGLRDHIRSHVRMAEAFEDMVRADERFEVVTDRQFALVCFRLRSPERFGGEKTANELNRGLLEEVNAVGPGPYMSSANVGGVYMLRCAVGSTLTEEHHVADAWKVVQDRASVILRKMEIIYSVLG

SEQ ID NO: 67361 - DNA, 1392 bp, Triticum aestivum
  misc_feature (1)..(1392): Ceres Seq. ID no. 14301936
cacactcagaacactagctactgtcctgccattctgctccgcgcttatcttcctcagcttcccaagtctgcctaagcatcaaacgctagcacgtccaagccgagaagttccaagcatgtggaagtttcttgcagcaacggcgctgccgatcctggtctcgctgctcgccgtgcgcgcgcgcggcgtcgacgactacacggcgttcgtgtacgccgggtgctcgcaggcgcgctacgacgccggcacccagtacgccgcggacgtcgacaccgtgctctcgaccctcaccgacaccgcggcctccaccccctacgccaactacacccccccgtccggcgccgccacgggcctagtcggcctctaccagtgccgctccgacctcccggccgccgtctgcggcgtctgcgtgaaggcgtccgcctccaagctctcctccctctgcaactcggccgccggcggcgcggtgcagctgcgcgcgtgcttcgtccgctacggcaacgactcgttcctcgggaagccggacaacacggtgctgttcaagaagtgcggcggcgagagcggggacgccggcgtcgcggcgctgcgcgacgcggcgctcggagcgctccaggccgcgtcgtcccccgcggccggcggctcgtaccgcgcaggcgcggccgggtacgtgcaggccatgtcgcagtgcgtgggggacctcggcgccaaggcctgcaccgactgcgtctccgtcgccgcctcgcagctcaaggccggctgcggcgacgcctccgccggggaggtctacctcggcaagtgctacgcgcgcttctggtccaatgccggcaccggcaccggcgggaccacccccggaggaggcaacgtcatcggcggcggtaacgccggccccatcggtgacggcggcaatggcatcgctggcggaggcaatggcatcgccggcggcggcaccgtcggcgtcccgggcgcaggcagcggatacggatacgggttcgtgccgcgtccgtacggcgacgtccaagatggttccgggaagaccctcgccatcatcatcggcatcgtggcggcggcggccatcatcatcatcttcctctccttcgtccgaagagcccgcgccgccaatggcaaaagctaagctaagggttgcagcagggatggtcgccactcgccactattagctcagatttggatcggtcggtggcttttggcttcggcgttgctttagtatctctccttttatcttttatggtctcttttgccgtgccagaaaaacaaagggaggccatgccgccactgtgccgaagtagggaactgaagattccagctgcatgctactagccactaaggaaaatattactacgcaagaataagaagatatatatttgttgaagtgaccac

SEQ ID NO: 67362 - protein, 375 aa, Triticum aestivum
  peptide (1)..(375): Ceres Seq. ID no. 14301937
  misc_feature (119)..(171): Pfam Name: Domain of unknown function DUF26 Pfam Description: Domain of unknown function DUF26
  misc_feature (335)..(365): Homolog of NCBI NO: 21593606 NR Description: unknown [Arabidopsis thaliana]
  misc_feature (68)..(302): Homolog of NCBI NO: 21593606 NR Description: unknown [Arabidopsis thaliana]
  misc_feature (340)..(374): Homolog of NCBI NO: 30693130 NR Description: expressed protein [Arabidopsis thaliana]
  misc_feature (38)..(269): Homolog of NCBI NO: 30693130 NR Description: expressed protein [Arabidopsis thaliana]
  misc_feature (335)..(365): Homolog of NCBI NO: 18409653 NR Description: expressed protein [Arabidopsis thaliana]
  misc_feature (68)..(302): Homolog of NCBI NO: 18409653 NR Description: expressed protein [Arabidopsis thaliana]
  misc_feature (320)..(374): Homolog of NCBI NO: 21554153 NR Description: unknown [Arabidopsis thaliana]
  misc_feature (42)..(279): Homolog of NCBI NO: 21554153 NR Description: unknown [Arabidopsis thaliana]
  misc_feature (320)..(374): Homolog of NCBI NO: 18379273 NR Description: expressed protein [Arabidopsis thaliana]
  misc_feature (42)..(279): Homolog of NCBI NO: 18379273 NR Description: expressed protein [Arabidopsis thaliana]
TLRTLATVLPFCSALIFLSFPSLPKHQTLARPSREVPSMWKFLAATALPILVSLLAVRARGVDDYTAFVYAGCSQARYDAGTQYAADVDTVLSTLTDTAASTPYANYTPPSGAATGLVGLYQCRSDLPAAVCGVCVKASASKLSSLCNSAAGGAVQLRACFVRYGNDSFLGKPDNTVLFKKCGGESGDAGVAALRDAALGALQAASSPAAGGSYRAGAAGYVQAMSQCVGDLGAKACTDCVSVAASQLKAGCGDASAGEVYLGKCYARFWSNAGTGTGGTTPGGGNVIGGGNAGPIGDGGNGIAGGGNGIAGGGTVGVPGAGSGYGYGFVPRPYGDVQDGSGKTLAIIIGIVAAAAIIIIFLSFVRRARAANGKS

SEQ ID NO: 67363 - protein, 337 aa, Triticum aestivum
  peptide (1)..(337): Ceres Seq. ID no. 14301938
  misc_feature (81)..(133): Pfam Name: Domain of unknown function DUF26 Pfam Description: Domain of unknown function DUF26
  misc_feature (297)..(327): Homolog of NCBI NO: 21593606 NR Description: unknown [Arabidopsis thaliana]
  misc_feature (30)..(264): Homolog of NCBI NO: 21593606 NR Description: unknown [Arabidopsis thaliana]
  misc_feature (302)..(336): Homolog of NCBI NO: 30693130 NR Description: expressed protein [Arabidopsis thaliana]
  misc_feature (1)..(231): Homolog of NCBI NO: 30693130 NR Description: expressed protein [Arabidopsis thaliana]
  misc_feature (297)..(327): Homolog of NCBI NO: 18409653 NR Description: expressed protein [Arabidopsis thaliana]
  misc_feature (30)..(264): Homolog of NCBI NO: 18409653 NR Description: expressed protein [Arabidopsis thaliana]
  misc_feature (282)..(336): Homolog of NCBI NO: 21554153 NR Description: unknown [Arabidopsis thaliana]
  misc_feature (4)..(241): Homolog of NCBI NO: 21554153 NR Description: unknown [Arabidopsis thaliana]
  misc_feature (282)..(336): Homolog of NCBI NO: 18379273 NR Description: expressed protein [Arabidopsis thaliana]
  misc_feature (4)..(241): Homolog of NCBI NO: 18379273 NR Description: expressed protein [Arabidopsis thaliana]
MWKFLAATALPILVSLLAVRARGVDDYTAFVYAGCSQARYDAGTQYAADVDTVLSTLTDTAASTPYANYTPPSGAATGLVGLYQCRSDLPAAVCGVCVKASASKLSSLCNSAAGGAVQLRACFVRYGNDSFLGKPDNTVLFKKCGGESGDAGVAALRDAALGALQAASSPAAGGSYRAGAAGYVQAMSQCVGDLGAKACTDCVSVAASQLKAGCGDASAGEVYLGKCYARFWSNAGTGTGGTTPGGGNVIGGGNAGPIGDGGNGIAGGGNGIAGGGTVGVPGAGSGYGYGFVPRPYGDVQDGSGKTLAIIIGIVAAAAIIIIFLSFVRRARAANGKS

SEQ ID NO: 67364 - DNA, 901 bp, Triticum aestivum
  misc_feature (1)..(901): Ceres Seq. ID no. 12627162
aaccgcaaagcgaggcaatccatcctcctctccggcggccgcgcgagagagagcgatctccggccacgagaggcgggcgggaccacgagagcctccgccgcccaccaaagccgcggagaaccgcaccggacgccttgtatctccgcccattctcaaaggtcttgaaacatggtggccatgtcaacgcttgccgctggatcgttgccgggaactgtggtccccaatggtcttctaacaaggaggtttcaaggctcacaatttcagacaactcaagttaaccgcatctcatttgagcgggaagtttctactaaagcaacactgaggagtgtaaaatgcagtgctcaaacccaaagtgttcagcgcaaatcttcaaccgcgactgtcaaacgatctgaccccaaaggaaaggttcaaggacctaagttggacgatggaagcggtgggttccctccgttccgtttcggcaaaggaggcggcggaggtggaggcggtgggggtggtagcagctactttggcgggttcctcctcttcacnatcgtgctgctcctggattacctcaaggagtttgagaagtacctgctcgctcgaaagcatcgtgccggagacgacgatgacgcgggctatgacacgagcggtgggatgctaggacaatcaccatgatgagtcttgttagcagtagtcgtccctagctactagaagtgcatcagtcagttaactggctttggttacgttacataaccttatcttggaaaattcatgcctatgcagagctcaaaatatttataggattgtgtggtgagatgcttaaacttgatgccatctggctgttgtgccgaagtatgaagaaattccatctatgtacaacaaaggttttgctactagaaatttccatgtctggatc

SEQ ID NO: 67365 - protein, 163 aa, Triticum aestivum
  peptide (1)..(163): Ceres Seq. ID no. 12627163
  misc_feature (53)..(134): Homolog of NCBI NO: 18405726 NR Description: expressed protein
  misc_feature (55)..(134): Homolog of NCBI NO: 25372889 NR Description: protein F26G16.9 [imported] - Arabidopsis
  misc_feature (122)..(122): Xaa is any aa, unknown or other
MVAMSTLAAGSLPGTVVPNGLLTRRFQGSQFQTTQVNRISFEREVSTKATLRSVKCSAQTQSVQRKSSTATVKRSDPKGKVQGPKLDDGSGGFPPFRFGKGGGGGGGGGGGSSYFGGFLLFXIVLLLDYLKEFEKYLLARKHRAGDDDDAGYDTSGGMLGQSP

SEQ ID NO: 67366 - protein, 160 aa, Triticum aestivum
  peptide (1)..(160): Ceres Seq. ID no. 12627164
  misc_feature (50)..(131): Homolog of NCBI NO: 18405726 NR Description: expressed protein
  misc_feature (52)..(131): Homolog of NCBI NO: 25372889 NR Description: protein F26G16.9 [imported] - Arabidopsis
  misc_feature (119)..(119): Xaa is any aa, unknown or other
MSTLAAGSLPGTVVPNGLLTRRFQGSQFQTTQVNRISFEREVSTKATLRSVKCSAQTQSVQRKSSTATVKRSDPKGKVQGPKLDDGSGGFPPFRFGKGGGGGGGGGGGSSYFGGFLLFXIVLLLDYLKEFEKYLLARKHRAGDDDDAGYDTSGGMLGQSP

SEQ ID NO: 67367 - protein, 91 aa, Triticum aestivum
  peptide (1)..(91): Ceres Seq. ID no. 12627165
PQSEAIHPPLRRPRERERSPATRGGRDHESLRRPPKPRRTAPDALYLRPFSKVLKHGGHVNACRWIVAGNCGPQWSSNKEVSRLTISDNSS

SEQ ID NO: 67368 - DNA, 1853 bp, Triticum aestivum
  misc_feature (1)..(1853): Ceres Seq. ID no. 13598695
atgagccagggtggcaatggcatgcctaacttaattcctgtttgattccctcctgctgcttattagttagctgccaaattgcctccaaaatatagctcgctggcaaatatggaacgcatgcatgtaattaacatggttgatttgtctatgcaatgtggatactcctatatggagtagtacgctactgcacacccgtatttggaagcattttacttcctcattgattaggatatatctcgcttgattaactccttgtttatgtgtagctatataggtgcgtcactcccttgctatgcgctcgttaaatatacgtcgtccagggattttcctatcgatcggctcgatcttgcttccactactcgatccattgaaacgatggtgaagacgagggccggtgccgtccggccgtgggcgcttctcgctcttgctctcctcctcatcgccggcagctgcgtggaggcggcggacgagcaggcggcgaacggcggtggcaggaggaggaggacgcatcgacgttccgcggcggcggtcgcggacatgatggtgcccatcaccttcctcaacgcctccgtcgagaagggcgccgtgtgtatggatgggacgccggccgcttacgacctggacccgggctccggggcagggagcaagagctggatcgtcaacctcgagggaggcgggtggtgcaacaacgcgaggacgtgcaggttccggacaaggactcaccatggctcctccaacttcatggagcggcagatcgccttcaccggcatcatgagcgccagccccgccgagaatcctgatttctacaactggaaccgggtgaagatccgctactgcgacagcgcctccttcgccggcgacaccttcgacaagggtaccgggctctacttccgggggcagcggatttgggaggaagccatccagcacctcctctccatcgggatggcgtcggccgaccgggcgcttctcacgggctgctccgccggtgggctggcggcgatactccactgcgaccagttcggcgccttcttcgccggccgaagcaccaccgtcaagtgcctcgccgacgcaggcctcttcctcgacgccgttgatgtttccgggggccgcagcttgagatcttactacggcgacattgtagccatgcagggagtggctccaaaccttccgcccacctgcaccgatcacctcgacgccacctcgtgcttcttccctcagaatataatcgacagcatcaagacccccatcttcttgctcaacgcagcctacgacgtctggcagattgaggaaagcctggccccaagcaaagccgaccccagccgcgcctggcgagcctgcaagttcaaccgctcggcctgcaacgcgtctcagataaacttcctgcaaggtttcagagatcagatggtggcatccgtgagaggcttctccggttccaagagcaacgggctcttcataaactcgtgtttcgcccactgccagtccgaactgccggccacctggaatggcacccctgccattcagaacaagaggatcgcgaaatctgtcggcgattggtactttggccgggccgaagtgaaggcgatcgattgcccatacccttgcgacaacacatgccgcaacatcatataagaagatcttgcaagcaagggccgattcgaacctcatgattaggatttagaactcgaggcaagtatttgttagtttttcataaagacttcacttcaggccggatatatgtctttgtgtatgatgtaattatgaaggtctcctcagaataaacttgttaaatgtaaaaaaaaaaaaaaaaaagcttatcgataccgtcgacctcgagggggggcccggtacccaat

SEQ ID NO: 67369 - protein, 456 aa, Triticum aestivum
  peptide (1)..(456): Ceres Seq. ID no. 15222399
  misc_feature (78)..(442): Pfam Name: Pectinacetylesterase Pfam Description: Pectinacetylesterase
  misc_feature (51)..(456): Homolog of NCBI NO: 15228677 NR Description: pectinacetylesterase family [Arabidopsis
  misc_feature (94)..(456): Homolog of NCBI NO: 7487997 NR Description: pectin acetylesterase homolog F21E10.11 -
  misc_feature (95)..(456): Homolog of NCBI NO: 21703105 NR Description: At1g57590/T8L23_6 [Arabidopsis thaliana]
  misc_feature (95)..(456): Homolog of NCBI NO: 30696158 NR Description: pectinacetylesterase, putative [Arabidopsis
  misc_feature (95)..(456): Homolog of NCBI NO: 25347293 NR Description: probable pectinacetylesterase precursor T8L23.6
  misc_feature (51)..(455): Homolog of NCBI NO: 34913332 NR Description: putative pectin acetylesterase precursor
  misc_feature (94)..(456): Homolog of NCBI NO: 18397406 NR Description: pectinacetylesterase, putative [Arabidopsis
  misc_feature (51)..(456): Homolog of NCBI NO: 28392968 NR Description: putative pectinacetylesterase [Arabidopsis
  misc_feature (94)..(456): Homolog of NCBI NO: 15226462 NR Description: pectinacetylesterase, putative [Arabidopsis
  misc_feature (53)..(456): Homolog of NCBI NO: 34894654 NR Description: P0028G04.28 [Oryza sativa (japonica
MCSYIGASLPCYALVKYTSSRDFPIDRLDLASTTRSIETMVKTRAGAVRPWALLALALLLIAGSCVEAADEQAANGGGRRRRTHRRSAAAVADMMVPITFLNASVEKGAVCMDGTPAAYDLDPGSGAGSKSWIVNLEGGGWCNNARTCRFRTRTHHGSSNFMERQIAFTGIMSASPAENPDFYNWNRVKIRYCDSASFAGDTFDKGTGLYFRGQRIWEEAIQHLLSIGMASADRALLTGCSAGGLAAILHCDQFGAFFAGRSTTVKCLADAGLFLDAVDVSGGRSLRSYYGDIVAMQGVAPNLPPTCTDHLDATSCFFPQNIIDSIKTPIFLLNAAYDVWQIEESLAPSKADPSRAWRACKFNRSACNASQINFLQGFRDQMVASVRGFSGSKSNGLFINSCFAHCQSELPATWNGTPAIQNKRIAKSVGDWYFGRAEVKAIDCPYPCDNTCRNII

SEQ ID NO: 67370 - protein, 417 aa, Triticum aestivum
  peptide (1)..(417): Ceres Seq. ID no. 15222400
  misc_feature (39)..(403): Pfam Name: Pectinacetylesterase Pfam Description: Pectinacetylesterase
  misc_feature (12)..(417): Homolog of NCBI NO: 15228677 NR Description: pectinacetylesterase family [Arabidopsis
  misc_feature (55)..(417): Homolog of NCBI NO: 7487997 NR Description: pectin acetylesterase homolog F21E10.11 -
  misc_feature (56)..(417): Homolog of NCBI NO: 21703105 NR Description: At1g57590/T8L23_6 [Arabidopsis thaliana]
  misc_feature (56)..(417): Homolog of NCBI NO: 30696158 NR Description: pectinacetylesterase, putative [Arabidopsis
  misc_feature (56)..(417): Homolog of NCBI NO: 25347293 NR Description: probable pectinacetylesterase precursor T8L23.6
  misc_feature (12)..(416): Homolog of NCBI NO: 34913332 NR Description: putative pectin acetylesterase precursor
  misc_feature (55)..(417): Homolog of NCBI NO: 18397406 NR Description: pectinacetylesterase, putative [Arabidopsis
  misc_feature (12)..(417): Homolog of NCBI NO: 28392968 NR Description: putative pectinacetylesterase [Arabidopsis
  misc_feature (55)..(417): Homolog of NCBI NO: 15226462 NR Description: pectinacetylesterase, putative [Arabidopsis
  misc_feature (14)..(417): Homolog of NCBI NO: 34894654 NR Description: P0028G04.28 [Oryza sativa (japonica
MVKTRAGAVRPWALLALALLLIAGSCVEAADEQAANGGGRRRRTHRRSAAAVADMMVPITFLNASVEKGAVCMDGTPAAYDLDPGSGAGSKSWIVNLEGGGWCNNARTCRFRTRTHHGSSNFMERQIAFTGIMSASPAENPDFYNWNRVKIRYCDSASFAGDTFDKGTGLYFRGQRIWEEAIQHLLSIGMASADRALLTGCSAGGLAAILHCDQFGAFFAGRSTTVKCLADAGLFLDAVDVSGGRSLRSYYGDIVAMQGVAPNLPPTCTDHLDATSCFFPQNIIDSIKTPIFLLNAAYDVWQIEESLAPSKADPSRAWRACKFNRSACNASQINFLQGFRDQMVASVRGFSGSKSNGLFINSCFAHCQSELPATWNGTPAIQNKRIAKSVGDWYFGRAEVKAIDCPYPCDNTCRNII

SEQ ID NO: 67371 - protein, 363 aa, Triticum aestivum
  peptide (1)..(363): Ceres Seq. ID no. 15222401
  misc_feature (1)..(349): Pfam Name: Pectinacetylesterase Pfam Description: Pectinacetylesterase
  misc_feature (1)..(363): Homolog of NCBI NO: 15228677 NR Description: pectinacetylesterase family [Arabidopsis
  misc_feature (1)..(363): Homolog of NCBI NO: 7487997 NR Description: pectin acetylesterase homolog F21E10.11 -
  misc_feature (2)..(363): Homolog of NCBI NO: 21703105 NR Description: At1g57590/T8L23_6 [Arabidopsis thaliana]
  misc_feature (2)..(363): Homolog of NCBI NO: 30696158 NR Description: pectinacetylesterase, putative [Arabidopsis
  misc_feature (2)..(363): Homolog of NCBI NO: 25347293 NR Description: probable pectinacetylesterase precursor T8L23.6
  misc_feature (1)..(362): Homolog of NCBI NO: 34913332 NR Description: putative pectin acetylesterase precursor
  misc_feature (1)..(363): Homolog of NCBI NO: 18397406 NR Description: pectinacetylesterase, putative [Arabidopsis
  misc_feature (1)..(363): Homolog of NCBI NO: 28392968 NR Description: putative pectinacetylesterase [Arabidopsis
  misc_feature (1)..(363): Homolog of NCBI NO: 15226462 NR Description: pectinacetylesterase, putative [Arabidopsis
  misc_feature (1)..(363): Homolog of NCBI NO: 34894654 NR Description: P0028G04.28 [Oryza sativa (japonica
MMVPITFLNASVEKGAVCMDGTPAAYDLDPGSGAGSKSWIVNLEGGGWCNNARTCRFRTRTHHGSSNFMERQIAFTGIMSASPAENPDFYNWNRVKIRYCDSASFAGDTFDKGTGLYFRGQRIWEEAIQHLLSIGMASADRALLTGCSAGGLAAILHCDQFGAFFAGRSTTVKCLADAGLFLDAVDVSGGRSLRSYYGDIVAMQGVAPNLPPTCTDHLDATSCFFPQNIIDSIKTPIFLLNAAYDVWQIEESLAPSKADPSRAWRACKFNRSACNASQINFLQGFRDQMVASVRGFSGSKSNGLFINSCFAHCQSELPATWNGTPAIQNKRIAKSVGDWYFGRAEVKAIDCPYPCDNTCRNII

SEQ ID NO: 67372 - DNA, 838 bp, Triticum aestivum
  misc_feature (1)..(838): Ceres Seq. ID no. 13660639
atagccgcccgcgccactagtccactagagtagaacagagtgccgagccaacttcgcccaagagccaagaagcttccgagctccctcagttcccccacgagaaacacccttccgctgaagatcaagctgcagcggcgagcgatggctctagcccggaggttcctgttcctcttccctgccgccgtcctgacatggctcgcctcggcctccgcgtcgccctttctgtcggacagagtattccaggccagcaccggatccacgtgaggagcttgctgcagaccaagagggactgccctatagactttgagtaccagaactacacaatcatcacaagcaggtgcaaagggccacaatcgccccctacggaatgttgtgatgctttcaagaaatttgcatgcccatttgccgtgtacatcaacaaccagagcactaactgtgcagacacaatgttaacctacatcaacggccgtggctcatacccagcaggaatgttcgctgccgagtgcctaaaaggcaagcaaggggtttcttgcgaaggcatcccagggatagacaccggcgtgccaagcggcgggcgacgagctcacgggatttcaggtcgtttgatcgctctcttgtgtggactaggaggattgctgttccattgagtgataccttgcacttctccaaagatggaatgtttgtcggttggaagttgtaagtagtaaggctcatttgcttctccttgacgctctcttggtgtagtgactggacaattggcttttccaagcgatatctcttcagaaactccttaatacttgactaacacctcttaaaaatgcatttggttactattccg

SEQ ID NO: 67373 - protein, 151 aa, Triticum aestivum
  peptide (1)..(151): Ceres Seq. ID no. 13660640
  misc_feature (34)..(114): Homolog of NCBI NO: 38345027 NR Description: OSJNBa0029H02.11 [Oryza sativa (japonica
  misc_feature (32)..(114): Homolog of NCBI NO: 38345028 NR Description: OSJNBa0029H02.12 [Oryza sativa (japonica
  misc_feature (32)..(114): Homolog of NCBI NO: 10241671 NR Description: hypothetical protein [Oryza sativa (indica
  misc_feature (34)..(114): Homolog of NCBI NO: 10241672 NR Description: hypothetical protein [Oryza sativa (indica
  misc_feature (34)..(117): Homolog of NCBI NO: 25337807 NR Description: hypothetical protein At2g20700 [imported] -
  misc_feature (20)..(117): Homolog of NCBI NO: 38603910 NR Description: At4g28280 [Arabidopsis thaliana]
  misc_feature (25)..(117): Homolog of NCBI NO: 15235244 NR Description: GPI-anchored protein -related [Arabidopsis
  misc_feature (20)..(117): Homolog of NCBI NO: 30681101 NR Description: expressed protein [Arabidopsis thaliana]
  misc_feature (25)..(150): Homolog of NCBI NO: 3868853 NR Description: GPI-anchored protein [Vigna radiata]
  misc_feature (25)..(114): Homolog of NCBI NO: 15241141 NR Description: expressed protein [Arabidopsis thaliana]
MARLGLRVALSVGQSIPGQHRIHVRSLLQTKRDCPIDFEYQNYTIITSRCKGPQSPPTECCDAFKKFACPFAVYINNQSTNCADTMLTYINGRGSYPAGMFAAECLKGKQGVSCEGIPGIDTGVPSGGRRAHGISGRLIALLCGLGGLLFH

SEQ ID NO: 67374 - DNA, 1088 bp, Triticum aestivum
  misc_feature (1)..(1088): Ceres Seq. ID no. 15169533
ataacaaaacatggctcccctgactcccagacttgtggtgcccatagatgtgaagaagaagccatgggagcagaaggttcgtctccataaccgctggcatccggatatccctcctgttgctgatgtaactgaaggggaattattccgtgttgagatggtcgattggactggaggacgggttagagatgatgactctgcagatgatatcaaatttctggacctcaaaattattcaagaagggactgctgaatggcaaaaaattgcaaatgaagcagcaagaactattcctggaagagagaatggggggaattgtgacataaagaatctaagcagaggttccaaagtttatctaccagtatttgttgacggagcaaatctgagtactggcgatatgcacttttcccaaggtgatggtgaagtgtcattttgcggagcaatagaaatgagtggattccttgagctaaagtgtgagatcataagaggtgggatgaaggaatacttgactcctgttggtccaacagcacttcatgtgaatcctatctttgagataggtccagtggagccacgtttctcagaatggttagtctttgagggcatcagtgtagatgagtcggggaaacagcatttccttgatgcatcagttgcatacaagcgtgcagttctcaatgccattgagtatctttccagatttgggtactccaaggagcaggtctatcttttactgtcatgctgtccatgtgagggtaggatatctggaatagtagacgcccctaatgcagtggcgacacttgcgatccctacagcaatattcgaccaggatataaagccaaaacgcctggggcatggaccgaaattgagaagacttccggatgttctgagatgaaggtgcagtagacaccttcctgtaacacaggaccaatatcatgtttagaatatctaacaataaatctaaataatcatctttagtattccacaaccatctatgtttgtgcaacacgaatgtggacgtgttgttgtaatatggggtttcttgtttctcgatacttgataatttatatatcagacaatcgacgtatatgaaggcaccc

SEQ ID NO: 67375 - protein, 290 aa, Triticum aestivum
  peptide (1)..(290): Ceres Seq. ID no. 15169534
  misc_feature (8)..(94): Pfam Name: Acetamidase/Formamidase family Pfam Description: Acetamidase/Formamidase family
  misc_feature (1)..(94): Homolog of NCBI NO: 14334654 NR Description: putative formamidase [Arabidopsis thaliana]
  misc_feature (74)..(290): Homolog of NCBI NO: 14334654 NR Description: putative formamidase [Arabidopsis thaliana]
  misc_feature (1)..(94): Homolog of NCBI NO: 18420071 NR Description: formamidase - like protein [Arabidopsis thaliana]
  misc_feature (74)..(290): Homolog of NCBI NO: 18420071 NR Description: formamidase - like protein [Arabidopsis thaliana]
  misc_feature (1)..(71): Homolog of NCBI NO: 21592429 NR Description: formamidase-like protein [Arabidopsis thaliana]
  misc_feature (74)..(290): Homolog of NCBI NO: 21592429 NR Description: formamidase-like protein [Arabidopsis thaliana]
  misc_feature (1)..(71): Homolog of NCBI NO: 18420069 NR Description: formamidase - like protein [Arabidopsis thaliana]
  misc_feature (74)..(290): Homolog of NCBI NO: 18420069 NR Description: formamidase - like protein [Arabidopsis thaliana]
  misc_feature (1)..(94): Homolog of NCBI NO: 34909818 NR Description: putative formamidase [Oryza sativa (japonica
  misc_feature (74)..(290): Homolog of NCBI NO: 34909818 NR Description: putative formamidase [Oryza sativa (japonica
MAPLTPRLVVPIDVKKKPWEQKVRLHNRWHPDIPPVADVTEGELFRVEMVDWTGGRVRDDDSADDIKFLDLKIIQEGTAEWQKIANEAARTIPGRENGGNCDIKNLSRGSKVYLPVFVDGANLSTGDMHFSQGDGEVSFCGAIEMSGFLELKCEIIRGGMKEYLTPVGPTALHVNPIFEIGPVEPRFSEWLVFEGISVDESGKQHFLDASVAYKRAVLNAIEYLSRFGYSKEQVYLLLSCCPCEGRISGIVDAPNAVATLAIPTAIFDQDIKPKRLGHGPKLRRLPDVLR

SEQ ID NO: 67376 - protein, 242 aa, Triticum aestivum
  peptide (1)..(242): Ceres Seq. ID no. 15169535
  misc_feature (26)..(222): Pfam Name: Acetamidase/Formamidase family Pfam Description: Acetamidase/Formamidase family
  misc_feature (1)..(46): Homolog of NCBI NO: 14334654 NR Description: putative formamidase [Arabidopsis thaliana]
  misc_feature (26)..(242): Homolog of NCBI NO: 14334654 NR Description: putative formamidase [Arabidopsis thaliana]
  misc_feature (1)..(46): Homolog of NCBI NO: 18420071 NR Description: formamidase - like protein [Arabidopsis thaliana]
  misc_feature (26)..(242): Homolog of NCBI NO: 18420071 NR Description: formamidase - like protein [Arabidopsis thaliana]
  misc_feature (1)..(23): Homolog of NCBI NO: 21592429 NR Description: formamidase-like protein [Arabidopsis thaliana]
  misc_feature (26)..(242): Homolog of NCBI NO: 21592429 NR Description: formamidase-like protein [Arabidopsis thaliana]
  misc_feature (1)..(23): Homolog of NCBI NO: 18420069 NR Description: formamidase - like protein [Arabidopsis thaliana]
  misc_feature (26)..(242): Homolog of NCBI NO: 18420069 NR Description: formamidase - like protein [Arabidopsis thaliana]
  misc_feature (1)..(46): Homolog of NCBI NO: 34909818 NR Description: putative formamidase [Oryza sativa (japonica
  misc_feature (26)..(242): Homolog of NCBI NO: 34909818 NR Description: putative formamidase [Oryza sativa (japonica
MVDWTGGRVRDDDSADDIKFLDLKIIQEGTAEWQKIANEAARTIPGRENGGNCDIKNLSRGSKVYLPVFVDGANLSTGDMHFSQGDGEVSFCGAIEMSGFLELKCEIIRGGMKEYLTPVGPTALHVNPIFEIGPVEPRFSEWLVFEGISVDESGKQHFLDASVAYKRAVLNAIEYLSRFGYSKEQVYLLLSCCPCEGRISGIVDAPNAVATLAIPTAIFDQDIKPKRLGHGPKLRRLPDVLR

SEQ ID NO: 67377 - protein, 163 aa, Triticum aestivum
  peptide (1)..(163): Ceres Seq. ID no. 15169536
  misc_feature (1)..(143): Pfam Name: Acetamidase/Formamidase family Pfam Description: Acetamidase/Formamidase family
  misc_feature (1)..(146): Homolog of NCBI NO: 32421387 NR Description: hypothetical protein [Neurospora crassa]
  misc_feature (1)..(155): Homolog of NCBI NO: 33592607 NR Description: formamidase [Bordetella pertussis]
  misc_feature (1)..(161): Homolog of NCBI NO: 3913682 NR Description: Formamidase (Formamide amidohydrolase)
  misc_feature (1)..(106): Homolog of NCBI NO: 7488107 NR Description: probable formamidase (EC 3.5.1.49) F19F18.50 -
  misc_feature (1)..(163): Homolog of NCBI NO: 7488106 NR Description: probable formamidase (EC 3.5.1.49) F19F18.40 -
  misc_feature (1)..(163): Homolog of NCBI NO: 14334654 NR Description: putative formamidase [Arabidopsis thaliana]
  misc_feature (1)..(163): Homolog of NCBI NO: 18420071 NR Description: formamidase - like protein [Arabidopsis thaliana]
  misc_feature (1)..(163): Homolog of NCBI NO: 21592429 NR Description: formamidase-like protein [Arabidopsis thaliana]
  misc_feature (1)..(163): Homolog of NCBI NO: 18420069 NR Description: formamidase - like protein [Arabidopsis thaliana]
  misc_feature (1)..(163): Homolog of NCBI NO: 34909818 NR Description: putative formamidase [Oryza sativa (japonica
MHFSQGDGEVSFCGAIEMSGFLELKCEIIRGGMKEYLTPVGPTALHVNPIFEIGPVEPRFSEWLVFEGISVDESGKQHFLDASVAYKRAVLNAIEYLSRFGYSKEQVYLLLSCCPCEGRISGIVDAPNAVATLAIPTAIFDQDIKPKRLGHGPKLRRLPDVLR

SEQ ID NO: 67378 - DNA, 843 bp, Triticum aestivum
  misc_feature (1)..(843): Ceres Seq. ID no. 13545965
atcgaccatctccggctcgctcgtcgcccacccccaccctctcatcctccctccctcccccgaccgattttgacgactcctttgacctctcgcgctgtccctcccccgccccgccccgcctgcgtcgccgcgccaagctccaggcgcccccgccccctggtcggtggattccatggccaacagcaacctcccccgccggatcatcaaggagacgcagcggctgctcagcgaaccagcgccggggatcagcgcctcgccgtcggaggagaacatgcgctacttcaatgtcatggtccttggccccgcgcagtcgccctacgaaggtggagtcttcaagcttgaacttttcttacccgaggaatatccgatggctgctcctaaagttaggtttctcacaaaaatataccatcccaacattgacaagcttggtagaatatgcctcgacatcctaaaggacaagtggagtccagctcttcagatacgcactgttcttcttagcattcaggcactgctgagcgccccaaacccagatgatcccctctcagaaaacgtcgcaaaacactggaaatccaatgaagctgaagctgttgagacagcgaaggaatggactcgtatgtatgccagtggcgcatgacaagctaacgctgttatggatgtaataacaccgtgtcatagttgggcctaatcgaaaaccatttgcttgataaaaacacacttgaaatgatttgcgatggacgaatgtatccagagtggcatcatttctagttggtggttgtatttgtggtgcgtgttctggcacgcttcataacttgctgcttatagaacatgctctgtttctcgttc

SEQ ID NO: 67379 - protein, 153 aa, Triticum aestivum
  peptide (1)..(153): Ceres Seq. ID no. 13545966
  misc_feature (4)..(150): Homolog of NCBI NO: 27882519 NR Description: Similar to ubiquitin-conjugating enzyme E2N
  misc_feature (4)..(150): Homolog of NCBI NO: 30583959 NR Description: Homo sapiens ubiquitin-conjugating enzyme E2N
  misc_feature (4)..(150): Homolog of NCBI NO: 4507793 NR Description: ubiquitin-conjugating enzyme E2N (UBC13 homolog,
  misc_feature (4)..(150): Homolog of NCBI NO: 16758810 NR Description: ubiquitin-conjugating enzyme E2N (homologous to
  misc_feature (1)..(150): Homolog of NCBI NO: 28174992 NR Description: similar to ubiquitin-conjugating enzyme E2N [Mus
  misc_feature (1)..(141): Homolog of NCBI NO: 25293666 NR Description: hypothetical protein F9K20.8 [imported] -
  misc_feature (1)..(153): Homolog of NCBI NO: 5381319 NR Description: ubiquitin-conjugating enzyme E2 [Catharanthus
  misc_feature (1)..(153): Homolog of NCBI NO: 18412149 NR Description: ubiquitin-conjugating enzyme, putative
  misc_feature (1)..(153): Homolog of NCBI NO: 34911052 NR Description: ubiquitin-conjugating enzyme E2
  misc_feature (1)..(153): Homolog of NCBI NO: 18394416 NR Description: ubiquitin-conjugating enzyme, putative
MANSNLPRRIIKETQRLLSEPAPGISASPSEENMRYFNVMVLGPAQSPYEGGVFKLELFLPEEYPMAAPKVRFLTKIYHPNIDKLGRICLDILKDKWSPALQIRTVLLSIQALLSAPNPDDPLSENVAKHWKSNEAEAVETAKEWTRMYASGA

SEQ ID NO: 67380 - protein, 149 aa, Triticum aestivum
  peptide (1)..(149): Ceres Seq. ID no. 13545967
RPSPARSSPTPTLSSSLPPPTDFDDSFDLSRCPSPAPPRLRRRAKLQAPPPPGRWIPWPTATSPAGSSRRRSGCSANQRRGSAPRRRRRTCATSMSWSLAPRSRPTKVESSSLNFSYPRNIRWLLLKLGFSQKYTIPTLTSLVEYASTS

SEQ ID NO: 67381 - protein, 120 aa, Triticum aestivum
  peptide (1)..(120): Ceres Seq. ID no. 13545968
  misc_feature (1)..(117): Homolog of NCBI NO: 27882519 NR Description: Similar to ubiquitin-conjugating enzyme E2N
  misc_feature (1)..(117): Homolog of NCBI NO: 30583959 NR Description: Homo sapiens ubiquitin-conjugating enzyme E2N
  misc_feature (1)..(117): Homolog of NCBI NO: 4507793 NR Description: ubiquitin-conjugating enzyme E2N (UBC13 homolog,
  misc_feature (1)..(117): Homolog of NCBI NO: 16758810 NR Description: ubiquitin-conjugating enzyme E2N (homologous to
  misc_feature (1)..(117): Homolog of NCBI NO: 28174992 NR Description: similar to ubiquitin-conjugating enzyme E2N [Mus
  misc_feature (1)..(108): Homolog of NCBI NO: 25293666 NR Description: hypothetical protein F9K20.8 [imported] -
  misc_feature (1)..(120): Homolog of NCBI NO: 5381319 NR Description: ubiquitin-conjugating enzyme E2 [Catharanthus
  misc_feature (1)..(120): Homolog of NCBI NO: 18412149 NR Description: ubiquitin-conjugating enzyme, putative
  misc_feature (1)..(120): Homolog of NCBI NO: 34911052 NR Description: ubiquitin-conjugating enzyme E2
  misc_feature (1)..(120): Homolog of NCBI NO: 18394416 NR Description: ubiquitin-conjugating enzyme, putative
MRYFNVMVLGPAQSPYEGGVFKLELFLPEEYPMAAPKVRFLTKIYHPNIDKLGRICLDILKDKWSPALQIRTVLLSIQALLSAPNPDDPLSENVAKHWKSNEAEAVETAKEWTRMYASGA

SEQ ID NO: 67382 - DNA, 1478 bp, Triticum aestivum
  misc_feature (1)..(1478): Ceres Seq. ID no. 15178724
ccatcgaggcggccacgagaactgggtgacgaacaaagcccctgcagctcgtctctcgtcttctccgccgccatggcctccgacctcgggcaaccgtcgccggcgaaacgcccgccgacggcgcccaccacgattaccgctatcggcgaagacctcctttgcgagatcttcctcctccttccctccctcccgagcctcgtccgcgccgccctcgcctgccgcaccttcctccacgccgtccgttcgtcccccgccttccgccgccgattccgggcactccacccgccgcagatccttggcttcttttgcgacccgggccgcgaagccgtccctcccttcgtccccctccgcagccgctccgacccggacatcgccgccgccgtccgcggcgccgatttcctcctcacccggatcccagaagacagcggcgattccaccctcgggtgggagctgcagagcttccacggcggctacgtcgtcctcgtcaacaacgccaccgaccagatcgctgcctacaaccccctcacgcaggcactgcatctcatcccccacccacccgaagatatcatcttctccatctcccctgagttccacatcctcttgtcggaagaggaccagagggtgttccgtatggtctgtgtccaacaccaggacacgccgagcctcgccgtcttctcaaccgcgaccagggagtggcaggttttgccgtgggtggagaccccgccacaacctgaaggcgacatccgcttgttctaccatggcacgcagctgaatggatttgtttactggaaacacgcgagccaagcctatgtgctcgctctcaacaccgcgacaatgcaattctctagagtgaacttgccgcatttcttggcagagatagatcatatgctgtttaggcttggtcagaccaaggatgggaagctctgtatggttgcagcagatgactctgacccaaagataggaacgcttgttgttcgtgtctggggagccgatgatgacggtgttgagaagtggatgctggaagatactttttcactgagtaaatttgttgatgtcaccaagtcttcaacagagtatgataccacggtgcagattgaggcattcgtcgatggctttctgtacctctgtattaagtatggtgagcataccgagtctctggtatccctctgcctggaaacaggaaagctaaacaagatatttgatgatacatatacaagccctgctcatccctacatcatgtcatggcctccttctttggtttgcaacaaggaggattcacaaaccaagattactggaggcagtgttgaggacgctggttctgtgggcacaaaagaaactccctctgttttagtcacagcgccacaatcgcacaaaattgattgatgacgatgaagccaaagtcatggagatagagttttttttactttgtattggggatgataaaaactcagcaagcaaaatcactgcatatgcataac

SEQ ID NO: 67383 - protein, 460 aa, Triticum aestivum
  peptide (1)..(460): Ceres Seq. ID no. 15178725
  misc_feature (50)..(92): Pfam Name: F-box domain Pfam Description: F-box domain
  misc_feature (45)..(193): Homolog of NCBI NO: 32480316 NR Description: OSJNBa0042D13.1 [Oryza sativa (japonica
  misc_feature (36)..(187): Homolog of NCBI NO: 37530924 NR Description: unknown protein [Oryza sativa (japonica
  misc_feature (39)..(189): Homolog of NCBI NO: 34393352 NR Description: hypothetical protein [Oryza sativa (japonica
  misc_feature (39)..(238): Homolog of NCBI NO: 34393351 NR Description: hypothetical protein [Oryza sativa (japonica
  misc_feature (23)..(138): Homolog of NCBI NO: 34914940 NR Description: B1096D03.37 [Oryza sativa (japonica
  misc_feature (33)..(193): Homolog of NCBI NO: 34393354 NR Description: hypothetical protein [Oryza sativa (japonica
  misc_feature (34)..(378): Homolog of NCBI NO: 34914942 NR Description: B1096D03.38 [Oryza sativa (japonica
  misc_feature (50)..(351): Homolog of NCBI NO: 34914580 NR Description: P0455H0310.25 [Oryza sativa (japonica
  misc_feature (43)..(182): Homolog of NCBI NO: 34901902 NR Description: OSJNBa0036M16.17 [Oryza sativa (japonica
  misc_feature (199)..(422): Homolog of NCBI NO: 34901902 NR Description: OSJNBa0036M16.17 [Oryza sativa (japonica
PSRRPRELGDEQSPCSSSLVFSAAMASDLGQPSPAKRPPTAPTTITAIGEDLLCEIFLLLPSLPSLVRAALACRTFLHAVRSSPAFRRRFRALHPPQILGFFCDPGREAVPPFVPLRSRSDPDIAAAVRGADFLLTRIPEDSGDSTLGWELQSFHGGYVVLVNNATDQIAAYNPLTQALHLIPHPPEDIIFSISPEFHILLSEEDQRVFRMVCVQHQDTPSLAVFSTATREWQVLPWVETPPQPEGDIRLFYHGTQLNGFVYWKHASQAYVLALNTATMQFSRVNLPHFLAEIDHMLFRLGQTKDGKLCMVAADDSDPKIGTLVVRVWGADDDGVEKWMLEDTFSLSKFVDVTKSSTEYDTTVQIEAFVDGFLYLCIKYGEHTESLVSLCLETGKLNKIFDDTYTSPAHPYIMSWPPSLVCNKEDSQTKITGGSVEDAGSVGTKETPSVLVTAPQSHKID

SEQ ID NO: 67384 - protein, 436 aa, Triticum aestivum
  peptide (1)..(436): Ceres Seq. ID no. 15178726
  misc_feature (26)..(68): Pfam Name: F-box domain Pfam Description: F-box domain
  misc_feature (21)..(169): Homolog of NCBI NO: 32480316 NR Description: OSJNBa0042D13.1 [Oryza sativa (japonica
  misc_feature (12)..(163): Homolog of NCBI NO: 37530924 NR Description: unknown protein [Oryza sativa (japonica
  misc_feature (15)..(165): Homolog of NCBI NO: 34393352 NR Description: hypothetical protein [Oryza sativa (japonica
  misc_feature (15)..(214): Homolog of NCBI NO: 34393351 NR Description: hypothetical protein [Oryza sativa (japonica
  misc_feature (1)..(114): Homolog of NCBI NO: 34914940 NR Description: B1096D03.37 [Oryza sativa (japonica
  misc_feature (9)..(169): Homolog of NCBI NO: 34393354 NR Description: hypothetical protein [Oryza sativa (japonica
  misc_feature (10)..(354): Homolog of NCBI NO: 34914942 NR Description: B1096D03.38 [Oryza sativa (japonica
  misc_feature (26)..(327): Homolog of NCBI NO: 34914580 NR Description: P0455H0310.25 [Oryza sativa (japonica
  misc_feature (19)..(158): Homolog of NCBI NO: 34901902 NR Description: OSJNBa0036M16.17 [Oryza sativa (japonica
  misc_feature (175)..(398): Homolog of NCBI NO: 34901902 NR Description: OSJNBa0036M16.17 [Oryza sativa (japonica
MASDLGQPSPAKRPPTAPTTITAIGEDLLCEIFLLLPSLPSLVRAALACRTFLHAVRSSPAFRRRFRALHPPQILGFFCDPGREAVPPFVPLRSRSDPDIAAAVRGADFLLTRIPEDSGDSTLGWELQSFHGGYVVLVNNATDQIAAYNPLTQALHLIPHPPEDIIFSISPEFHILLSEEDQRVFRMVCVQHQDTPSLAVFSTATREWQVLPWVETPPQPEGDIRLFYHGTQLNGFVYWKHASQAYVLALNTATMQFSRVNLPHFLAEIDHMLFRLGQTKDGKLCMVAADDSDPKIGTLVVRVWGADDDGVEKWMLEDTFSLSKFVDVTKSSTEYDTTVQIEAFVDGFLYLCIKYGEHTESLVSLCLETGKLNKIFDDTYTSPAHPYIMSWPPSLVCNKEDSQTKITGGSVEDAGSVGTKETPSVLVTAPQSHKID

SEQ ID NO: 67385 - protein, 256 aa, Triticum aestivum
  peptide (1)..(256): Ceres Seq. ID no. 15178727
  misc_feature (48)..(199): Pfam Name: Equine herpesvirus glycoprotein gp2 Pfam Description: Equine herpesvirus glycoprotein gp2
  misc_feature (10)..(256): Homolog of NCBI NO: 13592175 NR Description: ppg3 [Leishmania major]
  misc_feature (10)..(237): Homolog of NCBI NO: 13592175 NR Description: ppg3 [Leishmania major]
  misc_feature (10)..(200): Homolog of NCBI NO: 11359723 NR Description: proteophosphoglycan, membrane-associated
  misc_feature (11)..(231): Homolog of NCBI NO: 5420387 NR Description: proteophosphoglycan [Leishmania major]
  misc_feature (10)..(231): Homolog of NCBI NO: 13592175 NR Description: ppg3 [Leishmania major]
  misc_feature (10)..(231): Homolog of NCBI NO: 5420387 NR Description: proteophosphoglycan [Leishmania major]
  misc_feature (11)..(231): Homolog of NCBI NO: 11359723 NR Description: proteophosphoglycan, membrane-associated
  misc_feature (10)..(256): Homolog of NCBI NO: 13592175 NR Description: ppg3 [Leishmania major]
  misc_feature (10)..(256): Homolog of NCBI NO: 13592175 NR Description: ppg3 [Leishmania major]
  misc_feature (28)..(233): Homolog of NCBI NO: 32699068 NR Description: hypothetical protein FLJ35107 [Homo sapiens]
HRGGHENWVTNKAPAARLSSSPPPWPPTSGNRRRRNARRRRPPRLPLSAKTSFARSSSSFPPSRASSAPPSPAAPSSTPSVRPPPSAADSGHSTRRRSLASFATRAAKPSLPSSPSAAAPTRTSPPPSAAPISSSPGSQKTAAIPPSGGSCRASTAATSSSSTTPPTRSLPTTPSRRHCISSPTHPKISSSPSPLSSTSSCRKRTRGCSVWSVSNTRTRRASPSSQPRPGSGRFCRGWRPRHNLKATSACSTMARS

SEQ ID NO: 67386 - DNA, 2010 bp, Triticum aestivum
  misc_feature (1)..(2010): Ceres Seq. ID no. 14301836
aacttttttcccctcgtcgtccccacttttttttctcccactccgcccccgattctccccaatcccctctcgccgccgccaggaggcagcaccggaatcgcggcgaccgaagatcccctccgacccacgccaaggaatcccgccgatccgctcgcgcctcccggatggccctgcaccagcaccacgcggggtcggcgtccgggtcggcgtcggcgtccagctccagttcggggctgcacctgcccgcctcgcccttcggggacaccacccacaccaagctcttcgtcgggggcctcgcctgggagaccaccagcgagaggctccgccgcttctacgagcgcttcggggacatcctcgaggccgtcgtcatcaccgaccgccactccggccgctccaaaggatacggcttcgtgacgttccgcgatgccgaggcggccaccaaggcctgcgaggaaccgtcgccggtcatcgatggcaggcgggccaactgtaacctggcgtcgctaggtcgcgcccagccttccacacccctcgggcggccacgatcagctggctcctactttggtgttcctgtcccaaggggcatttatgtaggtggttatggtcagcaccgaccccttccgcttgggtactaccagtaccagggatttccggttccacaatacagttactccgcatatggcaccgactacatctatccacagggtacattaaacccatatgttggtcagcaatatgttccagtttacggtgtctcagctgcagcaaatactgctaaccaaccatttagccaattgagcccatccatttctggtgggggcaacggctatccgatgatgcatggttacagtatgccaggaaatcaatttgtgcatctcactgggtcaaacttaattaattcatccccaacaaatcgtcccaccattcaggctccctttttagtagcagcaccggttccctcccatccacacttagttgtaccagcccactcacctcagtttacacaagctagtggttcagactaaagagcaagctgaactatgcacccaacaatttataccttgaggtaactttagtttgcagcaggactaaaagaacagtgctgctgtatttgcagcacttgttcttacctggaaaaaaatcatccttgtattcataaggttgtccttatcatggttgacatatgtacctggagatcatgaactgtcccgatggatggggcggtatcgcaagagcgacggctgctcttatcagtttggcttggttaaaatcctgtcctggtgggggactgtgatcgtcgatgtctagatacagcattattgattctgtatctgacaagtcatggatatatggtggatgctggaatggagtccagcaccctgtaagtttgactaatccaaggggattagtcatgatggcactcttaagaatcagggatgagtcacgatttgatggcactgagatgagtatccatctgaagagtcgccaagttagtgtgctttagtgtcgcaaagtttgagtcttgcacaagcaaaagtcagtgtcatgatctatcactctggtttggcactaggcctattgatagccacattatggatttacaatgctccgcttgaccgtaagcaggatgttcagtttgcccaaagggtggccggagatggtcctgcgtctgtaccaatttccccttagagcttctctgcgttattacacaattattgatcagatcaaggtgcattttgatccgtgttacagttggtgtcggttcaagaaccactgttgttttgtaatatgtcccagaagttctaatttagattcatgatgccctgagcttggtagctccaagatcggagtcttgttgtacttgaataataataaatccatctgctctgagtccagtgattgggtgcctgtcataatggattttcatgaacttggtggcatgaaaagatgtactgttggtacaattgagctgtgtgttaactcaagaaaaatagtttgtgaacaatgttc

SEQ ID NO: 67387 - protein, 340 aa, Triticum aestivum
  peptide (1)..(340): Ceres Seq. ID no. 14301837
  misc_feature (93)..(150): Pfam Name: RNA recognition motif. (a.k.a. RRM, RBD, or RNP domain) Pfam Description: RNA recognition motif. (a.k.a. RRM, RBD, or RNP
  misc_feature (83)..(340): Homolog of NCBI NO: 25518109 NR Description: T16E15.6 protein - Arabidopsis thaliana
  misc_feature (87)..(295): Homolog of NCBI NO: 14532532 NR Description: At1g33470/F10C21_14 [Arabidopsis thaliana]
  misc_feature (85)..(293): Homolog of NCBI NO: 34907334 NR Description: P0698A10.29 [Oryza sativa (japonica
  misc_feature (72)..(331): Homolog of NCBI NO: 25518498 NR Description: hypothetical protein F9H16.14 - Arabidopsis
  misc_feature (76)..(176): Homolog of NCBI NO: 25406448 NR Description: probable RNA-binding protein, 24808-23340
  misc_feature (224)..(340): Homolog of NCBI NO: 25406448 NR Description: probable RNA-binding protein, 24808-23340
  misc_feature (72)..(340): Homolog of NCBI NO: 15010636 NR Description: At1g20880/F9H16_14 [Arabidopsis thaliana]
  misc_feature (72)..(340): Homolog of NCBI NO: 23505939 NR Description: At1g20880/F9H16_14 [Arabidopsis thaliana]
  misc_feature (72)..(340): Homolog of NCBI NO: 18394923 NR Description: RNA recognition motif (RRM)-containing protein
  misc_feature (76)..(340): Homolog of NCBI NO: 22330665 NR Description: RNA recognition motif (RRM)-containing protein
LFSPRRPHFFFSHSAPDSPQSPLAAARRQHRNRGDRRSPPTHAKESRRSARASRMALHQHHAGSASGSASASSSSSGLHLPASPFGDTTHTKLFVGGLAWETTSERLRRFYERFGDILEAVVITDRHSGRSKGYGFVTFRDAEAATKACEEPSPVIDGRRANCNLASLGRAQPSTPLGRPRSAGSYFGVPVPRGIYVGGYGQHRPLPLGYYQYQGFPVPQYSYSAYGTDYIYPQGTLNPYVGQQYVPVYGVSAAANTANQPFSQLSPSISGGGNGYPMMHGYSMPGNQFVHLTGSNLINSSPTNRPTIQAPFLVAAPVPSHPHLVVPAHSPQFTQASGSD

SEQ ID NO: 67388 - protein, 286 aa, Triticum aestivum
  peptide (1)..(286): Ceres Seq. ID no. 14301838
  misc_feature (39)..(96): Pfam Name: RNA recognition motif. (a.k.a. RRM, RBD, or RNP domain) Pfam Description: RNA recognition motif. (a.k.a. RRM, RBD, or RNP
  misc_feature (29)..(286): Homolog of NCBI NO: 25518109 NR Description: T16E15.6 protein - Arabidopsis thaliana
  misc_feature (33)..(241): Homolog of NCBI NO: 14532532 NR Description: At1g33470/F10C21_14 [Arabidopsis thaliana]
  misc_feature (31)..(239): Homolog of NCBI NO: 34907334 NR Description: P0698A10.29 [Oryza sativa (japonica
  misc_feature (18)..(277): Homolog of NCBI NO: 25518498 NR Description: hypothetical protein F9H16.14 - Arabidopsis
  misc_feature (22)..(122): Homolog of NCBI NO: 25406448 NR Description: probable RNA-binding protein, 24808-23340
  misc_feature (170)..(286): Homolog of NCBI NO: 25406448 NR Description: probable RNA-binding protein, 24808-23340
  misc_feature (18)..(286): Homolog of NCBI NO: 15010636 NR Description: At1g20880/F9H16_14 [Arabidopsis thaliana]
  misc_feature (18)..(286): Homolog of NCBI NO: 23505939 NR Description: At1g20880/F9H16_14 [Arabidopsis thaliana]
  misc_feature (18)..(286): Homolog of NCBI NO: 18394923 NR Description: RNA recognition motif (RRM)-containing protein
  misc_feature (22)..(286): Homolog of NCBI NO: 22330665 NR Description: RNA recognition motif (RRM)-containing protein
MALHQHHAGSASGSASASSSSSGLHLPASPFGDTTHTKLFVGGLAWETTSERLRRFYERFGDILEAVVITDRHSGRSKGYGFVTFRDAEAATKACEEPSPVIDGRRANCNLASLGRAQPSTPLGRPRSAGSYFGVPVPRGIYVGGYGQHRPLPLGYYQYQGFPVPQYSYSAYGTDYIYPQGTLNPYVGQQYVPVYGVSAAANTANQPFSQLSPSISGGGNGYPMMHGYSMPGNQFVHLTGSNLINSSPTNRPTIQAPFLVAAPVPSHPHLVVPAHSPQFTQASGSD

SEQ ID NO: 67389 - DNA, 2424 bp, Triticum aestivum
  misc_feature (1)..(2424): Ceres Seq. ID no. 13660025
attacctagaacatcctaatcgaaaagtgaagcccgtttgaagctccctccagagcatgtccactgagactttttagagaaagaagaagagtcaactcaacgctgaacggcagcgagcatactctctgctcatcacaagcttagcttccacttctggctgcttgtctactgtcgccaattcctcatgccatgctccacctgcacgcgagtctctcccacggcgatctccgccacctcttcctcctcccggacagtgctccgcatactccccttccgctccccgcgcgggccgtatggacgcgggctctgccttcctggctccataaggtgcactgcggaggtcgttgacgcggcaatgcacgcgcccaagccgccggagcccaagccgcgcgtcctggtcgccggcggggggatcggcggcctcaccttcgcgctcgcggccaggcggaagggcttccaggtgctcgtgctggaaaaggacatgagcgmcgtccgcggggagggcaagtaccggggccccatccagctgcagagcaacgcgctcgccgtcctcgaggccgtcgacatgcccgccgcggaccagatcatggacgccggatgcatcaccggcgaccgcgtcaacgggatcgtcgacggcatctccggctcctggtacatcaagtttgataccttcactcctgctgctgacagagggctcccggtcacaagggtcattagccgcatgacgctgcagcagattcttgcccgtgcagtcggcgacgacgctataatgaacgattgccacgttgtcgactttactgataatggcaacaaggtcaccgcgatattggaggatgggcggaaatttgaaggtgatctcttggttggagcagatggcatatggtcaaaggtgaggaagtcgctttttggcgaaacggatgcatcttattcagaatacacttgctacaccggaattgcagactttgtgcctcctgatattgacacagtcgggtaccgagtgtttcttggtcacaaacaatatttcgtctcctcagacgttggtggtggtaaaatgcagtggtatgcatttcacaaggaacctgctggtggtacttatcctgagaatggcaaaaagaaaagactgctcgagatatttagcggttggtgtgataatgtcattgatctgctaaatgcaactgaggaggaagcaattcttcgccgggatatatacgatcggccacctactatcaactgggggaaaggtcgtgtcaccttgcttggtgactctgtccatgctatgcagccaaatctgggacagggtggctgcatggctattgaggatggttaccagctggctgtagagcttgagaaggcctgggaagagagtgtcaagtctagaactcctgtggacgttatttcctccttgaggagttatgagaaggagagaaagctacgtgttgctatcatacatggattggcaagaatggcggcaatcatggctaccacttacagaccatatctaggtgtgggtctgggacctttgtcgtttttgacaaagttgaggataccgcatcctggaagagttggtggcagatttttcatcaaggttggaatgcctttgatgctgagctggattttaggtggcaacagctcaaagctagaaggaagaccgttaagttgccggctttctgacaaggcaagcaaccagcttggtcgatggtttcaggatgacgatgcattggaacaagctatgggtggagagtggtacctcttccctatgagctctggagatgactctgccttgcagcccattcgtttgatcagggatgaacagaggacactctctattggaagcaaaccagatccgagcaattctgattcttcgttgtcgttccccttgccacaagtatcagagatccatgctactatcacatgcaagaataagggtttctatttgaccgatctcggaagcgagcatggtacatggtttaacgacaacgaaggcagacgctaccggttacctccgaacttcccagttcgtttccacccttctgatgccattgagtttggttcagataagaaggccatgttccgggtgaaagtgctcagcacgcttccatacgactccgcgagaggtggagaagttctgcaggcagcatgagtggggacttcagcgacaccttgtcaccagccactgtacagcattcttcagtaaacagccgacactgcatcatcgccaaggaaagaaaaagaattgtaatttttgcactcatccagatatcccagaacaggattttgaatagcttctgacagaattactacgttgcagttctacgaaaaagaactgagggtgtacaataggggtaggcaattttagctgttgccactgtaatactgtacccagtacagtacattgttgtgcctattaacacgtgttcatactgc

SEQ ID NO: 67390 - protein, 651 aa, Triticum aestivum
  peptide (1)..(651): Ceres Seq. ID no. 15220001
  misc_feature (222)..(426): Pfam Name: Monooxygenase Pfam Description: Monooxygenase
  misc_feature (62)..(650): Homolog of NCBI NO: 5902706 NR Description: Zeaxanthin epoxidase, chloroplast precursor
  misc_feature (67)..(646): Homolog of NCBI NO: 9857296 NR Description: AtABA1 [Arabidopsis thaliana]
  misc_feature (69)..(638): Homolog of NCBI NO: 9857294 NR Description: CpABA1 [Vigna unguiculata]
  misc_feature (51)..(650): Homolog of NCBI NO: 17402597 NR Description: zeaxanthin epoxidase [Citrus unshiu]
  misc_feature (67)..(646): Homolog of NCBI NO: 30698272 NR Description: zeaxanthin epoxidase precursor (LOS6/ABA1)(ZEP)
  misc_feature (67)..(646): Homolog of NCBI NO: 10444088 NR Description: zeaxanthin epoxidase [Arabidopsis thaliana]
  misc_feature (62)..(643): Homolog of NCBI NO: 5902707 NR Description: Zeaxanthin epoxidase, chloroplast precursor
  misc_feature (38)..(651): Homolog of NCBI NO: 5902708 NR Description: Zeaxanthin epoxidase, chloroplast precursor
  misc_feature (67)..(616): Homolog of NCBI NO: 13442816 NR Description: zeaxanthin epoxidase [Oryza sativa (japonica
  misc_feature (1)..(651): Homolog of NCBI NO: 38344835 NR Description: OSJNBa0064H22.16 [Oryza sativa (japonica
  misc_feature (102)..(102): Xaa is any aa, unknown or other
MPCSTCTRVSPTAISATSSSSRTVLRILPFRSPRGPYGRGLCLPGSIRCTAEVVDAAMHAPKPPEPKPRVLVAGGGIGGLTFALAARRKGFQVLVLEKDMSXVRGEGKYRGPIQLQSNALAVLEAVDMPAADQIMDAGCITGDRVNGIVDGISGSWYIKFDTFTPAADRGLPVTRVISRMTLQQILARAVGDDAIMNDCHVVDFTDNGNKVTAILEDGRKFEGDLLVGADGIWSKVRKSLFGETDASYSEYTCYTGIADFVPPDIDTVGYRVFLGHKQYFVSSDVGGGKMQWYAFHKEPAGGTYPENGKKKRLLEIFSGWCDNVIDLLNATEEEAILRRDIYDRPPTINWGKGRVTLLGDSVHAMQPNLGQGGCMAIEDGYQLAVELEKAWEESVKSRTPVDVISSLRSYEKERKLRVAIIHGLARMAAIMATTYRPYLGVGLGPLSFLTKLRIPHPGRVGGRFFIKVGMPLMLSWILGGNSSKLEGRPLSCRLSDKASNQLGRWFQDDDALEQAMGGEWYLFPMSSGDDSALQPIRLIRDEQRTLSIGSKPDPSNSDSSLSFPLPQVSEIHATITCKNKGFYLTDLGSEHGTWFNDNEGRRYRLPPNFPVRFHPSDAIEFGSDKKAMFRVKVLSTLPYDSARGGEVLQAA

SEQ ID NO: 67391 - protein, 594 aa, Triticum aestivum
  peptide (1)..(594): Ceres Seq. ID no. 15220002
  misc_feature (165)..(369): Pfam Name: Monooxygenase Pfam Description: Monooxygenase
  misc_feature (5)..(593): Homolog of NCBI NO: 5902706 NR Description: Zeaxanthin epoxidase, chloroplast precursor
  misc_feature (10)..(589): Homolog of NCBI NO: 9857296 NR Description: AtABA1 [Arabidopsis thaliana]
  misc_feature (12)..(581): Homolog of NCBI NO: 9857294 NR Description: CpABA1 [Vigna unguiculata]
  misc_feature (1)..(593): Homolog of NCBI NO: 17402597 NR Description: zeaxanthin epoxidase [Citrus unshiu]
  misc_feature (10)..(589): Homolog of NCBI NO: 30698272 NR Description: zeaxanthin epoxidase precursor (LOS6/ABA1)(ZEP)
  misc_feature (10)..(589): Homolog of NCBI NO: 10444088 NR Description: zeaxanthin epoxidase [Arabidopsis thaliana]
  misc_feature (5)..(586): Homolog of NCBI NO: 5902707 NR Description: Zeaxanthin epoxidase, chloroplast precursor
  misc_feature (1)..(594): Homolog of NCBI NO: 5902708 NR Description: Zeaxanthin epoxidase, chloroplast precursor
  misc_feature (10)..(559): Homolog of NCBI NO: 13442816 NR Description: zeaxanthin epoxidase [Oryza sativa (japonica
  misc_feature (1)..(594): Homolog of NCBI NO: 38344835 NR Description: OSJNBa0064H22.16 [Oryza sativa (japonica
  misc_feature (45)..(45): Xaa is any aa, unknown or other
MHAPKPPEPKPRVLVAGGGIGGLTFALAARRKGFQVLVLEKDMSXVRGEGKYRGPIQLQSNALAVLEAVDMPAADQIMDAGCITGDRVNGIVDGISGSWYIKFDTFTPAADRGLPVTRVISRMTLQQILARAVGDDAIMNDCHVVDFTDNGNKVTAILEDGRKFEGDLLVGADGIWSKVRKSLFGETDASYSEYTCYTGIADFVPPDIDTVGYRVFLGHKQYFVSSDVGGGKMQWYAFHKEPAGGTYPENGKKKRLLEIFSGWCDNVIDLLNATEEEAILRRDIYDRPPTINWGKGRVTLLGDSVHAMQPNLGQGGCMAIEDGYQLAVELEKAWEESVKSRTPVDVISSLRSYEKERKLRVAIIHGLARMAAIMATTYRPYLGVGLGPLSFLTKLRIPHPGRVGGRFFIKVGMPLMLSWILGGNSSKLEGRPLSCRLSDKASNQLGRWFQDDDALEQAMGGEWYLFPMSSGDDSALQPIRLIRDEQRTLSIGSKPDPSNSDSSLSFPLPQVSEIHATITCKNKGFYLTDLGSEHGTWFNDNEGRRYRLPPNFPVRFHPSDAIEFGSDKKAMFRVKVLSTLPYDSARGGEVLQAA

SEQ ID NO: 67392 - protein, 552 aa, Triticum aestivum
  peptide (1)..(552): Ceres Seq. ID no. 15220003
  misc_feature (123)..(327): Pfam Name: Monooxygenase Pfam Description: Monooxygenase
  misc_feature (1)..(551): Homolog of NCBI NO: 5902706 NR Description: Zeaxanthin epoxidase, chloroplast precursor
  misc_feature (1)..(547): Homolog of NCBI NO: 9857296 NR Description: AtABA1 [Arabidopsis thaliana]
  misc_feature (1)..(539): Homolog of NCBI NO: 9857294 NR Description: CpABA1 [Vigna unguiculata]
  misc_feature (1)..(551): Homolog of NCBI NO: 17402597 NR Description: zeaxanthin epoxidase [Citrus unshiu]
  misc_feature (1)..(547): Homolog of NCBI NO: 30698272 NR Description: zeaxanthin epoxidase precursor (LOS6/ABA1)(ZEP)
  misc_feature (1)..(547): Homolog of NCBI NO: 10444088 NR Description: zeaxanthin epoxidase [Arabidopsis thaliana]
  misc_feature (1)..(544): Homolog of NCBI NO: 5902707 NR Description: Zeaxanthin epoxidase, chloroplast precursor
  misc_feature (1)..(552): Homolog of NCBI NO: 5902708 NR Description: Zeaxanthin epoxidase, chloroplast precursor
  misc_feature (1)..(517): Homolog of NCBI NO: 13442816 NR Description: zeaxanthin epoxidase [Oryza sativa (japonica
  misc_feature (1)..(552): Homolog of NCBI NO: 38344835 NR Description: OSJNBa0064H22.16 [Oryza sativa (japonica
  misc_feature (3)..(3): Xaa is any aa, unknown or other
MSXVRGEGKYRGPIQLQSNALAVLEAVDMPAADQIMDAGCITGDRVNGIVDGISGSWYIKFDTFTPAADRGLPVTRVISRMTLQQILARAVGDDAIMNDCHVVDFTDNGNKVTAILEDGRKFEGDLLVGADGIWSKVRKSLFGETDASYSEYTCYTGIADFVPPDIDTVGYRVFLGHKQYFVSSDVGGGKMQWYAFHKEPAGGTYPENGKKKRLLEIFSGWCDNVIDLLNATEEEAILRRDIYDRPPTINWGKGRVTLLGDSVHAMQPNLGQGGCMAIEDGYQLAVELEKAWEESVKSRTPVDVISSLRSYEKERKLRVAIIHGLARMAAIMATTYRPYLGVGLGPLSFLTKLRIPHPGRVGGRFFIKVGMPLMLSWILGGNSSKLEGRPLSCRLSDKASNQLGRWFQDDDALEQAMGGEWYLFPMSSGDDSALQPIRLIRDEQRTLSIGSKPDPSNSDSSLSFPLPQVSEIHATITCKNKGFYLTDLGSEHGTWFNDNEGRRYRLPPNFPVRFHPSDAIEFGSDKKAMFRVKVLSTLPYDSARGGEVLQAA

SEQ ID NO: 67393 - DNA, 1552 bp, Triticum aestivum
  misc_feature (1)..(1552): Ceres Seq. ID no. 14313292
agaacccacacacctcctctgtattttctccctctttaaacccacaaatctctgtctgtccttacactcagagagaccatcaaaatggttgcggaggcgaagcagaacggcgtggccaccatggcgggcagcaaggtgcagctgatgtcggtgaagcgcggcgagccgacgctggtgtcgccggcggaggccacgccgacgggggagcagtactacctgtccaacctggaccagaacatcgcggtgatcgtgcagaccgtgtactgcttcaagtgcccatcgggccgcggcaacgaaggtgccgcggacgcgctccgggccgcgctggctcgcgtgctcgtccactaccacccgctcgccggccgcctcggcatcagcccggagatgaagctcatcgtggagtgcaccggcgagggcgtcccgttcgtggaggctgaggccgcttgcgacctcgccctcatcggggacctctccaccccggaccccgccgcgctgggccagctcgtgtactccgtccccggcgccaagagcatcctcgagatgccgcccatgacggcgcaggtgaccaggtttgaatgtggcggcttcagcatcgggttggccatgaaccactgcatgttcgacggtctgggcgccatggagttcgtcaactcctgggccgagatggcgcgcggcgccacggagctcaccgtgccaccgttcctcgaccgctccgtgctccgcgcgcgcgaccctccggtgatctccaacccgcaccacgagttcgaggagatcgctgacgtctcggaaatggcggcgctctacggcggccaggagctggtgtaccgctccttctgcttcgacccggacaggcttgagcgcgtccgcggcctcgccctcgccgacggggatctcgagcgctgcaccaccttcgaggcgctctccggcctcgtctggcgcgctcgcacccgcgcgctggggctcgcgccggagcagcagacgaagctgctgttcgccgtggacgggcgccgccgcttcgtgcctccgctcccaaaggggtacttcgggaacggcatcgtgctgaccaacgccctagcgacggcgggggatctgctgtcggcgccggtgtcgcgcgcggccgggaaggtgcaggaggccgtgcggatggtgacggacgagtatatgcggtcggcggtggactattttgaggcgacgcgctcgcggccatcgctggcgtcgacgctgctcatcaccacgtggtcgcggctcgcgttcaacggcgccgacttcggctggggcgagccgaccatgtccgggccagtcacgctgccggagaaggaggtcatactcttcctcgcgcacggcaaggagaggaagagcatcaacgtgctgctcggcctgccggcgtccgccatggacactttccaagagctcatggacgagatatgatcggcccagaccgattggatacgtcagcgactgcgctcggtgtttctatgcttgttttgcatgtgtttgttacttgttagcatggttatgttaattgtattattaagtgtgcgtcatttaattg

SEQ ID NO: 67394 - protein, 447 aa, Triticum aestivum
  peptide (1)..(447): Ceres Seq. ID no. 14313293
  misc_feature (21)..(442): Pfam Name: Transferase family Pfam Description: Transferase family
  misc_feature (13)..(447): Homolog of NCBI NO: 37535814 NR Description: putative hypersensitivity-related (hsr)protein
  misc_feature (20)..(445): Homolog of NCBI NO: 7489142 NR Description: hsr201 protein, hypersensitivity-related - common
  misc_feature (20)..(445): Homolog of NCBI NO: 22854880 NR Description: benzoyl coenzyme A: benzyl alcohol benzoyl
  misc_feature (23)..(444): Homolog of NCBI NO: 15229017 NR Description: transferase family [Arabidopsis thaliana]
  misc_feature (23)..(444): Homolog of NCBI NO: 34222064 NR Description: At3g48720 [Arabidopsis thaliana]
  misc_feature (9)..(447): Homolog of NCBI NO: 20161743 NR Description: N-hydroxycinnamoyl/benzoyltransferase-like
  misc_feature (23)..(445): Homolog of NCBI NO: 21553692 NR Description: acyltransferase-like protein [Arabidopsis
  misc_feature (23)..(445): Homolog of NCBI NO: 15242820 NR Description: transferase family [Arabidopsis thaliana]
  misc_feature (8)..(442): Homolog of NCBI NO: 30693725 NR Description: transferase family [Arabidopsis thaliana]
  misc_feature (2)..(442): Homolog of NCBI NO: 30693723 NR Description: transferase family [Arabidopsis thaliana]
MVAEAKQNGVATMAGSKVQLMSVKRGEPTLVSPAEATPTGEQYYLSNLDQNIAVIVQTVYCFKCPSGRGNEGAADALRAALARVLVHYHPLAGRLGISPEMKLIVECTGEGVPFVEAEAACDLALIGDLSTPDPAALGQLVYSVPGAKSILEMPPMTAQVTRFECGGFSIGLAMNHCMFDGLGAMEFVNSWAEMARGATELTVPPFLDRSVLRARDPPVISNPHHEFEEIADVSEMAALYGGQELVYRSFCFDPDRLERVRGLALADGDLERCTTFEALSGLVWRARTRALGLAPEQQTKLLFAVDGRRRFVPPLPKGYFGNGIVLTNALATAGDLLSAPVSRAAGKVQEAVRMVTDEYMRSAVDYFEATRSRPSLASTLLITTWSRLAFNGADFGWGEPTMSGPVTLPEKEVILFLAHGKERKSINVLLGLPASAMDTFQELMDEI

SEQ ID NO: 67395 - protein, 435 aa, Triticum aestivum
  peptide (1)..(435): Ceres Seq. ID no. 14313294
  misc_feature (9)..(430): Pfam Name: Transferase family Pfam Description: Transferase family
  misc_feature (1)..(435): Homolog of NCBI NO: 37535814 NR Description: putative hypersensitivity-related (hsr)protein
  misc_feature (8)..(433): Homolog of NCBI NO: 7489142 NR Description: hsr201 protein, hypersensitivity-related - common
  misc_feature (8)..(433): Homolog of NCBI NO: 22854880 NR Description: benzoyl coenzyme A: benzyl alcohol benzoyl
  misc_feature (11)..(432): Homolog of NCBI NO: 15229017 NR Description: transferase family [Arabidopsis thaliana]
  misc_feature (11)..(432): Homolog of NCBI NO: 34222064 NR Description: At3g48720 [Arabidopsis thaliana]
  misc_feature (1)..(435): Homolog of NCBI NO: 20161743 NR Description: N-hydroxycinnamoyl/benzoyltransferase-like
  misc_feature (11)..(433): Homolog of NCBI NO: 21553692 NR Description: acyltransferase-like protein [Arabidopsis
  misc_feature (11)..(433): Homolog of NCBI NO: 15242820 NR Description: transferase family [Arabidopsis thaliana]
  misc_feature (1)..(430): Homolog of NCBI NO: 30693725 NR Description: transferase family [Arabidopsis thaliana]
  misc_feature (1)..(430): Homolog of NCBI NO: 30693723 NR Description: transferase family [Arabidopsis thaliana]
MAGSKVQLMSVKRGEPTLVSPAEATPTGEQYYLSNLDQNIAVIVQTVYCFKCPSGRGNEGAADALRAALARVLVHYHPLAGRLGISPEMKLIVECTGEGVPFVEAEAACDLALIGDLSTPDPAALGQLVYSVPGAKSILEMPPMTAQVTRFECGGFSIGLAMNHCMFDGLGAMEFVNSWAEMARGATELTVPPFLDRSVLRARDPPVISNPHHEFEEIADVSEMAALYGGQELVYRSFCFDPDRLERVRGLALADGDLERCTTFEALSGLVWRARTRALGLAPEQQTKLLFAVDGRRRFVPPLPKGYFGNGIVLTNALATAGDLLSAPVSRAAGKVQEAVRMVTDEYMRSAVDYFEATRSRPSLASTLLITTWSRLAFNGADFGWGEPTMSGPVTLPEKEVILFLAHGKERKSINVLLGLPASAMDTFQELMDEI

SEQ ID NO: 67396 - protein, 427 aa, Triticum aestivum
  peptide (1)..(427): Ceres Seq. ID no. 14313295
  misc_feature (1)..(422): Pfam Name: Transferase family Pfam Description: Transferase family
  misc_feature (1)..(427): Homolog of NCBI NO: 37535814 NR Description: putative hypersensitivity-related (hsr)protein
  misc_feature (1)..(425): Homolog of NCBI NO: 7489142 NR Description: hsr201 protein, hypersensitivity-related - common
  misc_feature (1)..(425): Homolog of NCBI NO: 22854880 NR Description: benzoyl coenzyme A: benzyl alcohol benzoyl
  misc_feature (3)..(424): Homolog of NCBI NO: 15229017 NR Description: transferase family [Arabidopsis thaliana]
  misc_feature (3)..(424): Homolog of NCBI NO: 34222064 NR Description: At3g48720 [Arabidopsis thaliana]
  misc_feature (1)..(427): Homolog of NCBI NO: 20161743 NR Description: N-hydroxycinnamoyl/benzoyltransferase-like
  misc_feature (3)..(425): Homolog of NCBI NO: 21553692 NR Description: acyltransferase-like protein [Arabidopsis
  misc_feature (3)..(425): Homolog of NCBI NO: 15242820 NR Description: transferase family [Arabidopsis thaliana]
  misc_feature (1)..(422): Homolog of NCBI NO: 30693725 NR Description: transferase family [Arabidopsis thaliana]
  misc_feature (1)..(422): Homolog of NCBI NO: 30693723 NR Description: transferase family [Arabidopsis thaliana]
MSVKRGEPTLVSPAEATPTGEQYYLSNLDQNIAVIVQTVYCFKCPSGRGNEGAADALRAALARVLVHYHPLAGRLGISPEMKLIVECTGEGVPFVEAEAACDLALIGDLSTPDPAALGQLVYSVPGAKSILEMPPMTAQVTRFECGGFSIGLAMNHCMFDGLGAMEFVNSWAEMARGATELTVPPFLDRSVLRARDPPVISNPHHEFEEIADVSEMAALYGGQELVYRSFCFDPDRLERVRGLALADGDLERCTTFEALSGLVWRARTRALGLAPEQQTKLLFAVDGRRRFVPPLPKGYFGNGIVLTNALATAGDLLSAPVSRAAGKVQEAVRMVTDEYMRSAVDYFEATRSRPSLASTLLITTWSRLAFNGADFGWGEPTMSGPVTLPEKEVILFLAHGKERKSINVLLGLPASAMDTFQELMDEI

SEQ ID NO: 67397 - DNA, 857 bp, Triticum aestivum
  misc_feature (1)..(857): Ceres Seq. ID no. 14313232
aaaaacgatcagaaaaccacaaccaggagcaacaggaatgggttcctttgctaatggccagaatggttcggagcttggcatccagatgccggccatggggagcagcgcggtgccggagcctcccacaacatctgtagcagcaagatgtccacggctggacatggccatggtggccaccagagctgcagccctcgtgatggcgctgctctcaatgtcgctcatggtctccgccaagcaacggggtagtctcatcatctttggcatcgagattccactgtatgccaaatggtccctctctgattcgctgaaatccttggttgggctatctgcggcagcagctgcctactctctggcacaacttctgtcgattgcgtacaaggccttgaagaaagtccctgtggttccatccaggcgctatgcctggatgctgttagctggtgatcaggtctttgcgtatgcgatgttgagcggggggtcagcagcggcggccgtcgcaaatttgaaccgcaccggcatccggcacacggcgcttcccaacttctgcaagcccttgccacgtttctgcgacctatcagcagcctccatcgcgtgcgcctttctcagctgcgccttccttgccgcatccgctgtaatcgatgttatctggctgtcaaatctgtgagaatgtgagatagatggtggcaaactagtacaccccttggcagggagttcaactttcagggtgctgtgcctttagatgatgtgccgaacctgaacctgtaaagtgtcctgaagtcctgtgagttggctgcttgtacaaattggagcccccttggtgcaatggatggcatcacctggatgttgattgttgatttgct

SEQ ID NO: 67398 - protein, 219 aa, Triticum aestivum
  peptide (1)..(219): Ceres Seq. ID no. 14313233
  misc_feature (50)..(149): Pfam Name: Domain of unknown function (DUF588) Pfam Description: Domain of unknown function (DUF588)
  misc_feature (153)..(217): Homolog of NCBI NO: 15219983 NR Description: hypothetical integral membrane protein common
  misc_feature (53)..(127): Homolog of NCBI NO: 15219983 NR Description: hypothetical integral membrane protein common
  misc_feature (53)..(217): Homolog of NCBI NO: 7715593 NR Description: F20B17.20 [Arabidopsis thaliana]
  misc_feature (51)..(217): Homolog of NCBI NO: 15228175 NR Description: Arabidopsis hypothetical integral membrane
  misc_feature (13)..(149): Homolog of NCBI NO: 34910750 NR Description: P0022F10.21 [Oryza sativa (japonica
KTIRKPQPGATGMGSFANGQNGSELGIQMPAMGSSAVPEPPTTSVAARCPRLDMAMVATRAAALVMALLSMSLMVSAKQRGSLIIFGIEIPLYAKWSLSDSLKSLVGLSAAAAAYSLAQLLSIAYKALKKVPVVPSRRYAWMLLAGDQVFAYAMLSGGSAAAAVANLNRTGIRHTALPNFCKPLPRFCDLSAASIACAFLSCAFLAASAVIDVIWLSNL

SEQ ID NO: 67399 - protein, 207 aa, Triticum aestivum
  peptide (1)..(207): Ceres Seq. ID no. 14313234
  misc_feature (38)..(137): Pfam Name: Domain of unknown function (DUF588) Pfam Description: Domain of unknown function (DUF588)
  misc_feature (141)..(205): Homolog of NCBI NO: 15219983 NR Description: hypothetical integral membrane protein common
  misc_feature (41)..(115): Homolog of NCBI NO: 15219983 NR Description: hypothetical integral membrane protein common
  misc_feature (41)..(205): Homolog of NCBI NO: 7715593 NR Description: F20B17.20 [Arabidopsis thaliana]
  misc_feature (39)..(205): Homolog of NCBI NO: 15228175 NR Description: Arabidopsis hypothetical integral membrane
  misc_feature (1)..(137): Homolog of NCBI NO: 34910750 NR Description: P0022F10.21 [Oryza sativa (japonica
MGSFANGQNGSELGIQMPAMGSSAVPEPPTTSVAARCPRLDMAMVATRAAALVMALLSMSLMVSAKQRGSLIIFGIEIPLYAKWSLSDSLKSLVGLSAAAAAYSLAQLLSIAYKALKKVPVVPSRRYAWMLLAGDQVFAYAMLSGGSAAAAVANLNRTGIRHTALPNFCKPLPRFCDLSAASIACAFLSCAFLAASAVIDVIWLSNL

SEQ ID NO: 67400 - protein, 191 aa, Triticum aestivum
  peptide (1)..(191): Ceres Seq. ID no. 14313235
  misc_feature (22)..(121): Pfam Name: Domain of unknown function (DUF588) Pfam Description: Domain of unknown function (DUF588)
  misc_feature (125)..(189): Homolog of NCBI NO: 15219983 NR Description: hypothetical integral membrane protein common
  misc_feature (25)..(99): Homolog of NCBI NO: 15219983 NR Description: hypothetical integral membrane protein common
  misc_feature (25)..(189): Homolog of NCBI NO: 7715593 NR Description: F20B17.20 [Arabidopsis thaliana]
  misc_feature (23)..(189): Homolog of NCBI NO: 15228175 NR Description: Arabidopsis hypothetical integral membrane
  misc_feature (1)..(121): Homolog of NCBI NO: 34910750 NR Description: P0022F10.21 [Oryza sativa (japonica
MPAMGSSAVPEPPTTSVAARCPRLDMAMVATRAAALVMALLSMSLMVSAKQRGSLIIFGIEIPLYAKWSLSDSLKSLVGLSAAAAAYSLAQLLSIAYKALKKVPVVPSRRYAWMLLAGDQVFAYAMLSGGSAAAAVANLNRTGIRHTALPNFCKPLPRFCDLSAASIACAFLSCAFLAASAVIDVIWLSNL

SEQ ID NO: 67401 - DNA, 1451 bp, Triticum aestivum
  misc_feature (1)..(1451): Ceres Seq. ID no. 13660544
catcctaatcgaaaaaaccgatcatagaaatatctcctttcttctttccttttgctttgcacacatactagtgggcagtggcaccggcagcaagtagtctattcatctcagatctgaagttcactccctctcccggtgttctcttcccagcgtggatcctaaatcgcggacgccggacgaggagcgttcctctccaagttgtaatcgatcgcatcggcagcttcttacatcatcagcaattaatggccaccggaggtatgaccctggagagcctaccgaacgagctaccattagacttcttgagcaaaatcacaaataacttctccggtgagctactacttggtcagggcgcgttcgggtcagtttataaggggatcctggacgatggagtggttgctgtgaagaagctcgcagaaaattcgcctgtaccacgtgacacaatattcgcgaatgaggttcagaatattatggtgctcgagcatgaaaatatcgtcaagttggttgcctactgccgggaagcacaaaacaaattggtgcagagcaacggacgatatattattgcagagatcactgacactgtactctgctatgaatacttgcctaaggggagccttcacaagaatctttttggtgaatccagtagcattgattgggatatgcgctttaaaataataaagggaatatgtgaaggtatacattttctacataccttgcctagtcccgttctccatttgggtctgaagccttagaatatactactgggtgacaacatgacaccgaaaattgcggattttggtttctccagaatattcggccaagatcaaacccgaaagaacacacgaagtgtcgtgggatcgattgggtacatggccccggagtatctgtacaatggcgaaatctcggctcggtcagacatatatagtttaggcctaatcataatggagatatccacgagagagatgaatagttctagcactgaccagaagcatgcaaggaaatatattgatggagtaaaagaaaattggacactggagaaaataatgtgtgagtacattgagttagaagaacatggtttcaatcaagtagaagcatgtatcaatattggtctacagtgtgtagagattgatcagaagaagagaccttccatagagaacattgtcaatatgctcaataagcttccagtgagcgaggaggtctccctgtccacgtgagcacaaaacatcccacttttcagtgagagatgccgaacatcaagtaaaacaagatcagtgctacaaaagtggatgatgaaaccaatgtttgcattcaataaagcaagccatgatggcctttttgtaaaaaagtattaatgagaagtgtattgtgaacatgacccattgatatcacacaattgcaaatatatttagttttactcaaaaaaaaaaaaaaaaaagcttatcgataccgtcgac

SEQ ID NO: 67402 - protein, 168 aa, Triticum aestivum
  peptide (1)..(168): Ceres Seq. ID no. 13660545
  misc_feature (14)..(168): Homolog of NCBI NO: 21929723 NR Description: barley stem rust resistance protein
  misc_feature (51)..(168): Homolog of NCBI NO: 21724199 NR Description: stem rust resistance protein [Hordeum vulgare
  misc_feature (11)..(132): Homolog of NCBI NO: 38344522 NR Description: OSJNBa0016N04.15 [Oryza sativa (japonica
  misc_feature (144)..(168): Homolog of NCBI NO: 38344522 NR Description: OSJNBa0016N04.15 [Oryza sativa (japonica
  misc_feature (14)..(168): Homolog of NCBI NO: 21929729 NR Description: barley stem rust resistance protein
  misc_feature (14)..(168): Homolog of NCBI NO: 21929723 NR Description: barley stem rust resistance protein
  misc_feature (14)..(168): Homolog of NCBI NO: 21728344 NR Description: stem rust resistance protein Rpg1
  misc_feature (11)..(168): Homolog of NCBI NO: 38344521 NR Description: OSJNBa0016N04.14 [Oryza sativa (japonica
  misc_feature (15)..(102): Homolog of NCBI NO: 37532178 NR Description: putative receptor-like protein kinase
  misc_feature (117)..(168): Homolog of NCBI NO: 37532178 NR Description: putative receptor-like protein kinase
MATGGMTLESLPNELPLDFLSKITNNFSGELLLGQGAFGSVYKGILDDGVVAVKKLAENSPVPRDTIFANEVQNIMVLEHENIVKLVAYCREAQNKLVQSNGRYIIAEITDTVLCYEYLPKGSLHKNLFGESSSIDWDMRFKIIKGICEGIHFLHTLPSPVLHLGLKP

SEQ ID NO: 67403 - protein, 163 aa, Triticum aestivum
  peptide (1)..(163): Ceres Seq. ID no. 13660546
  misc_feature (9)..(163): Homolog of NCBI NO: 21929723 NR Description: barley stem rust resistance protein
  misc_feature (46)..(163): Homolog of NCBI NO: 21724199 NR Description: stem rust resistance protein [Hordeum vulgare
  misc_feature (6)..(127): Homolog of NCBI NO: 38344522 NR Description: OSJNBa0016N04.15 [Oryza sativa (japonica
  misc_feature (139)..(163): Homolog of NCBI NO: 38344522 NR Description: OSJNBa0016N04.15 [Oryza sativa (japonica
  misc_feature (9)..(163): Homolog of NCBI NO: 21929729 NR Description: barley stem rust resistance protein
  misc_feature (9)..(163): Homolog of NCBI NO: 21929723 NR Description: barley stem rust resistance protein
  misc_feature (9)..(163): Homolog of NCBI NO: 21728344 NR Description: stem rust resistance protein Rpg1
  misc_feature (6)..(163): Homolog of NCBI NO: 38344521 NR Description: OSJNBa0016N04.14 [Oryza sativa (japonica
  misc_feature (10)..(97): Homolog of NCBI NO: 37532178 NR Description: putative receptor-like protein kinase
  misc_feature (112)..(163): Homolog of NCBI NO: 37532178 NR Description: putative receptor-like protein kinase
MTLESLPNELPLDFLSKITNNFSGELLLGQGAFGSVYKGILDDGVVAVKKLAENSPVPRDTIFANEVQNIMVLEHENIVKLVAYCREAQNKLVQSNGRYIIAEITDTVLCYEYLPKGSLHKNLFGESSSIDWDMRFKIIKGICEGIHFLHTLPSPVLHLGLKP

SEQ ID NO: 67404 - protein, 146 aa, Triticum aestivum
  peptide (1)..(146): Ceres Seq. ID no. 13660547
  misc_feature (1)..(144): Homolog of NCBI NO: 21728344 NR Description: stem rust resistance protein Rpg1
  misc_feature (1)..(144): Homolog of NCBI NO: 21929729 NR Description: barley stem rust resistance protein
  misc_feature (1)..(144): Homolog of NCBI NO: 21929723 NR Description: barley stem rust resistance protein
  misc_feature (1)..(146): Homolog of NCBI NO: 21724199 NR Description: stem rust resistance protein [Hordeum vulgare
  misc_feature (1)..(145): Homolog of NCBI NO: 38344522 NR Description: OSJNBa0016N04.15 [Oryza sativa (japonica
  misc_feature (1)..(138): Homolog of NCBI NO: 21929723 NR Description: barley stem rust resistance protein
  misc_feature (1)..(138): Homolog of NCBI NO: 21929729 NR Description: barley stem rust resistance protein
  misc_feature (1)..(138): Homolog of NCBI NO: 21728344 NR Description: stem rust resistance protein Rpg1
  misc_feature (1)..(136): Homolog of NCBI NO: 38344521 NR Description: OSJNBa0016N04.14 [Oryza sativa (japonica
  misc_feature (1)..(133): Homolog of NCBI NO: 37532178 NR Description: putative receptor-like protein kinase
MTPKIADFGFSRIFGQDQTRKNTRSVVGSIGYMAPEYLYNGEISARSDIYSLGLIIMEISTREMNSSSTDQKHARKYIDGVKENWTLEKIMCEYIELEEHGFNQVEACINIGLQCVEIDQKKRPSIENIVNMLNKLPVSEEVSLST

SEQ ID NO: 67405 - DNA, 463 bp, Triticum aestivum
  misc_feature (1)..(463): Ceres Seq. ID no. 13660548
atgtcgtcttcctcgccaccacaccacaccactgcagtgccgtcgcgtcatctcccacctctcccatcgggccagcggaagcagcagctgcgtgcggaaccaaccatgctccccttcctcctctccctccttctcctcaccggcgccgcggcgggggtacagggccacgacgacgcggcggcgcggcggacgatggaggagttcgccggcttccccgcctccgacgacggcgagggcggccgcgcctcccccttgcgcgtagactccgaaagtcthdagcgccagattgatgaactggcctcgttctccgactcgccggcgcrgtcggtgacgcgtgttctgtacagcgacaaggatgtgcaagctcgaaggtatattaaagggataatgaaacagcttggcctctctgttcgagaagatgccgttggcaacatatttggccgctgggtgggtyctgaggcag

SEQ ID NO: 67406 - protein, 154 aa, Triticum aestivum
  peptide (1)..(154): Ceres Seq. ID no. 13660549
  misc_feature (96)..(153): Pfam Name: Peptidase family M20/M25/M40 Pfam Description: Peptidase family M20/M25/M40
  misc_feature (85)..(151): Homolog of NCBI NO: 16799616 NR Description: similar to N-carbamyl-L-amino acid amidohydrolase
  misc_feature (85)..(151): Homolog of NCBI NO: 16802580 NR Description: similar to N-carbamyl-L-amino acid amidohydrolase
  misc_feature (65)..(153): Homolog of NCBI NO: 10178199 NR Description: N-carbamyl-L-amino acid amidohydrolase-like
  misc_feature (37)..(153): Homolog of NCBI NO: 22327548 NR Description: N-carbamyl-L-amino acid hydrolase, putative
  misc_feature (92)..(92): Xaa is any aa, unknown or other
  misc_feature (93)..(93): Xaa is any aa, unknown or other
  misc_feature (108)..(108): Xaa is any aa, unknown or other
  misc_feature (152)..(152): Xaa is any aa, unknown or other
MSSSSPPHHTTAVPSRHLPPLPSGQRKQQLRAEPTMLPFLLSLLLLTGAAAGVQGHDDAAARRTMEEFAGFPASDDGEGGRASPLRVDSESXXRQIDELASFSDSPAXSVTRVLYSDKDVQARRYIKGIMKQLGLSVREDAVGNIFGRWVGXEA

SEQ ID NO: 67407 - protein, 119 aa, Triticum aestivum
  peptide (1)..(119): Ceres Seq. ID no. 13660550
  misc_feature (61)..(118): Pfam Name: Peptidase family M20/M25/M40 Pfam Description: Peptidase family M20/M25/M40
  misc_feature (50)..(116): Homolog of NCBI NO: 16799616 NR Description: similar to N-carbamyl-L-amino acid amidohydrolase
  misc_feature (50)..(116): Homolog of NCBI NO: 16802580 NR Description: similar to N-carbamyl-L-amino acid amidohydrolase
  misc_feature (30)..(118): Homolog of NCBI NO: 10178199 NR Description: N-carbamyl-L-amino acid amidohydrolase-like
  misc_feature (2)..(118): Homolog of NCBI NO: 22327548 NR Description: N-carbamyl-L-amino acid hydrolase, putative
  misc_feature (57)..(57): Xaa is any aa, unknown or other
  misc_feature (58)..(58): Xaa is any aa, unknown or other
  misc_feature (73)..(73): Xaa is any aa, unknown or other
  misc_feature (117)..(117): Xaa is any aa, unknown or other
MLPFLLSLLLLTGAAAGVQGHDDAAARRTMEEFAGFPASDDGEGGRASPLRVDSESXXRQIDELASFSDSPAXSVTRVLYSDKDVQARRYIKGIMKQLGLSVREDAVGNIFGRWVGXEA

SEQ ID NO: 67408 - protein, 95 aa, Triticum aestivum
  peptide (1)..(95): Ceres Seq. ID no. 13660551
  misc_feature (92)..(92): Xaa is any aa, unknown or other
VVFLATTPHHCSAVASSPTSPIGPAEAAAACGTNHAPLPPLPPSPHRRRGGGTGPRRRGGAADDGGVRRLPRLRRRRGRPRLPLARRLRKSXAPD

SEQ ID NO: 67409 - DNA, 1432 bp, Triticum aestivum
  misc_feature (1)..(1432): Ceres Seq. ID no. 14302378
acccaatccatccctccgagcctttccactccactccgtgcgcccccaaccacgccgcacacttctcgcggcctccaaaacccaaatccctgaccgccggcggcggcgatgctcctctgccaccgcatcctccctcgcctcctctccctcccctccagcgccacctcgaaactcctcatccgcccctcccgcctccctcctcgccgccccttcctgcctcgctgcgccgtgctctctcagcttgcggccccccaaactgtagaccacgccgacgccgaagaatccgctgaccacctcgacgccgaagagccgcaggagccccaggagccgcaggaggtgctggtaaagctccccctcgaccggctcttcctgccaccgggggcgagcgtgaccccgggggacgaggaggtcgtgaccgcgcgtgtcctcaagggttccaacatcgtgctgggcacgtacgcgcggggcgatgcgcaggtggttaacgcggatttcataaagagcagcgtgcgacccgatgactgccccagggatgggctgcccgagttcgcgctcgtcggccgctccaacgtcggcaagtcgtcactgctcaactcgctcgtccgccgcaagcgcctcgcgctcacctccaagaaacctggcaagacccagtgtatcaatcattttaaaataaatgacagttggtaccttgttgacttgcctggttatggatatgcttcagcaccacaggtagctcgtaaagattgggatgagtttactagaaattacttccttagcagggataatctggtgtcagtttttctccttatagatgcaagtattcctgctaagaagattgatcttgactatgctagttggcttgggcaaaacaaggtcccaatgaccctcgtgttcacaaagtgcgacaagcgcaagaagaagaaaaatggcggcaagagaccggaagaaaacgtagaatgcttccagagtctgattcgcgaatattttgaggcggcgcctccgtggataatgacgagcagcgtaacgaaccaaggcagagacgagatacttctgcacatgtctcagctcagaaactattggcgcaagcattaagaggaggaattacaagagtaggactgaagcaatagcaaaccgcatgcaggcggcagccgcacctttgcaatcaggatttcaccaaccaatccgccttgccttttgagctgttgattgtccacgattgcatgatgattactcaatcaacaggaaggccgagaatacagacaagccgctgaaatcaactaccctgtttttttcttctatatttgtacaaccgtacagtctcaacgttttgtctttgttactttctgattataagattgtgcgtcctgtatgtagattaaagaaactcccgtgtcagctaatcatcatcgggaatcccacacgtttgtttgtc

SEQ ID NO: 67410 - protein, 327 aa, Triticum aestivum
  peptide (1)..(327): Ceres Seq. ID no. 14302379
  misc_feature (146)..(284): Pfam Name: GTPase of unknown function Pfam Description: GTPase of unknown function
  misc_feature (123)..(322): Homolog of NCBI NO: 34762743 NR Description: GTP-binding protein
  misc_feature (123)..(320): Homolog of NCBI NO: 29346493 NR Description: putative GTP-binding protein
  misc_feature (124)..(314): Homolog of NCBI NO: 31194343 NR Description: ENSANGP00000000181 [Anopheles gambiae]
  misc_feature (106)..(201): Homolog of NCBI NO: 20330773 NR Description: Putative nucleotide binding protein
  misc_feature (202)..(324): Homolog of NCBI NO: 20330773 NR Description: Putative nucleotide binding protein
  misc_feature (106)..(324): Homolog of NCBI NO: 25306612 NR Description: probable nucleotide-binding protein
  misc_feature (86)..(324): Homolog of NCBI NO: 18400109 NR Description: nucleotide-binding protein -related [Arabidopsis
  misc_feature (80)..(327): Homolog of NCBI NO: 21592799 NR Description: putative GTP-binding protein [Arabidopsis
  misc_feature (79)..(327): Homolog of NCBI NO: 15239069 NR Description: GTP-binding protein -related [Arabidopsis
  misc_feature (21)..(327): Homolog of NCBI NO: 34910170 NR Description: putative GTP-binding protein
MLLCHRILPRLLSLPSSATSKLLIRPSRLPPRRPFLPRCAVLSQLAAPQTVDHADAEESADHLDAEEPQEPQEPQEVLVKLPLDRLFLPPGASVTPGDEEVVTARVLKGSNIVLGTYARGDAQVVNADFIKSSVRPDDCPRDGLPEFALVGRSNVGKSSLLNSLVRRKRLALTSKKPGKTQCINHFKINDSWYLVDLPGYGYASAPQVARKDWDEFTRNYFLSRDNLVSVFLLIDASIPAKKIDLDYASWLGQNKVPMTLVFTKCDKRKKKKNGGKRPEENVECFQSLIREYFEAAPPWIMTSSVTNQGRDEILLHMSQLRNYWRKH

SEQ ID NO: 67411 - DNA, 1653 bp, Triticum aestivum
  misc_feature (1)..(1653): Ceres Seq. ID no. 13660693
aggagcatcatttttcttagagtcgctcaagctgagtaagccaacccaagctcaatggcggcgaatcagcagcaatcgacccgctcggaaccctagcctggcccgccgagtcgccatggcatgccctccttgcccgccgtcgccgctcgccagggtgcggctcgacgacgtggcgccccacgacggcgcggccgccccgggctacgcgcgcgccgtcggcgccctcgccgcctcgctcgcccgccgcggcgccgccgtgctcgagctccccgccgcggacgcggccgtcgtccgctgcgccctcgagtccgcccgcgccttcttccgcggccgccacgccgcctacctctaccgcgccgggaggactttggaagatggagagttgtcccctgcttgcatggctgatgctttcagatgtttgggcaaagcagcccgggccgccctctgtgcaatagcacggcacctgcgcctacgtaccgacgtattcaatcaattagttgatgatactccactgccggttaacgaggtctcctcatcagagttgctggtagcatattctcatgaacagctccaaagtggtctgacactcatgggatgtcccagcaggtcctcaatgcctcaagttgataggggatttgtgacgctagttgcttccgataatccaggaattgaggtttgtgacccaaatggccattggtacctagctgatggggtttcaggcccaaataatctattgcttctgactggaagggccctaagtcacgttactgctggtctttgcccaatttcccagtacagggtcactaatgaaaatagggcatcactcacctttaggttggtgcctcatgccaacgctatattggattgctctccaattttagctgctgggcattgcatacgacaggtgtaccaacccatacctgcaggccaatttatggatgattcttatgctgaagagcacgctgtttccagtcacttggaagaaccttctgaatctcagggcaactttgttagtgatccatcgctgagaagtgtcctgtcagaccctctgtctggggcttttcttgaagatgctatggttctccaatgtgggcactcatttggtggcgtcatgctgaagaaagtcattgaaatggctagatgcaccatttgcaatggagaagttgacccatcctccttgtttcctaatctcgctttaagagcagtagctacggtggtgaagatggaggatgacaggagactgtttcataacgccgctcttcggaagcgcaggaaagatgtgaccgagcatacggatgtggtgaagcggagtgggagtcgcaaaggaaacagtgagcttgctctggatgctgaaagcccggtggcattcaagggtgtgcagtacccatttgtagtgggcgagagggtcctgatcatggggaacaaaaggacgcccgagaaatttgtcgggaaggaggcggtcatcacttcacagtgtctgaatggctggtatcttgtgaaggcgctcgacagcggagagagcacacggcttcagtaccggtcgctgaagaaagtgccggggctgcaactgcagacgcaagcgaggctgcagcccctggcatttctcggaggcagacaataagagacggcgatgacggatcatgtgtggaccat

SEQ ID NO: 67412 - protein, 539 aa, Triticum aestivum
  peptide (1)..(539): Ceres Seq. ID no. 13660694
  misc_feature (115)..(352): Homolog of NCBI NO: 33146537 NR Description: unknown protein [Oryza sativa (japonica
  misc_feature (49)..(111): Homolog of NCBI NO: 15230647 NR Description: expressed protein [Arabidopsis thaliana]
  misc_feature (114)..(319): Homolog of NCBI NO: 15230647 NR Description: expressed protein [Arabidopsis thaliana]
  misc_feature (341)..(518): Homolog of NCBI NO: 27413505 NR Description: hypothetical protein [Arabidopsis thaliana]
  misc_feature (341)..(518): Homolog of NCBI NO: 30688352 NR Description: expressed protein [Arabidopsis thaliana]
  misc_feature (342)..(517): Homolog of NCBI NO: 28876015 NR Description: hypothetical protein [Oryza sativa (japonica
  misc_feature (47)..(278): Homolog of NCBI NO: 20453175 NR Description: At3g19895 [Arabidopsis thaliana]
  misc_feature (109)..(435): Homolog of NCBI NO: 20453175 NR Description: At3g19895 [Arabidopsis thaliana]
  misc_feature (47)..(518): Homolog of NCBI NO: 11994201 NR Description: gb|AAF35943.1~gene_id:MPN9.14~similar to unknown
  misc_feature (109)..(518): Homolog of NCBI NO: 30685540 NR Description: expressed protein [Arabidopsis thaliana]
GASFFLESLKLSKPTQAQWRRISSNRPARNPSLARRVAMACPPCPPSPLARVRLDDVAPHDGAAAPGYARAVGALAASLARRGAAVLELPAADAAVVRCALESARAFFRGRHAAYLYRAGRTLEDGELSPACMADAFRCLGKAARAALCAIARHLRLRTDVFNQLVDDTPLPVNEVSSSELLVAYSHEQLQSGLTLMGCPSRSSMPQVDRGFVTLVASDNPGIEVCDPNGHWYLADGVSGPNNLLLLTGRALSHVTAGLCPISQYRVTNENRASLTFRLVPHANAILDCSPILAAGHCIRQVYQPIPAGQFMDDSYAEEHAVSSHLEEPSESQGNFVSDPSLRSVLSDPLSGAFLEDAMVLQCGHSFGGVMLKKVIEMARCTICNGEVDPSSLFPNLALRAVATVVKMEDDRRLFHNAALRKRRKDVTEHTDVVKRSGSRKGNSELALDAESPVAFKGVQYPFVVGERVLIMGNKRTPEKFVGKEAVITSQCLNGWYLVKALDSGESTRLQYRSLKKVPGLQLQTQARLQPLAFLGGRQ

SEQ ID NO: 67413 - protein, 501 aa, Triticum aestivum
  peptide (1)..(501): Ceres Seq. ID no. 13660695
  misc_feature (77)..(314): Homolog of NCBI NO: 33146537 NR Description: unknown protein [Oryza sativa (japonica
  misc_feature (11)..(73): Homolog of NCBI NO: 15230647 NR Description: expressed protein [Arabidopsis thaliana]
  misc_feature (76)..(281): Homolog of NCBI NO: 15230647 NR Description: expressed protein [Arabidopsis thaliana]
  misc_feature (303)..(480): Homolog of NCBI NO: 27413505 NR Description: hypothetical protein [Arabidopsis thaliana]
  misc_feature (303)..(480): Homolog of NCBI NO: 30688352 NR Description: expressed protein [Arabidopsis thaliana]
  misc_feature (304)..(479): Homolog of NCBI NO: 28876015 NR Description: hypothetical protein [Oryza sativa (japonica
  misc_feature (9)..(240): Homolog of NCBI NO: 20453175 NR Description: At3g19895 [Arabidopsis thaliana]
  misc_feature (71)..(397): Homolog of NCBI NO: 20453175 NR Description: At3g19895 [Arabidopsis thaliana]
  misc_feature (9)..(480): Homolog of NCBI NO: 11994201 NR Description: gb|AAF35943.1~gene_id:MPN9.14~similar to unknown
  misc_feature (71)..(480): Homolog of NCBI NO: 30685540 NR Description: expressed protein [Arabidopsis thaliana]
MACPPCPPSPLARVRLDDVAPHDGAAAPGYARAVGALAASLARRGAAVLELPAADAAVVRCALESARAFFRGRHAAYLYRAGRTLEDGELSPACMADAFRCLGKAARAALCAIARHLRLRTDVFNQLVDDTPLPVNEVSSSELLVAYSHEQLQSGLTLMGCPSRSSMPQVDRGFVTLVASDNPGIEVCDPNGHWYLADGVSGPNNLLLLTGRALSHVTAGLCPISQYRVTNENRASLTFRLVPHANAILDCSPILAAGHCIRQVYQPIPAGQFMDDSYAEEHAVSSHLEEPSESQGNFVSDPSLRSVLSDPLSGAFLEDAMVLQCGHSFGGVMLKKVIEMARCTICNGEVDPSSLFPNLALRAVATVVKMEDDRRLFHNAALRKRRKDVTEHTDVVKRSGSRKGNSELALDAESPVAFKGVQYPFVVGERVLIMGNKRTPEKFVGKEAVITSQCLNGWYLVKALDSGESTRLQYRSLKKVPGLQLQTQARLQPLAFLGGRQ

SEQ ID NO: 67414 - protein, 407 aa, Triticum aestivum
  peptide (1)..(407): Ceres Seq. ID no. 13660696
  misc_feature (1)..(220): Homolog of NCBI NO: 33146538 NR Description: unknown protein [Oryza sativa (japonica
  misc_feature (1)..(220): Homolog of NCBI NO: 33146537 NR Description: unknown protein [Oryza sativa (japonica
  misc_feature (1)..(187): Homolog of NCBI NO: 15230647 NR Description: expressed protein [Arabidopsis thaliana]
  misc_feature (209)..(386): Homolog of NCBI NO: 27413505 NR Description: hypothetical protein [Arabidopsis thaliana]
  misc_feature (209)..(386): Homolog of NCBI NO: 30688352 NR Description: expressed protein [Arabidopsis thaliana]
  misc_feature (210)..(385): Homolog of NCBI NO: 28876015 NR Description: hypothetical protein [Oryza sativa (japonica
  misc_feature (1)..(146): Homolog of NCBI NO: 20453175 NR Description: At3g19895 [Arabidopsis thaliana]
  misc_feature (1)..(303): Homolog of NCBI NO: 20453175 NR Description: At3g19895 [Arabidopsis thaliana]
  misc_feature (1)..(386): Homolog of NCBI NO: 11994201 NR Description: gb|AAF35943.1~gene_id:MPN9.14~similar to unknown
  misc_feature (1)..(386): Homolog of NCBI NO: 30685540 NR Description: expressed protein [Arabidopsis thaliana]
MADAFRCLGKAARAALCAIARHLRLRTDVFNQLVDDTPLPVNEVSSSELLVAYSHEQLQSGLTLMGCPSRSSMPQVDRGFVTLVASDNPGIEVCDPNGHWYLADGVSGPNNLLLLTGRALSHVTAGLCPISQYRVTNENRASLTFRLVPHANAILDCSPILAAGHCIRQVYQPIPAGQFMDDSYAEEHAVSSHLEEPSESQGNFVSDPSLRSVLSDPLSGAFLEDAMVLQCGHSFGGVMLKKVIEMARCTICNGEVDPSSLFPNLALRAVATVVKMEDDRRLFHNAALRKRRKDVTEHTDVVKRSGSRKGNSELALDAESPVAFKGVQYPFVVGERVLIMGNKRTPEKFVGKEAVITSQCLNGWYLVKALDSGESTRLQYRSLKKVPGLQLQTQARLQPLAFLGGRQ

SEQ ID NO: 67415 - DNA, 2018 bp, Triticum aestivum
  misc_feature (1)..(2018): Ceres Seq. ID no. 15176862
cccattggccgcgcccacggacgcaggccgacagtttcccgtcctgcccctccctcgtcgctagtcgttgcttgctccgattttccacccacaatccggggcaaaacacccggggagcgaagcaagaaaccgagggctctcctcccaggcgcggatctaccagcctaccagggcgcggaccgcgcgaggctctggccttccgctcctccagcatgaggggaaaaaagatgatatatggattctccatttcccttatcctcatcaacctggcttccataatggagcgggctgatgagaatctcctccccgctgtttacaaggaagtcagtgccgccttcgatgctggtcctactgatctggggtaccttacgtttataatgaactttctgaagtccatagcatctcccttggcaggtgtccttgctcttcagtatgatcgccccactattcttgcggtcggaactgtcttctgggctctatcaacaggggccgttggtgtcagccagtattttcagcaggttgcattctggagaggtgtaaatggtgttggacttgccattgtcataccatcacttcagtccttcattgctgatagctacagagagggcacccgtggcgccggatttggtttgttgagtctcattggctcaataggtggtataggaggaagtattgtggcgacagttatggctggaagggattattggggatttcctggatggcggtttgcatttattgtggtcgcgtttgcaagcttgttgattgggcttcttgtttacttttacaccgttgatcctagaaaaacatctccagggaattttggtgacgacgacacccatgagaggtcacgtttggttggtaacagtgttttccctccactgtccatctggaaggattcatggataacagcaagatctgtcatgaaagtgcggacatttcaaatcatcgtcctgcaaggcatagtcggctccttgccatggactgctgtcgttttcttcacaatgtggtttgagctaattggtttcgataacaaaagctcggcggggttaaacagcctattcgccatcggctgcgcgagtgggtcatttcttggtggagtaattgcagaccgcgtgtcaagacactacccggattcaggccgcatcatgtgtgctcagttcagtgccttcatgtgcatccctttcacatggatcctcctcacggtcatcccgcagtcggtcgactactggtacagctacgccgtcacgctgttcctgatggggctcaccataagttggtgcgccacctgcgcaaacaacccgatgttcgcggaggtggtccctcccaagcaccgcaccatgatctacgcgtttgaccgcgcgttcgagggctccttctcctcgctggccgctcctgccgtcggcatggtgaccgagagggtatatggctacaacgcaaagacggtgaatctagcggacgggtcggtggcaggggcgtatgcgctctcgagagggctgctgaccatgatgattgttccttttggtctgtgctgcctgttctacaccccgctgtactttgtgttcaagcgcgaccgtgagaacgcgaggttggcggccagtgccaaggatctggagctaatgtgatgctccgcggtttttttttatcagctgcagtgttcgttaatgcggttagttgattcagcttggggttgaaatggtgcagttgacagaatactacaggtttcaccttcttcagacagatgagaagtacaccttcagacaaatgaaaagaaatacacgagtacaccttcagacagatgacaagatatacacgggtagagtcggtgattttaattttgtcaattagagaggatatatattgtactaatacattgtgtaggtaaataaatggcagctgtcatgttcaatctcaccgcaattaggatttattttttcttttgtcgcctgtaatcctgagctgaatttttggatgaagatggcattgcccctgatcctgaagtaatgaactaaacttggttc

SEQ ID NO: 67416 - protein, 539 aa, Triticum aestivum
  peptide (1)..(539): Ceres Seq. ID no. 15176863
  misc_feature (70)..(321): Homolog of NCBI NO: 7494336 NR Description: membrane transporter PFB0275w - malaria parasite
  misc_feature (314)..(523): Homolog of NCBI NO: 23593282 NR Description: hypothetical protein, conserved [Plasmodium
  misc_feature (70)..(321): Homolog of NCBI NO: 23593282 NR Description: hypothetical protein, conserved [Plasmodium
  misc_feature (68)..(520): Homolog of NCBI NO: 23480447 NR Description: major facilitator superfamily protein [Plasmodium
  misc_feature (156)..(531): Homolog of NCBI NO: 11358310 NR Description: hypothetical protein T31P16.180 - Arabidopsis
  misc_feature (81)..(531): Homolog of NCBI NO: 15218229 NR Description: transporter - related [Arabidopsis thaliana]
  misc_feature (81)..(531): Homolog of NCBI NO: 15238089 NR Description: transporter - related [Arabidopsis thaliana]
  misc_feature (92)..(538): Homolog of NCBI NO: 15224194 NR Description: transporter - related [Arabidopsis thaliana]
  misc_feature (229)..(539): Homolog of NCBI NO: 34393426 NR Description: membrane transporter PFB0275w-like protein
  misc_feature (67)..(539): Homolog of NCBI NO: 15234530 NR Description: transporter - related [Arabidopsis thaliana]
HWPRPRTQADSFPSCPSLVASRCLLRFSTHNPGQNTRGAKQETEGSPPRRGSTSLPGRGPREALAFRSSSMRGKKMIYGFSISLILINLASIMERADENLLPAVYKEVSAAFDAGPTDLGYLTFIMNFLKSIASPLAGVLALQYDRPTILAVGTVFWALSTGAVGVSQYFQQVAFWRGVNGVGLAIVIPSLQSFIADSYREGTRGAGFGLLSLIGSIGGIGGSIVATVMAGRDYWGFPGWRFAFIVVAFASLLIGLLVYFYTVDPRKTSPGNFGDDDTHERSRLVGNSVFPPLSIWKDSWITARSVMKVRTFQIIVLQGIVGSLPWTAVVFFTMWFELIGFDNKSSAGLNSLFAIGCASGSFLGGVIADRVSRHYPDSGRIMCAQFSAFMCIPFTWILLTVIPQSVDYWYSYAVTLFLMGLTISWCATCANNPMFAEVVPPKHRTMIYAFDRAFEGSFSSLAAPAVGMVTERVYGYNAKTVNLADGSVAGAYALSRGLLTMMIVPFGLCCLFYTPLYFVFKRDRENARLAASAKDLELM

SEQ ID NO: 67417 - protein, 469 aa, Triticum aestivum
  peptide (1)..(469): Ceres Seq. ID no. 15176864
  misc_feature (1)..(251): Homolog of NCBI NO: 7494336 NR Description: membrane transporter PFB0275w - malaria parasite
  misc_feature (244)..(453): Homolog of NCBI NO: 23593282 NR Description: hypothetical protein, conserved [Plasmodium
  misc_feature (1)..(251): Homolog of NCBI NO: 23593282 NR Description: hypothetical protein, conserved [Plasmodium
  misc_feature (1)..(450): Homolog of NCBI NO: 23480447 NR Description: major facilitator superfamily protein [Plasmodium
  misc_feature (86)..(461): Homolog of NCBI NO: 11358310 NR Description: hypothetical protein T31P16.180 - Arabidopsis
  misc_feature (11)..(461): Homolog of NCBI NO: 15218229 NR Description: transporter - related [Arabidopsis thaliana]
  misc_feature (11)..(461): Homolog of NCBI NO: 15238089 NR Description: transporter - related [Arabidopsis thaliana]
  misc_feature (22)..(468): Homolog of NCBI NO: 15224194 NR Description: transporter - related [Arabidopsis thaliana]
  misc_feature (159)..(469): Homolog of NCBI NO: 34393426 NR Description: membrane transporter PFB0275w-like protein
  misc_feature (1)..(469): Homolog of NCBI NO: 15234530 NR Description: transporter - related [Arabidopsis thaliana]
MRGKKMIYGFSISLILINLASIMERADENLLPAVYKEVSAAFDAGPTDLGYLTFIMNFLKSIASPLAGVLALQYDRPTILAVGTVFWALSTGAVGVSQYFQQVAFWRGVNGVGLAIVIPSLQSFIADSYREGTRGAGFGLLSLIGSIGGIGGSIVATVMAGRDYWGFPGWRFAFIVVAFASLLIGLLVYFYTVDPRKTSPGNFGDDDTHERSRLVGNSVFPPLSIWKDSWITARSVMKVRTFQIIVLQGIVGSLPWTAVVFFTMWFELIGFDNKSSAGLNSLFAIGCASGSFLGGVIADRVSRHYPDSGRIMCAQFSAFMCIPFTWILLTVIPQSVDYWYSYAVTLFLMGLTISWCATCANNPMFAEVVPPKHRTMIYAFDRAFEGSFSSLAAPAVGMVTERVYGYNAKTVNLADGSVAGAYALSRGLLTMMIVPFGLCCLFYTPLYFVFKRDRENARLAASAKDLELM

SEQ ID NO: 67418 - protein, 464 aa, Triticum aestivum
  peptide (1)..(464): Ceres Seq. ID no. 15176865
  misc_feature (1)..(246): Homolog of NCBI NO: 7494336 NR Description: membrane transporter PFB0275w - malaria parasite
  misc_feature (239)..(448): Homolog of NCBI NO: 23593282 NR Description: hypothetical protein, conserved [Plasmodium
  misc_feature (1)..(246): Homolog of NCBI NO: 23593282 NR Description: hypothetical protein, conserved [Plasmodium
  misc_feature (1)..(445): Homolog of NCBI NO: 23480447 NR Description: major facilitator superfamily protein [Plasmodium
  misc_feature (81)..(456): Homolog of NCBI NO: 11358310 NR Description: hypothetical protein T31P16.180 - Arabidopsis
  misc_feature (6)..(456): Homolog of NCBI NO: 15218229 NR Description: transporter - related [Arabidopsis thaliana]
  misc_feature (6)..(456): Homolog of NCBI NO: 15238089 NR Description: transporter - related [Arabidopsis thaliana]
  misc_feature (17)..(463): Homolog of NCBI NO: 15224194 NR Description: transporter - related [Arabidopsis thaliana]
  misc_feature (154)..(464): Homolog of NCBI NO: 34393426 NR Description: membrane transporter PFB0275w-like protein
  misc_feature (1)..(464): Homolog of NCBI NO: 15234530 NR Description: transporter - related [Arabidopsis thaliana]
MIYGFSISLILINLASIMERADENLLPAVYKEVSAAFDAGPTDLGYLTFIMNFLKSIASPLAGVLALQYDRPTILAVGTVFWALSTGAVGVSQYFQQVAFWRGVNGVGLAIVIPSLQSFIADSYREGTRGAGFGLLSLIGSIGGIGGSIVATVMAGRDYWGFPGWRFAFIVVAFASLLIGLLVYFYTVDPRKTSPGNFGDDDTHERSRLVGNSVFPPLSIWKDSWITARSVMKVRTFQIIVLQGIVGSLPWTAVVFFTMWFELIGFDNKSSAGLNSLFAIGCASGSFLGGVIADRVSRHYPDSGRIMCAQFSAFMCIPFTWILLTVIPQSVDYWYSYAVTLFLMGLTISWCATCANNPMFAEVVPPKHRTMIYAFDRAFEGSFSSLAAPAVGMVTERVYGYNAKTVNLADGSVAGAYALSRGLLTMMIVPFGLCCLFYTPLYFVFKRDRENARLAASAKDLELM

SEQ ID NO: 67419 - DNA, 2031 bp, Triticum aestivum
  misc_feature (1)..(2031): Ceres Seq. ID no. 14313288
tttgccctgatcataccggtagctggtacacacattcatacatacattcttcttcagcatccactcattgctagctagcttgcgaggcagtgtgtgagctgttagtttgagcgggagaagctgggtggacggagagcacggcgctagctagcttgctggtgcaagatgaggagccgtggtagcttcgctctgaaccatgcggtggcgtttctcgtgtggtggatggtgcattgcggcagtgagctcgttgccgccgtgcctcctgatggttggtacgattacactgcccacacggactgcagaggccgcccggagccggcgcagtacaacggcgggattctcaagtacggcaacggcgacgacccgaacgggtacaagacgacggagactggcgtcctgtccccggcgttcgtggtctacaacctcaacaagtccacaatgtacaccttctcaggctgggtgaagctggaaggctctccctcggctctgatcaccgcgaggctggccccggacaactccggcacacggtgcatcgggacggtcctcgccaggagcgactgctgggcgttcctcaagggtggcttcgtcctcgactggccaactcagacctccgtcatcttcttccagaatgctgataggaccccgatgaagatcaccactgcgagcgcctcgctccagccgttcacgacggatcaatggtcgatgcaccagaaagatacgatccggaagaggaggaagaggatggccaccgtccacgtcgccgacccgcacggcacccgggtggtcggcgcgtcggtgtccgtgcagcagacggctaaggacttcccgcttgggtcggcgatcgcctccaccatcctgggcaacgacgcgtaccagaagtggttcgtggaccggttcaacgcggcggtgttcgaggacgagctcaagtggtactcgacggagccggcgtcggggctgctccggttcgacgtgccggaccagatgctggcgttcgtgcggtcgcaccgggtgatggtgcgcgggcacaacatcttctgggagaaccaggacgccacgccccggtgggtcaagggcctgtcgccggacgacctccgctccgccgtgaacacgcgcatccagagcctcatgacccgctaccgcggcgagttcgcgcactgggacgtcaacaacgagatgctgcacttcaacttctacgagcagcggctgggccccaacgccaccatggagttcttcagcgtggcgcaggacgccgacccgctcgccacgctcttcatgaacgagtacaacgtggtggagacctgcgacgacgtgtcctcgaccgtcgacgcgtacgtggcccgactcaaggacctccgggccggcggcgccgtgctggaggggatcggcctcgagggccacttctccaagcccaacatcccctacatgagggccgtgctcgacaagctggccacgctcaacctgcccatctggttcaccgagatcgacatcaacaacaagttcgacgcgcagacgcaggccgtgtacctggagcaggtgctgcgggaggcgtacgcgcacccggcggtgagcggcgtcatgctctggacggcgctgcacgagaacgggtgctaccagatgtgcctcacggactggaacctcaagaacctgcccgtcggggacgtcgtcgaccgcctgctgcaggagtggcagacggggcaggtcgccgggccgacggacgtgcacggcgcctacagcttcagcggctacctcggcgagtacgtggtcaccgtgaacgccggcaacacgtcgaagcaggccaccttctcgctgtccccaggggacgagaccaggcacatcaccgttcagatatgacactggttgtgtcgtagtatatgtgagtggccggtggcacgctgtactgcccgcacttgttgtttcgggcttctacctgcgatgacacatatcgtcgcttgtgggtagtggttactaaactatatactcgagcaaacgattatgtcttcgaaaaaacaaaacaaatgattatgacatggt

SEQ ID NO: 67420 - protein, 561 aa, Triticum aestivum
  peptide (1)..(561): Ceres Seq. ID no. 14313289
  misc_feature (211)..(504): Pfam Name: Glycosyl hydrolase family 10 Pfam Description: Glycosyl hydrolase family 10
  misc_feature (80)..(549): Homolog of NCBI NO: 37533260 NR Description: putative 1,4-beta-xylanase
  misc_feature (59)..(545): Homolog of NCBI NO: 37533262 NR Description: putative 1,4-beta-xylanase
  misc_feature (84)..(547): Homolog of NCBI NO: 15235134 NR Description: glycosyl hydrolase family 10 [Arabidopsis
  misc_feature (84)..(554): Homolog of NCBI NO: 30689830 NR Description: glycosyl hydrolase family 10 [Arabidopsis
  misc_feature (84)..(554): Homolog of NCBI NO: 7485619 NR Description: hypothetical protein F17I5.30 - Arabidopsis
  misc_feature (84)..(556): Homolog of NCBI NO: 15235131 NR Description: glycosyl hydrolase family 10 [Arabidopsis
  misc_feature (37)..(59): Homolog of NCBI NO: 23429644 NR Description: endoxylanase [Carica papaya]
  misc_feature (87)..(555): Homolog of NCBI NO: 23429644 NR Description: endoxylanase [Carica papaya]
  misc_feature (150)..(561): Homolog of NCBI NO: 15233983 NR Description: glycosyl hydrolase family 10 [Arabidopsis
  misc_feature (34)..(561): Homolog of NCBI NO: 28416709 NR Description: At4g38650 [Arabidopsis thaliana]
MRSRGSFALNHAVAFLVWWMVHCGSELVAAVPPDGWYDYTAHTDCRGRPEPAQYNGGILKYGNGDDPNGYKTTETGVLSPAFVVYNLNKSTMYTFSGWVKLEGSPSALITARLAPDNSGTRCIGTVLARSDCWAFLKGGFVLDWPTQTSVIFFQNADRTPMKITTASASLQPFTTDQWSMHQKDTIRKRRKRMATVHVADPHGTRVVGASVSVQQTAKDFPLGSAIASTILGNDAYQKWFVDRFNAAVFEDELKWYSTEPASGLLRFDVPDQMLAFVRSHRVMVRGHNIFWENQDATPRWVKGLSPDDLRSAVNTRIQSLMTRYRGEFAHWDVNNEMLHFNFYEQRLGPNATMEFFSVAQDADPLATLFMNEYNVVETCDDVSSTVDAYVARLKDLRAGGAVLEGIGLEGHFSKPNIPYMRAVLDKLATLNLPIWFTEIDINNKFDAQTQAVYLEQVLREAYAHPAVSGVMLWTALHENGCYQMCLTDWNLKNLPVGDVVDRLLQEWQTGQVAGPTDVHGAYSFSGYLGEYVVTVNAGNTSKQATFSLSPGDETRHITVQI

SEQ ID NO: 67421 - protein, 542 aa, Triticum aestivum
  peptide (1)..(542): Ceres Seq. ID no. 14313290
  misc_feature (192)..(485): Pfam Name: Glycosyl hydrolase family 10 Pfam Description: Glycosyl hydrolase family 10
  misc_feature (61)..(530): Homolog of NCBI NO: 37533260 NR Description: putative 1,4-beta-xylanase
  misc_feature (40)..(526): Homolog of NCBI NO: 37533262 NR Description: putative 1,4-beta-xylanase
  misc_feature (65)..(528): Homolog of NCBI NO: 15235134 NR Description: glycosyl hydrolase family 10 [Arabidopsis
  misc_feature (65)..(535): Homolog of NCBI NO: 30689830 NR Description: glycosyl hydrolase family 10 [Arabidopsis
  misc_feature (65)..(535): Homolog of NCBI NO: 7485619 NR Description: hypothetical protein F17I5.30 - Arabidopsis
  misc_feature (65)..(537): Homolog of NCBI NO: 15235131 NR Description: glycosyl hydrolase family 10 [Arabidopsis
  misc_feature (18)..(40): Homolog of NCBI NO: 23429644 NR Description: endoxylanase [Carica papaya]
  misc_feature (68)..(536): Homolog of NCBI NO: 23429644 NR Description: endoxylanase [Carica papaya]
  misc_feature (131)..(542): Homolog of NCBI NO: 15233983 NR Description: glycosyl hydrolase family 10 [Arabidopsis
  misc_feature (15)..(542): Homolog of NCBI NO: 28416709 NR Description: At4g38650 [Arabidopsis thaliana]
MVHCGSELVAAVPPDGWYDYTAHTDCRGRPEPAQYNGGILKYGNGDDPNGYKTTETGVLSPAFVVYNLNKSTMYTFSGWVKLEGSPSALITARLAPDNSGTRCIGTVLARSDCWAFLKGGFVLDWPTQTSVIFFQNADRTPMKITTASASLQPFTTDQWSMHQKDTIRKRRKRMATVHVADPHGTRVVGASVSVQQTAKDFPLGSAIASTILGNDAYQKWFVDRFNAAVFEDELKWYSTEPASGLLRFDVPDQMLAFVRSHRVMVRGHNIFWENQDATPRWVKGLSPDDLRSAVNTRIQSLMTRYRGEFAHWDVNNEMLHFNFYEQRLGPNATMEFFSVAQDADPLATLFMNEYNVVETCDDVSSTVDAYVARLKDLRAGGAVLEGIGLEGHFSKPNIPYMRAVLDKLATLNLPIWFTEIDINNKFDAQTQAVYLEQVLREAYAHPAVSGVMLWTALHENGCYQMCLTDWNLKNLPVGDVVDRLLQEWQTGQVAGPTDVHGAYSFSGYLGEYVVTVNAGNTSKQATFSLSPGDETRHITVQI

SEQ ID NO: 67422 - protein, 470 aa, Triticum aestivum
  peptide (1)..(470): Ceres Seq. ID no. 14313291
  misc_feature (120)..(413): Pfam Name: Glycosyl hydrolase family 10 Pfam Description: Glycosyl hydrolase family 10
  misc_feature (2)..(458): Homolog of NCBI NO: 40363757 NR Description: putative 1,4-beta-xylanase [Triticum aestivum]
  misc_feature (1)..(458): Homolog of NCBI NO: 37533260 NR Description: putative 1,4-beta-xylanase
  misc_feature (1)..(454): Homolog of NCBI NO: 37533262 NR Description: putative 1,4-beta-xylanase
  misc_feature (1)..(456): Homolog of NCBI NO: 15235134 NR Description: glycosyl hydrolase family 10 [Arabidopsis
  misc_feature (1)..(463): Homolog of NCBI NO: 30689830 NR Description: glycosyl hydrolase family 10 [Arabidopsis
  misc_feature (1)..(463): Homolog of NCBI NO: 7485619 NR Description: hypothetical protein F17I5.30 - Arabidopsis
  misc_feature (1)..(465): Homolog of NCBI NO: 15235131 NR Description: glycosyl hydrolase family 10 [Arabidopsis
  misc_feature (1)..(464): Homolog of NCBI NO: 23429644 NR Description: endoxylanase [Carica papaya]
  misc_feature (59)..(470): Homolog of NCBI NO: 15233983 NR Description: glycosyl hydrolase family 10 [Arabidopsis
  misc_feature (1)..(470): Homolog of NCBI NO: 28416709 NR Description: At4g38650 [Arabidopsis thaliana]
MYTFSGWVKLEGSPSALITARLAPDNSGTRCIGTVLARSDCWAFLKGGFVLDWPTQTSVIFFQNADRTPMKITTASASLQPFTTDQWSMHQKDTIRKRRKRMATVHVADPHGTRVVGASVSVQQTAKDFPLGSAIASTILGNDAYQKWFVDRFNAAVFEDELKWYSTEPASGLLRFDVPDQMLAFVRSHRVMVRGHNIFWENQDATPRWVKGLSPDDLRSAVNTRIQSLMTRYRGEFAHWDVNNEMLHFNFYEQRLGPNATMEFFSVAQDADPLATLFMNEYNVVETCDDVSSTVDAYVARLKDLRAGGAVLEGIGLEGHFSKPNIPYMRAVLDKLATLNLPIWFTEIDINNKFDAQTQAVYLEQVLREAYAHPAVSGVMLWTALHENGCYQMCLTDWNLKNLPVGDVVDRLLQEWQTGQVAGPTDVHGAYSFSGYLGEYVVTVNAGNTSKQATFSLSPGDETRHITVQI

SEQ ID NO: 67423 - DNA, 1667 bp, Triticum aestivum
  misc_feature (1)..(1667): Ceres Seq. ID no. 14301676
ctcgcctctcacccccacacagagctgccaaaacattctgcaacaagcagagagagcgagacaaaacatgtcgtggactactcgtgtccctctcctcgtcggcgccacctccatctgcttcctctccgccgccgcggcgtccaactacacctcgttacgccccggccaccacctcctgacccagctctcgcaatggcgggagcactacctgtccgacgcttcctcgcacgccgccggcaccgggggcgtgcgccggcacaccgtcctcgcgtgggtcctggccttcctggccgcgtccgtgtcgagcgccggcggcgtcgggggcgggtcgctgttcctgcccatcctgaacctggtggcggggctgaccctgaagcgcgccaccacctactcctccttcatggtcaccggcggcgccgcgtcgaacgtgctctacaacctctggcgcgcgcggggccggccggcgctgatcgactacgacatcgcactgctgttccagccgtgcctgctcctgggcgtcagcgtcggggtggtgtgcaacgtcatgttcccggagtggctcatcacggcgctcttctcgctgttcctcgccttctgcaccgccaagacgtgccgcgccggggccaagatctggcggtccgagagcgccggcgcccccgccaccgccaccgccgcgcgtcacgaccacaaggagcccctgcttctcggcggcctcccgcagcccgtccaggacgacgggggccaagcagctcgcaatggcggctctggcgccggcgccggcgctgggttcccgtggaaggacgtggcggtgctcctggtggtgtggctctgcttcttcctgctccacgtcttcatcggagataagcacgggaagggagtgatcagcataaagccctgcggagtggcatactggcttgccaccgtgtcccaggtgcctttcgccgtggctttcacagcctatatcatatacgcaaagaggaagaagcaggttgcacatcaccacgaagatggcaaggcacattcttctgtgcacacgaagacggagaccttgccggcgctcgcgctcccgctggccgctttcgtgaccggatctctgagcggcctcttcggcatcggcggagggctgcttctcaaccctgtcctccttcagatcgggatacccccgcagacggcggcggcgacgtcttcgttcatggtgctgttctgcgcgtccatgtcgatggtccagttcatcctgctgggcatggacgggatcggggaggcctcggtctacgcggggatatgcttcgtcgcctcgatcgccggggtggtcttgatcgagcgggtcgtcaggaagtccgggcgggtgtcgatgatcgtcttcttggtcaccgccatcatggcgctcagcactgtgatcgtcacctgcttcggagccctagatgtctggacgcaatacactggcggagcgtacatggggttcaagctaccttgtacgtagtttacccatgcatatatgagagcatgggtgagaggtgcttagttactaattgcttcttctggcttggcgtttatgtcttttctgaagaaaggttttgttcgtggtgttgctatggctgtttatgggctatatataattttgtgtgaataaatatatgcttctggaatgaagcttacatggcactgcg

SEQ ID NO: 67424 - protein, 492 aa, Triticum aestivum
  peptide (1)..(492): Ceres Seq. ID no. 14301677
  misc_feature (115)..(212): Homolog of NCBI NO: 15233581 NR Description: hypothetical protein [Arabidopsis thaliana]
  misc_feature (363)..(491): Homolog of NCBI NO: 15233581 NR Description: hypothetical protein [Arabidopsis thaliana]
  misc_feature (87)..(473): Homolog of NCBI NO: 34908752 NR Description: P0415A04.9 [Oryza sativa (japonica
  misc_feature (98)..(491): Homolog of NCBI NO: 11358507 NR Description: membrane protein [imported] - Arabidopsis
  misc_feature (441)..(491): Homolog of NCBI NO: 15233579 NR Description: hypothetical protein [Arabidopsis thaliana]
  misc_feature (38)..(421): Homolog of NCBI NO: 15233579 NR Description: hypothetical protein [Arabidopsis thaliana]
  misc_feature (63)..(491): Homolog of NCBI NO: 6554197 NR Description: T23J18.20 [Arabidopsis thaliana]
  misc_feature (48)..(491): Homolog of NCBI NO: 15220419 NR Description: expressed protein [Arabidopsis thaliana]
  misc_feature (29)..(491): Homolog of NCBI NO: 15220600 NR Description: expressed protein [Arabidopsis thaliana]
  misc_feature (10)..(491): Homolog of NCBI NO: 34908754 NR Description: P0415A04.10 [Oryza sativa (japonica
SPLTPTQSCQNILQQAERARQNMSWTTRVPLLVGATSICFLSAAAASNYTSLRPGHHLLTQLSQWREHYLSDASSHAAGTGGVRRHTVLAWVLAFLAASVSSAGGVGGGSLFLPILNLVAGLTLKRATTYSSFMVTGGAASNVLYNLWRARGRPALIDYDIALLFQPCLLLGVSVGVVCNVMFPEWLITALFSLFLAFCTAKTCRAGAKIWRSESAGAPATATAARHDHKEPLLLGGLPQPVQDDGGQAARNGGSGAGAGAGFPWKDVAVLLVVWLCFFLLHVFIGDKHGKGVISIKPCGVAYWLATVSQVPFAVAFTAYIIYAKRKKQVAHHHEDGKAHSSVHTKTETLPALALPLAAFVTGSLSGLFGIGGGLLLNPVLLQIGIPPQTAAATSSFMVLFCASMSMVQFILLGMDGIGEASVYAGICFVASIAGVVLIERVVRKSGRVSMIVFLVTAIMALSTVIVTCFGALDVWTQYTGGAYMGFKLPCT

SEQ ID NO: 67425 - protein, 470 aa, Triticum aestivum
  peptide (1)..(470): Ceres Seq. ID no. 14301678
  misc_feature (93)..(190): Homolog of NCBI NO: 15233581 NR Description: hypothetical protein [Arabidopsis thaliana]
  misc_feature (341)..(469): Homolog of NCBI NO: 15233581 NR Description: hypothetical protein [Arabidopsis thaliana]
  misc_feature (65)..(451): Homolog of NCBI NO: 34908752 NR Description: P0415A04.9 [Oryza sativa (japonica
  misc_feature (76)..(469): Homolog of NCBI NO: 11358507 NR Description: membrane protein [imported] - Arabidopsis
  misc_feature (419)..(469): Homolog of NCBI NO: 15233579 NR Description: hypothetical protein [Arabidopsis thaliana]
  misc_feature (16)..(399): Homolog of NCBI NO: 15233579 NR Description: hypothetical protein [Arabidopsis thaliana]
  misc_feature (41)..(469): Homolog of NCBI NO: 6554197 NR Description: T23J18.20 [Arabidopsis thaliana]
  misc_feature (26)..(469): Homolog of NCBI NO: 15220419 NR Description: expressed protein [Arabidopsis thaliana]
  misc_feature (7)..(469): Homolog of NCBI NO: 15220600 NR Description: expressed protein [Arabidopsis thaliana]
  misc_feature (1)..(469): Homolog of NCBI NO: 34908754 NR Description: P0415A04.10 [Oryza sativa (japonica
MSWTTRVPLLVGATSICFLSAAAASNYTSLRPGHHLLTQLSQWREHYLSDASSHAAGTGGVRRHTVLAWVLAFLAASVSSAGGVGGGSLFLPILNLVAGLTLKRATTYSSFMVTGGAASNVLYNLWRARGRPALIDYDIALLFQPCLLLGVSVGVVCNVMFPEWLITALFSLFLAFCTAKTCRAGAKIWRSESAGAPATATAARHDHKEPLLLGGLPQPVQDDGGQAARNGGSGAGAGAGFPWKDVAVLLVVWLCFFLLHVFIGDKHGKGVISIKPCGVAYWLATVSQVPFAVAFTAYIIYAKRKKQVAHHHEDGKAHSSVHTKTETLPALALPLAAFVTGSLSGLFGIGGGLLLNPVLLQIGIPPQTAAATSSFMVLFCASMSMVQFILLGMDGIGEASVYAGICFVASIAGVVLIERVVRKSGRVSMIVFLVTAIMALSTVIVTCFGALDVWTQYTGGAYMGFKLPCT

SEQ ID NO: 67426 - protein, 359 aa, Triticum aestivum
  peptide (1)..(359): Ceres Seq. ID no. 14301679
  misc_feature (1)..(79): Homolog of NCBI NO: 15233581 NR Description: hypothetical protein [Arabidopsis thaliana]
  misc_feature (230)..(358): Homolog of NCBI NO: 15233581 NR Description: hypothetical protein [Arabidopsis thaliana]
  misc_feature (1)..(340): Homolog of NCBI NO: 34908752 NR Description: P0415A04.9 [Oryza sativa (japonica
  misc_feature (1)..(358): Homolog of NCBI NO: 11358507 NR Description: membrane protein [imported] - Arabidopsis
  misc_feature (308)..(358): Homolog of NCBI NO: 15233579 NR Description: hypothetical protein [Arabidopsis thaliana]
  misc_feature (1)..(288): Homolog of NCBI NO: 15233579 NR Description: hypothetical protein [Arabidopsis thaliana]
  misc_feature (1)..(358): Homolog of NCBI NO: 6554197 NR Description: T23J18.20 [Arabidopsis thaliana]
  misc_feature (1)..(358): Homolog of NCBI NO: 15220419 NR Description: expressed protein [Arabidopsis thaliana]
  misc_feature (1)..(358): Homolog of NCBI NO: 15220600 NR Description: expressed protein [Arabidopsis thaliana]
  misc_feature (1)..(358): Homolog of NCBI NO: 34908754 NR Description: P0415A04.10 [Oryza sativa (japonica
MVTGGAASNVLYNLWRARGRPALIDYDIALLFQPCLLLGVSVGVVCNVMFPEWLITALFSLFLAFCTAKTCRAGAKIWRSESAGAPATATAARHDHKEPLLLGGLPQPVQDDGGQAARNGGSGAGAGAGFPWKDVAVLLVVWLCFFLLHVFIGDKHGKGVISIKPCGVAYWLATVSQVPFAVAFTAYIIYAKRKKQVAHHHEDGKAHSSVHTKTETLPALALPLAAFVTGSLSGLFGIGGGLLLNPVLLQIGIPPQTAAATSSFMVLFCASMSMVQFILLGMDGIGEASVYAGICFVASIAGVVLIERVVRKSGRVSMIVFLVTAIMALSTVIVTCFGALDVWTQYTGGAYMGFKLPCT

SEQ ID NO: 67427 - DNA, 1670 bp, Triticum aestivum
  misc_feature (1)..(1670): Ceres Seq. ID no. 13660269
aatcgcccgccctcgctccccatcaaccccttcctagctagctagcgaagcaccagtttgggcagccgccgggcaggatggaagggctggacgtgtaccagcactaccgcttgaaccctacagatgtggacgccgtgacttactacctgccacgcctcatcgccggccagacgctgcacggcgccgataaattcatccaccacgtcgacatctacagctgcgagcccaaggatctggccgcccggattgcgcccgtgccgcaggccgccagcagcggcgaccgcttcttcttcaccacgcgcaagagcaagaacggaagcaaaacccagagcgtgcgcaccgccggcggcggcacctggaccgtcaacgctaccacggccgtcaaacacgccggagtcgaggtcggcgagaggaagaacctgtcgttcaggaagaagggcaagtccaccggttgggtcatggaggagtacaaatgcttgctgccagaggccgtcgtcgccgacggggtgaaggtgttctgcaagatccacttggctcagcatcctcctgacgcggcccgccaggaatcagccgcgtacaagcatcaagcagaaccgcaaccagaggccgtgactgcgagcatgcacgcacagaagaggccagcaatagctcccgccgccgatcctcatccgccgcgccccaacaagaggatgcgaggatcagtccctgtccccgcacctgccccaccgtcgttcttgacgtatgatgaggcagcgagtgcaatgtatggcccgctggctcgtaccatcttccctgttcaagatgctctggatataccagcgtcaatcgaaggtccttcagcatcatgcgagtccactacaacatccaaccactccggcgttgcttcttcctcagataatatgcagcgacaagctcaagctactgagatttcctcccagtcagatgtgctggagtctgtcaagaattacagccaacaacagatgattgttcctgaggctggctcaagcattgcaaggagcacatatgaagaggatgtctttcagccattggagcctctttccgatttgccgggtggggaggcagatggttttgacattgaagaactaatgagaatgatggaagacgacccaattgaggttgagacggtcactggagccaacactggcgtggagatgggccaacaggaacctctgtacctggataccttggaccaaggcatgctggaggacatgctgcagtccgattgcccttacccaatgtcgggatcagaggatcgggccatgcacaaccctgccttccatgatgctgacaaagagaagaggtacaatgccgcgtcggatcttgacgctccatcgcttcagggacaggaccactcgttcaaacagcccttcgatccatttgaagcagcatggaaggccgaagaggcgcacgagaaggagaagagggacaatcttcacgctggaccgcttggaggacacaacaacttcttctggcctgcaagtgtctattaagtccgatgttgaaattgttttcaaagtgtatacgaggatactcactggctgatatattagttcgtccttatacgatcgccacacgtgtacctctgagcaatttgctccacttgttcatgtaagctaaaactgttgttgttcttcttgcccctctgatgg

SEQ ID NO: 67428 - protein, 477 aa, Triticum aestivum
  peptide (1)..(477): Ceres Seq. ID no. 13660270
  misc_feature (10)..(132): Pfam Name: No apical meristem (NAM) protein Pfam Description: No apical meristem (NAM) protein
  misc_feature (1)..(198): Homolog of NCBI NO: 34911090 NR Description: OJ1117_G01.12 [Oryza sativa (japonica
  misc_feature (222)..(335): Homolog of NCBI NO: 27960757 NR Description: AP2 domain protein [Hordeum vulgare]
  misc_feature (360)..(411): Homolog of NCBI NO: 30313898 NR Description: AP2 transcriptional activator DRF1.1 [Hordeum
  misc_feature (360)..(411): Homolog of NCBI NO: 27960760 NR Description: dehydration-responsive AP2 domain transcriptional
  misc_feature (198)..(358): Homolog of NCBI NO: 30313898 NR Description: AP2 transcriptional activator DRF1.1 [Hordeum
  misc_feature (198)..(358): Homolog of NCBI NO: 27960760 NR Description: dehydration-responsive AP2 domain transcriptional
MEGLDVYQHYRLNPTDVDAVTYYLPRLIAGQTLHGADKFIHHVDIYSCEPKDLAARIAPVPQAASSGDRFFFTTRKSKNGSKTQSVRTAGGGTWTVNATTAVKHAGVEVGERKNLSFRKKGKSTGWVMEEYKCLLPEAVVADGVKVFCKIHLAQHPPDAARQESAAYKHQAEPQPEAVTASMHAQKRPAIAPAADPHPPRPNKRMRGSVPVPAPAPPSFLTYDEAASAMYGPLARTIFPVQDALDIPASIEGPSASCESTTTSNHSGVASSSDNMQRQAQATEISSQSDVLESVKNYSQQQMIVPEAGSSIARSTYEEDVFQPLEPLSDLPGGEADGFDIEELMRMMEDDPIEVETVTGANTGVEMGQQEPLYLDTLDQGMLEDMLQSDCPYPMSGSEDRAMHNPAFHDADKEKRYNAASDLDAPSLQGQDHSFKQPFDPFEAAWKAEEAHEKEKRDNLHAGPLGGHNNFFWPASVY

SEQ ID NO: 67429 - protein, 350 aa, Triticum aestivum
  peptide (1)..(350): Ceres Seq. ID no. 13660271
  misc_feature (1)..(71): Homolog of NCBI NO: 34911090 NR Description: OJ1117_G01.12 [Oryza sativa (japonica
  misc_feature (95)..(208): Homolog of NCBI NO: 27960757 NR Description: AP2 domain protein [Hordeum vulgare]
  misc_feature (233)..(284): Homolog of NCBI NO: 30313898 NR Description: AP2 transcriptional activator DRF1.1 [Hordeum
  misc_feature (233)..(284): Homolog of NCBI NO: 27960760 NR Description: dehydration-responsive AP2 domain transcriptional
  misc_feature (71)..(231): Homolog of NCBI NO: 30313898 NR Description: AP2 transcriptional activator DRF1.1 [Hordeum
  misc_feature (71)..(231): Homolog of NCBI NO: 27960760 NR Description: dehydration-responsive AP2 domain transcriptional
MEEYKCLLPEAVVADGVKVFCKIHLAQHPPDAARQESAAYKHQAEPQPEAVTASMHAQKRPAIAPAADPHPPRPNKRMRGSVPVPAPAPPSFLTYDEAASAMYGPLARTIFPVQDALDIPASIEGPSASCESTTTSNHSGVASSSDNMQRQAQATEISSQSDVLESVKNYSQQQMIVPEAGSSIARSTYEEDVFQPLEPLSDLPGGEADGFDIEELMRMMEDDPIEVETVTGANTGVEMGQQEPLYLDTLDQGMLEDMLQSDCPYPMSGSEDRAMHNPAFHDADKEKRYNAASDLDAPSLQGQDHSFKQPFDPFEAAWKAEEAHEKEKRDNLHAGPLGGHNNFFWPASVY

SEQ ID NO: 67430 - protein, 296 aa, Triticum aestivum
  peptide (1)..(296): Ceres Seq. ID no. 13660272
  misc_feature (1)..(17): Homolog of NCBI NO: 34911090 NR Description: OJ1117_G01.12 [Oryza sativa (japonica
  misc_feature (41)..(154): Homolog of NCBI NO: 27960757 NR Description: AP2 domain protein [Hordeum vulgare]
  misc_feature (179)..(230): Homolog of NCBI NO: 30313898 NR Description: AP2 transcriptional activator DRF1.1 [Hordeum
  misc_feature (179)..(230): Homolog of NCBI NO: 27960760 NR Description: dehydration-responsive AP2 domain transcriptional
  misc_feature (17)..(177): Homolog of NCBI NO: 30313898 NR Description: AP2 transcriptional activator DRF1.1 [Hordeum
  misc_feature (17)..(177): Homolog of NCBI NO: 27960760 NR Description: dehydration-responsive AP2 domain transcriptional
MHAQKRPAIAPAADPHPPRPNKRMRGSVPVPAPAPPSFLTYDEAASAMYGPLARTIFPVQDALDIPASIEGPSASCESTTTSNHSGVASSSDNMQRQAQATEISSQSDVLESVKNYSQQQMIVPEAGSSIARSTYEEDVFQPLEPLSDLPGGEADGFDIEELMRMMEDDPIEVETVTGANTGVEMGQQEPLYLDTLDQGMLEDMLQSDCPYPMSGSEDRAMHNPAFHDADKEKRYNAASDLDAPSLQGQDHSFKQPFDPFEAAWKAEEAHEKEKRDNLHAGPLGGHNNFFWPASVY

SEQ ID NO: 67431 - DNA, 1436 bp, Triticum aestivum
  misc_feature (1)..(1436): Ceres Seq. ID no. 13500573
ggagatgctctgacgtgtgactttaccacagcaagtcggagaatctggttttgactctccctcgccggcggccggcgccgtgctcccgcagcggcgcagcccccgtgtccaaccccaacatctacgccccgttgagtcacgtgccgtgcccgcacgaacacctgctcccatatccctggccgcgctccgcgctaccgcggcgatcgggcgtccactgcccagtcgagcaccttccctcgccgtacgaatatggcccctgttcccgctcctatcgcgcgcctccccctcctccctcgccgtgtccacacccccctccctcatccccgaccgtcagcaccggcggaggcacgacacaccgcgcgcacgagggcgccgcagcggatcggaggagtggatccggggggaagggagacggcgcggggtagcggcacatcactccggagcacggggcgactggcgcggcgggcgccatggctaaaaaggcgcggcatgtgaaccaccctagttgacattttgcttcgcctgatgcgtatccggttgctggattgactcgtacgcttccagggctcggataagggggggttcttcacggagtacggcgaggcgacccgataccaggtcggcgaagtggtcggcaaaggcagctacggcgtcgtggcgtctgccgtcgacacccacaccggcgagagcgtcgccatcaaaaagatcgacgacgtcttcgagcatgtcgccgacgccacccgcattctccgcgagatcaagctgctccgccttctgcgccatccagacatcgtccagatcaagcacatcatgctcccgccgtcgcgccgcgaattccgtgacatctacataatcttcgagctcatggagtccgacctccaccaggtcatcaaggccaacgacgacctcagcccggagcaccatcagttctttttctaccagctgcttcgtgggatgaagtacatacacgctgccaatgtcttccaccgggacctcaagcccaagaacattctagccaatgccgattgcaagctcaagatttgcgacttcggccttgctcgggtttccttcaatgacaccccgtccgcgatattctggacggattatgtagcaacaaggtggtatcgtgctccagaattatgtggctccttcttttcaaagtatactcctgcgattgatatttggagcataggatgtatatttgcagaaatgcttacagggaggccgctctttcctggcaaaaatgtggtacatcaattggatctcatgactgatctactcggcactccttcggcagaatctatttctagggtgagttcaattccccgcttctaaaataaataaatcagttagagacttatctcgtgcgtgatttatttaccaactctttgtgcttgtggttaccatttcctttatcaagatgaaatattcctgcg

SEQ ID NO: 67432 - protein, 174 aa, Triticum aestivum
  peptide (1)..(174): Ceres Seq. ID no. 13500574
  misc_feature (1)..(168): Pfam Name: Protein kinase domain Pfam Description: Protein kinase domain
  misc_feature (1)..(168): Homolog of NCBI NO: 5815410 NR Description: blast and wounding induced mitogen-activated
  misc_feature (1)..(168): Homolog of NCBI NO: 7106542 NR Description: ATMPK8 [Arabidopsis thaliana]
  misc_feature (1)..(168): Homolog of NCBI NO: 25406284 NR Description: probable MAP kinase F25P22.9 [imported] -
  misc_feature (1)..(168): Homolog of NCBI NO: 18410420 NR Description: mitogen-activated protein kinase (MAPK), putative
  misc_feature (1)..(168): Homolog of NCBI NO: 37594657 NR Description: mitogen activated protein kinase 6 [Zea mays]
  misc_feature (1)..(168): Homolog of NCBI NO: 17064906 NR Description: Unknown protein [Arabidopsis thaliana]
  misc_feature (1)..(168): Homolog of NCBI NO: 15239634 NR Description: mitogen-activated protein kinase (MAPK), putative
  misc_feature (1)..(168): Homolog of NCBI NO: 18401750 NR Description: mitogen-activated protein kinase (MAPK), putative
  misc_feature (1)..(168): Homolog of NCBI NO: 9294059 NR Description: MAP kinase [Arabidopsis thaliana]
  misc_feature (1)..(168): Homolog of NCBI NO: 15220976 NR Description: mitogen-activated protein kinase (MAPK), putative
MLPPSRREFRDIYIIFELMESDLHQVIKANDDLSPEHHQFFFYQLLRGMKYIHAANVFHRDLKPKNILANADCKLKICDFGLARVSFNDTPSAIFWTDYVATRWYRAPELCGSFFSKYTPAIDIWSIGCIFAEMLTGRPLFPGKNVVHQLDLMTDLLGTPSAESISRVSSIPRF

SEQ ID NO: 67433 - protein, 156 aa, Triticum aestivum
  peptide (1)..(156): Ceres Seq. ID no. 13500575
  misc_feature (1)..(150): Pfam Name: Protein kinase domain Pfam Description: Protein kinase domain
  misc_feature (1)..(150): Homolog of NCBI NO: 5815410 NR Description: blast and wounding induced mitogen-activated
  misc_feature (1)..(150): Homolog of NCBI NO: 7106542 NR Description: ATMPK8 [Arabidopsis thaliana]
  misc_feature (1)..(150): Homolog of NCBI NO: 25406284 NR Description: probable MAP kinase F25P22.9 [imported] -
  misc_feature (1)..(150): Homolog of NCBI NO: 18410420 NR Description: mitogen-activated protein kinase (MAPK), putative
  misc_feature (1)..(150): Homolog of NCBI NO: 37594657 NR Description: mitogen activated protein kinase 6 [Zea mays]
  misc_feature (1)..(150): Homolog of NCBI NO: 17064906 NR Description: Unknown protein [Arabidopsis thaliana]
  misc_feature (1)..(150): Homolog of NCBI NO: 15239634 NR Description: mitogen-activated protein kinase (MAPK), putative
  misc_feature (1)..(150): Homolog of NCBI NO: 18401750 NR Description: mitogen-activated protein kinase (MAPK), putative
  misc_feature (1)..(150): Homolog of NCBI NO: 9294059 NR Description: MAP kinase [Arabidopsis thaliana]
  misc_feature (1)..(150): Homolog of NCBI NO: 15220976 NR Description: mitogen-activated protein kinase (MAPK), putative
MESDLHQVIKANDDLSPEHHQFFFYQLLRGMKYIHAANVFHRDLKPKNILANADCKLKICDFGLARVSFNDTPSAIFWTDYVATRWYRAPELCGSFFSKYTPAIDIWSIGCIFAEMLTGRPLFPGKNVVHQLDLMTDLLGTPSAESISRVSSIPRF

SEQ ID NO: 67434 - protein, 126 aa, Triticum aestivum
  peptide (1)..(126): Ceres Seq. ID no. 13500576
  misc_feature (1)..(120): Pfam Name: Protein kinase domain Pfam Description: Protein kinase domain
  misc_feature (1)..(120): Homolog of NCBI NO: 5815410 NR Description: blast and wounding induced mitogen-activated
  misc_feature (1)..(120): Homolog of NCBI NO: 7106542 NR Description: ATMPK8 [Arabidopsis thaliana]
  misc_feature (1)..(120): Homolog of NCBI NO: 25406284 NR Description: probable MAP kinase F25P22.9 [imported] -
  misc_feature (1)..(120): Homolog of NCBI NO: 18410420 NR Description: mitogen-activated protein kinase (MAPK), putative
  misc_feature (1)..(120): Homolog of NCBI NO: 37594657 NR Description: mitogen activated protein kinase 6 [Zea mays]
  misc_feature (1)..(120): Homolog of NCBI NO: 17064906 NR Description: Unknown protein [Arabidopsis thaliana]
  misc_feature (1)..(120): Homolog of NCBI NO: 15239634 NR Description: mitogen-activated protein kinase (MAPK), putative
  misc_feature (1)..(120): Homolog of NCBI NO: 18401750 NR Description: mitogen-activated protein kinase (MAPK), putative
  misc_feature (1)..(120): Homolog of NCBI NO: 9294059 NR Description: MAP kinase [Arabidopsis thaliana]
  misc_feature (1)..(120): Homolog of NCBI NO: 15220976 NR Description: mitogen-activated protein kinase (MAPK), putative
MKYIHAANVFHRDLKPKNILANADCKLKICDFGLARVSFNDTPSAIFWTDYVATRWYRAPELCGSFFSKYTPAIDIWSIGCIFAEMLTGRPLFPGKNVVHQLDLMTDLLGTPSAESISRVSSIPRF

SEQ ID NO: 67435 - DNA, 875 bp, Triticum aestivum
  misc_feature (1)..(875): Ceres Seq. ID no. 14301449
accacccacttcctgcagctcgcaaccaagcctcccaaccagctgagagctagcaggagcagcaagcgaaccaacgactcctccggtcgctcgtcggagccaggcaaggcaacgcagcatgtgtaacctcatcacgatcccgtcggtcgcctggctgcgccgcgccgtgcgccggtggcgcgcccgccgctccacctccaccccggtgccggcggggcacgtcgcggtctgcgcggacggcgcgcggttcatgggtgcggctggcgcacctcagccaccccgcgttcctggagctgctcaggcaggcggaggaggagtacggcttcccgtccggcgcctccggccctgtcgcactcccctgcgacgaggaccgcctccgcgacgtcctccgccgcgtctcttcctcgtccgactccacggagccgcgccgctcctccttctgccgccgccgcggcgactcgcggccgctgctgcaggcggtggccttcctgtgagcgcgcccgcgcggcggcaccgaacgatccagcaacgcagcgcccaatttctgggtgccagagcagcaactggtgacagactcagcactccggacgcgggaaaaagacgaaggccatcaagaccgttcgggccagcgtggcggcgtgctcccgtgccgtgcccagcgtattgccggccggcgatcgggcgcgtactggagctgcgtagtacagtgcgtgatggggaagtgatgttacatgctagtaactgattgattgaggaaggcgacgattttttgggttctttttctctgtaacgaccactcaactcgcctgtgcaaatccttgccgaggcataggagtaaattaattaataaagatttgattgattgttcttgctgc

SEQ ID NO: 67436 - protein, 208 aa, Triticum aestivum
  peptide (1)..(208): Ceres Seq. ID no. 14301450
  misc_feature (1)..(41): Homolog of NCBI NO: 38346069 NR Description: OSJNBa0084K01.9 [Oryza sativa (japonica
MCNLITIPSVAWLRRAVRRWRARRSTSTPVPAGHVAVCADGARFMGAAGAPQPPRVPGAAQAGGGGVRLPVRRLRPCRTPLRRGPPPRRPPPRLFLVRLHGAAPLLLLPPPRRLAAAAAGGGLPVSAPARRHRTIQQRSAQFLGARAATGDRLSTPDAGKRRRPSRPFGPAWRRAPVPCPAYCRPAIGRVLELRSTVRDGEVMLHASN

SEQ ID NO: 67437 - protein, 164 aa, Triticum aestivum
  peptide (1)..(164): Ceres Seq. ID no. 14301451
MGAAGAPQPPRVPGAAQAGGGGVRLPVRRLRPCRTPLRRGPPPRRPPPRLFLVRLHGAAPLLLLPPPRRLAAAAAGGGLPVSAPARRHRTIQQRSAQFLGARAATGDRLSTPDAGKRRRPSRPFGPAWRRAPVPCPAYCRPAIGRVLELRSTVRDGEVMLHASN

SEQ ID NO: 67438 - DNA, 1079 bp, Triticum aestivum
  misc_feature (1)..(1079): Ceres Seq. ID no. 13660443
aaaccctccccaaaaccctagctgattcggggaactagggttcctccccgcctccaccgccgccgccgccaagctcccgccgagctcagaagatacttaccatgggtaagtcaagcaagaagtctgctgttgcggttgcacctgctgctgggctggtcccagatggaaaatctttaaagaaaggcaagaggaatgcggaagatgacatcgagaaggctgtcagtgccaagaagcagaaaactgcacctgagaaggccgtgcctgtgaagaatgatcttaaagtcaagaagctccctccaaagaaggtcgagagcagcagttctgatgaggattcttcagaatccgaggacgaggtgacggttcaaccaaagaaggctgcaccgtctgctaaacaggagtccagttttgatagcagcgatgagagcagttctgatgacgaacctgcaaaaaagcctgctactgcttcaaagaaacctgctgcacttgctagcaatggttcaaagaaagtcaagtctgacagcagcagctctgacagcagctctgatgaggatgtgatggtcccacccaagaaggctgcacaatctgctaaacaggagtccagctctgatggtagtgacgagagcagctctgatgatgaacctgcaaagaagtctgctgccacttcaaagaaacctgctgcaaagactgaagattcagatagcagcagctctgatgaggatgaagatatgcttcccgctaaagcaccagcagcagccaagaagattgacgaatccagtgaaagttccgattttggtagctctgctctgatgatgccgtcagagcacaacttgctcgttttcagcatgaggaagaagatgatttgacagggagcaacacagcttgcttgttttgtttctctgtagcaagttattctataaatactgaacactatgcaaggaaatcagcagctgccattgttcaagaatgtactaattctctgaacattgttttgtttttctatagcaagttatttctataaatactgaacactgcaaggaaatcagcagctttcattgttaagagaatgagctaattctctg

SEQ ID NO: 67439 - protein, 253 aa, Triticum aestivum
  peptide (1)..(253): Ceres Seq. ID no. 13660444
  misc_feature (71)..(207): Pfam Name: Lipoprotein amino terminal region Pfam Description: Lipoprotein amino terminal region
  misc_feature (1)..(229): Homolog of NCBI NO: 40253662 NR Description: putative nucleolin [Oryza sativa (japonica
  misc_feature (1)..(234): Homolog of NCBI NO: 7440063 NR Description: nucleolin homolog nuM1 - alfalfa
  misc_feature (23)..(228): Homolog of NCBI NO: 9294322 NR Description: contains similarity to nucleolin, protein
  misc_feature (1)..(229): Homolog of NCBI NO: 21700195 NR Description: tobacco nucleolin [Nicotiana tabacum]
  misc_feature (1)..(208): Homolog of NCBI NO: 21700195 NR Description: tobacco nucleolin [Nicotiana tabacum]
  misc_feature (1)..(229): Homolog of NCBI NO: 15222009 NR Description: nucleolin, putative [Arabidopsis thaliana]
  misc_feature (1)..(234): Homolog of NCBI NO: 15229678 NR Description: nucleolin, putative [Arabidopsis thaliana]
  misc_feature (1)..(234): Homolog of NCBI NO: 38344339 NR Description: OSJNBa0058K23.21 [Oryza sativa (japonica
  misc_feature (1)..(229): Homolog of NCBI NO: 40253662 NR Description: putative nucleolin [Oryza sativa (japonica
  misc_feature (1)..(208): Homolog of NCBI NO: 38344339 NR Description: OSJNBa0058K23.21 [Oryza sativa (japonica
MGKSSKKSAVAVAPAAGLVPDGKSLKKGKRNAEDDIEKAVSAKKQKTAPEKAVPVKNDLKVKKLPPKKVESSSSDEDSSESEDEVTVQPKKAAPSAKQESSFDSSDESSSDDEPAKKPATASKKPAALASNGSKKVKSDSSSSDSSSDEDVMVPPKKAAQSAKQESSSDGSDESSSDDEPAKKSAATSKKPAAKTEDSDSSSSDEDEDMLPAKAPAAAKKIDESSESSDFGSSALMMPSEHNLLVFSMRKKMI

SEQ ID NO: 67440 - DNA, 1273 bp, Triticum aestivum
  misc_feature (1)..(1273): Ceres Seq. ID no. 14302998
ctccactctaggaagcaatctagctagctatcaaggcgcctagccatgtccaacccgtacaccttcctcaggcctcatatagatcgtcctttcttccccttccaaagaagcctagtctctccatcctctcccccaaaacaagcactccctctcctaagccttctcccttcgagccatgatcacagcaagatccttggttgtgggtatgccggtgatgatgatcatcatcaacttaagaaggaagatgaggatgtgaacatctcactccaaattgggccgccgaatccgaaccccgcgcctaatcttttaaggagtactgtgagtgatggtggttgcgatgatgcaacaggaacaacacaggatcagtgtggtggtggcgatcacagcagggcggacgagcaggaggaagaggaagacgacgatgatgatgccgccggtgatggtctttgttcggagtactttgccgctggtaagcttaccaagggcaagtattggatccctacccccgctcagatcctcattgggcccactcacttcgcctgcccggtgtgctgcaagaccttcagcagatacaacaacctgcagatgcacatgtggggacacgggtcgcagtaccgccgcgggcctgactccctccgcggcacgcagccggcggcgatgctccggctgccgtgcttctgctgcgcgccggggtgccggagccacgtggaccacccgcgggcgcggccgctcaaggacttccggacgctgcagacgcactacaagcgcaggcactgtgccaagccattcctctgccgcaagtgcggcaaggcgctcgccgtgcgcggcgactggcgaactcacgagaagaactgcggccgccggtggcactgcacctgcggctctgacttcaagcacaagcgctcgctcaaggatcacattcgggccttcgggcaggaccacgtcgagcggccgcccgccgccaaaatgtgaccgtcgagagccacggacgataaatatgcatggccaaacggcctgccagtgattatacgattgcttgtgcaatattaggggaccgattgatttgggtatccatggtattctccttcgcataataagcattactatgttactagctgctagctgaactcagtttgattattacacttttttttaactattttgttcttattcaagtgctatgtgcgtattttagcgtgttaatcgtagacttgtaagttatggcaacttaatttgttcagtaatattcttattttgtatttgtttcatggtc

SEQ ID NO: 67441 - protein, 308 aa, Triticum aestivum
  peptide (1)..(308): Ceres Seq. ID no. 14302999
  misc_feature (274)..(299): Pfam Name: Zinc finger, C2H2 type Pfam Description: Zinc finger, C2H2 type
  misc_feature (148)..(303): Homolog of NCBI NO: 15223175 NR Description: WIP3 protein [Arabidopsis thaliana]
  misc_feature (34)..(308): Homolog of NCBI NO: 34908460 NR Description: P0683F02.21 [Oryza sativa (japonica
  misc_feature (130)..(303): Homolog of NCBI NO: 18253283 NR Description: transparent testa 1 [Arabidopsis thaliana]
  misc_feature (130)..(303): Homolog of NCBI NO: 30693123 NR Description: transparent testa 1 (TT1) protein [Arabidopsis
  misc_feature (25)..(300): Homolog of NCBI NO: 15223781 NR Description: expressed protein [Arabidopsis thaliana]
  misc_feature (6)..(300): Homolog of NCBI NO: 30685975 NR Description: DNA-binding protein -related [Arabidopsis
  misc_feature (6)..(300): Homolog of NCBI NO: 9294415 NR Description: zinc finger-like protein [Arabidopsis thaliana]
  misc_feature (58)..(299): Homolog of NCBI NO: 28973719 NR Description: putative zinc finger protein [Arabidopsis
  misc_feature (58)..(299): Homolog of NCBI NO: 15230370 NR Description: zinc finger - like protein [Arabidopsis thaliana]
MSNPYTFLRPHIDRPFFPFQRSLVSPSSPPKQALPLLSLLPSSHDHSKILGCGYAGDDDHHQLKKEDEDVNISLQIGPPNPNPAPNLLRSTVSDGGCDDATGTTQDQCGGGDHSRADEQEEEEDDDDDAAGDGLCSEYFAAGKLTKGKYWIPTPAQILIGPTHFACPVCCKTFSRYNNLQMHMWGHGSQYRRGPDSLRGTQPAAMLRLPCFCCAPGCRSHVDHPRARPLKDFRTLQTHYKRRHCAKPFLCRKCGKALAVRGDWRTHEKNCGRRWHCTCGSDFKHKRSLKDHIRAFGQDHVERPPAAKM

SEQ ID NO: 67442 - protein, 232 aa, Triticum aestivum
  peptide (1)..(232): Ceres Seq. ID no. 14303000
  misc_feature (71)..(195): Pfam Name: Equine herpesvirus glycoprotein gp2 Pfam Description: Equine herpesvirus glycoprotein gp2
MVVAMMQQEQHRISVVVAITAGRTSRRKRKTTMMMPPVMVFVRSTLPLVSLPRASIGSLPPLRSSLGPLTSPARCAARPSADTTTCRCTCGDTGRSTAAGLTPSAARSRRRCSGCRASAARRGAGATWTTRGRGRSRTSGRCRRTTSAGTVPSHSSAASAARRSPCAATGELTRRTAAAGGTAPAALTSSTSARSRITFGPSGRTTSSGRPPPKCDRREPRTINMHGQTACQ

SEQ ID NO: 67443 - protein, 228 aa, Triticum aestivum
  peptide (1)..(228): Ceres Seq. ID no. 14303001
  misc_feature (67)..(191): Pfam Name: Equine herpesvirus glycoprotein gp2 Pfam Description: Equine herpesvirus glycoprotein gp2
MMQQEQHRISVVVAITAGRTSRRKRKTTMMMPPVMVFVRSTLPLVSLPRASIGSLPPLRSSLGPLTSPARCAARPSADTTTCRCTCGDTGRSTAAGLTPSAARSRRRCSGCRASAARRGAGATWTTRGRGRSRTSGRCRRTTSAGTVPSHSSAASAARRSPCAATGELTRRTAAAGGTAPAALTSSTSARSRITFGPSGRTTSSGRPPPKCDRREPRTINMHGQTACQ

SEQ ID NO: 67444 - DNA, 1655 bp, Triticum aestivum
  misc_feature (1)..(1655): Ceres Seq. ID no. 14308045
acccgatgcgcctggctggctttcgattgatcacacgagacatgtagaaaccacatgcgtttccaacctagttagatagaaggatggacgccttggcggggctctcggcctttgccgcggtggcgctgccgctcctcctgctgtacagcgtgcaccggtggaggaaccctcggtgcaacggccggctcccgccggggtccatgggcctcccgctcgtcggcgagacgttccagttcttctccccggacgcctccttggacgtccctcgcttcatccgagacaggctcacgaggtacggcccgatcttcaagacgagcgtggtggggcacccggtggtggtgtcggcggacgaggagctgaaccacatggtgttccagcaggagggggagctgttccagagctggtacccggactcgttcgtggagatcctcggccgcgacaacgtcggggagcagaagggcaccatgttcaagtacctcaagaacatggtgctcaggttcttcggcccggagagcctcaaggagtccatcctccgcgacgtccagcgcgccgtctgcagctcgctctgcacctggtccaccctgccggccgtcgacttcaaagaagccgtctccaccatggtgtttgaactttcggcgagcaagctgctcggcctggagccgtcgaggtccaaggttctacggaagagcttcttcgacttcgttctagggctcatctccttcccgctctacctgccaggaacagcctactacgcatgcatgcagggacggatgagtgtaatggaggtgctgcagcaggtgttggaggagaggacgagatcagctgaggcggccggaggaggggaagcacggtgccacggcgacttcctggactacgtcgtccaggagatcaccaaggagaagccggtcctgacggagggaatggcgctggacctcctgtttgtgctcctcttcgccagcttccacaccacgtcgctggccatcaccctggccgtcaagctcctcaccgacaaccctcgcgtcctggaggaactcacggtggagcatgaaacgattctgaacgagcgtgaggcaggcggtgagactgatggcgacagacttacatggaaagagtacaaatccatgacattcacatcccaggtgataaacgagacggtccgactggccaacattgcgcctggcatcttcagaaagacactgaaagatgtacagttcagagtctacacaattccagctggatggggagtgatggtctgccctctcgcggtgcacctgaatccagatatttaccctgaccccctcaccttcaatccttcaaggtttaaggataaactagaggcaaaccgtgggtcaagacacttcatggctttcggaggaggtctccggtcctgtgttggagcagacttcagcaagctacaaatggccattttccttcactttcttgtcaccaaatataggtggatacaactaggtggaggcaagatagtccggtgtccagggctggaatttcctgatggttacctcattcagattagacagagagactaatcaacacctgctttcaagtcatgctagcagtaggaaaagcttatatcacacgtgtacaattgttctagcatgttgtttgatgaaataacagttgtgcagaagtattat

SEQ ID NO: 67445 - protein, 487 aa, Triticum aestivum
  peptide (1)..(487): Ceres Seq. ID no. 14308046
  misc_feature (213)..(483): Pfam Name: Cytochrome P450 Pfam Description: Cytochrome P450
  misc_feature (79)..(483): Homolog of NCBI NO: 27764671 NR Description: putative hydroxylase [Oryza sativa (japonica
  misc_feature (28)..(157): Homolog of NCBI NO: 28564842 NR Description: putative cytochrome P450 [Oryza sativa (japonica
  misc_feature (143)..(462): Homolog of NCBI NO: 28564842 NR Description: putative cytochrome P450 [Oryza sativa (japonica
  misc_feature (1)..(414): Homolog of NCBI NO: 38567917 NR Description: OSJNBa0088I22.13 [Oryza sativa (japonica
  misc_feature (7)..(486): Homolog of NCBI NO: 18483228 NR Description: putative cytochrome P450-like protein [Sorghum
  misc_feature (13)..(487): Homolog of NCBI NO: 9502380 NR Description: T12C24.27 [Arabidopsis thaliana]
  misc_feature (13)..(487): Homolog of NCBI NO: 30682922 NR Description: cytochrome P450, putative [Arabidopsis thaliana]
  misc_feature (11)..(483): Homolog of NCBI NO: 38567920 NR Description: OSJNBa0088I22.16 [Oryza sativa (japonica
  misc_feature (1)..(483): Homolog of NCBI NO: 20520627 NR Description: putative cytochrome P450 [Oryza sativa (japonica
  misc_feature (1)..(486): Homolog of NCBI NO: 38567916 NR Description: OSJNBa0088I22.12 [Oryza sativa (japonica
MDALAGLSAFAAVALPLLLLYSVHRWRNPRCNGRLPPGSMGLPLVGETFQFFSPDASLDVPRFIRDRLTRYGPIFKTSVVGHPVVVSADEELNHMVFQQEGELFQSWYPDSFVEILGRDNVGEQKGTMFKYLKNMVLRFFGPESLKESILRDVQRAVCSSLCTWSTLPAVDFKEAVSTMVFELSASKLLGLEPSRSKVLRKSFFDFVLGLISFPLYLPGTAYYACMQGRMSVMEVLQQVLEERTRSAEAAGGGEARCHGDFLDYVVQEITKEKPVLTEGMALDLLFVLLFASFHTTSLAITLAVKLLTDNPRVLEELTVEHETILNEREAGGETDGDRLTWKEYKSMTFTSQVINETVRLANIAPGIFRKTLKDVQFRVYTIPAGWGVMVCPLAVHLNPDIYPDPLTFNPSRFKDKLEANRGSRHFMAFGGGLRSCVGADFSKLQMAIFLHFLVTKYRWIQLGGGKIVRCPGLEFPDGYLIQIRQRD

SEQ ID NO: 67446 - protein, 448 aa, Triticum aestivum
  peptide (1)..(448): Ceres Seq. ID no. 14308047
  misc_feature (174)..(444): Pfam Name: Cytochrome P450 Pfam Description: Cytochrome P450
  misc_feature (40)..(444): Homolog of NCBI NO: 27764671 NR Description: putative hydroxylase [Oryza sativa (japonica
  misc_feature (1)..(118): Homolog of NCBI NO: 28564842 NR Description: putative cytochrome P450 [Oryza sativa (japonica
  misc_feature (104)..(423): Homolog of NCBI NO: 28564842 NR Description: putative cytochrome P450 [Oryza sativa (japonica
  misc_feature (1)..(375): Homolog of NCBI NO: 38567917 NR Description: OSJNBa0088I22.13 [Oryza sativa (japonica
  misc_feature (1)..(447): Homolog of NCBI NO: 18483228 NR Description: putative cytochrome P450-like protein [Sorghum
  misc_feature (1)..(448): Homolog of NCBI NO: 9502380 NR Description: T12C24.27 [Arabidopsis thaliana]
  misc_feature (1)..(448): Homolog of NCBI NO: 30682922 NR Description: cytochrome P450, putative [Arabidopsis thaliana]
  misc_feature (1)..(444): Homolog of NCBI NO: 38567920 NR Description: OSJNBa0088I22.16 [Oryza sativa (japonica
  misc_feature (1)..(444): Homolog of NCBI NO: 20520627 NR Description: putative cytochrome P450 [Oryza sativa (japonica
  misc_feature (1)..(447): Homolog of NCBI NO: 38567916 NR Description: OSJNBa0088I22.12 [Oryza sativa (japonica
MGLPLVGETFQFFSPDASLDVPRFIRDRLTRYGPIFKTSVVGHPVVVSADEELNHMVFQQEGELFQSWYPDSFVEILGRDNVGEQKGTMFKYLKNMVLRFFGPESLKESILRDVQRAVCSSLCTWSTLPAVDFKEAVSTMVFELSASKLLGLEPSRSKVLRKSFFDFVLGLISFPLYLPGTAYYACMQGRMSVMEVLQQVLEERTRSAEAAGGGEARCHGDFLDYVVQEITKEKPVLTEGMALDLLFVLLFASFHTTSLAITLAVKLLTDNPRVLEELTVEHETILNEREAGGETDGDRLTWKEYKSMTFTSQVINETVRLANIAPGIFRKTLKDVQFRVYTIPAGWGVMVCPLAVHLNPDIYPDPLTFNPSRFKDKLEANRGSRHFMAFGGGLRSCVGADFSKLQMAIFLHFLVTKYRWIQLGGGKIVRCPGLEFPDGYLIQIRQRD

SEQ ID NO: 67447 - protein, 393 aa, Triticum aestivum
  peptide (1)..(393): Ceres Seq. ID no. 14308048
  misc_feature (119)..(389): Pfam Name: Cytochrome P450 Pfam Description: Cytochrome P450
  misc_feature (1)..(389): Homolog of NCBI NO: 27764671 NR Description: putative hydroxylase [Oryza sativa (japonica
  misc_feature (1)..(63): Homolog of NCBI NO: 28564842 NR Description: putative cytochrome P450 [Oryza sativa (japonica
  misc_feature (49)..(368): Homolog of NCBI NO: 28564842 NR Description: putative cytochrome P450 [Oryza sativa (japonica
  misc_feature (1)..(320): Homolog of NCBI NO: 38567917 NR Description: OSJNBa0088I22.13 [Oryza sativa (japonica
  misc_feature (1)..(392): Homolog of NCBI NO: 18483228 NR Description: putative cytochrome P450-like protein [Sorghum
  misc_feature (1)..(393): Homolog of NCBI NO: 9502380 NR Description: T12C24.27 [Arabidopsis thaliana]
  misc_feature (1)..(393): Homolog of NCBI NO: 30682922 NR Description: cytochrome P450, putative [Arabidopsis thaliana]
  misc_feature (1)..(389): Homolog of NCBI NO: 38567920 NR Description: OSJNBa0088I22.16 [Oryza sativa (japonica
  misc_feature (1)..(389): Homolog of NCBI NO: 20520627 NR Description: putative cytochrome P450 [Oryza sativa (japonica
  misc_feature (1)..(392): Homolog of NCBI NO: 38567916 NR Description: OSJNBa0088I22.12 [Oryza sativa (japonica
MVFQQEGELFQSWYPDSFVEILGRDNVGEQKGTMFKYLKNMVLRFFGPESLKESILRDVQRAVCSSLCTWSTLPAVDFKEAVSTMVFELSASKLLGLEPSRSKVLRKSFFDFVLGLISFPLYLPGTAYYACMQGRMSVMEVLQQVLEERTRSAEAAGGGEARCHGDFLDYVVQEITKEKPVLTEGMALDLLFVLLFASFHTTSLAITLAVKLLTDNPRVLEELTVEHETILNEREAGGETDGDRLTWKEYKSMTFTSQVINETVRLANIAPGIFRKTLKDVQFRVYTIPAGWGVMVCPLAVHLNPDIYPDPLTFNPSRFKDKLEANRGSRHFMAFGGGLRSCVGADFSKLQMAIFLHFLVTKYRWIQLGGGKIVRCPGLEFPDGYLIQIRQRD

SEQ ID NO: 67448 - DNA, 721 bp, Triticum aestivum
  misc_feature (1)..(721): Ceres Seq. ID no. 12783233
atgtaggttctttcttccgctccggtcctggaatttgggcagccagcactgagccttcatcaccccttccgccagaggcaaagcaagactctgaactaactgaagggactgttttgactggctgtgaagaaggcccaaggaggaggcggccatgagcgagtctgggcagaggtcgagggcgtggccaccgggggacgccgcgatgacgccgtccgagccggctgcggccgcggacgcgacgggcgaggcgacgacgctgagggacttcggcacgtccatggacgccatctccttcggcttcgcggccacggccatcctcatctccatcttcctcctcatggccatcttcgagcacctcatcaggccccaggccttccaggcgccggccgactccccgggcggcagacgccggcgtggccaccgctcgcccggcaaaccccggagcccgcccatggtgcagacggtgctgcaggcggcggacctgtcggtgctgatgccggggcagcggtacccgacctacctcgcgcagccggcgccattgccgccgccgtgccccagggagggggtgcactggccgccgcacgaccaccaccgctcccacatgccaccctgaccatctcactcggtcgaaagtttcgttcagtttttgtacagcgggagattgttgtaaaagccggagaatgtgaacaaaaatcctggtttgttgtcggtgccgttctcc

SEQ ID NO: 67449 - protein, 153 aa, Triticum aestivum
  peptide (1)..(153): Ceres Seq. ID no. 12783234
  misc_feature (41)..(142): Homolog of NCBI NO: 22329455 NR Description: hypothetical protein; protein id: At1g09812.1
  misc_feature (4)..(153): Homolog of NCBI NO: 34907352 NR Description: P0471B04.10 [Oryza sativa (japonica
MSESGQRSRAWPPGDAAMTPSEPAAAADATGEATTLRDFGTSMDAISFGFAATAILISIFLLMAIFEHLIRPQAFQAPADSPGGRRRRGHRSPGKPRSPPMVQTVLQAADLSVLMPGQRYPTYLAQPAPLPPPCPREGVHWPPHDHHRSHMPP

SEQ ID NO: 67450 - protein, 136 aa, Triticum aestivum
  peptide (1)..(136): Ceres Seq. ID no. 12783235
  misc_feature (24)..(125): Homolog of NCBI NO: 22329455 NR Description: hypothetical protein; protein id: At1g09812.1
  misc_feature (1)..(136): Homolog of NCBI NO: 34907352 NR Description: P0471B04.10 [Oryza sativa (japonica
MTPSEPAAAADATGEATTLRDFGTSMDAISFGFAATAILISIFLLMAIFEHLIRPQAFQAPADSPGGRRRRGHRSPGKPRSPPMVQTVLQAADLSVLMPGQRYPTYLAQPAPLPPPCPREGVHWPPHDHHRSHMPP

SEQ ID NO: 67451 - protein, 111 aa, Triticum aestivum
  peptide (1)..(111): Ceres Seq. ID no. 12783236
  misc_feature (1)..(100): Homolog of NCBI NO: 22329455 NR Description: hypothetical protein; protein id: At1g09812.1
  misc_feature (1)..(111): Homolog of NCBI NO: 34907352 NR Description: P0471B04.10 [Oryza sativa (japonica
MDAISFGFAATAILISIFLLMAIFEHLIRPQAFQAPADSPGGRRRRGHRSPGKPRSPPMVQTVLQAADLSVLMPGQRYPTYLAQPAPLPPPCPREGVHWPPHDHHRSHMPP

SEQ ID NO: 67452 - DNA, 462 bp, Triticum aestivum
  misc_feature (1)..(462): Ceres Seq. ID no. 13660322
attatttcaaaaaactcctccgtattttcgtctactactccgaattaataataatcccgcaaaatctctccgtccccagctactcccccggatccgatcgccaccgccggaatatccgatctctctgccgccgccgccgcccgagacctgctcgtcggaattccccgcggcggcgcatgtcgctggcgtgcgggctgccgctgctggagtgtgtctactgcctggggtgcgcgcggtgggcgtggaagcggtgcgtccactccggccaccacgacagcgccacctggggccacgccgccgccgccgacttcgcgcccgtgccccgcatgtgccgcctcgtcatggccaactacgccccgcccgacctcctcgccgccccgccgctcctcctcgacccctcaaacgtcgtgcgccgccgcacctacgccgacacggggggccgcgtcacgccctacctcgtct

SEQ ID NO: 67453 - protein, 153 aa, Triticum aestivum
  peptide (1)..(153): Ceres Seq. ID no. 13660323
  misc_feature (19)..(55): Homolog of NCBI NO: 81286 NR Description: extensin - Volvox carteri (fragment)
  misc_feature (91)..(152): Homolog of NCBI NO: 23274133 NR Description: Similar to serine/arginine repetitive matrix 1
  misc_feature (86)..(147): Homolog of NCBI NO: 34872074 NR Description: similar to Ser/Arg-related nuclear matrix protein
  misc_feature (86)..(147): Homolog of NCBI NO: 23274133 NR Description: Similar to serine/arginine repetitive matrix 1
  misc_feature (86)..(147): Homolog of NCBI NO: 7949115 NR Description: Ser/Arg-related nuclear matrix protein
LFQKTPPYFRLLLRINNNPAKSLRPQLLPRIRSPPPEYPISLPPPPPETCSSEFPAAAHVAGVRAAAAGVCLLPGVRAVGVEAVRPLRPPRQRHLGPRRRRRLRARAPHVPPRHGQLRPARPPRRPAAPPRPLKRRAPPHLRRHGGPRHALPR

SEQ ID NO: 67454 - protein, 153 aa, Triticum aestivum
  peptide (1)..(153): Ceres Seq. ID no. 13660324
  misc_feature (25)..(58): Homolog of NCBI NO: 34872074 NR Description: similar to Ser/Arg-related nuclear matrix protein
  misc_feature (25)..(58): Homolog of NCBI NO: 23274133 NR Description: Similar to serine/arginine repetitive matrix 1
  misc_feature (25)..(58): Homolog of NCBI NO: 7949115 NR Description: Ser/Arg-related nuclear matrix protein
  misc_feature (59)..(152): Homolog of NCBI NO: 9757980 NR Description: calmodulin-binding heat-shock protein
  misc_feature (59)..(152): Homolog of NCBI NO: 15240318 NR Description: calmodulin-binding heat-shock protein
  misc_feature (59)..(152): Homolog of NCBI NO: 7489106 NR Description: calmodulin-binding heat-shock protein - common
  misc_feature (59)..(152): Homolog of NCBI NO: 15229078 NR Description: calmodulin-binding heat-shock protein
  misc_feature (59)..(152): Homolog of NCBI NO: 34901742 NR Description: P0434A03.37 [Oryza sativa (japonica
  misc_feature (59)..(152): Homolog of NCBI NO: 30678658 NR Description: calmodulin-binding heat-shock protein
  misc_feature (59)..(152): Homolog of NCBI NO: 7486555 NR Description: hypothetical protein F6N23.21 - Arabidopsis
YFKKLLRIFVYYSELIIIPQNLSVPSYSPGSDRHRRNIRSLCRRRRPRPARRNSPRRRMSLACGLPLLECVYCLGCARWAWKRCVHSGHHDSATWGHAAAADFAPVPRMCRLVMANYAPPDLLAAPPLLLDPSNVVRRRTYADTGGRVTPYLV

SEQ ID NO: 67455 - protein, 95 aa, Triticum aestivum
  peptide (1)..(95): Ceres Seq. ID no. 13660325
  misc_feature (1)..(57): Homolog of NCBI NO: 13324799 NR Description: putative calmodulin-binding heat-shock protein
  misc_feature (1)..(94): Homolog of NCBI NO: 9757980 NR Description: calmodulin-binding heat-shock protein
  misc_feature (1)..(94): Homolog of NCBI NO: 15240318 NR Description: calmodulin-binding heat-shock protein
  misc_feature (1)..(94): Homolog of NCBI NO: 7489106 NR Description: calmodulin-binding heat-shock protein - common
  misc_feature (1)..(94): Homolog of NCBI NO: 15229078 NR Description: calmodulin-binding heat-shock protein
  misc_feature (1)..(94): Homolog of NCBI NO: 34901742 NR Description: P0434A03.37 [Oryza sativa (japonica
  misc_feature (1)..(94): Homolog of NCBI NO: 30678658 NR Description: calmodulin-binding heat-shock protein
  misc_feature (1)..(94): Homolog of NCBI NO: 7486555 NR Description: hypothetical protein F6N23.21 - Arabidopsis
MSLACGLPLLECVYCLGCARWAWKRCVHSGHHDSATWGHAAAADFAPVPRMCRLVMANYAPPDLLAAPPLLLDPSNVVRRRTYADTGGRVTPYLV

SEQ ID NO: 67456 - DNA, 1204 bp, Triticum aestivum
  misc_feature (1)..(1204): Ceres Seq. ID no. 15169545
ctagtaaaaccgaccagagccgcaacaaacactatcgaaccgaagccggaggtctggcgattcgaccctcgagaggcggccgagccgagcagacgccatggaccgcgagtggggctccaagcccggcagcggcggcgccgccacctcccagaatgaggccatcgaccggcgggagcgcctgcgccgcctcgcgctcgagaccatcgacctcgccaaggacccctacttcatgcgaaaccatctcggcagctatgagtgcaagctctgcctgacgctccacaacaacgaggggaactacctcgcgcacacgcaggggaagcggcaccagaccaacctcgccaagcgtgccgcccgcgaggccaaggacgcgcccgcgcagccccagccaaacaagcgcaagctcgcgccccgcaagtctgttaagattggcagacctggatatacagtaactaaacagtatgatcctgacacgaagcaacactcttttctctttgagattgagtatcctgaaatcgaagataatagcaagccaaggcaccgtttcatggcatcatatgaacagaaaatccaatcttgggataagaggtaccaatatctgctttttgcagcggagccctatgaagtcattggctttaagataccaagcacagagattgacaaatcaacagacaagtttttctcgtattgggatccggacaagaagtcatacattctgcaactatacttcaagccaagagcaccggagattaacagacaaccagcagctcctggtactgtcccaaatgggacaggaggccctcctggtgctccaccaaggccaccatcccagccacaggctctgccgccacctccaccgaatgcacctatgggaatgccccctaggatcccgccaccaccaatgagcggtcttcaacctccaccccctccgcctccgcttgcaaatggtcctccgcgttcaataccacctccacctccttctggtggtccaatggctaactttactcctggagcacctccgccacgctttccgatgcaaggctaccctggacctcagcagtaggtgatctgagtgtgggcaagagagatcaggctacaaattttgaacacttgctttatccaaaccagtatgtgctacattgttgtctgaaattttactgtataagcagattaaattatttaagtgcgctttcaagcaaagcattct

SEQ ID NO: 67457 - protein, 320 aa, Triticum aestivum
  peptide (1)..(320): Ceres Seq. ID no. 15169546
  misc_feature (212)..(304): Pfam Name: Formin Homology 2 Domain Pfam Description: Formin Homology 2 Domain
  misc_feature (6)..(318): Homolog of NCBI NO: 10800150 NR Description: splicing factor 3a, subunit 2
  misc_feature (6)..(318): Homolog of NCBI NO: 34862283 NR Description: similar to Splicing factor 3A subunit 2
  misc_feature (6)..(318): Homolog of NCBI NO: 627605 NR Description: spliceosome-associated protein SAP 62 - human
  misc_feature (6)..(318): Homolog of NCBI NO: 30931324 NR Description: Unknown (protein for MGC:64703) [Mus musculus]
  misc_feature (6)..(318): Homolog of NCBI NO: 21361376 NR Description: splicing factor 3a, subunit 2, 66kDa
  misc_feature (6)..(318): Homolog of NCBI NO: 27371271 NR Description: Similar to splicing factor 3a, subunit 2, 66kDa
  misc_feature (1)..(276): Homolog of NCBI NO: 7488346 NR Description: probable spliceosome-associated protein SAP62
  misc_feature (1)..(276): Homolog of NCBI NO: 18403023 NR Description: spliceosome associated protein-family
  misc_feature (1)..(52): Homolog of NCBI NO: 34902138 NR Description: hypothetical protein [Oryza sativa (japonica
  misc_feature (49)..(320): Homolog of NCBI NO: 34902138 NR Description: hypothetical protein [Oryza sativa (japonica
MDREWGSKPGSGGAATSQNEAIDRRERLRRLALETIDLAKDPYFMRNHLGSYECKLCLTLHNNEGNYLAHTQGKRHQTNLAKRAAREAKDAPAQPQPNKRKLAPRKSVKIGRPGYTVTKQYDPDTKQHSFLFEIEYPEIEDNSKPRHRFMASYEQKIQSWDKRYQYLLFAAEPYEVIGFKIPSTEIDKSTDKFFSYWDPDKKSYILQLYFKPRAPEINRQPAAPGTVPNGTGGPPGAPPRPPSQPQALPPPPPNAPMGMPPRIPPPPMSGLQPPPPPPPLANGPPRSIPPPPPSGGPMANFTPGAPPPRFPMQGYPGPQQ

SEQ ID NO: 67458 - protein, 276 aa, Triticum aestivum
  peptide (1)..(276): Ceres Seq. ID no. 15169547
  misc_feature (168)..(260): Pfam Name: Formin Homology 2 Domain Pfam Description: Formin Homology 2 Domain
  misc_feature (1)..(167): Homolog of NCBI NO: 7498869 NR Description: hypothetical protein F11A10.2 - Caenorhabditis
  misc_feature (1)..(274): Homolog of NCBI NO: 10800150 NR Description: splicing factor 3a, subunit 2
  misc_feature (1)..(274): Homolog of NCBI NO: 34862283 NR Description: similar to Splicing factor 3A subunit 2
  misc_feature (1)..(274): Homolog of NCBI NO: 627605 NR Description: spliceosome-associated protein SAP 62 - human
  misc_feature (1)..(274): Homolog of NCBI NO: 30931324 NR Description: Unknown (protein for MGC:64703) [Mus musculus]
  misc_feature (1)..(274): Homolog of NCBI NO: 21361376 NR Description: splicing factor 3a, subunit 2, 66kDa
  misc_feature (1)..(274): Homolog of NCBI NO: 27371271 NR Description: Similar to splicing factor 3a, subunit 2, 66kDa
  misc_feature (1)..(232): Homolog of NCBI NO: 7488346 NR Description: probable spliceosome-associated protein SAP62
  misc_feature (1)..(232): Homolog of NCBI NO: 18403023 NR Description: spliceosome associated protein-family
  misc_feature (5)..(276): Homolog of NCBI NO: 34902138 NR Description: hypothetical protein [Oryza sativa (japonica
MRNHLGSYECKLCLTLHNNEGNYLAHTQGKRHQTNLAKRAAREAKDAPAQPQPNKRKLAPRKSVKIGRPGYTVTKQYDPDTKQHSFLFEIEYPEIEDNSKPRHRFMASYEQKIQSWDKRYQYLLFAAEPYEVIGFKIPSTEIDKSTDKFFSYWDPDKKSYILQLYFKPRAPEINRQPAAPGTVPNGTGGPPGAPPRPPSQPQALPPPPPNAPMGMPPRIPPPPMSGLQPPPPPPPLANGPPRSIPPPPPSGGPMANFTPGAPPPRFPMQGYPGPQQ

SEQ ID NO: 67459 - protein, 171 aa, Triticum aestivum
  peptide (1)..(171): Ceres Seq. ID no. 15169548
  misc_feature (63)..(155): Pfam Name: Formin Homology 2 Domain Pfam Description: Formin Homology 2 Domain
  misc_feature (1)..(62): Homolog of NCBI NO: 7498869 NR Description: hypothetical protein F11A10.2 - Caenorhabditis
  misc_feature (1)..(169): Homolog of NCBI NO: 10800150 NR Description: splicing factor 3a, subunit 2
  misc_feature (1)..(169): Homolog of NCBI NO: 34862283 NR Description: similar to Splicing factor 3A subunit 2
  misc_feature (1)..(169): Homolog of NCBI NO: 627605 NR Description: spliceosome-associated protein SAP 62 - human
  misc_feature (1)..(169): Homolog of NCBI NO: 30931324 NR Description: Unknown (protein for MGC:64703) [Mus musculus]
  misc_feature (1)..(169): Homolog of NCBI NO: 21361376 NR Description: splicing factor 3a, subunit 2, 66kDa
  misc_feature (1)..(169): Homolog of NCBI NO: 27371271 NR Description: Similar to splicing factor 3a, subunit 2, 66kDa
  misc_feature (1)..(127): Homolog of NCBI NO: 7488346 NR Description: probable spliceosome-associated protein SAP62
  misc_feature (1)..(127): Homolog of NCBI NO: 18403023 NR Description: spliceosome associated protein-family
  misc_feature (1)..(171): Homolog of NCBI NO: 34902138 NR Description: hypothetical protein [Oryza sativa (japonica
MASYEQKIQSWDKRYQYLLFAAEPYEVIGFKIPSTEIDKSTDKFFSYWDPDKKSYILQLYFKPRAPEINRQPAAPGTVPNGTGGPPGAPPRPPSQPQALPPPPPNAPMGMPPRIPPPPMSGLQPPPPPPPLANGPPRSIPPPPPSGGPMANFTPGAPPPRFPMQGYPGPQQ

SEQ ID NO: 67460 - DNA, 1993 bp, Triticum aestivum
  misc_feature (1)..(1993): Ceres Seq. ID no. 13660790
acctagaacatcctaatcaaaaaggcagcgtagcagaagcatttccggcaccgaaatttccatcgatctgaacgcccccaccggccggtcgaccctccaccaccacctaccggccccgtcgccgtcgccgtcgtctccagccccccctccgcccccaaaaccctagccccggccccggccccgccgcccccagagcccccaccatgtccaccaacggcagctccccgagggtcagggacacggagagcagcctggagaaggtgaagcggcagctgtcgacgggatccgggaggtacctgctgcagggccccctgctgaagcgatctgagacgctacggaaatggaacgaaagatggataatattggacccaacgtctggcaagatggaatacaaacttcggaggaatgaaactgctgttaagggaaccattctatttgatgcttcaagcaccattactttgtctcctgtaaattttcaaggcatgccaaagtatgacggatgctgtttctacattggaactcctcagaaaaaggattactttctttgcgctgaaactcctggtgctgccaaagcttgggtatctacattgcatgcaactcagttagtactacaagcgcataaagaggcagtaaattctttagctgggaatggctctccttctacattaggcacggttgctactgcagttgctaatgctaatgcaactgctttggaggcaatgaaggagatagatgcagcactgaaggtttcaatgagggcagctcttgggttgggtacaaataattcgaatgtgggtcaacttgatgatttgactatcatgaaggagactctccgagtgaaagatgaggagttgcagcatttggctaaggacattcgtgctcgtgacgccacaattcaggaaattgcagagaagttaacagagaccgcagaggctgcagaagcagcagcttctgcagctcatacaatcgatgaacagagacggcttctatgttcagagattgagcgtctgaaaaaagcaatggaaacacaaatggaacaatccatgcttaagctacggcaatctgaagagaaggtaattagcctgagcaaagagaacgaccagttgctgaaggaaagagacgccgcatttcaggaagcatatatgtggcgcactgaactaggaaaagctagagagcaagcagtgatacaggaagcagcaattgcccgagcagaggaaaaggtaagggtgtctgaagcggatgccgcggttcggcatcaaggaagctgctgaaaatttgcatgctgctgagaaagaaaaagaagaacttctagcccttattggtgttctccaatcacaagtgcagagagaacaaagcagcacgaagcaagtatgcgaggagagatccgagtcatgctccggcgccgacaactcccctccgctgacgaagcacgtcgacgcatcggacgacgacgtggacaaggcgtgcgtgagcgattcgagatcggtcttggtctcgagcgagagcacggaggtccagctggccgtggatggggtggacatccgccccatcggcgacccagagtggggcagcttccagcagccggaagcgctgattgccgacgtgcgggaggtctccccggaggcggaaggcagcagcctggatatcccggtggtcaacccggcaccggccaatgatcatatgcagggaggggcaacacatccctgaaggcctggaggtcttggagctgaccattgctttcttgggtggtttgtgattattgaggagactggcagggatttgaatcctctcgagaattacttttgtgtttttctttttgcgctgtttccgggttgtgtctccgttgtatttaagtatgcaactcaataaaaagatgatagcggtttgtcgtgtgattgtaaattattattcacgtcaaaaaaaaaaaaaaaaaagcttatcgattgtttaaacacaataaagtyggamcksgagggggggcccggtacccaat

SEQ ID NO: 67461 - protein, 355 aa, Triticum aestivum
  peptide (1)..(355): Ceres Seq. ID no. 15220057
  misc_feature (32)..(134): Pfam Name: PH domain Pfam Description: PH domain
  misc_feature (9)..(345): Homolog of NCBI NO: 25408106 NR Description: hypothetical protein At2g30880 [imported] -
  misc_feature (131)..(350): Homolog of NCBI NO: 25408106 NR Description: hypothetical protein At2g30880 [imported] -
  misc_feature (104)..(350): Homolog of NCBI NO: 34394393 NR Description: unknown protein [Oryza sativa (japonica
  misc_feature (1)..(350): Homolog of NCBI NO: 30684745 NR Description: expressed protein [Arabidopsis thaliana]
  misc_feature (1)..(350): Homolog of NCBI NO: 34394392 NR Description: unknown protein [Oryza sativa (japonica
  misc_feature (1)..(350): Homolog of NCBI NO: 40538917 NR Description: putative PH domain containing protein
MSTNGSSPRVRDTESSLEKVKRQLSTGSGRYLLQGPLLKRSETLRKWNERWIILDPTSGKMEYKLRRNETAVKGTILFDASSTITLSPVNFQGMPKYDGCCFYIGTPQKKDYFLCAETPGAAKAWVSTLHATQLVLQAHKEAVNSLAGNGSPSTLGTVATAVANANATALEAMKEIDAALKVSMRAALGLGTNNSNVGQLDDLTIMKETLRVKDEELQHLAKDIRARDATIQEIAEKLTETAEAAEAAASAAHTIDEQRRLLCSEIERLKKAMETQMEQSMLKLRQSEEKVISLSKENDQLLKERDAAFQEAYMWRTELGKAREQAVIQEAAIARAEEKVRVSEADAAVRHQGSC

SEQ ID NO: 67462 - protein, 295 aa, Triticum aestivum
  peptide (1)..(295): Ceres Seq. ID no. 15220058
  misc_feature (1)..(74): Pfam Name: PH domain Pfam Description: PH domain
  misc_feature (1)..(285): Homolog of NCBI NO: 25408106 NR Description: hypothetical protein At2g30880 [imported] -
  misc_feature (71)..(290): Homolog of NCBI NO: 25408106 NR Description: hypothetical protein At2g30880 [imported] -
  misc_feature (44)..(290): Homolog of NCBI NO: 34394393 NR Description: unknown protein [Oryza sativa (japonica
  misc_feature (1)..(290): Homolog of NCBI NO: 30684745 NR Description: expressed protein [Arabidopsis thaliana]
  misc_feature (1)..(290): Homolog of NCBI NO: 34394392 NR Description: unknown protein [Oryza sativa (japonica
  misc_feature (1)..(290): Homolog of NCBI NO: 40538917 NR Description: putative PH domain containing protein
MEYKLRRNETAVKGTILFDASSTITLSPVNFQGMPKYDGCCFYIGTPQKKDYFLCAETPGAAKAWVSTLHATQLVLQAHKEAVNSLAGNGSPSTLGTVATAVANANATALEAMKEIDAALKVSMRAALGLGTNNSNVGQLDDLTIMKETLRVKDEELQHLAKDIRARDATIQEIAEKLTETAEAAEAAASAAHTIDEQRRLLCSEIERLKKAMETQMEQSMLKLRQSEEKVISLSKENDQLLKERDAAFQEAYMWRTELGKAREQAVIQEAAIARAEEKVRVSEADAAVRHQGSC

SEQ ID NO: 67463 - protein, 262 aa, Triticum aestivum
  peptide (1)..(262): Ceres Seq. ID no. 15220059
  misc_feature (1)..(252): Homolog of NCBI NO: 25408106 NR Description: hypothetical protein At2g30880 [imported] -
  misc_feature (38)..(257): Homolog of NCBI NO: 25408106 NR Description: hypothetical protein At2g30880 [imported] -
  misc_feature (11)..(257): Homolog of NCBI NO: 34394393 NR Description: unknown protein [Oryza sativa (japonica
  misc_feature (1)..(257): Homolog of NCBI NO: 30684745 NR Description: expressed protein [Arabidopsis thaliana]
  misc_feature (1)..(257): Homolog of NCBI NO: 34394392 NR Description: unknown protein [Oryza sativa (japonica
  misc_feature (1)..(257): Homolog of NCBI NO: 40538917 NR Description: putative PH domain containing protein
MPKYDGCCFYIGTPQKKDYFLCAETPGAAKAWVSTLHATQLVLQAHKEAVNSLAGNGSPSTLGTVATAVANANATALEAMKEIDAALKVSMRAALGLGTNNSNVGQLDDLTIMKETLRVKDEELQHLAKDIRARDATIQEIAEKLTETAEAAEAAASAAHTIDEQRRLLCSEIERLKKAMETQMEQSMLKLRQSEEKVISLSKENDQLLKERDAAFQEAYMWRTELGKAREQAVIQEAAIARAEEKVRVSEADAAVRHQGSC

SEQ ID NO: 67464 - DNA, 1652 bp, Triticum aestivum
  misc_feature (1)..(1652): Ceres Seq. ID no. 13660333
gaacatcctaatcgaaaaaaatgcccccgaacagctgccgcgcaccgccatgccctctgcatcgacggccaccaaccagctccccttcctcctctcacctccccagcagatcacgcggcgagggaacgaagcccaccaccgacaaactcctccttctcttccagcttcccctcctccggcgccggtcctgcggcggccatggggatggtgcgggcggcgtggtttctgctcctgttggcgttgctcgcggcggcggacgcaaggaggcagaagggcggcgagacggcctgcgacaaggggtgggagtgcagcggcagcaggttctgctgcaacgagaccatcaccgactacttcaaggcctaccagttcgaggagctcttcgccaagcgcaacaactccctcgcccacgccgccggcttctgggactacaaggccttcatcaccgccgcggccctctacgagcctcgtgggttcggcaccaccggcggcagggagatgagcatgaaggaggtcgccgccttcctcggccacgtcggcgccaagacctcgtgtggatatagtctagctgacggtggttcattggcttggggtctttgctacaaccatgaaatgagcccaagccagagctactgtgacgacagcaacgaattataccgttgtgctgaaggagttgagtactatggtcgaggcgcccttcctgtttactggaactacaactatggtatcgtgggtaagggtatcaagcaggatctgttgaaccacccagagttattggaacaaaatgccactctagcatttgaagcagcgatctggaggtggatgactccaatgaagaggaagcagccatcagcccatgatgcctttgttggcaactggaaaccaaccaagaaagacactttgtccaagaggtatcctggcttcggtgcgacaatgaacattttgtatggtgatgccatctgtggtaaagggtccattgataatatgaatggcattatatcccactatcaacattatcttgatttgatgggagttggtgctcagcactctggagataacttggattgtgccgaccaagtgccattcaatccatcatcaaagagtcccgactcataaccaagttgcatgtcagatccatgtatattccccctgtacatttgaggtgcagctatcttgcatccgcaacgatagaagtattgtgtgcaattctatatgatagtactccctccgtttttatttagtccgcatattagctttggtcaaagtcaagctttgtaaactttgactaagtttataaacaaaaatattaacatatacaataaaaaatcaataccactagattcattattgaatgtactttcacatcatatagatttgttatggtaaatgtttatatatttttctataaatttggtcaaactttgcaaagtttgacttcggtcaaacctaatatgcagactgaataaaaacggagggagtatttattagtagctctgaggacgactgttgcatttgtgtagtctgtaacctatttatgtaagcccgtaaccttctctcattttgtgtttttgccatgtatattacagcagagaactcgcatttgaacacatgatgacttccttgtaaattatattacttctgttactaaaggtggg

SEQ ID NO: 67465 - protein, 370 aa, Triticum aestivum
  peptide (1)..(370): Ceres Seq. ID no. 15220020
  misc_feature (89)..(361): Homolog of NCBI NO: 7798678 NR Description: class I chitinase [Arabis parishii]
  misc_feature (89)..(361): Homolog of NCBI NO: 7798644 NR Description: class I chitinase [Arabis fecunda]
  misc_feature (89)..(361): Homolog of NCBI NO: 7798670 NR Description: class I chitinase [Arabis microphylla]
  misc_feature (89)..(361): Homolog of NCBI NO: 7798664 NR Description: class I chitinase [Arabis lignifera]
  misc_feature (97)..(361): Homolog of NCBI NO: 17932710 NR Description: putative chitinase [Musa acuminata]
  misc_feature (89)..(361): Homolog of NCBI NO: 7798632 NR Description: class I chitinase [Arabis holboellii]
  misc_feature (93)..(370): Homolog of NCBI NO: 15228911 NR Description: glycosyl hydrolase family 19 (chitinase)
  misc_feature (66)..(368): Homolog of NCBI NO: 32401253 NR Description: class VII chitinase precursor [Gossypium
  misc_feature (79)..(365): Homolog of NCBI NO: 15221283 NR Description: glycosyl hydrolase family 19 (chitinase)
  misc_feature (76)..(370): Homolog of NCBI NO: 27817867 NR Description: OJ1081_B12.16 [Oryza sativa (japonica
EHPNRKKCPRTAAAHRHALCIDGHQPAPLPPLTSPADHAARERSPPPTNSSFSSSFPSSGAGPAAAMGMVRAAWFLLLLALLAAADARRQKGGETACDKGWECSGSRFCCNETITDYFKAYQFEELFAKRNNSLAHAAGFWDYKAFITAAALYEPRGFGTTGGREMSMKEVAAFLGHVGAKTSCGYSLADGGSLAWGLCYNHEMSPSQSYCDDSNELYRCAEGVEYYGRGALPVYWNYNYGIVGKGIKQDLLNHPELLEQNATLAFEAAIWRWMTPMKRKQPSAHDAFVGNWKPTKKDTLSKRYPGFGATMNILYGDAICGKGSIDNMNGIISHYQHYLDLMGVGAQHSGDNLDCADQVPFNPSSKSPDS

SEQ ID NO: 67466 - protein, 304 aa, Triticum aestivum
  peptide (1)..(304): Ceres Seq. ID no. 15220021
  misc_feature (23)..(295): Homolog of NCBI NO: 7798678 NR Description: class I chitinase [Arabis parishii]
  misc_feature (23)..(295): Homolog of NCBI NO: 7798644 NR Description: class I chitinase [Arabis fecunda]
  misc_feature (23)..(295): Homolog of NCBI NO: 7798670 NR Description: class I chitinase [Arabis microphylla]
  misc_feature (23)..(295): Homolog of NCBI NO: 7798664 NR Description: class I chitinase [Arabis lignifera]
  misc_feature (31)..(295): Homolog of NCBI NO: 17932710 NR Description: putative chitinase [Musa acuminata]
  misc_feature (23)..(295): Homolog of NCBI NO: 7798632 NR Description: class I chitinase [Arabis holboellii]
  misc_feature (27)..(304): Homolog of NCBI NO: 15228911 NR Description: glycosyl hydrolase family 19 (chitinase)
  misc_feature (1)..(302): Homolog of NCBI NO: 32401253 NR Description: class VII chitinase precursor [Gossypium
  misc_feature (13)..(299): Homolog of NCBI NO: 15221283 NR Description: glycosyl hydrolase family 19 (chitinase)
  misc_feature (10)..(304): Homolog of NCBI NO: 27817867 NR Description: OJ1081_B12.16 [Oryza sativa (japonica
MGMVRAAWFLLLLALLAAADARRQKGGETACDKGWECSGSRFCCNETITDYFKAYQFEELFAKRNNSLAHAAGFWDYKAFITAAALYEPRGFGTTGGREMSMKEVAAFLGHVGAKTSCGYSLADGGSLAWGLCYNHEMSPSQSYCDDSNELYRCAEGVEYYGRGALPVYWNYNYGIVGKGIKQDLLNHPELLEQNATLAFEAAIWRWMTPMKRKQPSAHDAFVGNWKPTKKDTLSKRYPGFGATMNILYGDAICGKGSIDNMNGIISHYQHYLDLMGVGAQHSGDNLDCADQVPFNPSSKSPDS

SEQ ID NO: 67467 - protein, 302 aa, Triticum aestivum
  peptide (1)..(302): Ceres Seq. ID no. 15220022
  misc_feature (21)..(293): Homolog of NCBI NO: 7798678 NR Description: class I chitinase [Arabis parishii]
  misc_feature (21)..(293): Homolog of NCBI NO: 7798644 NR Description: class I chitinase [Arabis fecunda]
  misc_feature (21)..(293): Homolog of NCBI NO: 7798670 NR Description: class I chitinase [Arabis microphylla]
  misc_feature (21)..(293): Homolog of NCBI NO: 7798664 NR Description: class I chitinase [Arabis lignifera]
  misc_feature (29)..(293): Homolog of NCBI NO: 17932710 NR Description: putative chitinase [Musa acuminata]
  misc_feature (21)..(293): Homolog of NCBI NO: 7798632 NR Description: class I chitinase [Arabis holboellii]
  misc_feature (25)..(302): Homolog of NCBI NO: 15228911 NR Description: glycosyl hydrolase family 19 (chitinase)
  misc_feature (1)..(300): Homolog of NCBI NO: 32401253 NR Description: class VII chitinase precursor [Gossypium
  misc_feature (11)..(297): Homolog of NCBI NO: 15221283 NR Description: glycosyl hydrolase family 19 (chitinase)
  misc_feature (8)..(302): Homolog of NCBI NO: 27817867 NR Description: OJ1081_B12.16 [Oryza sativa (japonica
MVRAAWFLLLLALLAAADARRQKGGETACDKGWECSGSRFCCNETITDYFKAYQFEELFAKRNNSLAHAAGFWDYKAFITAAALYEPRGFGTTGGREMSMKEVAAFLGHVGAKTSCGYSLADGGSLAWGLCYNHEMSPSQSYCDDSNELYRCAEGVEYYGRGALPVYWNYNYGIVGKGIKQDLLNHPELLEQNATLAFEAAIWRWMTPMKRKQPSAHDAFVGNWKPTKKDTLSKRYPGFGATMNILYGDAICGKGSIDNMNGIISHYQHYLDLMGVGAQHSGDNLDCADQVPFNPSSKSPDS

SEQ ID NO: 67468 - DNA, 882 bp, Triticum aestivum
  misc_feature (1)..(882): Ceres Seq. ID no. 13660334
aaaggcaaaccccaagaaaccccaaccggccaccaccaccaccacctcccgtcccgaccccgagacaaacacctcccactcgcggccatgcccccctgccaccgccgctgctgactagccatctgcgccgcgaccggtcaacatctatctcgccggaacatctgaatcaacatggacccggcccaggaggagctcgagcgccgcagccgctacctcagctcgctcgttcgccgcaccaggctcgacgacccgccccagccggagccggagccggagcgagagctcaaggtggagcggaaatcggcggcggagcccagcggcggggagggcaaggccgctaagccggaggccaaggacaacagggaggcggcgaaggtcaaaggggacgccgcgagcggggaggggaggaaggtggcggtgcgggtgcgcgcggcggacatgccgctggcgctgcagcggcgcgcgatctggatcgcccgggaggtcgtcctctccacgccgcgcctcgagagcaagcgcctcgcgctcgcgctcaagaaggaattcgacacgacatacgggcctgcttggcactgcattgtcggcacaagctttggctcctacgtcactcactccttaggaggcttcctgtacttttccgttgacaaggcgtacattcttctcttcagaaccgctgtcgagccactgagtaaaccgtgatgaggcctggaacctatcttctcacacacaagtgtagatttagcgcaaatgtgtaatttaaactgctgttttaggagctcgacggtagcaagtgtaagcagtggagaaggatcacctctccgcatacagaagtgtagcaaacatgcctctatgacctttaagtatctacgtaagctgctgctg

SEQ ID NO: 67469 - protein, 175 aa, Triticum aestivum
  peptide (1)..(175): Ceres Seq. ID no. 13660335
  misc_feature (83)..(168): Pfam Name: Dynein light chain type 1 Pfam Description: Dynein light chain type 1
  misc_feature (74)..(167): Homolog of NCBI NO: 15234756 NR Description: dynein light chain like protein [Arabidopsis
  misc_feature (85)..(167): Homolog of NCBI NO: 2811014 NR Description: DYNEIN LIGHT CHAIN LC6, FLAGELLAR OUTER ARM
  misc_feature (85)..(167): Homolog of NCBI NO: 5305389 NR Description: dynein light chain 2 [Schistosoma japonicum]
  misc_feature (53)..(167): Homolog of NCBI NO: 28466885 NR Description: At4g15930 [Arabidopsis thaliana]
  misc_feature (80)..(166): Homolog of NCBI NO: 28829295 NR Description: similar to Anthocidaris crassispina (Sea urchin).
  misc_feature (50)..(167): Homolog of NCBI NO: 34902908 NR Description: unnamed protein product [Oryza sativa (japonica
  misc_feature (8)..(169): Homolog of NCBI NO: 34913978 NR Description: dynein light chain - like protein
  misc_feature (35)..(173): Homolog of NCBI NO: 15241269 NR Description: dynein light chain - like protein [Arabidopsis
  misc_feature (83)..(174): Homolog of NCBI NO: 15220678 NR Description: dynein light subunit lc6, flagellar outer arm
  misc_feature (1)..(173): Homolog of NCBI NO: 38567715 NR Description: B1358B12.13 [Oryza sativa (japonica
MDPAQEELERRSRYLSSLVRRTRLDDPPQPEPEPERELKVERKSAAEPSGGEGKAAKPEAKDNREAAKVKGDAASGEGRKVAVRVRAADMPLALQRRAIWIAREVVLSTPRLESKRLALALKKEFDTTYGPAWHCIVGTSFGSYVTHSLGGFLYFSVDKAYILLFRTAVEPLSKP

SEQ ID NO: 67470 - protein, 112 aa, Triticum aestivum
  peptide (1)..(112): Ceres Seq. ID no. 13660336
  misc_feature (10)..(107): Pfam Name: Caudal like protein activation region Pfam Description: Caudal like protein activation region
  misc_feature (82)..(112): Homolog of NCBI NO: 7024451 NR Description: glycine-rich RNA-binding protein [Citrus unshiu]
  misc_feature (7)..(112): Homolog of NCBI NO: 29829093 NR Description: putative translation initiation factor IF-2
  misc_feature (4)..(112): Homolog of NCBI NO: 19553189 NR Description: translation initiation factor 2
  misc_feature (11)..(112): Homolog of NCBI NO: 3915138 NR Description: TonB protein
  misc_feature (72)..(112): Homolog of NCBI NO: 1076731 NR Description: RNA binding protein - barley
  misc_feature (4)..(112): Homolog of NCBI NO: 9790179 NR Description: proline-rich protein MP5; proline-rich protein
  misc_feature (10)..(112): Homolog of NCBI NO: 25028434 NR Description: putative translation initiation factor IF-2
  misc_feature (4)..(112): Homolog of NCBI NO: 15827818 NR Description: initiation factor IF-2 [Mycobacterium leprae]
  misc_feature (1)..(112): Homolog of NCBI NO: 23019271 NR Description: hypothetical protein [Thermobifida fusca]
  misc_feature (3)..(112): Homolog of NCBI NO: 15609976 NR Description: infB [Mycobacterium tuberculosis H37Rv]
RQTPRNPNRPPPPPPPVPTPRQTPPTRGHAPLPPPLLTSHLRRDRSTSISPEHLNQHGPGPGGARAPQPLPQLARSPHQARRPAPAGAGAGARAQGGAEIGGGAQRRGGQGR

SEQ ID NO: 67471 - DNA, 996 bp, Triticum aestivum
  misc_feature (1)..(996): Ceres Seq. ID no. 12780822
atacttctctagtttatactaccccggatccccttgctttgcgcgcgctagtaggagtacgccgcctgccgccatctccgttagactagtcgccagcgccatatggaggactacggcggcgtggcgagcctggtggcgtccggggtggtgttgtggtcgacggcgttcctgctgctgcgggcgctgctccccaagcgctcctacgacttctgcaaccgcgcggtctccaccatgcacgccgtcgccggcgtcgccctcggctgcctctccgtgcaggactgggcctcccccgtctcccccgtcgcctcaccctcctcgccaagccagatgagggcgctggcggtgacgctgtcctacatgatctacgacggggcgtgctgccacctgagcggcgacgcgcggttggacaacgccttgcaccacctcatcagcatcgtcggcctcgccgccggcctcgcctaccagaggtgtgggacggagctggtggcgtgcctgctcgtcacggagatatccagcccgctgctgcacctcagggagatgctcaaggagctcggcgtcaaggacacggacctcaacctcctcgtcgacatcctgttcgcggtgaccttctcggtggcacggatggtttgcgggacgtacgtcacctaccgcactgtcacggctgacaaccccatcctcatcaaggcgatggcgacgagcttgctgctggtgagcgcctactggttcttgaggatcctcaggatggtcaggcacaagattgggaagaagaggctggcgtccaaagccgccggcaaggaatctatgtgatgccacaagtggtgtctcgccgcaattattgttgaaaatgcacgttatgtagtagtactactatctagcgcattaatcgtgtggtgggtaaaggatgatgtcccaagcatgagatgcatgtattctggtcattttcattttattaatgtgcatgaactgttaatgtcacaagcatgagctgtttcgctc

SEQ ID NO: 67472 - protein, 234 aa, Triticum aestivum
  peptide (1)..(234): Ceres Seq. ID no. 12780823
  misc_feature (114)..(163): Homolog of NCBI NO: 25405881 NR Description: protein F27F5.9 [imported] - Arabidopsis thaliana
  misc_feature (10)..(83): Homolog of NCBI NO: 25405881 NR Description: protein F27F5.9 [imported] - Arabidopsis thaliana
  misc_feature (18)..(232): Homolog of NCBI NO: 34535216 NR Description: unnamed protein product [Homo sapiens]
  misc_feature (18)..(232): Homolog of NCBI NO: 27661880 NR Description: hypothetical protein XP_236191 [Rattus norvegicus]
  misc_feature (2)..(163): Homolog of NCBI NO: 25518603 NR Description: hypothetical protein T32G9.28 - Arabidopsis
  misc_feature (2)..(206): Homolog of NCBI NO: 15219511 NR Description: hypothetical protein; protein id: At1g35170.1
  misc_feature (10)..(227): Homolog of NCBI NO: 22330031 NR Description: hypothetical protein
  misc_feature (2)..(227): Homolog of NCBI NO: 30693154 NR Description: expressed protein [Arabidopsis thaliana]
  misc_feature (11)..(230): Homolog of NCBI NO: 34903030 NR Description: unnamed protein product [Oryza sativa (japonica
MEDYGGVASLVASGVVLWSTAFLLLRALLPKRSYDFCNRAVSTMHAVAGVALGCLSVQDWASPVSPVASPSSPSQMRALAVTLSYMIYDGACCHLSGDARLDNALHHLISIVGLAAGLAYQRCGTELVACLLVTEISSPLLHLREMLKELGVKDTDLNLLVDILFAVTFSVARMVCGTYVTYRTVTADNPILIKAMATSLLLVSAYWFLRILRMVRHKIGKKRLASKAAGKESM

SEQ ID NO: 67473 - protein, 191 aa, Triticum aestivum
  peptide (1)..(191): Ceres Seq. ID no. 12780824
  misc_feature (71)..(120): Homolog of NCBI NO: 25405881 NR Description: protein F27F5.9 [imported] - Arabidopsis thaliana
  misc_feature (1)..(40): Homolog of NCBI NO: 25405881 NR Description: protein F27F5.9 [imported] - Arabidopsis thaliana
  misc_feature (1)..(189): Homolog of NCBI NO: 34535216 NR Description: unnamed protein product [Homo sapiens]
  misc_feature (1)..(189): Homolog of NCBI NO: 27661880 NR Description: hypothetical protein XP_236191 [Rattus norvegicus]
  misc_feature (1)..(120): Homolog of NCBI NO: 25518603 NR Description: hypothetical protein T32G9.28 - Arabidopsis
  misc_feature (1)..(163): Homolog of NCBI NO: 15219511 NR Description: hypothetical protein; protein id: At1g35170.1
  misc_feature (1)..(184): Homolog of NCBI NO: 22330031 NR Description: hypothetical protein
  misc_feature (1)..(184): Homolog of NCBI NO: 30693154 NR Description: expressed protein [Arabidopsis thaliana]
  misc_feature (1)..(187): Homolog of NCBI NO: 34903030 NR Description: unnamed protein product [Oryza sativa (japonica
MHAVAGVALGCLSVQDWASPVSPVASPSSPSQMRALAVTLSYMIYDGACCHLSGDARLDNALHHLISIVGLAAGLAYQRCGTELVACLLVTEISSPLLHLREMLKELGVKDTDLNLLVDILFAVTFSVARMVCGTYVTYRTVTADNPILIKAMATSLLLVSAYWFLRILRMVRHKIGKKRLASKAAGKESM

SEQ ID NO: 67474 - protein, 159 aa, Triticum aestivum
  peptide (1)..(159): Ceres Seq. ID no. 12780825
  misc_feature (39)..(88): Homolog of NCBI NO: 25405881 NR Description: protein F27F5.9 [imported] - Arabidopsis thaliana
  misc_feature (1)..(157): Homolog of NCBI NO: 34535216 NR Description: unnamed protein product [Homo sapiens]
  misc_feature (1)..(157): Homolog of NCBI NO: 27661880 NR Description: hypothetical protein XP_236191 [Rattus norvegicus]
  misc_feature (1)..(88): Homolog of NCBI NO: 25518603 NR Description: hypothetical protein T32G9.28 - Arabidopsis
  misc_feature (1)..(131): Homolog of NCBI NO: 15219511 NR Description: hypothetical protein; protein id: At1g35170.1
  misc_feature (1)..(152): Homolog of NCBI NO: 22330031 NR Description: hypothetical protein
  misc_feature (1)..(152): Homolog of NCBI NO: 30693154 NR Description: expressed protein [Arabidopsis thaliana]
  misc_feature (1)..(155): Homolog of NCBI NO: 34903030 NR Description: unnamed protein product [Oryza sativa (japonica
MRALAVTLSYMIYDGACCHLSGDARLDNALHHLISIVGLAAGLAYQRCGTELVACLLVTEISSPLLHLREMLKELGVKDTDLNLLVDILFAVTFSVARMVCGTYVTYRTVTADNPILIKAMATSLLLVSAYWFLRILRMVRHKIGKKRLASKAAGKESM

SEQ ID NO: 67475 - DNA, 2112 bp, Triticum aestivum
  misc_feature (1)..(2112): Ceres Seq. ID no. 13660894
aaaaaagaactcattgccacagttgaatgaatgccgccgccactttcactgctccacgcgcgcaagctccacgcgacgctcctcaagtccggtcaccatggcgacgcctaccgctgcaacctcctcctccgcgcctacacccgcggcggcgcactggccgacgcccgccacctactgbacctcatgccgtccccgaccctcgtctcctacaacaccgtcctctccggctacgcctcctcctcgacccccggcctccttgacgccgccctgcacctgctagacgggatgcccgaaagggactcctggtcctggaacaccgccatatctggccttgcacgcgccggccgggctcgcgacgcgctgcgaaggttcctgcagatgacgcgcacccccgtggcgccggacgctttcacgtactccatcgtctcgccgtgctgtggcgttgacctaggatccgcgggtcaggtccacgcgcgggctctcaaggccggggtgttcgcggacgcctgcgtcggcactagtttcatcaagctgtacgcagagctgggcctgatggaggatgcacgcaaggtgttcgattgtatgccgctgagagatctagtgtcatggaatgtgctcctggactgcggtgtgaggtccggcgaagcaggatcatgtatgaaggagtttcttagcatgaccggctgcggggttcggcctgatgagttcacctttgccactgtcttgaatggtttggctgagcggtctgcaggtctagaggcaatgcaggtacactcagttattctaaaatctggatatcttagggatcttttcctatgcaattgtttgctggacgtgtacgggagatgcggttacgttgacttggccaagaagctgtttgatgctatgcttgagaaggatgttgtgtcgtggaccgctgtgatttcagggcttgcagcctgcggttaccaggctgatgccttcgacatattttgccagatgctgaaagctgcaatgctgcccaattcattcacatttgggagcatagtaagctcatgtgcatatgtgaatgaccttggcagtgggaggcagtgtcatgctcttgctgtcaagcatgggttagaacttgttcctatagttgccagctgttttatcgatatgtactcaaagtgcgccaagatggatgatgcaataagaatgtttgagatcatgccacagagagacattgtatcttggaatgcaatgatatgtggattagctcagaatggtcaatcagcgagatctcttgagctgtatgatgaaatgatgcgacttcattgtgaatcggtcaccccaaactcagtaacttttgtgagtgtcctgagcgcatgcagccatgctggtaatgtccaaaaaggttgcagctactttactcaaatggttaatgacttccacatcgrgaaccaatttcagagcactacacttgccttatcgatctctttgcgcgagctggatggttagatgaagcagaagagatcatttcaaacttacctttcaaacatgatgctgttatcctgggcaccatgcttaatggctgcagaaaatatggtaaccttgacatggctaagcgctttgctaagaggcttctagtgaataatccagataatgcatcggccatttttctactctcaaatatgtacattgcaaatgaagaatggagtaatgcctcggagctgagggatgctgcgatttcaagtggaactcataaagtcatggggaatagctggattgatgttggtggtcatgtacaatgtttcagagcgggttctagtccagatgcataattcgaacatatatatgatgttctgcaacaacttcagttgatgatggtagatgctgacaagctggtcacacagattaactccttatgtacttatattaacagtgagtagtgacaactatgctttattttgatgagtttcaaattcaaattaagtagtatgtgctacttgggttgtttttgcaagaccgatttggatagtatttatatgcgagaaggttagttatttatgcaatgcaacctactacgtcagtcaaaahaaaaaaaaaaaaagcttatcgataccgwcgacctcgagggggggcccggtaccc

SEQ ID NO: 67476 - protein, 482 aa, Triticum aestivum
  peptide (1)..(482): Ceres Seq. ID no. 15220063
  misc_feature (362)..(396): Pfam Name: PPR repeat Pfam Description: PPR repeat
  misc_feature (82)..(482): Homolog of NCBI NO: 15234095 NR Description: pentatricopeptide (PPR) repeat-containing protein
  misc_feature (11)..(66): Homolog of NCBI NO: 34915012 NR Description: P0458A05.10 [Oryza sativa (japonica
  misc_feature (74)..(462): Homolog of NCBI NO: 34915012 NR Description: P0458A05.10 [Oryza sativa (japonica
  misc_feature (12)..(86): Homolog of NCBI NO: 38423978 NR Description: PPR-repeat protein-like [Oryza sativa (japonica
  misc_feature (11)..(84): Homolog of NCBI NO: 15226150 NR Description: pentatricopeptide (PPR) repeat-containing protein
  misc_feature (74)..(482): Homolog of NCBI NO: 15226150 NR Description: pentatricopeptide (PPR) repeat-containing protein
  misc_feature (13)..(82): Homolog of NCBI NO: 38423978 NR Description: PPR-repeat protein-like [Oryza sativa (japonica
  misc_feature (61)..(462): Homolog of NCBI NO: 38423978 NR Description: PPR-repeat protein-like [Oryza sativa (japonica
  misc_feature (7)..(65): Homolog of NCBI NO: 15235115 NR Description: pentatricopeptide (PPR) repeat-containing protein
  misc_feature (29)..(457): Homolog of NCBI NO: 15235115 NR Description: pentatricopeptide (PPR) repeat-containing protein
  misc_feature (50)..(50): Xaa is any aa, unknown or other
  misc_feature (463)..(463): Xaa is any aa, unknown or other
MPPPLSLLHARKLHATLLKSGHHGDAYRCNLLLRAYTRGGALADARHLLXLMPSPTLVSYNTVLSGYASSSTPGLLDAALHLLDGMPERDSWSWNTAISGLARAGRARDALRRFLQMTRTPVAPDAFTYSIVSPCCGVDLGSAGQVHARALKAGVFADACVGTSFIKLYAELGLMEDARKVFDCMPLRDLVSWNVLLDCGVRSGEAGSCMKEFLSMTGCGVRPDEFTFATVLNGLAERSAGLEAMQVHSVILKSGYLRDLFLCNCLLDVYGRCGYVDLAKKLFDAMLEKDVVSWTAVISGLAACGYQADAFDIFCQMLKAAMLPNSFTFGSIVSSCAYVNDLGSGRQCHALAVKHGLELVPIVASCFIDMYSKCAKMDDAIRMFEIMPQRDIVSWNAMICGLAQNGQSARSLELYDEMMRLHCESVTPNSVTFVSVLSACSHAGNVQKGCSYFTQMVNDFHIXNQFQSTTLALSISLRELDG

SEQ ID NO: 67477 - protein, 431 aa, Triticum aestivum
  peptide (1)..(431): Ceres Seq. ID no. 15220064
  misc_feature (311)..(345): Pfam Name: PPR repeat Pfam Description: PPR repeat
  misc_feature (31)..(431): Homolog of NCBI NO: 15234095 NR Description: pentatricopeptide (PPR) repeat-containing protein
  misc_feature (1)..(15): Homolog of NCBI NO: 34915012 NR Description: P0458A05.10 [Oryza sativa (japonica
  misc_feature (23)..(411): Homolog of NCBI NO: 34915012 NR Description: P0458A05.10 [Oryza sativa (japonica
  misc_feature (1)..(35): Homolog of NCBI NO: 38423978 NR Description: PPR-repeat protein-like [Oryza sativa (japonica
  misc_feature (1)..(33): Homolog of NCBI NO: 15226150 NR Description: pentatricopeptide (PPR) repeat-containing protein
  misc_feature (23)..(431): Homolog of NCBI NO: 15226150 NR Description: pentatricopeptide (PPR) repeat-containing protein
  misc_feature (1)..(31): Homolog of NCBI NO: 38423978 NR Description: PPR-repeat protein-like [Oryza sativa (japonica
  misc_feature (10)..(411): Homolog of NCBI NO: 38423978 NR Description: PPR-repeat protein-like [Oryza sativa (japonica
  misc_feature (1)..(14): Homolog of NCBI NO: 15235115 NR Description: pentatricopeptide (PPR) repeat-containing protein
  misc_feature (1)..(406): Homolog of NCBI NO: 15235115 NR Description: pentatricopeptide (PPR) repeat-containing protein
  misc_feature (412)..(412): Xaa is any aa, unknown or other
MPSPTLVSYNTVLSGYASSSTPGLLDAALHLLDGMPERDSWSWNTAISGLARAGRARDALRRFLQMTRTPVAPDAFTYSIVSPCCGVDLGSAGQVHARALKAGVFADACVGTSFIKLYAELGLMEDARKVFDCMPLRDLVSWNVLLDCGVRSGEAGSCMKEFLSMTGCGVRPDEFTFATVLNGLAERSAGLEAMQVHSVILKSGYLRDLFLCNCLLDVYGRCGYVDLAKKLFDAMLEKDVVSWTAVISGLAACGYQADAFDIFCQMLKAAMLPNSFTFGSIVSSCAYVNDLGSGRQCHALAVKHGLELVPIVASCFIDMYSKCAKMDDAIRMFEIMPQRDIVSWNAMICGLAQNGQSARSLELYDEMMRLHCESVTPNSVTFVSVLSACSHAGNVQKGCSYFTQMVNDFHIXNQFQSTTLALSISLRELDG

SEQ ID NO: 67478 - protein, 397 aa, Triticum aestivum
  peptide (1)..(397): Ceres Seq. ID no. 15220065
  misc_feature (277)..(311): Pfam Name: PPR repeat Pfam Description: PPR repeat
  misc_feature (1)..(382): Homolog of NCBI NO: 37536800 NR Description: putative PPR-repeat protein
  misc_feature (1)..(371): Homolog of NCBI NO: 33146592 NR Description: putative pentatricopeptide (PPR)
  misc_feature (1)..(377): Homolog of NCBI NO: 15228590 NR Description: pentatricopeptide (PPR) repeat-containing protein
  misc_feature (1)..(397): Homolog of NCBI NO: 34914806 NR Description: B1045D11.13 [Oryza sativa (japonica
  misc_feature (1)..(379): Homolog of NCBI NO: 38423978 NR Description: PPR-repeat protein-like [Oryza sativa (japonica
  misc_feature (1)..(397): Homolog of NCBI NO: 15234095 NR Description: pentatricopeptide (PPR) repeat-containing protein
  misc_feature (1)..(377): Homolog of NCBI NO: 34915012 NR Description: P0458A05.10 [Oryza sativa (japonica
  misc_feature (1)..(397): Homolog of NCBI NO: 15226150 NR Description: pentatricopeptide (PPR) repeat-containing protein
  misc_feature (1)..(377): Homolog of NCBI NO: 38423978 NR Description: PPR-repeat protein-like [Oryza sativa (japonica
  misc_feature (1)..(372): Homolog of NCBI NO: 15235115 NR Description: pentatricopeptide (PPR) repeat-containing protein
  misc_feature (378)..(378): Xaa is any aa, unknown or other
MPERDSWSWNTAISGLARAGRARDALRRFLQMTRTPVAPDAFTYSIVSPCCGVDLGSAGQVHARALKAGVFADACVGTSFIKLYAELGLMEDARKVFDCMPLRDLVSWNVLLDCGVRSGEAGSCMKEFLSMTGCGVRPDEFTFATVLNGLAERSAGLEAMQVHSVILKSGYLRDLFLCNCLLDVYGRCGYVDLAKKLFDAMLEKDVVSWTAVISGLAACGYQADAFDIFCQMLKAAMLPNSFTFGSIVSSCAYVNDLGSGRQCHALAVKHGLELVPIVASCFIDMYSKCAKMDDAIRMFEIMPQRDIVSWNAMICGLAQNGQSARSLELYDEMMRLHCESVTPNSVTFVSVLSACSHAGNVQKGCSYFTQMVNDFHIXNQFQSTTLALSISLRELDG

SEQ ID NO: 67479 - DNA, 488 bp, Triticum aestivum
  misc_feature (1)..(488): Ceres Seq. ID no. 13660895
actgacaacttattaattcggccacatcgccgcctgtcccagccagccagtccaacccgcccgccgtccaacaccccgcgcgcacaccaccgccgccgccgtcgaccccttcctccctcgcacccatggcgttcgcactcaaggcctccgcctcccccgccctcgccgctgcctcctcggcggcgtcgtccccctccttctcggccgcctccgcggcgccgaggggccgcgccgccgcggcgaggagggtctcgctccgcggggccgcgcaccccgttgccgccatcagggcgtccgccaccgccngtggccggggacaagcgcaccatctccggcacgttcaccaacctcaaggagcaggacaagatcgcgttcatcccgttcatcgtcgccggcgaccccgacttggcgaccacggcgaaggcgctaaaggttctcgatgcgtgtggttctgatgtgatcgaattgggcgtgccgtactctgatcc

SEQ ID NO: 67480 - protein, 162 aa, Triticum aestivum
  peptide (1)..(162): Ceres Seq. ID no. 13660896
  misc_feature (17)..(105): Pfam Name: Formin Homology 2 Domain Pfam Description: Formin Homology 2 Domain
  misc_feature (67)..(161): Homolog of NCBI NO: 34897216 NR Description: putative indole-3-glycerol phosphate lyase
  misc_feature (67)..(161): Homolog of NCBI NO: 34897218 NR Description: putative indole-3-glycerol phosphate lyase
  misc_feature (110)..(161): Homolog of NCBI NO: 15235430 NR Description: tryptophan synthase, alpha subunit (TSA1),
  misc_feature (104)..(161): Homolog of NCBI NO: 11993328 NR Description: putative tryptophan synthase alpha [Zea mays]
  misc_feature (104)..(161): Homolog of NCBI NO: 11993326 NR Description: putative tryptophan synthase alpha [Zea mays]
  misc_feature (74)..(161): Homolog of NCBI NO: 21593559 NR Description: tryptophan synthase alpha chain [Arabidopsis
  misc_feature (74)..(161): Homolog of NCBI NO: 18410104 NR Description: tryptophan synthase, alpha subunit (TSA1)
  misc_feature (103)..(161): Homolog of NCBI NO: 34897224 NR Description: putative indole-3-glycerol phosphate lyase
  misc_feature (44)..(161): Homolog of NCBI NO: 11993325 NR Description: indole-3-glycerol phosphate lyase [Zea mays]
  misc_feature (76)..(161): Homolog of NCBI NO: 34393530 NR Description: putative tryptophan synthase alpha chain
  misc_feature (102)..(102): Xaa is any aa, unknown or other
TDNLLIRPHRRLSQPASPTRPPSNTPRAHHRRRRRPLPPSHPWRSHSRPPPPPPSPLPPRRRRPPPSRPPPRRRGAAPPRRGGSRSAGPRTPLPPSGRPPPXVAGDKRTISGTFTNLKEQDKIAFIPFIVAGDPDLATTAKALKVLDACGSDVIELGVPYSD

SEQ ID NO: 67481 - protein, 109 aa, Triticum aestivum
  peptide (1)..(109): Ceres Seq. ID no. 13660897
  misc_feature (1)..(65): Homolog of NCBI NO: 34393530 NR Description: putative tryptophan synthase alpha chain
  misc_feature (61)..(61): Xaa is any aa, unknown or other
MAFALKASASPALAAASSAASSPSFSAASAAPRGRAAAARRVSLRGAAHPVAAIRASATAXGRGQAHHLRHVHQPQGAGQDRVHPVHRRRRPRLGDHGEGAKGSRCVWF

SEQ ID NO: 67482 - DNA, 1892 bp, Triticum aestivum
  misc_feature (1)..(1892): Ceres Seq. ID no. 13660898
ctagctcagatcccccatcgcacccctcctccctcatccccatctcctcgccgccgccgccacctcctccccgtcctctgcaccactcctcgtcgccaacctcgccgccgccacctcttccccgtcccctgcaccactccctgatccctcctccggccccatccccggccatccccggccatccgtcccagtcgctgctctctctcggttcagtgagatgggatccactcccgcagccgccgctccaccctcaccgtcaacgacccatgccgccgccgcacaccaccgcgccctcccctcaccttggccccaagtcgggcagtgcgaggcggcgcttccagaccgcgatggccgcaaccttgcccactccgatctggatccatggtgcactccttcctccctctggatcgatggccgcagcctcgccgatggatccagcgcctgccggagacgagggctgccagatccgcgacctgggacgctcctcctgtaggatacgggagcagcacaccgcaccctgcagtcgtcggtccgggacgagcgcagcagctcgaggaagccggcgacaaacgccggcgctcctctgctccatcgacctggacggctgctactccgccaaagacgccgcctacaggaggtgctctactcttgcgcatgtctggtggcgtctccggcgcagtggtacttcttgaggtgactggcgtgacggcggctgtgtatggcggtgaccacaagctctccggtccggcttgtggggattgtcagcggcaaggcagagcggaacacggacgtgtccttcacgctcgacgacggcaccggccgtatcgacttcatcagatgcctggagcagaaggtgattccataatgcaaggtggctgactaggcggtgctcatcaacgcctactgcccctctcgccccctaaagcgcaactacatgtatgcttatacttccagccaaactcaacaacctcatcgacggtccgtgctgctgcctcccacaagtgttgatgtatgtagagaagctggtgagttgatgtgtagcttcatttgcctaatataagtgtaatctaactgctcagagctcaagataacctgtgatatgacatgctacggtactaattggaacatttctgatgcctgggagccacccgtccttagtttctgctttggttactcgctgtgctttgtgattaagtgagctgttgtaatctccgtactagcttacaagttggaatgcaaaattgcttgtgtcaatgctatgtgtagttgtgtcgtgtgtactactttgaaacgtcggtctatggttgtagaagctctactttatgctaatacttgcttggtccttcatatcaaagcttgcatgtactgtagaagctctactttatgctaatacttgcttgtgtaacatttttcatggcatacttctaaatggacaagtacgtgcgacttccagcgtcaacgatgatgcggaccatatgttcaactgcagccccatccattgcatcgacacaaagatgttttgcatcagcctgtcattgctaagggagaagcgggacttggagaggaaatctttccattaagcagattacatgtttggttgctgtgaagtaccagataggctagttctatttttttcacgtcctggagtatttcagcagcgccatgcaaatgcattagcgttaggtttctgattcaccttttgtaaaaacttagttagcccgcagtcagtcagtagtagctcagccagccagccagcctcaaatagtattgctggaatgaatgcttgtaatataataacattgcacgttgctttgaaaatgtatgagaactgggctaggcctaagataacttgtggtgtgatgtgttgtaatgtcaatggcataatatttttt

SEQ ID NO: 67483 - protein, 229 aa, Triticum aestivum
  peptide (1)..(229): Ceres Seq. ID no. 13660899
  misc_feature (4)..(147): Pfam Name: Extensin-like region Pfam Description: Extensin-like region
  misc_feature (4)..(147): Homolog of NCBI NO: 99861 NR Description: extensin - almond
  misc_feature (2)..(145): Homolog of NCBI NO: 7488674 NR Description: extensin homolog HRGP2 - soybean (fragment)
  misc_feature (2)..(147): Homolog of NCBI NO: 6523547 NR Description: hydroxyproline-rich glycoprotein DZ-HRGP
  misc_feature (13)..(150): Homolog of NCBI NO: 30387315 NR Description: unknown [Choristoneura fumiferana MNPV]
  misc_feature (1)..(145): Homolog of NCBI NO: 99861 NR Description: extensin - almond
  misc_feature (2)..(133): Homolog of NCBI NO: 3204132 NR Description: extensin [Cicer arietinum]
  misc_feature (2)..(175): Homolog of NCBI NO: 15242969 NR Description: formin homology 2 (FH2) domain-containing protein
  misc_feature (4)..(147): Homolog of NCBI NO: 15240851 NR Description: expressed protein [Arabidopsis thaliana]
  misc_feature (4)..(158): Homolog of NCBI NO: 39586348 NR Description: Hypothetical protein CBG21646 [Caenorhabditis
  misc_feature (2)..(152): Homolog of NCBI NO: 15240851 NR Description: expressed protein [Arabidopsis thaliana]
SSDPPSHPSSLIPISSPPPPPPPRPLHHSSSPTSPPPPLPRPLHHSLIPPPAPSPAIPGHPSQSLLSLGSVRWDPLPQPPLHPHRQRPMPPPHTTAPSPHLGPKSGSARRRFQTAMAATLPTPIWIHGALLPPSGSMAAASPMDPAPAGDEGCQIRDLGRSSCRIREQHTAPCSRRSGTSAAARGSRRQTPALLCSIDLDGCYSAKDAAYRRCSTLAHVWWRLRRSGTS

SEQ ID NO: 67484 - protein, 165 aa, Triticum aestivum
  peptide (1)..(165): Ceres Seq. ID no. 13660900
MVHSFLPLDRWPQPRRWIQRLPETRAARSATWDAPPVGYGSSTPHPAVVGPGRAQQLEEAGDKRRRSSAPSTWTAATPPKTPPTGGALLLRMSGGVSGAVVLLEVTGVTAAVYGGDHKLSGPACGDCQRQGRAEHGRVLHARRRHRPYRLHQMPGAEGDSIMQGG

SEQ ID NO: 67485 - protein, 141 aa, Triticum aestivum
  peptide (1)..(141): Ceres Seq. ID no. 13660901
  misc_feature (1)..(59): Pfam Name: Extensin-like region Pfam Description: Extensin-like region
  misc_feature (1)..(59): Homolog of NCBI NO: 99861 NR Description: extensin - almond
  misc_feature (1)..(57): Homolog of NCBI NO: 7488674 NR Description: extensin homolog HRGP2 - soybean (fragment)
  misc_feature (1)..(59): Homolog of NCBI NO: 6523547 NR Description: hydroxyproline-rich glycoprotein DZ-HRGP
  misc_feature (1)..(62): Homolog of NCBI NO: 30387315 NR Description: unknown [Choristoneura fumiferana MNPV]
  misc_feature (1)..(57): Homolog of NCBI NO: 99861 NR Description: extensin - almond
  misc_feature (1)..(45): Homolog of NCBI NO: 3204132 NR Description: extensin [Cicer arietinum]
  misc_feature (1)..(87): Homolog of NCBI NO: 15242969 NR Description: formin homology 2 (FH2) domain-containing protein
  misc_feature (1)..(59): Homolog of NCBI NO: 15240851 NR Description: expressed protein [Arabidopsis thaliana]
  misc_feature (1)..(70): Homolog of NCBI NO: 39586348 NR Description: Hypothetical protein CBG21646 [Caenorhabditis
  misc_feature (1)..(64): Homolog of NCBI NO: 15240851 NR Description: expressed protein [Arabidopsis thaliana]
MPPPHTTAPSPHLGPKSGSARRRFQTAMAATLPTPIWIHGALLPPSGSMAAASPMDPAPAGDEGCQIRDLGRSSCRIREQHTAPCSRRSGTSAAARGSRRQTPALLCSIDLDGCYSAKDAAYRRCSTLAHVWWRLRRSGTS

SEQ ID NO: 67486 - DNA, 1758 bp, Triticum aestivum
  misc_feature (1)..(1758): Ceres Seq. ID no. 14303079
acacgacgcctctctcccgttcacccgtcccgattccggatcactccctctcctctcctctcttctccactcccccgccgagatatttcacgcggcccgcccgccatgtcgctgctcgccgtcgtcaccagccgcgccgcgcccgtgcgcccgctccgcgcctcggcggcctcgggagaggcggcggcggccgccgcggaccagccgggggagcggaggccggtcaagataatactgcccaagaagaagccgcagaagtggtccacggggatggagccggggtcgtacggcggcggcccgaccaccatcaagccgcgcaagtactggatggggaaggaggaccgcgaccccattggcaacaccgacgacttcatctggaacaagaacttcctcccccacatggagcgcgtcatcgccaacggcggtacggacacgcccgccaccatcccccgcgtcacgccggcggacgaggactcagggtttctaagcttcaaccgcgcaatggaccttgacagtgtggatgttgatctgagcaaggagcttatggcaccggccaagtcaatcttgcagacgcagctcaaggctgcccgccgtggtcgatccactagcgttgaggctgtcaatagacccacctacattagatggaagctagctccgactcgacgggagcaggagcaatgggaccgagcgaccagggcaaccaccggtggcattgatgtcatactaagggagtcgcagcagaaagtgcagctgaaaggggaccctaaggtggtggcagctgaggccagagagcaatacctgaagttgaaagaaaggttgcagctgcttactttaggtattggtggcgtcggggtggtttctgcttatgtttcatacactcctgaaattgctgcgagctttagtgcagggctgattggatctctggtgtatctccgcatgcttggaaccagtgtggattctttagcgggtggaactaaagcagctgccaagggcgctgcggcacagccaagattgcttattccaatggttcttgtgatgatgtacaatcgatggaatgcgtaagtagatcaagtcttttaaaatacttcctctgcctcttgaactgcaaaaacgtcttatatttagaggcagagggagtattttctgctgaaatattttcgtaatatgtcaaacaaacaaaaaaaaacgtacatgcatgtttgcctttgctttttctgatgcaggatactggttccagagtacggcttcatgcacctggagttgatacccatgctccttgggttctttacctacaagattgctatgtttactcaagcgattcaggaatcagtacctgatgctggaaaccgcgaagtttgaacactgttttggctaatagaaaaacaaagagaaggtcttattaaaggttttagaagagtctaatctggggcctggagatgccgccaggtacgtagatgagatgcacgctgaggctgaggatactgtctgaacatattaccaacattccgcggagaaagtttactttgttgactgtacaaaagggagttggccaacacaaattcaagttccgtgtagtgtacacctttgaacttttggtgcactgaccccgactcctatggttgagctggcatctaacattatttacgcaaggaggtcggcaggattcggatcagtacagaatgtaaatagcgcgagctgtcaatatactagctcgggaagctctatattttacaaagtgctaaaaaaatgatatattac

SEQ ID NO: 67487 - protein, 353 aa, Triticum aestivum
  peptide (1)..(353): Ceres Seq. ID no. 14303080
  misc_feature (236)..(350): Homolog of NCBI NO: 33863740 NR Description: possible H+-transporting ATP synthase
  misc_feature (265)..(351): Homolog of NCBI NO: 114706 NR Description: ATP synthase protein I
  misc_feature (67)..(353): Homolog of NCBI NO: 18402535 NR Description: expressed protein [Arabidopsis thaliana]
  misc_feature (67)..(353): Homolog of NCBI NO: 21593011 NR Description: unknown [Arabidopsis thaliana]
  misc_feature (36)..(155): Homolog of NCBI NO: 34911056 NR Description: P0007F06.23 [Oryza sativa (japonica
  misc_feature (206)..(352): Homolog of NCBI NO: 34911056 NR Description: P0007F06.23 [Oryza sativa (japonica
TRRLSPVHPSRFRITPSPLLSSPLPRRDISRGPPAMSLLAVVTSRAAPVRPLRASAASGEAAAAAADQPGERRPVKIILPKKKPQKWSTGMEPGSYGGGPTTIKPRKYWMGKEDRDPIGNTDDFIWNKNFLPHMERVIANGGTDTPATIPRVTPADEDSGFLSFNRAMDLDSVDVDLSKELMAPAKSILQTQLKAARRGRSTSVEAVNRPTYIRWKLAPTRREQEQWDRATRATTGGIDVILRESQQKVQLKGDPKVVAAEAREQYLKLKERLQLLTLGIGGVGVVSAYVSYTPEIAASFSAGLIGSLVYLRMLGTSVDSLAGGTKAAAKGAAAQPRLLIPMVLVMMYNRWNA

SEQ ID NO: 67488 - protein, 318 aa, Triticum aestivum
  peptide (1)..(318): Ceres Seq. ID no. 14303081
  misc_feature (201)..(315): Homolog of NCBI NO: 33863740 NR Description: possible H+-transporting ATP synthase
  misc_feature (230)..(316): Homolog of NCBI NO: 114706 NR Description: ATP synthase protein I
  misc_feature (32)..(318): Homolog of NCBI NO: 18402535 NR Description: expressed protein [Arabidopsis thaliana]
  misc_feature (32)..(318): Homolog of NCBI NO: 21593011 NR Description: unknown [Arabidopsis thaliana]
  misc_feature (1)..(120): Homolog of NCBI NO: 34911056 NR Description: P0007F06.23 [Oryza sativa (japonica
  misc_feature (171)..(317): Homolog of NCBI NO: 34911056 NR Description: P0007F06.23 [Oryza sativa (japonica
MSLLAVVTSRAAPVRPLRASAASGEAAAAAADQPGERRPVKIILPKKKPQKWSTGMEPGSYGGGPTTIKPRKYWMGKEDRDPIGNTDDFIWNKNFLPHMERVIANGGTDTPATIPRVTPADEDSGFLSFNRAMDLDSVDVDLSKELMAPAKSILQTQLKAARRGRSTSVEAVNRPTYIRWKLAPTRREQEQWDRATRATTGGIDVILRESQQKVQLKGDPKVVAAEAREQYLKLKERLQLLTLGIGGVGVVSAYVSYTPEIAASFSAGLIGSLVYLRMLGTSVDSLAGGTKAAAKGAAAQPRLLIPMVLVMMYNRWNA

SEQ ID NO: 67489 - protein, 263 aa, Triticum aestivum
  peptide (1)..(263): Ceres Seq. ID no. 14303082
  misc_feature (146)..(260): Homolog of NCBI NO: 33863740 NR Description: possible H+-transporting ATP synthase
  misc_feature (175)..(261): Homolog of NCBI NO: 114706 NR Description: ATP synthase protein I
  misc_feature (1)..(263): Homolog of NCBI NO: 18402535 NR Description: expressed protein [Arabidopsis thaliana]
  misc_feature (1)..(263): Homolog of NCBI NO: 21593011 NR Description: unknown [Arabidopsis thaliana]
  misc_feature (1)..(65): Homolog of NCBI NO: 34911056 NR Description: P0007F06.23 [Oryza sativa (japonica
  misc_feature (116)..(262): Homolog of NCBI NO: 34911056 NR Description: P0007F06.23 [Oryza sativa (japonica
MEPGSYGGGPTTIKPRKYWMGKEDRDPIGNTDDFIWNKNFLPHMERVIANGGTDTPATIPRVTPADEDSGFLSFNRAMDLDSVDVDLSKELMAPAKSILQTQLKAARRGRSTSVEAVNRPTYIRWKLAPTRREQEQWDRATRATTGGIDVILRESQQKVQLKGDPKVVAAEAREQYLKLKERLQLLTLGIGGVGVVSAYVSYTPEIAASFSAGLIGSLVYLRMLGTSVDSLAGGTKAAAKGAAAQPRLLIPMVLVMMYNRWNA

SEQ ID NO: 67490 - DNA, 1876 bp, Triticum aestivum
  misc_feature (1)..(1876): Ceres Seq. ID no. 14307892
atattcccgagagagaaagaatccagcccccacccgccgccgcgccgctgatagcgagcgtgacagagtcctcccccattaaacccccccgcccgccgccgcgtccaccgccaccgccagaccacgcagcccgcaatcgccgaccgaggcaccgccggtggtcggagaagcgctacgaacgccgaggacgcgcgccatggagggcagagcgccgctgctgccccggcgccaagaggcggccaagagcggcgggtggcgttgcggggcggcggcggcggaggccaggaaggtcgcgcacgtggcgctgccgatggcggccgtgagcgtggcgcagtacgccgtgcaggtggcctccaacatgatggtcggccacctccccgggggcgtgctggcgctctccgcctccgccatcgccacctccctcgcctccgtatccggattcagcctcctcattggaatgtcaaacggcttagaaactctctgtggtcaagcttacggggccgaacaatatggcagattgggagtgcaaacctacagagctatggtcaccctgacggctgtcagcattccaatctcacttctctggatattcatgggaaaactcctgaccctcataggccaggaccccgtgatctcgcatgaagccgggagatacataatgtggttgattccggccctctttgcatatgctgtcagccagcccctaacaaagttcttacagtctcagagtctgataatccctatgctctggtcctccattgcaacattgctcttgcacattcctgtttgctggttattggtgttcaagaccagccttgggtacattggagccgctttggcgataagcgtatcatactggttgaacgtgttcatgcttgttgcgtacatcggatgctcaaactcttgtaaggagacattctcgcctcccacactcgatgctttcagtggagtgggtgtgttcatgcgcttagccctgccgtctgcactaatgttatgttttgaatggtggtcatttgaggtcattattcttctgtctggacttctacccaatccagagctgcaaacttcagttctttctacatgcatgacaacaatcacattgatgtatactatagcgtacggaattggtgctgctggaagcactcgtgtatcaaatgaattaggtgctgggaatcctgaaggtgctcgactggctgtccgcgttgtgatgtctattgctgtgactgaggcagttctcatcactggggcactgttagcatcccagcacatcttgggctacgcatacagcagtgataaggaggttgttgattatgtcaatgcaatggttccgttcatctgcatctcagttgctgctgatagcctacaaggagttctctcaggtatcgctcgagggtgcgggtcgcagcacctgggcgcctatgttaacctcggttcgttctatctgtttgggattccaatgtccctcctactcgggtttgttctgaagatgggaggaaaggggctctggatgggcatttcctgcggctccatagtgcaattcctacttctgtccggcatagtgttcttcagcaactggcaaaagatgtctgacaatgcgagggagagggttttcggcggaaccccggcggagaaggagcctttgatgtctgatgtaacgggcgctgcctaattttctcgcgagttgctcaatcccttgacccgaacttgaagcggacgacacggcagcttaatcttgtcgctgtagatgacagtctcagagatgtgtgtatatagagaggcgagtttgctgaagaaccgaagaacttaagaactaactggtgcccgtagttgtaatgttgcaattttgctgaggtcggaaaagaatgatacatacagt

SEQ ID NO: 67491 - protein, 490 aa, Triticum aestivum
  peptide (1)..(490): Ceres Seq. ID no. 14307893
  misc_feature (261)..(424): Pfam Name: MatE Pfam Description: MatE
  misc_feature (7)..(461): Homolog of NCBI NO: 25518684 NR Description: hypothetical protein F9L1.12 [imported] -
  misc_feature (23)..(461): Homolog of NCBI NO: 25518472 NR Description: hypothetical protein F9L1.9 [imported] -
  misc_feature (7)..(471): Homolog of NCBI NO: 18394206 NR Description: MATE efflux protein - related [Arabidopsis
  misc_feature (23)..(461): Homolog of NCBI NO: 25518548 NR Description: hypothetical protein F9L1.10 - Arabidopsis
  misc_feature (23)..(471): Homolog of NCBI NO: 15218068 NR Description: MATE efflux protein family [Arabidopsis thaliana]
  misc_feature (7)..(461): Homolog of NCBI NO: 25511632 NR Description: F9L1.11 protein - Arabidopsis thaliana
  misc_feature (11)..(480): Homolog of NCBI NO: 15223961 NR Description: MATE efflux protein family [Arabidopsis thaliana]
  misc_feature (23)..(471): Homolog of NCBI NO: 22329577 NR Description: MATE efflux protein family [Arabidopsis thaliana]
  misc_feature (7)..(471): Homolog of NCBI NO: 15218070 NR Description: MATE efflux protein family [Arabidopsis thaliana]
  misc_feature (73)..(466): Homolog of NCBI NO: 34911248 NR Description: P0445E10.22 [Oryza sativa (japonica
MEGRAPLLPRRQEAAKSGGWRCGAAAAEARKVAHVALPMAAVSVAQYAVQVASNMMVGHLPGGVLALSASAIATSLASVSGFSLLIGMSNGLETLCGQAYGAEQYGRLGVQTYRAMVTLTAVSIPISLLWIFMGKLLTLIGQDPVISHEAGRYIMWLIPALFAYAVSQPLTKFLQSQSLIIPMLWSSIATLLLHIPVCWLLVFKTSLGYIGAALAISVSYWLNVFMLVAYIGCSNSCKETFSPPTLDAFSGVGVFMRLALPSALMLCFEWWSFEVIILLSGLLPNPELQTSVLSTCMTTITLMYTIAYGIGAAGSTRVSNELGAGNPEGARLAVRVVMSIAVTEAVLITGALLASQHILGYAYSSDKEVVDYVNAMVPFICISVAADSLQGVLSGIARGCGSQHLGAYVNLGSFYLFGIPMSLLLGFVLKMGGKGLWMGISCGSIVQFLLLSGIVFFSNWQKMSDNARERVFGGTPAEKEPLMSDVTGAA

SEQ ID NO: 67492 - protein, 452 aa, Triticum aestivum
  peptide (1)..(452): Ceres Seq. ID no. 14307894
  misc_feature (223)..(386): Pfam Name: MatE Pfam Description: MatE
  misc_feature (1)..(423): Homolog of NCBI NO: 25518684 NR Description: hypothetical protein F9L1.12 [imported] -
  misc_feature (1)..(423): Homolog of NCBI NO: 25518472 NR Description: hypothetical protein F9L1.9 [imported] -
  misc_feature (1)..(433): Homolog of NCBI NO: 18394206 NR Description: MATE efflux protein - related [Arabidopsis
  misc_feature (1)..(423): Homolog of NCBI NO: 25518548 NR Description: hypothetical protein F9L1.10 - Arabidopsis
  misc_feature (1)..(433): Homolog of NCBI NO: 15218068 NR Description: MATE efflux protein family [Arabidopsis thaliana]
  misc_feature (1)..(423): Homolog of NCBI NO: 25511632 NR Description: F9L1.11 protein - Arabidopsis thaliana
  misc_feature (1)..(442): Homolog of NCBI NO: 15223961 NR Description: MATE efflux protein family [Arabidopsis thaliana]
  misc_feature (1)..(433): Homolog of NCBI NO: 22329577 NR Description: MATE efflux protein family [Arabidopsis thaliana]
  misc_feature (1)..(433): Homolog of NCBI NO: 15218070 NR Description: MATE efflux protein family [Arabidopsis thaliana]
  misc_feature (35)..(428): Homolog of NCBI NO: 34911248 NR Description: P0445E10.22 [Oryza sativa (japonica
MAAVSVAQYAVQVASNMMVGHLPGGVLALSASAIATSLASVSGFSLLIGMSNGLETLCGQAYGAEQYGRLGVQTYRAMVTLTAVSIPISLLWIFMGKLLTLIGQDPVISHEAGRYIMWLIPALFAYAVSQPLTKFLQSQSLIIPMLWSSIATLLLHIPVCWLLVFKTSLGYIGAALAISVSYWLNVFMLVAYIGCSNSCKETFSPPTLDAFSGVGVFMRLALPSALMLCFEWWSFEVIILLSGLLPNPELQTSVLSTCMTTITLMYTIAYGIGAAGSTRVSNELGAGNPEGARLAVRVVMSIAVTEAVLITGALLASQHILGYAYSSDKEVVDYVNAMVPFICISVAADSLQGVLSGIARGCGSQHLGAYVNLGSFYLFGIPMSLLLGFVLKMGGKGLWMGISCGSIVQFLLLSGIVFFSNWQKMSDNARERVFGGTPAEKEPLMSDVTGAA

SEQ ID NO: 67493 - protein, 436 aa, Triticum aestivum
  peptide (1)..(436): Ceres Seq. ID no. 14307895
  misc_feature (207)..(370): Pfam Name: MatE Pfam Description: MatE
  misc_feature (1)..(407): Homolog of NCBI NO: 25518684 NR Description: hypothetical protein F9L1.12 [imported] -
  misc_feature (1)..(407): Homolog of NCBI NO: 25518472 NR Description: hypothetical protein F9L1.9 [imported] -
  misc_feature (1)..(417): Homolog of NCBI NO: 18394206 NR Description: MATE efflux protein - related [Arabidopsis
  misc_feature (1)..(407): Homolog of NCBI NO: 25518548 NR Description: hypothetical protein F9L1.10 - Arabidopsis
  misc_feature (1)..(417): Homolog of NCBI NO: 15218068 NR Description: MATE efflux protein family [Arabidopsis thaliana]
  misc_feature (1)..(407): Homolog of NCBI NO: 25511632 NR Description: F9L1.11 protein - Arabidopsis thaliana
  misc_feature (1)..(426): Homolog of NCBI NO: 15223961 NR Description: MATE efflux protein family [Arabidopsis thaliana]
  misc_feature (1)..(417): Homolog of NCBI NO: 22329577 NR Description: MATE efflux protein family [Arabidopsis thaliana]
  misc_feature (1)..(417): Homolog of NCBI NO: 15218070 NR Description: MATE efflux protein family [Arabidopsis thaliana]
  misc_feature (19)..(412): Homolog of NCBI NO: 34911248 NR Description: P0445E10.22 [Oryza sativa (japonica
MMVGHLPGGVLALSASAIATSLASVSGFSLLIGMSNGLETLCGQAYGAEQYGRLGVQTYRAMVTLTAVSIPISLLWIFMGKLLTLIGQDPVISHEAGRYIMWLIPALFAYAVSQPLTKFLQSQSLIIPMLWSSIATLLLHIPVCWLLVFKTSLGYIGAALAISVSYWLNVFMLVAYIGCSNSCKETFSPPTLDAFSGVGVFMRLALPSALMLCFEWWSFEVIILLSGLLPNPELQTSVLSTCMTTITLMYTIAYGIGAAGSTRVSNELGAGNPEGARLAVRVVMSIAVTEAVLITGALLASQHILGYAYSSDKEVVDYVNAMVPFICISVAADSLQGVLSGIARGCGSQHLGAYVNLGSFYLFGIPMSLLLGFVLKMGGKGLWMGISCGSIVQFLLLSGIVFFSNWQKMSDNARERVFGGTPAEKEPLMSDVTGAA

SEQ ID NO: 67494 - DNA, 1649 bp, Triticum aestivum
  misc_feature (1)..(1649): Ceres Seq. ID no. 13660260
cattacctagaacatcctaatcgaaaagttgctgtagtccaaccaaaagtagctgacgggctcccttgtttgtatgtcccccactcccggcgaccgcgagcctctcgtccactcccgacaccgagccgaaagccgcgtggattcgccgcccgatccagcgatggattcagcctccagagttgccccgccgccggtcagcgctggtgtccgcgtccgcgcgccgctggtagagtccgtctcctgttactgcagattagatacaggccttaaaactgtcgtggatgctagaaaatttgcttctggagcaaagatgtgcatgcaacctgatgtcaaacaaaccaagcgcaagtcaaggggctcgcggaaggagaggtgccgagctcaagcaccacttttgcctggccttcctgatgatcttgcaattgcctgtcttatacgggttccacgagtggaacaccccaatctccggacagtttgtaaaagatggaaccgccttttgtcaggaaattactattattccttgcgcaagaaactcagcatggcagaagaatgggtttatgtctttaaaagggatcgtgaggggaaaatatcctggcatgccttcgatccactgaaccagctctggaagtcccttccacctgttccaccagagtattcagaagcgttgggttttggctgtgctgttctgagtggttgctatctgtacttatttggcggtaaggatcctttgaggggctctatgagacgtgttgtattttacaatgcccggaccaacaaatggcatcgagctccagatatgttacgaaagcgacacttttttggttcctgtgttataaacaattgtctatatgttgctggtggagagtgtgaaggcatacaaaggactcttcagtctgctgaagtttatgaccctaataggaacagatgggtctgcatccctgagatgaacaacgggatggtgcctttcatcggagttgtatatgatgacaagtggttcctaaaagggcttgactcccatcgccaagtgacatgtgaagtgtacctaccgtcatccaatttgtggtcaaccattgatgatgaaatggttacaggttggcgaaacccaagcatttccttcaatggacgtctctattcatctgattgccgggatggctgcaagcttagagtctatgatgcaaacacaggaacatgggcacgattcatagacagcaggcaccatctaggcagctcacgagccttcgaagccgcaggcttggtgtctttaaatggtaagctttgcattattcgcaacaacatgagcatcactcttgttgatatcttggatccaacaatgagtatcgagaccgacagtgcatgcatgtggaaaactgttgcgcgtaagggtcagcacaagtcatttgtggcaaacttgtggtcgaccattgcaggacgtaacctgaagagtcacataatccattgtcaggtgctgcaaatttgagttcagctgttgcgaatcgggacatgatgaaatcagcgaaacaacacctccattacaagatcaaatgctcaccgcctgaacaaatctttgtacatttgattactagaagctgcaattcaagattctggcaatatcatgagctctctatatatattaatgaattttgaagtgc

SEQ ID NO: 67495 - protein, 467 aa, Triticum aestivum
  peptide (1)..(467): Ceres Seq. ID no. 15220687
  misc_feature (197)..(243): Pfam Name: Kelch motif Pfam Description: Kelch motif
  misc_feature (83)..(373): Homolog of NCBI NO: 5679844 NR Description: l1332.8 [Oryza sativa (indica cultivar-group)]
  misc_feature (94)..(373): Homolog of NCBI NO: 18397351 NR Description: Kelch repeat containing F-box protein family
  misc_feature (104)..(415): Homolog of NCBI NO: 26453288 NR Description: putative SKP1 interacting partner 4 SKIP4
  misc_feature (104)..(415): Homolog of NCBI NO: 18411974 NR Description: SKP1 interacting partner 4 (SKIP4), putative
  misc_feature (95)..(432): Homolog of NCBI NO: 15220452 NR Description: Kelch repeat containing F-box protein family
  misc_feature (95)..(432): Homolog of NCBI NO: 7487225 NR Description: hypothetical protein T1F15.5 - Arabidopsis
  misc_feature (30)..(434): Homolog of NCBI NO: 25405811 NR Description: unknown protein, 58496-60308 [imported] -
  misc_feature (30)..(466): Homolog of NCBI NO: 18405298 NR Description: Kelch repeat containing F-box protein family
  misc_feature (52)..(467): Homolog of NCBI NO: 19071626 NR Description: putative Kelch motif containing protein
  misc_feature (30)..(467): Homolog of NCBI NO: 37534254 NR Description: unknown protein [Oryza sativa (japonica
MSPTPGDREPLVHSRHRAESRVDSPPDPAMDSASRVAPPPVSAGVRVRAPLVESVSCYCRLDTGLKTVVDARKFASGAKMCMQPDVKQTKRKSRGSRKERCRAQAPLLPGLPDDLAIACLIRVPRVEHPNLRTVCKRWNRLLSGNYYYSLRKKLSMAEEWVYVFKRDREGKISWHAFDPLNQLWKSLPPVPPEYSEALGFGCAVLSGCYLYLFGGKDPLRGSMRRVVFYNARTNKWHRAPDMLRKRHFFGSCVINNCLYVAGGECEGIQRTLQSAEVYDPNRNRWVCIPEMNNGMVPFIGVVYDDKWFLKGLDSHRQVTCEVYLPSSNLWSTIDDEMVTGWRNPSISFNGRLYSSDCRDGCKLRVYDANTGTWARFIDSRHHLGSSRAFEAAGLVSLNGKLCIIRNNMSITLVDILDPTMSIETDSACMWKTVARKGQHKSFVANLWSTIAGRNLKSHIIHCQVLQI

SEQ ID NO: 67496 - protein, 438 aa, Triticum aestivum
  peptide (1)..(438): Ceres Seq. ID no. 15220688
  misc_feature (168)..(214): Pfam Name: Kelch motif Pfam Description: Kelch motif
  misc_feature (54)..(344): Homolog of NCBI NO: 5679844 NR Description: l1332.8 [Oryza sativa (indica cultivar-group)]
  misc_feature (65)..(344): Homolog of NCBI NO: 18397351 NR Description: Kelch repeat containing F-box protein family
  misc_feature (75)..(386): Homolog of NCBI NO: 26453288 NR Description: putative SKP1 interacting partner 4 SKIP4
  misc_feature (75)..(386): Homolog of NCBI NO: 18411974 NR Description: SKP1 interacting partner 4 (SKIP4), putative
  misc_feature (66)..(403): Homolog of NCBI NO: 15220452 NR Description: Kelch repeat containing F-box protein family
  misc_feature (66)..(403): Homolog of NCBI NO: 7487225 NR Description: hypothetical protein T1F15.5 - Arabidopsis
  misc_feature (1)..(405): Homolog of NCBI NO: 25405811 NR Description: unknown protein, 58496-60308 [imported] -
  misc_feature (1)..(437): Homolog of NCBI NO: 18405298 NR Description: Kelch repeat containing F-box protein family
  misc_feature (23)..(438): Homolog of NCBI NO: 19071626 NR Description: putative Kelch motif containing protein
  misc_feature (1)..(438): Homolog of NCBI NO: 37534254 NR Description: unknown protein [Oryza sativa (japonica
MDSASRVAPPPVSAGVRVRAPLVESVSCYCRLDTGLKTVVDARKFASGAKMCMQPDVKQTKRKSRGSRKERCRAQAPLLPGLPDDLAIACLIRVPRVEHPNLRTVCKRWNRLLSGNYYYSLRKKLSMAEEWVYVFKRDREGKISWHAFDPLNQLWKSLPPVPPEYSEALGFGCAVLSGCYLYLFGGKDPLRGSMRRVVFYNARTNKWHRAPDMLRKRHFFGSCVINNCLYVAGGECEGIQRTLQSAEVYDPNRNRWVCIPEMNNGMVPFIGVVYDDKWFLKGLDSHRQVTCEVYLPSSNLWSTIDDEMVTGWRNPSISFNGRLYSSDCRDGCKLRVYDANTGTWARFIDSRHHLGSSRAFEAAGLVSLNGKLCIIRNNMSITLVDILDPTMSIETDSACMWKTVARKGQHKSFVANLWSTIAGRNLKSHIIHCQVLQI

SEQ ID NO: 67497 - protein, 388 aa, Triticum aestivum
  peptide (1)..(388): Ceres Seq. ID no. 15220689
  misc_feature (118)..(164): Pfam Name: Kelch motif Pfam Description: Kelch motif
  misc_feature (4)..(294): Homolog of NCBI NO: 5679844 NR Description: l1332.8 [Oryza sativa (indica cultivar-group)]
  misc_feature (15)..(294): Homolog of NCBI NO: 18397351 NR Description: Kelch repeat containing F-box protein family
  misc_feature (25)..(336): Homolog of NCBI NO: 26453288 NR Description: putative SKP1 interacting partner 4 SKIP4
  misc_feature (25)..(336): Homolog of NCBI NO: 18411974 NR Description: SKP1 interacting partner 4 (SKIP4), putative
  misc_feature (16)..(353): Homolog of NCBI NO: 15220452 NR Description: Kelch repeat containing F-box protein family
  misc_feature (16)..(353): Homolog of NCBI NO: 7487225 NR Description: hypothetical protein T1F15.5 - Arabidopsis
  misc_feature (1)..(355): Homolog of NCBI NO: 25405811 NR Description: unknown protein, 58496-60308 [imported] -
  misc_feature (1)..(387): Homolog of NCBI NO: 18405298 NR Description: Kelch repeat containing F-box protein family
  misc_feature (1)..(388): Homolog of NCBI NO: 19071626 NR Description: putative Kelch motif containing protein
  misc_feature (1)..(388): Homolog of NCBI NO: 37534254 NR Description: unknown protein [Oryza sativa (japonica
MCMQPDVKQTKRKSRGSRKERCRAQAPLLPGLPDDLAIACLIRVPRVEHPNLRTVCKRWNRLLSGNYYYSLRKKLSMAEEWVYVFKRDREGKISWHAFDPLNQLWKSLPPVPPEYSEALGFGCAVLSGCYLYLFGGKDPLRGSMRRVVFYNARTNKWHRAPDMLRKRHFFGSCVINNCLYVAGGECEGIQRTLQSAEVYDPNRNRWVCIPEMNNGMVPFIGVVYDDKWFLKGLDSHRQVTCEVYLPSSNLWSTIDDEMVTGWRNPSISFNGRLYSSDCRDGCKLRVYDANTGTWARFIDSRHHLGSSRAFEAAGLVSLNGKLCIIRNNMSITLVDILDPTMSIETDSACMWKTVARKGQHKSFVANLWSTIAGRNLKSHIIHCQVLQI

SEQ ID NO: 67498 - DNA, 1458 bp, Triticum aestivum
  misc_feature (1)..(1458): Ceres Seq. ID no. 14303006
ctccgtcattaccaaggtaattgcactgcccagcatgcatcttcgtcttaatccactctatcggtgcttcgtcttgcgtcccgtggcagcctgtgccgccatgcctgttgcctaatttcctactgatgcagtatcgcaatgcactcctgagctgacagttttagattttagcaagtgcctgtgcatctcccggcctgctcactcgcctctgttttgagttcctagctttcttttcgagaaattacaccctgctttgccgacagagattctcgctgctagtacgagattatttatttataaactgatgtctgcttcggcctctgcttttctgaattttgttgccacgcgtagtacagtagtactggaagattgcaagctctggttttctgaatattcgagctgcttcagatcgagttcagaagtttttctgaattccgtgccattattaatttggaagttgagagcgcaggaaggaagatgggctcgttggaggcgacgcgggcggagctggggctggcggtgctgtacctgaacaaggcggaggctcgggacaagatctgcagggccatccagtacggctccaagttcatcagcaacggccagcccggcaccgcgcagaacgtcgacaagtccaccaccttggctcgcaaggtcttccgcctcctcaagtgggtgaacgatctgcacgccctcatcagcccggccgccaaagggacccctctcacgctggtcttgcttgggaagtccaagaatgcgctgctgtcgactttcctgttcctggaccagttcgtgtggctaggaagatcggggatttaccagaacaaggagcgcacggaccgcatcgccaggatgtccctctactgctggatggcctcctccgtctgtgcaagtctagtcgagcttggtgagctcaagagactatcaaaggcgatgaggaagcgcgccaaggagcttaggggcgccgacaaatacgaggacgagcagtacctggggaagatgaagcagtcggacgaccggctgctggcgctggtgaaggcgggcatggacgtggtggtggccgtggggctgctgcagctggcgcccaagaagatcacccccagggtcaccggggccttcggcttcgtcacctccctcatctcctgctaccagcaactcccgtcccgcgctcccctggccaaactcaaggcgtgaggaacggacgctacaccatgcatgctagtccagatgctgcctccgcttaactcaagccgatgctgtgctccagcatggaatccgagatgttttattcctgtgtacgtagcagtatagaatgatgatgtcgattgtctgtacgtacggtttttatacatatacatgtacacggtatatgctatgaatagtagtaatggacatggtatgtctggtcgatcatgtgttggtgcatgctgcttatatatgccaacagtgttgccacttgcg

SEQ ID NO: 67499 - protein, 237 aa, Triticum aestivum
  peptide (1)..(237): Ceres Seq. ID no. 14303007
  misc_feature (11)..(226): Pfam Name: Peroxisomal biogenesis factor 11 (PEX11) Pfam Description: Peroxisomal biogenesis factor 11 (PEX11)
  misc_feature (131)..(229): Homolog of NCBI NO: 14335058 NR Description: At2g45740/F4I18.28 [Arabidopsis thaliana]
  misc_feature (1)..(231): Homolog of NCBI NO: 34898026 NR Description: ESTs AU064537(E31904),AU082147(E31904) correspond a region of the predicted gene.~Similar to Arabidopsis thaliana
  misc_feature (1)..(230): Homolog of NCBI NO: 25553559 NR Description: OSJNBa0038F22.7 [Oryza sativa (japonica
  misc_feature (1)..(232): Homolog of NCBI NO: 11358250 NR Description: hypothetical protein T27I15_160 - Arabidopsis
  misc_feature (1)..(232): Homolog of NCBI NO: 30695340 NR Description: expressed protein [Arabidopsis thaliana]
  misc_feature (1)..(224): Homolog of NCBI NO: 7486466 NR Description: hypothetical protein At2g45740 [imported] -
  misc_feature (1)..(229): Homolog of NCBI NO: 18406877 NR Description: expressed protein [Arabidopsis thaliana]
  misc_feature (1)..(228): Homolog of NCBI NO: 8489788 NR Description: unknown [Lycopersicon esculentum]
  misc_feature (1)..(235): Homolog of NCBI NO: 18378887 NR Description: expressed protein [Arabidopsis thaliana]
MGSLEATRAELGLAVLYLNKAEARDKICRAIQYGSKFISNGQPGTAQNVDKSTTLARKVFRLLKWVNDLHALISPAAKGTPLTLVLLGKSKNALLSTFLFLDQFVWLGRSGIYQNKERTDRIARMSLYCWMASSVCASLVELGELKRLSKAMRKRAKELRGADKYEDEQYLGKMKQSDDRLLALVKAGMDVVVAVGLLQLAPKKITPRVTGAFGFVTSLISCYQQLPSRAPLAKLKA

SEQ ID NO: 67500 - DNA, 1498 bp, Triticum aestivum
  misc_feature (1)..(1498): Ceres Seq. ID no. 15169541
aacaaaagcaccacccccacccgccttccttcctgccttcctgccctcagtcagccggagccggattgctcctcccgccatggcgctcctcaccgatctcctcaacctcgacctcaccgactccacggagaagatcatcgccgagtacatatggatcggcggatctggcatggatctcaggagcaaggccaggaccctccccggcccggtcacggatcccagcaagctgcccaagtggaactacgacggctccagcaccggccaggcccccggcgaggacagcgaggtcatcctgtacccacaggccatcttcaaggacccgttcaggaagggcaacaacatccttgtcatgtgcgattgctacaccccagctggagtgccaatccccaccaacaagagatacaacgctgccaagatctttagcaaccctgatgttgccaaggaggagccatggtatggtattgagcaggagtacaccctcctacagaaggacatcaactggcctctcggctggcctgttggtggattccctggtcctcagggtccttactactgtagtattggtgctgacaagtcgtttgggcgtgacatagttgacgctcactacaaggcctgcctctttgccggtgtcaacatcagtggcatcaatggcgaggtcatgcccggacagtgggagttccaagtcggcccgactgttggcatttctgctggcgaccaagtgtgggtcgctcgctaccttcttgagaggatcactgagatcgccggagttgtcgtcacatttgaccccaagcccatcccaggcgactggaacggtgctggtgctcacacaaactacagtaccgagtcgatgaggaaggacggcgggttcaaggtcatcgtggatgccgtggagaagctcaagctcaagcacaaggagcacatcgccgcctacggcgagggcaacgagcgccgcctcaccggcaagcacgagaccgccgacatcaacaccttcagctggggcgtcgcaaaccgtggcgcgtcggtgcgcgtgggccgggagacggagcagaacggcaagggctacttcgaggaccgccggccggcgtccaacatggacccatacgtggtcacctcgatgatcgccgagaccaccatcctgtggaagccctgaagccgatcggcgccgatcgccgtgcgatgatcagtgatgggttgggttggatttggtgggtggccactggaggatttggacgaaattcttccaacatatttgattttccgtttggttgcatactacgcgtagtccgcttaggtaggtcgcatcatcgtcgtcgtcgtcatgcatcagggtgtctggtcgctcttctctcgtctctgggtggtgggtggcaagaggcgtgtcaaacacacaaggctactattgattgttttcccttgccgtttgggtgctctggtcctcgtgtaatcatcaattgatatggtaataaaatggtccgtaccgctgccgtggtaccacacc

SEQ ID NO: 67501 - protein, 382 aa, Triticum aestivum
  peptide (1)..(382): Ceres Seq. ID no. 15169542
  misc_feature (129)..(381): Pfam Name: Glutamine synthetase, catalytic domain Pfam Description: Glutamine synthetase, catalytic domain
  misc_feature (27)..(382): Homolog of NCBI NO: 417060 NR Description: Glutamine synthetase nodule isozyme
  misc_feature (27)..(382): Homolog of NCBI NO: 481914 NR Description: glutamate-ammonia ligase (EC 6.3.1.2) - rape
  misc_feature (27)..(382): Homolog of NCBI NO: 1835154 NR Description: glutamine synthetase [Medicago truncatula]
  misc_feature (27)..(382): Homolog of NCBI NO: 585204 NR Description: GLUTAMINE SYNTHETASE ROOT ISOZYME 4
  misc_feature (27)..(382): Homolog of NCBI NO: 585203 NR Description: GLUTAMINE SYNTHETASE ROOT ISOZYME 3
  misc_feature (27)..(382): Homolog of NCBI NO: 121349 NR Description: Glutamine synthetase shoot isozyme
  misc_feature (27)..(382): Homolog of NCBI NO: 286124 NR Description: glutamine synthetase [Zea mays]
  misc_feature (27)..(382): Homolog of NCBI NO: 286122 NR Description: glutamine synthetase [Zea mays]
  misc_feature (27)..(382): Homolog of NCBI NO: 729590 NR Description: GLUTAMINE SYNTHETASE (GLUTAMATE--AMMONIA LIGASE)
  misc_feature (11)..(382): Homolog of NCBI NO: 322833 NR Description: glutamate-ammonia ligase (EC 6.3.1.2), cytosolic
TKAPPPPAFLPAFLPSVSRSRIAPPAMALLTDLLNLDLTDSTEKIIAEYIWIGGSGMDLRSKARTLPGPVTDPSKLPKWNYDGSSTGQAPGEDSEVILYPQAIFKDPFRKGNNILVMCDCYTPAGVPIPTNKRYNAAKIFSNPDVAKEEPWYGIEQEYTLLQKDINWPLGWPVGGFPGPQGPYYCSIGADKSFGRDIVDAHYKACLFAGVNISGINGEVMPGQWEFQVGPTVGISAGDQVWVARYLLERITEIAGVVVTFDPKPIPGDWNGAGAHTNYSTESMRKDGGFKVIVDAVEKLKLKHKEHIAAYGEGNERRLTGKHETADINTFSWGVANRGASVRVGRETEQNGKGYFEDRRPASNMDPYVVTSMIAETTILWKP

SEQ ID NO: 67502 - protein, 356 aa, Triticum aestivum
  peptide (1)..(356): Ceres Seq. ID no. 15169543
  misc_feature (103)..(355): Pfam Name: Glutamine synthetase, catalytic domain Pfam Description: Glutamine synthetase, catalytic domain
  misc_feature (1)..(356): Homolog of NCBI NO: 417060 NR Description: Glutamine synthetase nodule isozyme
  misc_feature (1)..(356): Homolog of NCBI NO: 481914 NR Description: glutamate-ammonia ligase (EC 6.3.1.2) - rape
  misc_feature (1)..(356): Homolog of NCBI NO: 1835154 NR Description: glutamine synthetase [Medicago truncatula]
  misc_feature (1)..(356): Homolog of NCBI NO: 585204 NR Description: GLUTAMINE SYNTHETASE ROOT ISOZYME 4
  misc_feature (1)..(356): Homolog of NCBI NO: 585203 NR Description: GLUTAMINE SYNTHETASE ROOT ISOZYME 3
  misc_feature (1)..(356): Homolog of NCBI NO: 121349 NR Description: Glutamine synthetase shoot isozyme
  misc_feature (1)..(356): Homolog of NCBI NO: 286124 NR Description: glutamine synthetase [Zea mays]
  misc_feature (1)..(356): Homolog of NCBI NO: 286122 NR Description: glutamine synthetase [Zea mays]
  misc_feature (1)..(356): Homolog of NCBI NO: 729590 NR Description: GLUTAMINE SYNTHETASE (GLUTAMATE--AMMONIA LIGASE)
  misc_feature (1)..(356): Homolog of NCBI NO: 322833 NR Description: glutamate-ammonia ligase (EC 6.3.1.2), cytosolic
MALLTDLLNLDLTDSTEKIIAEYIWIGGSGMDLRSKARTLPGPVTDPSKLPKWNYDGSSTGQAPGEDSEVILYPQAIFKDPFRKGNNILVMCDCYTPAGVPIPTNKRYNAAKIFSNPDVAKEEPWYGIEQEYTLLQKDINWPLGWPVGGFPGPQGPYYCSIGADKSFGRDIVDAHYKACLFAGVNISGINGEVMPGQWEFQVGPTVGISAGDQVWVARYLLERITEIAGVVVTFDPKPIPGDWNGAGAHTNYSTESMRKDGGFKVIVDAVEKLKLKHKEHIAAYGEGNERRLTGKHETADINTFSWGVANRGASVRVGRETEQNGKGYFEDRRPASNMDPYVVTSMIAETTILWKP

SEQ ID NO: 67503 - protein, 326 aa, Triticum aestivum
  peptide (1)..(326): Ceres Seq. ID no. 15169544
  misc_feature (73)..(325): Pfam Name: Glutamine synthetase, catalytic domain Pfam Description: Glutamine synthetase, catalytic domain
  misc_feature (1)..(326): Homolog of NCBI NO: 417060 NR Description: Glutamine synthetase nodule isozyme
  misc_feature (1)..(326): Homolog of NCBI NO: 481914 NR Description: glutamate-ammonia ligase (EC 6.3.1.2) - rape
  misc_feature (1)..(326): Homolog of NCBI NO: 1835154 NR Description: glutamine synthetase [Medicago truncatula]
  misc_feature (1)..(326): Homolog of NCBI NO: 585204 NR Description: GLUTAMINE SYNTHETASE ROOT ISOZYME 4
  misc_feature (1)..(326): Homolog of NCBI NO: 585203 NR Description: GLUTAMINE SYNTHETASE ROOT ISOZYME 3
  misc_feature (1)..(326): Homolog of NCBI NO: 121349 NR Description: Glutamine synthetase shoot isozyme
  misc_feature (1)..(326): Homolog of NCBI NO: 286124 NR Description: glutamine synthetase [Zea mays]
  misc_feature (1)..(326): Homolog of NCBI NO: 286122 NR Description: glutamine synthetase [Zea mays]
  misc_feature (1)..(326): Homolog of NCBI NO: 729590 NR Description: GLUTAMINE SYNTHETASE (GLUTAMATE--AMMONIA LIGASE)
  misc_feature (1)..(326): Homolog of NCBI NO: 322833 NR Description: glutamate-ammonia ligase (EC 6.3.1.2), cytosolic
MDLRSKARTLPGPVTDPSKLPKWNYDGSSTGQAPGEDSEVILYPQAIFKDPFRKGNNILVMCDCYTPAGVPIPTNKRYNAAKIFSNPDVAKEEPWYGIEQEYTLLQKDINWPLGWPVGGFPGPQGPYYCSIGADKSFGRDIVDAHYKACLFAGVNISGINGEVMPGQWEFQVGPTVGISAGDQVWVARYLLERITEIAGVVVTFDPKPIPGDWNGAGAHTNYSTESMRKDGGFKVIVDAVEKLKLKHKEHIAAYGEGNERRLTGKHETADINTFSWGVANRGASVRVGRETEQNGKGYFEDRRPASNMDPYVVTSMIAETTILWKP

SEQ ID NO: 67504 - DNA, 2194 bp, Triticum aestivum
  misc_feature (1)..(2194): Ceres Seq. ID no. 13660912
cccccctccactgatcatctcatctctttcttcttggtgcctccccccctggtttttgcttctgccactccatgtctcaatcttctcctttcttttccattgcccccgcacatgctggagcaggagggcaagctgcggctgccgctctcctgctccgttgccctgccgctcagctgccacctgccattcactgcttccgtctggctaaagtgtcgcctgccaagacactgagctcgcacctggtgcttccgcgcgccacactctcctcctttgcaaacgctgacgatggctccggtgcaaactcagatgcctcgggggagcagagcggaggatccgaactgtcagagatggcaaaggcattccatatttcaccacggatggccatgtcaatctctgtggtgattgcatttgcagctctcactgttcccctggccatgcgctcactgctcttccatgggacgaccaagatgaaggtgctggcatatctgaccctcttgtcaggattctacatggcatggaacattggagccaatgatgtggcaaatgccatggggacgtcggtcggatctggggctttgactctccggcaggcagtgttgactgcagctgtgctagagttctctggtgcattccttatgggcacccatgtcaccagcaccatgcagaagggcatcctcgtcacatccgtcttccaaggaaatgattctctgctctttgctggattgctgtcctccctcgctgctgctggtacatggttgcaggttgcttcctcttatggctggcctgtgtcaactacccattgtattgttggggctatggttggttttgggctggtatatggaggggtcaatgcagttttctggagctccttggctagagtatcttcatcatggcttatttctcctctgatgggtgctgcagtctcatttcttgtttacaagtgcatacgcaggttcgtgtacagcgcaccaaatccaggtcaagctgcagctgcttctgcacctattgcagtttttactggtgtcactgcaatctcgtttgccgctttccctctcagcaagacattttccattgccgttctgcaagcattagtatgtggggcaataggagctgtctttgttagcagggcaatcaaaaaacagcttggtgatctactgtcttcggaagcagaaaagatagcaacagctgacaatacagatgttcagcaaggtggatttgacgtcgctggccctagaggagctcaactgcagattgtctacggcgtatttggctacatgcaggtcctgtcagcatgcttcatgtcattcgctcatggaggcaatgatgtctccaatgccatagggcctctggccgcagctttgtctcttcttcaaggcgtagcaagcagcgctgagatagtcataccgactgaagtccttgcttggggtggttttggaattgtcgcagggcttacaatgtggggttatagagtcatagcaacaattggcaagaaaatcaccgaattaacacccacaagggggttcgcagcagagtttgcggccgcttctgtggtcttgtttgcatctaagcttgggttgccaatatctgctacacatacacttgttggtgcagtgatgggtgtaggatttgcaagaggtctcaacagagtcagagcagagactgttcgtgaaattgtggtctcctgggtggtcacaattccagttggtgctttgctatcagtcatctatacattaatcttgaccaagattctgaaatactttatgtgagtgctttgtgagatacagttgctgttttgagaggtccagccgttgtccctaaattttttatgctgtaaaagaatgtgtaacagtgaatagatgagccagctccgggagtttccagcagagaaattgaaaagatttgtcagagaaaataatcattttcctggcaacaaaacatgattaggataaagggtttacggtaaataatcatgtttgagactcccagcttcttcatcttttatctctaatgtaccacctatatgactatatctttatattttcttccagaaggtggaatatttcaatttcttgtagagatatgattaattgatcatacataatagacaatggttcgtctcactacccttgtaattatgccacattgacgattttgctgtttcagcgccactataaatgtgaatctttttctttgg

SEQ ID NO: 67505 - protein, 564 aa, Triticum aestivum
  peptide (1)..(564): Ceres Seq. ID no. 15220696
  misc_feature (151)..(549): Pfam Name: Phosphate transporter family Pfam Description: Phosphate transporter family
  misc_feature (120)..(330): Homolog of NCBI NO: 15642438 NR Description: pho4 family protein [Vibrio cholerae]
  misc_feature (329)..(552): Homolog of NCBI NO: 15642438 NR Description: pho4 family protein [Vibrio cholerae]
  misc_feature (135)..(330): Homolog of NCBI NO: 28897192 NR Description: pho4 family protein [Vibrio parahaemolyticus RIMD
  misc_feature (329)..(552): Homolog of NCBI NO: 28897192 NR Description: pho4 family protein [Vibrio parahaemolyticus RIMD
  misc_feature (133)..(556): Homolog of NCBI NO: 15618590 NR Description: Phosphate Permease [Chlamydophila pneumoniae
  misc_feature (54)..(564): Homolog of NCBI NO: 7522208 NR Description: probable phosphate permease - common ice plant
  misc_feature (47)..(564): Homolog of NCBI NO: 24079961 NR Description: phosphate transporter PHT2-1 [Medicago truncatula]
  misc_feature (1)..(564): Homolog of NCBI NO: 30688383 NR Description: phosphate transporter -related [Arabidopsis
  misc_feature (1)..(564): Homolog of NCBI NO: 30688378 NR Description: phosphate transporter -related [Arabidopsis
  misc_feature (54)..(564): Homolog of NCBI NO: 22450125 NR Description: phosphate hydrogen transporter [Spinacia oleracea]
MSQSSPFFSIAPAHAGAGGQAAAAALLLRCPAAQLPPAIHCFRLAKVSPAKTLSSHLVLPRATLSSFANADDGSGANSDASGEQSGGSELSEMAKAFHISPRMAMSISVVIAFAALTVPLAMRSLLFHGTTKMKVLAYLTLLSGFYMAWNIGANDVANAMGTSVGSGALTLRQAVLTAAVLEFSGAFLMGTHVTSTMQKGILVTSVFQGNDSLLFAGLLSSLAAAGTWLQVASSYGWPVSTTHCIVGAMVGFGLVYGGVNAVFWSSLARVSSSWLISPLMGAAVSFLVYKCIRRFVYSAPNPGQAAAASAPIAVFTGVTAISFAAFPLSKTFSIAVLQALVCGAIGAVFVSRAIKKQLGDLLSSEAEKIATADNTDVQQGGFDVAGPRGAQLQIVYGVFGYMQVLSACFMSFAHGGNDVSNAIGPLAAALSLLQGVASSAEIVIPTEVLAWGGFGIVAGLTMWGYRVIATIGKKITELTPTRGFAAEFAAASVVLFASKLGLPISATHTLVGAVMGVGFARGLNRVRAETVREIVVSWVVTIPVGALLSVIYTLILTKILKYFM

SEQ ID NO: 67506 - protein, 472 aa, Triticum aestivum
  peptide (1)..(472): Ceres Seq. ID no. 15220697
  misc_feature (59)..(457): Pfam Name: Phosphate transporter family Pfam Description: Phosphate transporter family
  misc_feature (28)..(238): Homolog of NCBI NO: 15642438 NR Description: pho4 family protein [Vibrio cholerae]
  misc_feature (237)..(460): Homolog of NCBI NO: 15642438 NR Description: pho4 family protein [Vibrio cholerae]
  misc_feature (43)..(238): Homolog of NCBI NO: 28897192 NR Description: pho4 family protein [Vibrio parahaemolyticus RIMD
  misc_feature (237)..(460): Homolog of NCBI NO: 28897192 NR Description: pho4 family protein [Vibrio parahaemolyticus RIMD
  misc_feature (41)..(464): Homolog of NCBI NO: 15618590 NR Description: Phosphate Permease [Chlamydophila pneumoniae
  misc_feature (1)..(472): Homolog of NCBI NO: 7522208 NR Description: probable phosphate permease - common ice plant
  misc_feature (1)..(472): Homolog of NCBI NO: 24079961 NR Description: phosphate transporter PHT2-1 [Medicago truncatula]
  misc_feature (1)..(472): Homolog of NCBI NO: 30688383 NR Description: phosphate transporter -related [Arabidopsis
  misc_feature (1)..(472): Homolog of NCBI NO: 30688378 NR Description: phosphate transporter -related [Arabidopsis
  misc_feature (1)..(472): Homolog of NCBI NO: 22450125 NR Description: phosphate hydrogen transporter [Spinacia oleracea]
MAKAFHISPRMAMSISVVIAFAALTVPLAMRSLLFHGTTKMKVLAYLTLLSGFYMAWNIGANDVANAMGTSVGSGALTLRQAVLTAAVLEFSGAFLMGTHVTSTMQKGILVTSVFQGNDSLLFAGLLSSLAAAGTWLQVASSYGWPVSTTHCIVGAMVGFGLVYGGVNAVFWSSLARVSSSWLISPLMGAAVSFLVYKCIRRFVYSAPNPGQAAAASAPIAVFTGVTAISFAAFPLSKTFSIAVLQALVCGAIGAVFVSRAIKKQLGDLLSSEAEKIATADNTDVQQGGFDVAGPRGAQLQIVYGVFGYMQVLSACFMSFAHGGNDVSNAIGPLAAALSLLQGVASSAEIVIPTEVLAWGGFGIVAGLTMWGYRVIATIGKKITELTPTRGFAAEFAAASVVLFASKLGLPISATHTLVGAVMGVGFARGLNRVRAETVREIVVSWVVTIPVGALLSVIYTLILTKILKYFM

SEQ ID NO: 67507 - protein, 462 aa, Triticum aestivum
  peptide (1)..(462): Ceres Seq. ID no. 15220698
  misc_feature (49)..(447): Pfam Name: Phosphate transporter family Pfam Description: Phosphate transporter family
  misc_feature (18)..(228): Homolog of NCBI NO: 15642438 NR Description: pho4 family protein [Vibrio cholerae]
  misc_feature (227)..(450): Homolog of NCBI NO: 15642438 NR Description: pho4 family protein [Vibrio cholerae]
  misc_feature (33)..(228): Homolog of NCBI NO: 28897192 NR Description: pho4 family protein [Vibrio parahaemolyticus RIMD
  misc_feature (227)..(450): Homolog of NCBI NO: 28897192 NR Description: pho4 family protein [Vibrio parahaemolyticus RIMD
  misc_feature (31)..(454): Homolog of NCBI NO: 15618590 NR Description: Phosphate Permease [Chlamydophila pneumoniae
  misc_feature (1)..(462): Homolog of NCBI NO: 7522208 NR Description: probable phosphate permease - common ice plant
  misc_feature (1)..(462): Homolog of NCBI NO: 24079961 NR Description: phosphate transporter PHT2-1 [Medicago truncatula]
  misc_feature (1)..(462): Homolog of NCBI NO: 30688383 NR Description: phosphate transporter -related [Arabidopsis
  misc_feature (1)..(462): Homolog of NCBI NO: 30688378 NR Description: phosphate transporter -related [Arabidopsis
  misc_feature (1)..(462): Homolog of NCBI NO: 22450125 NR Description: phosphate hydrogen transporter [Spinacia oleracea]
MAMSISVVIAFAALTVPLAMRSLLFHGTTKMKVLAYLTLLSGFYMAWNIGANDVANAMGTSVGSGALTLRQAVLTAAVLEFSGAFLMGTHVTSTMQKGILVTSVFQGNDSLLFAGLLSSLAAAGTWLQVASSYGWPVSTTHCIVGAMVGFGLVYGGVNAVFWSSLARVSSSWLISPLMGAAVSFLVYKCIRRFVYSAPNPGQAAAASAPIAVFTGVTAISFAAFPLSKTFSIAVLQALVCGAIGAVFVSRAIKKQLGDLLSSEAEKIATADNTDVQQGGFDVAGPRGAQLQIVYGVFGYMQVLSACFMSFAHGGNDVSNAIGPLAAALSLLQGVASSAEIVIPTEVLAWGGFGIVAGLTMWGYRVIATIGKKITELTPTRGFAAEFAAASVVLFASKLGLPISATHTLVGAVMGVGFARGLNRVRAETVREIVVSWVVTIPVGALLSVIYTLILTKILKYFM

SEQ ID NO: 67508 - DNA, 1551 bp, Triticum aestivum
  misc_feature (1)..(1551): Ceres Seq. ID no. 13664395
gcagatttgtttgccatcttttggggttttcttgatgagttcttggttggtatgagtggagtggtttgcgattctctttttcctgcttggaggaaggattaggttcttccatttcttgctgggtccgtgctcttgtgtgggcgtctagcttcttccatttcttgttgcattcctgctgatctctgtgggtgccagagatgagcgtaccgcacctgttccggtgtccgatcagcctggacatcttcacggacccggtgacgctctgcacggggcagacgtacgaccgtcaatgcatcgagcggtggctcgctgacggccaccgcacctgccccgtcacaatgcaggccctcggcgacgccgacaccaccgtgctcgtgcccaaccgcaccctgcgccacctcatcgagcgctggctctccgccgccaccgaccacagcctcccggagtcggcggacgacgatccatcgcttgcggcgctcaagcggtgcctccagtccgacgccacctccgccgccgccaagatcggcgcgctcaagaaggtcttggcgctggcgtccgagtccgacgtcggccgcgcgtgcatgctgcagctggggttcctctgcgtgctcctgccgctcgtcttccacgccgcgccgaccgcgccagcgcagcgccacgcggaggcggaggagctcgcgctgcagtgcgcgctcagcctcatgccgtcgaacgccgccgcgccgcagctggactgcctcaacatgctcaagaaggaggacaacctggcgtccttcgtccggctgctggggcgaggcagcggccgggccaaggcaggcctgtgccgcctcctggagaccgtcgccacggccgcggcgacgcgggacctggcgctcgtcgtggccgcctcgccgcgcgtgtggcaggcgctcctgccgctcctgcagcagcacgccggcccggcccccgacgcgcgcgcctcggaggctgcagtgcgcgcgatcgctgcggtctgcgcggccgagccggcgcgtggcagtgccatccaccacggcgcggtcggcgcgctcttcaggcacctgtcgtggtgggcgtacggcaagggcggcggggccgtgtccagcgcgctggcggcggtggaggcgctggcggagacggaggccggccggagggcggtggcgcgcgcgcccggcgcaacgcggattctcgtgaggcacgtgttcatgatgtcatcgagcaacgacgggagcgagcacgcggcggcggcgctgctagccgtgtgcagggagtcgcgggcggcgcggagcgaggcggtgggcgccggggtggtgacgcagctgctgctgctgcttcagagccagtgcggcgccagggctaaggccaaggcgagggcgctgctgaagctgctcaaatccaggtgaactagagctgagtactcattagagttagcgaggatttagatgttcttgtaagctgtaagtttctgcgtcaagaatgtctgccaatgacatggtattcaattccgggcaatttatgtagtaactctgggggattaaattgcccgggcgtttt

SEQ ID NO: 67509 - protein, 400 aa, Triticum aestivum
  peptide (1)..(400): Ceres Seq. ID no. 13664396
  misc_feature (2)..(73): Pfam Name: U-box domain Pfam Description: U-box domain
  misc_feature (1)..(375): Homolog of NCBI NO: 39545718 NR Description: OSJNBa0033G16.8 [Oryza sativa (japonica
  misc_feature (1)..(396): Homolog of NCBI NO: 21741126 NR Description: OSJNBa0070M12.4 [Oryza sativa (japonica
  misc_feature (1)..(396): Homolog of NCBI NO: 30686609 NR Description: expressed protein [Arabidopsis thaliana]
  misc_feature (1)..(396): Homolog of NCBI NO: 25408431 NR Description: hypothetical protein At2g35930 [imported] -
  misc_feature (1)..(400): Homolog of NCBI NO: 15237755 NR Description: expressed protein [Arabidopsis thaliana]
  misc_feature (1)..(398): Homolog of NCBI NO: 18402223 NR Description: expressed protein [Arabidopsis thaliana]
  misc_feature (1)..(398): Homolog of NCBI NO: 26451730 NR Description: unknown protein [Arabidopsis thaliana]
  misc_feature (1)..(398): Homolog of NCBI NO: 15222819 NR Description: expressed protein [Arabidopsis thaliana]
  misc_feature (1)..(397): Homolog of NCBI NO: 38344067 NR Description: OSJNBa0006B20.11 [Oryza sativa (japonica
  misc_feature (9)..(399): Homolog of NCBI NO: 38344067 NR Description: OSJNBa0006B20.11 [Oryza sativa (japonica
MSVPHLFRCPISLDIFTDPVTLCTGQTYDRQCIERWLADGHRTCPVTMQALGDADTTVLVPNRTLRHLIERWLSAATDHSLPESADDDPSLAALKRCLQSDATSAAAKIGALKKVLALASESDVGRACMLQLGFLCVLLPLVFHAAPTAPAQRHAEAEELALQCALSLMPSNAAAPQLDCLNMLKKEDNLASFVRLLGRGSGRAKAGLCRLLETVATAAATRDLALVVAASPRVWQALLPLLQQHAGPAPDARASEAAVRAIAAVCAAEPARGSAIHHGAVGALFRHLSWWAYGKGGGAVSSALAAVEALAETEAGRRAVARAPGATRILVRHVFMMSSSNDGSEHAAAALLAVCRESRAARSEAVGAGVVTQLLLLLQSQCGARAKAKARALLKLLKSR

SEQ ID NO: 67510 - protein, 353 aa, Triticum aestivum
  peptide (1)..(353): Ceres Seq. ID no. 13664397
  misc_feature (1)..(328): Homolog of NCBI NO: 39545718 NR Description: OSJNBa0033G16.8 [Oryza sativa (japonica
  misc_feature (1)..(349): Homolog of NCBI NO: 21741126 NR Description: OSJNBa0070M12.4 [Oryza sativa (japonica
  misc_feature (1)..(349): Homolog of NCBI NO: 30686609 NR Description: expressed protein [Arabidopsis thaliana]
  misc_feature (1)..(349): Homolog of NCBI NO: 25408431 NR Description: hypothetical protein At2g35930 [imported] -
  misc_feature (1)..(353): Homolog of NCBI NO: 15237755 NR Description: expressed protein [Arabidopsis thaliana]
  misc_feature (1)..(351): Homolog of NCBI NO: 18402223 NR Description: expressed protein [Arabidopsis thaliana]
  misc_feature (1)..(351): Homolog of NCBI NO: 26451730 NR Description: unknown protein [Arabidopsis thaliana]
  misc_feature (1)..(351): Homolog of NCBI NO: 15222819 NR Description: expressed protein [Arabidopsis thaliana]
  misc_feature (1)..(350): Homolog of NCBI NO: 38344067 NR Description: OSJNBa0006B20.11 [Oryza sativa (japonica
  misc_feature (1)..(352): Homolog of NCBI NO: 38344067 NR Description: OSJNBa0006B20.11 [Oryza sativa (japonica
MQALGDADTTVLVPNRTLRHLIERWLSAATDHSLPESADDDPSLAALKRCLQSDATSAAAKIGALKKVLALASESDVGRACMLQLGFLCVLLPLVFHAAPTAPAQRHAEAEELALQCALSLMPSNAAAPQLDCLNMLKKEDNLASFVRLLGRGSGRAKAGLCRLLETVATAAATRDLALVVAASPRVWQALLPLLQQHAGPAPDARASEAAVRAIAAVCAAEPARGSAIHHGAVGALFRHLSWWAYGKGGGAVSSALAAVEALAETEAGRRAVARAPGATRILVRHVFMMSSSNDGSEHAAAALLAVCRESRAARSEAVGAGVVTQLLLLLQSQCGARAKAKARALLKLLKSR

SEQ ID NO: 67511 - protein, 272 aa, Triticum aestivum
  peptide (1)..(272): Ceres Seq. ID no. 13664398
  misc_feature (1)..(247): Homolog of NCBI NO: 39545718 NR Description: OSJNBa0033G16.8 [Oryza sativa (japonica
  misc_feature (1)..(268): Homolog of NCBI NO: 21741126 NR Description: OSJNBa0070M12.4 [Oryza sativa (japonica
  misc_feature (1)..(268): Homolog of NCBI NO: 30686609 NR Description: expressed protein [Arabidopsis thaliana]
  misc_feature (1)..(268): Homolog of NCBI NO: 25408431 NR Description: hypothetical protein At2g35930 [imported] -
  misc_feature (1)..(272): Homolog of NCBI NO: 15237755 NR Description: expressed protein [Arabidopsis thaliana]
  misc_feature (1)..(270): Homolog of NCBI NO: 18402223 NR Description: expressed protein [Arabidopsis thaliana]
  misc_feature (1)..(270): Homolog of NCBI NO: 26451730 NR Description: unknown protein [Arabidopsis thaliana]
  misc_feature (1)..(270): Homolog of NCBI NO: 15222819 NR Description: expressed protein [Arabidopsis thaliana]
  misc_feature (1)..(269): Homolog of NCBI NO: 38344067 NR Description: OSJNBa0006B20.11 [Oryza sativa (japonica
  misc_feature (1)..(271): Homolog of NCBI NO: 38344067 NR Description: OSJNBa0006B20.11 [Oryza sativa (japonica
MLQLGFLCVLLPLVFHAAPTAPAQRHAEAEELALQCALSLMPSNAAAPQLDCLNMLKKEDNLASFVRLLGRGSGRAKAGLCRLLETVATAAATRDLALVVAASPRVWQALLPLLQQHAGPAPDARASEAAVRAIAAVCAAEPARGSAIHHGAVGALFRHLSWWAYGKGGGAVSSALAAVEALAETEAGRRAVARAPGATRILVRHVFMMSSSNDGSEHAAAALLAVCRESRAARSEAVGAGVVTQLLLLLQSQCGARAKAKARALLKLLKSR

SEQ ID NO: 67512 - DNA, 1742 bp, Triticum aestivum
  misc_feature (1)..(1742): Ceres Seq. ID no. 15169619
tggagtttggaaggaaatcttgggtggctgcagtcctctgatccttctcattctggaggcgtattcagtacaaaccaatattctggttggtgattgtcagcatggagatggcaagtagcgccaagtggtttgctgtggctcttgttttcatcactgtgatcctactcagggtcataagaggaaggaggatggccgctgctccagccagtgagaaaccacctccacctgtggtgaatggttttgctttactaggacttctacctaggcttcttacaatggaccttcgaactaagataaattgcctgcacgataagtatggcagtgtgttcacagttagtccttttggactaactaatgtaacctttctgatcggcccggaggtccaatcccatttctttcaagggttggagtcagagattaaccatggcaatcttcttgagttccttgtgctgatgtttggacaagagataggtcaaggtgtcgatgcagccactcggactgagcagtcccgcttttatctcgatgcattaaagcaatccaagttgaggagacatcttgatccaatgcttcaagaggtcgagagctactttggcaaatggggcctggaaggagaagttgatttaaaacatgagtttgaagagttgctcatgttgatatcgagccgatgtctactaggaaaagaggttcgggagaagatgtttgatgagttctataaactatttcgtgatgtcgaaaatggagtgaacatgatcagtgtcttcttcccatatattccaattcctgcaaaccgtaggcgtgacaaagcacgtcttaagctcatcgaattactttctggaactgtgaggtcacgtaagagctccccctcagtggaggaagatgtgctacaaagattgatagattccaagtataaagacggccgctccacaacggaaacagaggtaaccgggatgatcattgcattgatctttggtggaaagcacacaagttccctcgctagtacctggaccggagcttgcctactcacccatccaaagttcttagcggctgcatcccaggagcaaaaggaaatcatgatgaaatacgaggacaaaatagaatatgatgccttgttagagatgaatacccttcataattgtatcaaagaggcacttcggttgaacccaccaacaacaatgttggttcgcaaggcacttaaacatttcacagtgcggacaagacaaggccaagagtatggcattcccaaggggcatactcttgcaagtcccataatacaaaacaattacttgccttacatttataaggaccccgaggtatatgatccagatcggtttggtcccgtaaggcaggaggacgtggttggcggcaagttttcttatacatcctttggtggtggaaggcatttttgcagtggggatgcctatgcttacatgcaagttaaagttatatggagccacttgctcaacaactttgatctcaaattattatctccttatcccaagactgactggagtaagttaatcccagagcctcaagggaatatgatggttagctacaagagacgccagctgctaggctagcttgctatatatatcatttgcatgaggagcaccggcttgcatgcttgtgtttgtatgggtgcatcacttattacttgtatttgtgtatgtttttatgattgtaataattttcagtaacccttggatgagctatatatggtcttctcatagtgtgtgccactagtg

SEQ ID NO: 67513 - protein, 491 aa, Triticum aestivum
  peptide (1)..(491): Ceres Seq. ID no. 15169620
  misc_feature (71)..(488): Homolog of NCBI NO: 28395121 NR Description: lanosterol 14 alpha demethylase; ERG11
  misc_feature (1)..(487): Homolog of NCBI NO: 21618866 NR Description: cytochrome P450, 51 [Mus musculus]
  misc_feature (71)..(490): Homolog of NCBI NO: 4586676 NR Description: sterol 14-demethylase [Oryza sativa (japonica
  misc_feature (1)..(489): Homolog of NCBI NO: 15221075 NR Description: obtusifoliol 14-demethylase (CYP51) [Arabidopsis
  misc_feature (40)..(490): Homolog of NCBI NO: 6166036 NR Description: Cytochrome P450 51 (CYPL1) (P450-L1A1)
  misc_feature (14)..(489): Homolog of NCBI NO: 27461067 NR Description: obtusifoliol-14-demethylase [Nicotiana tabacum]
  misc_feature (1)..(489): Homolog of NCBI NO: 18000074 NR Description: obtusifoliol-14-demethylase [Nicotiana tabacum]
  misc_feature (12)..(490): Homolog of NCBI NO: 27542762 NR Description: cytochrome P450-like protein [Sorghum bicolor]
  misc_feature (12)..(490): Homolog of NCBI NO: 5921924 NR Description: Cytochrome P450 51 (CYPL1) (P450-L1A1)
  misc_feature (1)..(489): Homolog of NCBI NO: 34901524 NR Description: putative cytochrome P450(Obtusifoliol 14-alpha
MEMASSAKWFAVALVFITVILLRVIRGRRMAAAPASEKPPPPVVNGFALLGLLPRLLTMDLRTKINCLHDKYGSVFTVSPFGLTNVTFLIGPEVQSHFFQGLESEINHGNLLEFLVLMFGQEIGQGVDAATRTEQSRFYLDALKQSKLRRHLDPMLQEVESYFGKWGLEGEVDLKHEFEELLMLISSRCLLGKEVREKMFDEFYKLFRDVENGVNMISVFFPYIPIPANRRRDKARLKLIELLSGTVRSRKSSPSVEEDVLQRLIDSKYKDGRSTTETEVTGMIIALIFGGKHTSSLASTWTGACLLTHPKFLAAASQEQKEIMMKYEDKIEYDALLEMNTLHNCIKEALRLNPPTTMLVRKALKHFTVRTRQGQEYGIPKGHTLASPIIQNNYLPYIYKDPEVYDPDRFGPVRQEDVVGGKFSYTSFGGGRHFCSGDAYAYMQVKVIWSHLLNNFDLKLLSPYPKTDWSKLIPEPQGNMMVSYKRRQLLG

SEQ ID NO: 67514 - protein, 489 aa, Triticum aestivum
  peptide (1)..(489): Ceres Seq. ID no. 15169621
  misc_feature (69)..(486): Homolog of NCBI NO: 28395121 NR Description: lanosterol 14 alpha demethylase; ERG11
  misc_feature (1)..(485): Homolog of NCBI NO: 21618866 NR Description: cytochrome P450, 51 [Mus musculus]
  misc_feature (69)..(488): Homolog of NCBI NO: 4586676 NR Description: sterol 14-demethylase [Oryza sativa (japonica
  misc_feature (1)..(487): Homolog of NCBI NO: 15221075 NR Description: obtusifoliol 14-demethylase (CYP51) [Arabidopsis
  misc_feature (38)..(488): Homolog of NCBI NO: 6166036 NR Description: Cytochrome P450 51 (CYPL1) (P450-L1A1)
  misc_feature (12)..(487): Homolog of NCBI NO: 27461067 NR Description: obtusifoliol-14-demethylase [Nicotiana tabacum]
  misc_feature (1)..(487): Homolog of NCBI NO: 18000074 NR Description: obtusifoliol-14-demethylase [Nicotiana tabacum]
  misc_feature (10)..(488): Homolog of NCBI NO: 27542762 NR Description: cytochrome P450-like protein [Sorghum bicolor]
  misc_feature (10)..(488): Homolog of NCBI NO: 5921924 NR Description: Cytochrome P450 51 (CYPL1) (P450-L1A1)
  misc_feature (1)..(487): Homolog of NCBI NO: 34901524 NR Description: putative cytochrome P450(Obtusifoliol 14-alpha
MASSAKWFAVALVFITVILLRVIRGRRMAAAPASEKPPPPVVNGFALLGLLPRLLTMDLRTKINCLHDKYGSVFTVSPFGLTNVTFLIGPEVQSHFFQGLESEINHGNLLEFLVLMFGQEIGQGVDAATRTEQSRFYLDALKQSKLRRHLDPMLQEVESYFGKWGLEGEVDLKHEFEELLMLISSRCLLGKEVREKMFDEFYKLFRDVENGVNMISVFFPYIPIPANRRRDKARLKLIELLSGTVRSRKSSPSVEEDVLQRLIDSKYKDGRSTTETEVTGMIIALIFGGKHTSSLASTWTGACLLTHPKFLAAASQEQKEIMMKYEDKIEYDALLEMNTLHNCIKEALRLNPPTTMLVRKALKHFTVRTRQGQEYGIPKGHTLASPIIQNNYLPYIYKDPEVYDPDRFGPVRQEDVVGGKFSYTSFGGGRHFCSGDAYAYMQVKVIWSHLLNNFDLKLLSPYPKTDWSKLIPEPQGNMMVSYKRRQLLG

SEQ ID NO: 67515 - protein, 462 aa, Triticum aestivum
  peptide (1)..(462): Ceres Seq. ID no. 15169622
  misc_feature (42)..(459): Homolog of NCBI NO: 28395121 NR Description: lanosterol 14 alpha demethylase; ERG11
  misc_feature (1)..(458): Homolog of NCBI NO: 21618866 NR Description: cytochrome P450, 51 [Mus musculus]
  misc_feature (42)..(461): Homolog of NCBI NO: 4586676 NR Description: sterol 14-demethylase [Oryza sativa (japonica
  misc_feature (1)..(460): Homolog of NCBI NO: 15221075 NR Description: obtusifoliol 14-demethylase (CYP51) [Arabidopsis
  misc_feature (11)..(461): Homolog of NCBI NO: 6166036 NR Description: Cytochrome P450 51 (CYPL1) (P450-L1A1)
  misc_feature (1)..(460): Homolog of NCBI NO: 27461067 NR Description: obtusifoliol-14-demethylase [Nicotiana tabacum]
  misc_feature (1)..(460): Homolog of NCBI NO: 18000074 NR Description: obtusifoliol-14-demethylase [Nicotiana tabacum]
  misc_feature (1)..(461): Homolog of NCBI NO: 27542762 NR Description: cytochrome P450-like protein [Sorghum bicolor]
  misc_feature (1)..(461): Homolog of NCBI NO: 5921924 NR Description: Cytochrome P450 51 (CYPL1) (P450-L1A1)
  misc_feature (1)..(460): Homolog of NCBI NO: 34901524 NR Description: putative cytochrome P450(Obtusifoliol 14-alpha
MAAAPASEKPPPPVVNGFALLGLLPRLLTMDLRTKINCLHDKYGSVFTVSPFGLTNVTFLIGPEVQSHFFQGLESEINHGNLLEFLVLMFGQEIGQGVDAATRTEQSRFYLDALKQSKLRRHLDPMLQEVESYFGKWGLEGEVDLKHEFEELLMLISSRCLLGKEVREKMFDEFYKLFRDVENGVNMISVFFPYIPIPANRRRDKARLKLIELLSGTVRSRKSSPSVEEDVLQRLIDSKYKDGRSTTETEVTGMIIALIFGGKHTSSLASTWTGACLLTHPKFLAAASQEQKEIMMKYEDKIEYDALLEMNTLHNCIKEALRLNPPTTMLVRKALKHFTVRTRQGQEYGIPKGHTLASPIIQNNYLPYIYKDPEVYDPDRFGPVRQEDVVGGKFSYTSFGGGRHFCSGDAYAYMQVKVIWSHLLNNFDLKLLSPYPKTDWSKLIPEPQGNMMVSYKRRQLLG

SEQ ID NO: 67516 - DNA, 1197 bp, Triticum aestivum
  misc_feature (1)..(1197): Ceres Seq. ID no. 13663748
gaccaacttggagcctccctgttcttaaaaaatcaaccaacttgccagcgaacgagcgaccaccgacggctcctcgtcgccgccggtgatcgaggtgggccccgcaggccggatctcgggaggaggaggaggagcaatgtcgcgggcgtcgctgtccccgtcgtcgtcgggcgacgaggaggaggaggacgacgagggggtcgacgggtaccgcaagggcggataccacgccgtcctcctcctcctcctcgcctccccgcggccacacctcgactcgctccctcgagatcatctgttccatccttttgaggctgagatggcggctaccttcaatgttaatgctgaggcaggccttaaaaagcttgatggctaccttctgtctcgcagttacatctctggataccaagcttccaaggatgacttggctgtgtattcagagttctcagttgctccaccatcaacttgcaccaatgttgcaaggtggtacaatcacattgatgcactcctgaagctgagtggagttactgcccctggtcaaggtgtgaaggttctgtcatcagttgtccctgaaacctcaactactgatgttgctgaggctcctgcagctgatgatgacgatgacagcgatgttgacctttttggagaggaaaccgaggaggagaaaaaggcagctgaagagcgcgctgccaaagcaaaggcttctaccaagaagaaagaatctggcaagtcatcagttttgcttgatgttaagccatgggacgatgagaccgacatggtcaagctggaggaagctgtccgaagcatcaagatggagggccttctgtggggtgcttccaagctcatgcccgttggatatggcatcaagaagctccagattatgatgaccatcattgatgacctcgtctctgtcgacactcttattgaagaccatctctgcgttgaaccagccaacgagtacatccagagctgtgacattgttgccttcaacaaaatctaaatcttcctgaggcaggtgatggcggtgggcgcacaatatatctacagttttctgttgccgtgatggtgtcgtagctaaagcaagcataacatatctgccctgtgaggtttttggaccttagatcgagttgattcgtagtattactactgagtgttatttgcttcgtatgaaatgagacaatgtggttggattcctgttgc

SEQ ID NO: 67517 - protein, 286 aa, Triticum aestivum
  peptide (1)..(286): Ceres Seq. ID no. 13663749
  misc_feature (197)..(286): Pfam Name: EF-1 guanine nucleotide exchange domain Pfam Description: EF-1 guanine nucleotide exchange domain
  misc_feature (61)..(286): Homolog of NCBI NO: 480620 NR Description: translation elongation factor eEF-1 beta-A1 chain
  misc_feature (61)..(286): Homolog of NCBI NO: 21593028 NR Description: putative elongation factor beta-1 [Arabidopsis
  misc_feature (61)..(286): Homolog of NCBI NO: 15224107 NR Description: elongation factor beta-1 -related [Arabidopsis
  misc_feature (61)..(286): Homolog of NCBI NO: 30691619 NR Description: elongation factor 1-beta -related [Arabidopsis
  misc_feature (61)..(286): Homolog of NCBI NO: 25299531 NR Description: probable elongation factor 1-beta
  misc_feature (61)..(286): Homolog of NCBI NO: 38232568 NR Description: translational elongation factor 1 subunit Bbeta
  misc_feature (61)..(286): Homolog of NCBI NO: 6015064 NR Description: ELONGATION FACTOR 1-BETA (EF-1-BETA)
  misc_feature (61)..(286): Homolog of NCBI NO: 3894214 NR Description: elongation factor 1 beta 2
  misc_feature (61)..(286): Homolog of NCBI NO: 6166140 NR Description: ELONGATION FACTOR 1-BETA (EF-1-BETA)
  misc_feature (61)..(286): Homolog of NCBI NO: 7711024 NR Description: putative elongation factor 1 beta [Hordeum
MSRASLSPSSSGDEEEEDDEGVDGYRKGGYHAVLLLLLASPRPHLDSLPRDHLFHPFEAEMAATFNVNAEAGLKKLDGYLLSRSYISGYQASKDDLAVYSEFSVAPPSTCTNVARWYNHIDALLKLSGVTAPGQGVKVLSSVVPETSTTDVAEAPAADDDDDSDVDLFGEETEEEKKAAEERAAKAKASTKKKESGKSSVLLDVKPWDDETDMVKLEEAVRSIKMEGLLWGASKLMPVGYGIKKLQIMMTIIDDLVSVDTLIEDHLCVEPANEYIQSCDIVAFNKI

SEQ ID NO: 67518 - protein, 226 aa, Triticum aestivum
  peptide (1)..(226): Ceres Seq. ID no. 13663750
  misc_feature (137)..(226): Pfam Name: EF-1 guanine nucleotide exchange domain Pfam Description: EF-1 guanine nucleotide exchange domain
  misc_feature (1)..(226): Homolog of NCBI NO: 480620 NR Description: translation elongation factor eEF-1 beta-A1 chain
  misc_feature (1)..(226): Homolog of NCBI NO: 21593028 NR Description: putative elongation factor beta-1 [Arabidopsis
  misc_feature (1)..(226): Homolog of NCBI NO: 15224107 NR Description: elongation factor beta-1 -related [Arabidopsis
  misc_feature (1)..(226): Homolog of NCBI NO: 30691619 NR Description: elongation factor 1-beta -related [Arabidopsis
  misc_feature (1)..(226): Homolog of NCBI NO: 25299531 NR Description: probable elongation factor 1-beta
  misc_feature (1)..(226): Homolog of NCBI NO: 38232568 NR Description: translational elongation factor 1 subunit Bbeta
  misc_feature (1)..(226): Homolog of NCBI NO: 6015064 NR Description: ELONGATION FACTOR 1-BETA (EF-1-BETA)
  misc_feature (1)..(226): Homolog of NCBI NO: 3894214 NR Description: elongation factor 1 beta 2
  misc_feature (1)..(226): Homolog of NCBI NO: 6166140 NR Description: ELONGATION FACTOR 1-BETA (EF-1-BETA)
  misc_feature (1)..(226): Homolog of NCBI NO: 7711024 NR Description: putative elongation factor 1 beta [Hordeum
MAATFNVNAEAGLKKLDGYLLSRSYISGYQASKDDLAVYSEFSVAPPSTCTNVARWYNHIDALLKLSGVTAPGQGVKVLSSVVPETSTTDVAEAPAADDDDDSDVDLFGEETEEEKKAAEERAAKAKASTKKKESGKSSVLLDVKPWDDETDMVKLEEAVRSIKMEGLLWGASKLMPVGYGIKKLQIMMTIIDDLVSVDTLIEDHLCVEPANEYIQSCDIVAFNKI

SEQ ID NO: 67519 - DNA, 813 bp, Triticum aestivum
  misc_feature (1)..(813): Ceres Seq. ID no. 13663751
gcatccaacccctcctgctgctgctgtgttgcccgtgttgccgccccgaccgccgcctccaccacccacccacccacaccgcgccggcctcttccccctgtcccgtctccctcatggcctccgccgccgcatccgccgtctccttcgccaggcccgtcaaggcaatcaatgccaactcggtctccttctctgctccaaggaaaggcaatgtatccttccgtcttcagccagttccccagagattttctgtttcctgtgctgccaaaaaggagacagtagaaaaggtttgtgatattgtgaagagccagcttgcgcttgctgacgacactgtagtttctggctcctctacgtttgctgatcttggtgccgattccttggacacggttgagattgtcatgggcctcgaggaggctttcgggatcagcgtggaggagtcgagtgcgcagaccatcgcaacggtggaagacgccgccaacctcatcgacagccttgttgcaaactaaacatatttctttgcaataatgggctacccactgcaatcgttgctgctggagatgatcccgtttgacgtgctagattttactgtggagagtcggtgacatctgtatcagtgtttttgcctgtcttgccatattaagacattatttattaagcgaatgttgaaggaattttttcttgttgaagctgtgttggagactgatttcagggtctgaacatgctgtgctggaattaactacccctgtctttcttgggttcaaagaaaaaaaaaaaaaaaaaagcttatcgataccgtcgacctcgagggggggcccg

SEQ ID NO: 67520 - protein, 166 aa, Triticum aestivum
  peptide (1)..(166): Ceres Seq. ID no. 13663752
  misc_feature (93)..(160): Pfam Name: Phosphopantetheine attachment site Pfam Description: Phosphopantetheine attachment site
  misc_feature (60)..(164): Homolog of NCBI NO: 2465010 NR Description: acyl carrier protein [Fragaria vesca]
  misc_feature (38)..(164): Homolog of NCBI NO: 20137323 NR Description: Acyl carrier protein 1, chloroplast precursor
  misc_feature (40)..(163): Homolog of NCBI NO: 30102979 NR Description: putative acyl carrier protein, 3'-partial
  misc_feature (38)..(163): Homolog of NCBI NO: 5669599 NR Description: acyl carrier protein [Coriandrum sativum]
  misc_feature (38)..(165): Homolog of NCBI NO: 4457219 NR Description: acyl carrier protein [Capsicum chinense]
  misc_feature (60)..(165): Homolog of NCBI NO: 166975 NR Description: acyl carrier protein III precursor
  misc_feature (38)..(165): Homolog of NCBI NO: 16518983 NR Description: acyl carrier protein [Olea europaea]
  misc_feature (52)..(165): Homolog of NCBI NO: 7442270 NR Description: acyl carrier protein - maize
  misc_feature (38)..(165): Homolog of NCBI NO: 113172 NR Description: Acyl carrier protein III, chloroplast precursor
  misc_feature (38)..(164): Homolog of NCBI NO: 113169 NR Description: Acyl carrier protein II, chloroplast precursor
IQPLLLLLCCPCCRPDRRLHHPPTHTAPASSPCPVSLMASAAASAVSFARPVKAINANSVSFSAPRKGNVSFRLQPVPQRFSVSCAAKKETVEKVCDIVKSQLALADDTVVSGSSTFADLGADSLDTVEIVMGLEEAFGISVEESSAQTIATVEDAANLIDSLVAN

SEQ ID NO: 67521 - protein, 129 aa, Triticum aestivum
  peptide (1)..(129): Ceres Seq. ID no. 13663753
  misc_feature (56)..(123): Pfam Name: Phosphopantetheine attachment site Pfam Description: Phosphopantetheine attachment site
  misc_feature (23)..(127): Homolog of NCBI NO: 2465010 NR Description: acyl carrier protein [Fragaria vesca]
  misc_feature (1)..(127): Homolog of NCBI NO: 20137323 NR Description: Acyl carrier protein 1, chloroplast precursor
  misc_feature (3)..(126): Homolog of NCBI NO: 30102979 NR Description: putative acyl carrier protein, 3'-partial
  misc_feature (1)..(126): Homolog of NCBI NO: 5669599 NR Description: acyl carrier protein [Coriandrum sativum]
  misc_feature (1)..(128): Homolog of NCBI NO: 4457219 NR Description: acyl carrier protein [Capsicum chinense]
  misc_feature (23)..(128): Homolog of NCBI NO: 166975 NR Description: acyl carrier protein III precursor
  misc_feature (1)..(128): Homolog of NCBI NO: 16518983 NR Description: acyl carrier protein [Olea europaea]
  misc_feature (15)..(128): Homolog of NCBI NO: 7442270 NR Description: acyl carrier protein - maize
  misc_feature (1)..(128): Homolog of NCBI NO: 113172 NR Description: Acyl carrier protein III, chloroplast precursor
  misc_feature (1)..(127): Homolog of NCBI NO: 113169 NR Description: Acyl carrier protein II, chloroplast precursor
MASAAASAVSFARPVKAINANSVSFSAPRKGNVSFRLQPVPQRFSVSCAAKKETVEKVCDIVKSQLALADDTVVSGSSTFADLGADSLDTVEIVMGLEEAFGISVEESSAQTIATVEDAANLIDSLVAN

SEQ ID NO: 67522 - protein, 96 aa, Triticum aestivum
  peptide (1)..(96): Ceres Seq. ID no. 13663754
  misc_feature (2)..(25): Homolog of NCBI NO: 21322711 NR Description: pherophorin-dz1 protein [Volvox carteri f.
  misc_feature (2)..(25): Homolog of NCBI NO: 21322711 NR Description: pherophorin-dz1 protein [Volvox carteri f.
  misc_feature (2)..(25): Homolog of NCBI NO: 11068076 NR Description: PxORF73 peptide [Plutella xylostella
  misc_feature (2)..(25): Homolog of NCBI NO: 6523547 NR Description: hydroxyproline-rich glycoprotein DZ-HRGP
  misc_feature (2)..(25): Homolog of NCBI NO: 6523547 NR Description: hydroxyproline-rich glycoprotein DZ-HRGP
  misc_feature (2)..(25): Homolog of NCBI NO: 6523547 NR Description: hydroxyproline-rich glycoprotein DZ-HRGP
  misc_feature (2)..(25): Homolog of NCBI NO: 6523547 NR Description: hydroxyproline-rich glycoprotein DZ-HRGP
  misc_feature (2)..(25): Homolog of NCBI NO: 6523547 NR Description: hydroxyproline-rich glycoprotein DZ-HRGP
  misc_feature (2)..(25): Homolog of NCBI NO: 6523547 NR Description: hydroxyproline-rich glycoprotein DZ-HRGP
HPTPPAAAVLPVLPPRPPPPPPTHPHRAGLFPLSRLPHGLRRRIRRLLRQARQGNQCQLGLLLCSKERQCILPSSASSPEIFCFLCCQKGDSRKGL

SEQ ID NO: 67523 - DNA, 1894 bp, Triticum aestivum
  misc_feature (1)..(1894): Ceres Seq. ID no. 15169623
aacccaaattaacagtagcccgcggcggcctgcgcgtgagcgatgcccgccgcggcattcgcctccgcgttcgcgtctcctcctcctccgtgggccccacgaccgcctcctcgccacgccagcctccgcctgcccccgccaaggagcagcagcaacaacagcggcggcggcggaggggacaagcccaccacctcgtgggtcagccccgactggctgacgtcgctgtctcgctcggtgctcggccgggggaacgacgactcggggatacccgtcgcctccgccaagctcgacgacgtgcaggacctcctcgggggcgcgctcttcctgccgctcttcaagtggttccgcgaggaagggcccgtctaccgcctcgccgcggggccgcgcgacttcgtcatcgtcagcgaccccgccgtagccaagcacgtcctccgcgggtacggcacgcggtacgagaaggggctcgtcgccgaggtctccgagttcctctttggctctgggttcgccatcgccgagggagcgctctggacggtgagacgtagagcagttgtaccatctctacacaaaagatttctctcagtaatggtcgataaagtgttctgtaaatgtgctgagagattggtggaaaagctcgagacttatgctttgagtggtgaacctgttaatatggaagcgaggttttcgcaaatgacgttagatgtgattggtttatccttgttcaactacaactttgattccctcacatcagatagtcctgttattgatgctgtttacactgcactcaaagaagcagaggctcgttctacagatcttttaccatactggcagatcgatttgctgtgcaagattgtccctagacagataaaagcagaaaaagcagttaacacaataaggaataccgttgaagacctaattacaaaatgcaaggcaattgtagatgctgaaaatgaacagattgagggtgaagaatatgtcagcagtttgcagttacgtgatgatctattgtcaatgttagttgctggtcatgaaacaacaggttctgtactgacatggaccatttatcttctcagtaagggtccagtagcactaaggaaagcccaagatgaggtagatcgtgttctacaaggtagactccccagatatgaagatgtaaaagagctgaagtacttgatgcgctgtatcaatgagtccatgcggctatacccacatcctcctgtgctgatacggcgtgcactagttgatgatgtgcttcctggaaactacaaggttaagactggtcaagatgttatgatttctgtgtacaatatacacagatcacccgaggtatgggacagagcagatgaattcattccagagagatttgatttggagggtcccattccaaatgagtcaaacactgatttcaggtttatcccttttagtggaggtcctcgaaaatgtgttggagatcagtttgctcttttagaagcaattgtggcacttgcaattgtcatacaaaagatggacattcagcttgtggcagatcaaaaaatcagcatgaccactggggccactatccatacaaccaatggactgtatatgaatgtaagtctgcgtaaagttgagcaagaagctgacttagcactgagtccatcgggctagacaaaagcaaagcaaaacagggtgggattagtacaggcagaggcaacagaattgtcaatacgtgagatgcctctgcaattaaatttggacatgtttggaatgtttccttgtccagaaatttgagatacctctcttcagttcttgtatcttttcagcaggttccagctatcaatggctaataggttgcgtaaactgtaaagaaatggatcattgacttgctgattttgacagttaatgtaaatcggtggtacct

SEQ ID NO: 67524 - protein, 532 aa, Triticum aestivum
  peptide (1)..(532): Ceres Seq. ID no. 15169624
  misc_feature (69)..(333): Homolog of NCBI NO: 25282642 NR Description: probable cytochrome P450 [imported] - Arabidopsis
  misc_feature (69)..(333): Homolog of NCBI NO: 18398119 NR Description: cytochrome P450, putative [Arabidopsis thaliana]
  misc_feature (305)..(518): Homolog of NCBI NO: 15231755 NR Description: cytochrome p450 family [Arabidopsis thaliana]
  misc_feature (3)..(334): Homolog of NCBI NO: 15231755 NR Description: cytochrome p450 family [Arabidopsis thaliana]
  misc_feature (305)..(518): Homolog of NCBI NO: 20258842 NR Description: putative cytochrome P450 [Arabidopsis thaliana]
  misc_feature (3)..(334): Homolog of NCBI NO: 20258842 NR Description: putative cytochrome P450 [Arabidopsis thaliana]
  misc_feature (305)..(518): Homolog of NCBI NO: 40218379 NR Description: chloroplast carotenoid epsilon-ring hydroxylase
  misc_feature (3)..(334): Homolog of NCBI NO: 40218379 NR Description: chloroplast carotenoid epsilon-ring hydroxylase
  misc_feature (305)..(515): Homolog of NCBI NO: 37536604 NR Description: putative cytochrome P450 monooxygenase
  misc_feature (1)..(334): Homolog of NCBI NO: 37536604 NR Description: putative cytochrome P450 monooxygenase
MPAAAFASAFASPPPPWAPRPPPRHASLRLPPPRSSSNNSGGGGGDKPTTSWVSPDWLTSLSRSVLGRGNDDSGIPVASAKLDDVQDLLGGALFLPLFKWFREEGPVYRLAAGPRDFVIVSDPAVAKHVLRGYGTRYEKGLVAEVSEFLFGSGFAIAEGALWTVRRRAVVPSLHKRFLSVMVDKVFCKCAERLVEKLETYALSGEPVNMEARFSQMTLDVIGLSLFNYNFDSLTSDSPVIDAVYTALKEAEARSTDLLPYWQIDLLCKIVPRQIKAEKAVNTIRNTVEDLITKCKAIVDAENEQIEGEEYVSSLQLRDDLLSMLVAGHETTGSVLTWTIYLLSKGPVALRKAQDEVDRVLQGRLPRYEDVKELKYLMRCINESMRLYPHPPVLIRRALVDDVLPGNYKVKTGQDVMISVYNIHRSPEVWDRADEFIPERFDLEGPIPNESNTDFRFIPFSGGPRKCVGDQFALLEAIVALAIVIQKMDIQLVADQKISMTTGATIHTTNGLYMNVSLRKVEQEADLALSPSG

SEQ ID NO: 67525 - protein, 352 aa, Triticum aestivum
  peptide (1)..(352): Ceres Seq. ID no. 15169625
  misc_feature (1)..(153): Homolog of NCBI NO: 25282642 NR Description: probable cytochrome P450 [imported] - Arabidopsis
  misc_feature (1)..(153): Homolog of NCBI NO: 18398119 NR Description: cytochrome P450, putative [Arabidopsis thaliana]
  misc_feature (125)..(338): Homolog of NCBI NO: 15231755 NR Description: cytochrome p450 family [Arabidopsis thaliana]
  misc_feature (1)..(154): Homolog of NCBI NO: 15231755 NR Description: cytochrome p450 family [Arabidopsis thaliana]
  misc_feature (125)..(338): Homolog of NCBI NO: 20258842 NR Description: putative cytochrome P450 [Arabidopsis thaliana]
  misc_feature (1)..(154): Homolog of NCBI NO: 20258842 NR Description: putative cytochrome P450 [Arabidopsis thaliana]
  misc_feature (125)..(338): Homolog of NCBI NO: 40218379 NR Description: chloroplast carotenoid epsilon-ring hydroxylase
  misc_feature (1)..(154): Homolog of NCBI NO: 40218379 NR Description: chloroplast carotenoid epsilon-ring hydroxylase
  misc_feature (125)..(335): Homolog of NCBI NO: 37536604 NR Description: putative cytochrome P450 monooxygenase
  misc_feature (1)..(154): Homolog of NCBI NO: 37536604 NR Description: putative cytochrome P450 monooxygenase
MVDKVFCKCAERLVEKLETYALSGEPVNMEARFSQMTLDVIGLSLFNYNFDSLTSDSPVIDAVYTALKEAEARSTDLLPYWQIDLLCKIVPRQIKAEKAVNTIRNTVEDLITKCKAIVDAENEQIEGEEYVSSLQLRDDLLSMLVAGHETTGSVLTWTIYLLSKGPVALRKAQDEVDRVLQGRLPRYEDVKELKYLMRCINESMRLYPHPPVLIRRALVDDVLPGNYKVKTGQDVMISVYNIHRSPEVWDRADEFIPERFDLEGPIPNESNTDFRFIPFSGGPRKCVGDQFALLEAIVALAIVIQKMDIQLVADQKISMTTGATIHTTNGLYMNVSLRKVEQEADLALSPSG

SEQ ID NO: 67526 - protein, 324 aa, Triticum aestivum
  peptide (1)..(324): Ceres Seq. ID no. 15169626
  misc_feature (1)..(125): Homolog of NCBI NO: 25282642 NR Description: probable cytochrome P450 [imported] - Arabidopsis
  misc_feature (1)..(125): Homolog of NCBI NO: 18398119 NR Description: cytochrome P450, putative [Arabidopsis thaliana]
  misc_feature (97)..(310): Homolog of NCBI NO: 15231755 NR Description: cytochrome p450 family [Arabidopsis thaliana]
  misc_feature (1)..(126): Homolog of NCBI NO: 15231755 NR Description: cytochrome p450 family [Arabidopsis thaliana]
  misc_feature (97)..(310): Homolog of NCBI NO: 20258842 NR Description: putative cytochrome P450 [Arabidopsis thaliana]
  misc_feature (1)..(126): Homolog of NCBI NO: 20258842 NR Description: putative cytochrome P450 [Arabidopsis thaliana]
  misc_feature (97)..(310): Homolog of NCBI NO: 40218379 NR Description: chloroplast carotenoid epsilon-ring hydroxylase
  misc_feature (1)..(126): Homolog of NCBI NO: 40218379 NR Description: chloroplast carotenoid epsilon-ring hydroxylase
  misc_feature (97)..(307): Homolog of NCBI NO: 37536604 NR Description: putative cytochrome P450 monooxygenase
  misc_feature (1)..(126): Homolog of NCBI NO: 37536604 NR Description: putative cytochrome P450 monooxygenase
MEARFSQMTLDVIGLSLFNYNFDSLTSDSPVIDAVYTALKEAEARSTDLLPYWQIDLLCKIVPRQIKAEKAVNTIRNTVEDLITKCKAIVDAENEQIEGEEYVSSLQLRDDLLSMLVAGHETTGSVLTWTIYLLSKGPVALRKAQDEVDRVLQGRLPRYEDVKELKYLMRCINESMRLYPHPPVLIRRALVDDVLPGNYKVKTGQDVMISVYNIHRSPEVWDRADEFIPERFDLEGPIPNESNTDFRFIPFSGGPRKCVGDQFALLEAIVALAIVIQKMDIQLVADQKISMTTGATIHTTNGLYMNVSLRKVEQEADLALSPSG

SEQ ID NO: 67527 - DNA, 1073 bp, Triticum aestivum
  misc_feature (1)..(1073): Ceres Seq. ID no. 13664032
gattgacgcgcttccactcctgttcttggagccgctgattcggagccttccgggtctggttggtgctgggttttttgatcggcttttgagttgaccggagaagggaggagctgctgctctgtttcttggctaacttcggtgggcggcgatgccggactccgacaacgactccggcgggccgagcaacgcggacttctcgtcgcccaaggagcaggacaggttcctgccgatcgccaacgtgagccggatcatgaagaaggcgctgccggccaacgccaagatctccaaggacgccaaggagacggtgcaggagtgcgtgtccgagttcatctccttcatcaccggcgaggcctccgacaagtgccagcgcgagaagcgcaagaccatcaacggcgacgacctgctgtgggccatgaccacgctcggcttcgaggactacatggagccgctcaagctctacctgcacaagttccgcgagctcgagggcgagaaggccgtcggcgccggcggcgttggcgcgttaccctcccccggcggctccagctcgcagcagagggagtcgacgccaaggaacaatgcgggaggcggtgaggccggcggctacggcggcatgtacggtggcgccggggcaggaggcagcggcggcggcatgttcatgatgatggggcagcccatgtacgggtccccgccggcggcagggtaccaacatccgcagcatcaccaccagatgatgacgggagggcaaggcgggtacggctacggcgacgccggcgccggcggcgggtcttcgtcgtcctcagggttcggcaggcaagacagggcatgaccgtcccagcttgcacgagcttgttcgttggcgtatctgttttactggtaaccggagttgccaacggccagccgccaggccagttaatctctacagtaccttttttgtgttctaaatgcggtttaagtcggtcaattttattccaaattagcagcaccagcgcgactagttgcatttagcccgctactgtaaatgggctactgacaaggtgcatttacatacaaaaattaatggcaagtgcattttg

SEQ ID NO: 67528 - protein, 225 aa, Triticum aestivum
  peptide (1)..(225): Ceres Seq. ID no. 13664033
  misc_feature (6)..(134): Homolog of NCBI NO: 17979253 NR Description: At2g37060/T2N18.18 [Arabidopsis thaliana]
  misc_feature (1)..(156): Homolog of NCBI NO: 30409459 NR Description: NF-YB [Oryza sativa (japonica cultivar-group)]
  misc_feature (6)..(153): Homolog of NCBI NO: 15231796 NR Description: transcription factor NF-Y, CCAAT-binding - like
  misc_feature (6)..(133): Homolog of NCBI NO: 115840 NR Description: CCAAT-BINDING TRANSCRIPTION FACTOR SUBUNIT A (NF-Y PROTEIN CHAIN B) (NF-YB) (CAAT-BOX DNA BINDING PROTEIN
  misc_feature (6)..(133): Homolog of NCBI NO: 22380 NR Description: CAAT-box DNA binding protein subunit B (NF-YB)
  misc_feature (1)..(133): Homolog of NCBI NO: 18404885 NR Description: CCAAT-binding transcription factor subunit
  misc_feature (1)..(133): Homolog of NCBI NO: 30409461 NR Description: NF-YB [Oryza sativa (japonica cultivar-group)]
  misc_feature (5)..(167): Homolog of NCBI NO: 2398529 NR Description: Transcription factor [Arabidopsis thaliana]
  misc_feature (1)..(167): Homolog of NCBI NO: 15238156 NR Description: expressed protein [Arabidopsis thaliana]
  misc_feature (1)..(158): Homolog of NCBI NO: 15233475 NR Description: CCAAT-binding transcription factor subunit
MPDSDNDSGGPSNADFSSPKEQDRFLPIANVSRIMKKALPANAKISKDAKETVQECVSEFISFITGEASDKCQREKRKTINGDDLLWAMTTLGFEDYMEPLKLYLHKFRELEGEKAVGAGGVGALPSPGGSSSQQRESTPRNNAGGGEAGGYGGMYGGAGAGGSGGGMFMMMGQPMYGSPPAAGYQHPQHHHQMMTGGQGGYGYGDAGAGGGSSSSSGFGRQDRA

SEQ ID NO: 67529 - protein, 191 aa, Triticum aestivum
  peptide (1)..(191): Ceres Seq. ID no. 13664034
  misc_feature (1)..(100): Homolog of NCBI NO: 17979253 NR Description: At2g37060/T2N18.18 [Arabidopsis thaliana]
  misc_feature (1)..(122): Homolog of NCBI NO: 30409459 NR Description: NF-YB [Oryza sativa (japonica cultivar-group)]
  misc_feature (1)..(119): Homolog of NCBI NO: 15231796 NR Description: transcription factor NF-Y, CCAAT-binding - like
  misc_feature (1)..(99): Homolog of NCBI NO: 115840 NR Description: CCAAT-BINDING TRANSCRIPTION FACTOR SUBUNIT A (NF-Y PROTEIN CHAIN B) (NF-YB) (CAAT-BOX DNA BINDING PROTEIN
  misc_feature (1)..(99): Homolog of NCBI NO: 22380 NR Description: CAAT-box DNA binding protein subunit B (NF-YB)
  misc_feature (1)..(99): Homolog of NCBI NO: 18404885 NR Description: CCAAT-binding transcription factor subunit
  misc_feature (1)..(99): Homolog of NCBI NO: 30409461 NR Description: NF-YB [Oryza sativa (japonica cultivar-group)]
  misc_feature (1)..(133): Homolog of NCBI NO: 2398529 NR Description: Transcription factor [Arabidopsis thaliana]
  misc_feature (1)..(133): Homolog of NCBI NO: 15238156 NR Description: expressed protein [Arabidopsis thaliana]
  misc_feature (1)..(124): Homolog of NCBI NO: 15233475 NR Description: CCAAT-binding transcription factor subunit
MKKALPANAKISKDAKETVQECVSEFISFITGEASDKCQREKRKTINGDDLLWAMTTLGFEDYMEPLKLYLHKFRELEGEKAVGAGGVGALPSPGGSSSQQRESTPRNNAGGGEAGGYGGMYGGAGAGGSGGGMFMMMGQPMYGSPPAAGYQHPQHHHQMMTGGQGGYGYGDAGAGGGSSSSSGFGRQDRA

SEQ ID NO: 67530 - protein, 137 aa, Triticum aestivum
  peptide (1)..(137): Ceres Seq. ID no. 13664035
  misc_feature (1)..(46): Homolog of NCBI NO: 17979253 NR Description: At2g37060/T2N18.18 [Arabidopsis thaliana]
  misc_feature (1)..(68): Homolog of NCBI NO: 30409459 NR Description: NF-YB [Oryza sativa (japonica cultivar-group)]
  misc_feature (1)..(65): Homolog of NCBI NO: 15231796 NR Description: transcription factor NF-Y, CCAAT-binding - like
  misc_feature (1)..(45): Homolog of NCBI NO: 115840 NR Description: CCAAT-BINDING TRANSCRIPTION FACTOR SUBUNIT A (NF-Y PROTEIN CHAIN B) (NF-YB) (CAAT-BOX DNA BINDING PROTEIN
  misc_feature (1)..(45): Homolog of NCBI NO: 22380 NR Description: CAAT-box DNA binding protein subunit B (NF-YB)
  misc_feature (1)..(45): Homolog of NCBI NO: 18404885 NR Description: CCAAT-binding transcription factor subunit
  misc_feature (1)..(45): Homolog of NCBI NO: 30409461 NR Description: NF-YB [Oryza sativa (japonica cultivar-group)]
  misc_feature (1)..(79): Homolog of NCBI NO: 2398529 NR Description: Transcription factor [Arabidopsis thaliana]
  misc_feature (1)..(79): Homolog of NCBI NO: 15238156 NR Description: expressed protein [Arabidopsis thaliana]
  misc_feature (1)..(70): Homolog of NCBI NO: 15233475 NR Description: CCAAT-binding transcription factor subunit
MTTLGFEDYMEPLKLYLHKFRELEGEKAVGAGGVGALPSPGGSSSQQRESTPRNNAGGGEAGGYGGMYGGAGAGGSGGGMFMMMGQPMYGSPPAAGYQHPQHHHQMMTGGQGGYGYGDAGAGGGSSSSSGFGRQDRA

SEQ ID NO: 67531 - DNA, 1584 bp, Triticum aestivum
  misc_feature (1)..(1584): Ceres Seq. ID no. 13661001
atcactcgcaccccgcgaatactcttctcttcccttctcttctcttctcttctccgcacagcatcactgcctccggccgtgtcgagcaaaccaaaccaaaatctcctgagttgtctcgctcgcctcatcaatccttggcgtcgctagcttcatctggaggcgaggaggcggacggtttgaacccgatcatggatatggcgcacgagagggactcgagcagcgaggaggaggtgatggccggcgacctccgccgcgggccgtggacggtggaggaggacatcctgctcgtcaactacatcgccgctcacggcgagggccgctggaactcgctcgcccgatcagcaggtctgaagcgcaccggcaagagctgccgcctcaggtggctcaactacctccgccccgacctccggcgcggcagcatcaccccgcaggagcagctgctcatcctcgagctgcactcgcggtggggcaaccgctggtccaagatcgcgcagcacctccccgggcgcaccgacaacgagatcaagaactactggcgcacgcgcgtgcagaagcacgccaagcagctcaagtgcgacgtcaacagccagcagttcaaggacgtcatgcgctacctctggatgccccgcctcgtcgagcgcatccaggccgccgccacggccgacgcggtgcaggccgccgctgacacgcccctgtcgtggcagcacggcgccgacgacgctctctacgagtcaccggagctccctgtcgacgcgtgctggccaacggagtacgccgccgtggccggcgggcagctgcccaacgcctcggtcgcggagctgtcgagcactactaccgccggctcttcctcgccgtccaccacggactctggcgccggcgcccagcccagctggcctgcagcagtcgacggtgccgagtggttcaccaccgcctgcgacgcctccagcgccgccgccaccatatgcgacacggaccagctgatccagcagcaggcaccgtcccagcccgcgggtgcgtggacgtccgagccgctgccgagcctcgggttccccgagctgggcgtcgcggacttcgagatgggcagcttcgacgtagacagcatctggagcatggacgacttgtggaacacgcagccgcagttcgtgtgaaaagtcaagacggtggcatggaaatcctcagctgcgacggtgcccgcgggggggcgtgcggcctccgggtccggggacgcgtagcagatccagcggagggaaacggattagaagaagaaggagaggaaccacctgggactgggaggattaaaacaagactaatttaccctgcacgtgaagatctcccggcctgttctgctccagttctgcgccgtcttgtctcctgtgttaatttattactacgtacaagggtaaacagatacgtaaaagtgtagcagaagcagatgatctactagtgttagctgtgccgccgttaattatgctatgttccgtttaatcttactcattcttttcgagtgattactactacatatttaagtacaaaaaaaaaaaaaaaaaagcttatcgataccgtcgacctcgagggggggcccgg

SEQ ID NO: 67532 - protein, 381 aa, Triticum aestivum
  peptide (1)..(381): Ceres Seq. ID no. 13661002
  misc_feature (84)..(131): Pfam Name: Myb-like DNA-binding domain Pfam Description: Myb-like DNA-binding domain
  misc_feature (76)..(220): Homolog of NCBI NO: 13177578 NR Description: Myb transcription factor JAMyb [Oryza sativa]
  misc_feature (69)..(229): Homolog of NCBI NO: 15230731 NR Description: myb family transcription factor (MYB108)
  misc_feature (68)..(234): Homolog of NCBI NO: 15240518 NR Description: myb family transcription factor [Arabidopsis
  misc_feature (73)..(296): Homolog of NCBI NO: 34894466 NR Description: putative dehydration-induced myb-related protein
  misc_feature (69)..(221): Homolog of NCBI NO: 19073334 NR Description: typical P-type R2R3 Myb protein [Sorghum bicolor]
  misc_feature (69)..(368): Homolog of NCBI NO: 34898110 NR Description: putative typical P-type R2R3 Myb protein
  misc_feature (62)..(380): Homolog of NCBI NO: 7446185 NR Description: dehydration-induced myb-related protein Cpm7 -
  misc_feature (71)..(380): Homolog of NCBI NO: 7446184 NR Description: myb-related protein Cpm5 - Craterostigma
  misc_feature (71)..(380): Homolog of NCBI NO: 7446183 NR Description: ABA-induced myb-related protein Cpm10 -
  misc_feature (78)..(231): Homolog of NCBI NO: 19073328 NR Description: typical P-type R2R3 Myb protein [Sorghum bicolor]
HSHPANTLLFPSLLFSSPHSITASGRVEQTKPKSPELSRSPHQSLASLASSGGEEADGLNPIMDMAHERDSSSEEEVMAGDLRRGPWTVEEDILLVNYIAAHGEGRWNSLARSAGLKRTGKSCRLRWLNYLRPDLRRGSITPQEQLLILELHSRWGNRWSKIAQHLPGRTDNEIKNYWRTRVQKHAKQLKCDVNSQQFKDVMRYLWMPRLVERIQAAATADAVQAAADTPLSWQHGADDALYESPELPVDACWPTEYAAVAGGQLPNASVAELSSTTTAGSSSPSTTDSGAGAQPSWPAAVDGAEWFTTACDASSAAATICDTDQLIQQQAPSQPAGAWTSEPLPSLGFPELGVADFEMGSFDVDSIWSMDDLWNTQPQFV

SEQ ID NO: 67533 - protein, 319 aa, Triticum aestivum
  peptide (1)..(319): Ceres Seq. ID no. 13661003
  misc_feature (22)..(69): Pfam Name: Myb-like DNA-binding domain Pfam Description: Myb-like DNA-binding domain
  misc_feature (14)..(158): Homolog of NCBI NO: 13177578 NR Description: Myb transcription factor JAMyb [Oryza sativa]
  misc_feature (7)..(167): Homolog of NCBI NO: 15230731 NR Description: myb family transcription factor (MYB108)
  misc_feature (6)..(172): Homolog of NCBI NO: 15240518 NR Description: myb family transcription factor [Arabidopsis
  misc_feature (11)..(234): Homolog of NCBI NO: 34894466 NR Description: putative dehydration-induced myb-related protein
  misc_feature (7)..(159): Homolog of NCBI NO: 19073334 NR Description: typical P-type R2R3 Myb protein [Sorghum bicolor]
  misc_feature (7)..(306): Homolog of NCBI NO: 34898110 NR Description: putative typical P-type R2R3 Myb protein
  misc_feature (1)..(318): Homolog of NCBI NO: 7446185 NR Description: dehydration-induced myb-related protein Cpm7 -
  misc_feature (9)..(318): Homolog of NCBI NO: 7446184 NR Description: myb-related protein Cpm5 - Craterostigma
  misc_feature (9)..(318): Homolog of NCBI NO: 7446183 NR Description: ABA-induced myb-related protein Cpm10 -
  misc_feature (16)..(169): Homolog of NCBI NO: 19073328 NR Description: typical P-type R2R3 Myb protein [Sorghum bicolor]
MDMAHERDSSSEEEVMAGDLRRGPWTVEEDILLVNYIAAHGEGRWNSLARSAGLKRTGKSCRLRWLNYLRPDLRRGSITPQEQLLILELHSRWGNRWSKIAQHLPGRTDNEIKNYWRTRVQKHAKQLKCDVNSQQFKDVMRYLWMPRLVERIQAAATADAVQAAADTPLSWQHGADDALYESPELPVDACWPTEYAAVAGGQLPNASVAELSSTTTAGSSSPSTTDSGAGAQPSWPAAVDGAEWFTTACDASSAAATICDTDQLIQQQAPSQPAGAWTSEPLPSLGFPELGVADFEMGSFDVDSIWSMDDLWNTQPQFV

SEQ ID NO: 67534 - protein, 317 aa, Triticum aestivum
  peptide (1)..(317): Ceres Seq. ID no. 13661004
  misc_feature (20)..(67): Pfam Name: Myb-like DNA-binding domain Pfam Description: Myb-like DNA-binding domain
  misc_feature (12)..(156): Homolog of NCBI NO: 13177578 NR Description: Myb transcription factor JAMyb [Oryza sativa]
  misc_feature (5)..(165): Homolog of NCBI NO: 15230731 NR Description: myb family transcription factor (MYB108)
  misc_feature (4)..(170): Homolog of NCBI NO: 15240518 NR Description: myb family transcription factor [Arabidopsis
  misc_feature (9)..(232): Homolog of NCBI NO: 34894466 NR Description: putative dehydration-induced myb-related protein
  misc_feature (5)..(157): Homolog of NCBI NO: 19073334 NR Description: typical P-type R2R3 Myb protein [Sorghum bicolor]
  misc_feature (5)..(304): Homolog of NCBI NO: 34898110 NR Description: putative typical P-type R2R3 Myb protein
  misc_feature (1)..(316): Homolog of NCBI NO: 7446185 NR Description: dehydration-induced myb-related protein Cpm7 -
  misc_feature (7)..(316): Homolog of NCBI NO: 7446184 NR Description: myb-related protein Cpm5 - Craterostigma
  misc_feature (7)..(316): Homolog of NCBI NO: 7446183 NR Description: ABA-induced myb-related protein Cpm10 -
  misc_feature (14)..(167): Homolog of NCBI NO: 19073328 NR Description: typical P-type R2R3 Myb protein [Sorghum bicolor]
MAHERDSSSEEEVMAGDLRRGPWTVEEDILLVNYIAAHGEGRWNSLARSAGLKRTGKSCRLRWLNYLRPDLRRGSITPQEQLLILELHSRWGNRWSKIAQHLPGRTDNEIKNYWRTRVQKHAKQLKCDVNSQQFKDVMRYLWMPRLVERIQAAATADAVQAAADTPLSWQHGADDALYESPELPVDACWPTEYAAVAGGQLPNASVAELSSTTTAGSSSPSTTDSGAGAQPSWPAAVDGAEWFTTACDASSAAATICDTDQLIQQQAPSQPAGAWTSEPLPSLGFPELGVADFEMGSFDVDSIWSMDDLWNTQPQFV

SEQ ID NO: 67535 - DNA, 580 bp, Triticum aestivum
  misc_feature (1)..(580): Ceres Seq. ID no. 12622913
ggcacggaggcgccaccggcggccccacggggacgcacggcgccgccgccgccgcgggcaccgggcagctccagccgaccagggacgaccacaagaccgacggtgtcctgcgccgctccggcagttccagctccagctcgtctgaggacgacggcgctggcgggaggaggaagaaagggatgaaggagaagatcaaggagaagctccccggcggagcccacaaggacgccaccgggcagcagcacacgccggcggccggcgagtacgccgggaccggcaccggcacgcacggcgcggaggccaccggcgagaagaagggcgtcatggacaagatcaaggagaagcttcccggcgggcagcactaagctaagatgggcagctagcgatcgacctgtgtctgtgttcgcctgttcggtcaaagctctgtcgcatgcatgcgtacttctacatgcgttcctacgggataaataatcggcgccgatcgaggtgccggagtatatatgttgtgtgtgtgacgtatttgtggaccccgtacgtgtacatgtatttgtatctccatcgtaataaagcgctcgtttat

SEQ ID NO: 67536 - protein, 120 aa, Triticum aestivum
  peptide (1)..(120): Ceres Seq. ID no. 12622914
  misc_feature (1)..(120): Pfam Name: Dehydrin Pfam Description: Dehydrin
  misc_feature (1)..(120): Homolog of NCBI NO: 100918 NR Description: RAB-17 protein - maize
  misc_feature (16)..(120): Homolog of NCBI NO: 7489645 NR Description: dehydrin DHN2 - sorghum (fragment)
  misc_feature (1)..(120): Homolog of NCBI NO: 118484 NR Description: DEHYDRIN DHN1 (M3) (RAB-17 PROTEIN)
  misc_feature (1)..(120): Homolog of NCBI NO: 82684 NR Description: dehydrin 3 - maize
  misc_feature (3)..(120): Homolog of NCBI NO: 7442078 NR Description: dehydrin - barley
  misc_feature (1)..(120): Homolog of NCBI NO: 421976 NR Description: dehydrin 7 - barley
  misc_feature (1)..(120): Homolog of NCBI NO: 118483 NR Description: DEHYDRIN DHN1 (B8)
  misc_feature (1)..(120): Homolog of NCBI NO: 4105105 NR Description: dehydrin 2 [Hordeum vulgare]
  misc_feature (1)..(120): Homolog of NCBI NO: 118486 NR Description: DEHYDRIN DHN2 (B9)
  misc_feature (1)..(120): Homolog of NCBI NO: 6017930 NR Description: dehydrin; Dhn2 [Hordeum vulgare]
HGGATGGPTGTHGAAAAAGTGQLQPTRDDHKTDGVLRRSGSSSSSSSEDDGAGGRRKKGMKEKIKEKLPGGAHKDATGQQHTPAAGEYAGTGTGTHGAEATGEKKGVMDKIKEKLPGGQH

SEQ ID NO: 67537 - protein, 61 aa, Triticum aestivum
  peptide (1)..(61): Ceres Seq. ID no. 12622915
  misc_feature (1)..(61): Pfam Name: Dehydrin Pfam Description: Dehydrin
  misc_feature (1)..(61): Homolog of NCBI NO: 100918 NR Description: RAB-17 protein - maize
  misc_feature (1)..(61): Homolog of NCBI NO: 7489645 NR Description: dehydrin DHN2 - sorghum (fragment)
  misc_feature (1)..(61): Homolog of NCBI NO: 118484 NR Description: DEHYDRIN DHN1 (M3) (RAB-17 PROTEIN)
  misc_feature (1)..(61): Homolog of NCBI NO: 82684 NR Description: dehydrin 3 - maize
  misc_feature (1)..(61): Homolog of NCBI NO: 7442078 NR Description: dehydrin - barley
  misc_feature (1)..(61): Homolog of NCBI NO: 421976 NR Description: dehydrin 7 - barley
  misc_feature (1)..(61): Homolog of NCBI NO: 118483 NR Description: DEHYDRIN DHN1 (B8)
  misc_feature (1)..(61): Homolog of NCBI NO: 4105105 NR Description: dehydrin 2 [Hordeum vulgare]
  misc_feature (1)..(61): Homolog of NCBI NO: 118486 NR Description: DEHYDRIN DHN2 (B9)
  misc_feature (1)..(61): Homolog of NCBI NO: 6017930 NR Description: dehydrin; Dhn2 [Hordeum vulgare]
MKEKIKEKLPGGAHKDATGQQHTPAAGEYAGTGTGTHGAEATGEKKGVMDKIKEKLPGGQH

SEQ ID NO: 67538 - protein, 60 aa, Triticum aestivum
  peptide (1)..(60): Ceres Seq. ID no. 12622916
GTEAPPAAPRGRTAPPPPRAPGSSSRPGTTTRPTVSCAAPAVPAPARLRTTALAGGGRKG

SEQ ID NO: 67539 - DNA, 1529 bp, Triticum aestivum
  misc_feature (1)..(1529): Ceres Seq. ID no. 14303161
ctttaacagcataccctaaactggttacctatattcatcccattgcatctatctctattcaagggtgccaacacactccaaataaattgtagtacaatgcatcaaacaatgattcaaatactttccataatccaccacaggttaggttaattttttaggaatacattgcatgtcaaatgattcaaatattatcagagctctttatggtgaatgctgatagttatgcaagttagtttaagtaattttaccacatgcatggagatggtagcatcagctgcatgacgcataccttctgaattatgtaattcctccattgcggttgtcccctagttcttttagatatttcataccttattttgttgtccagccattttttgtattaagatctcattagttgttagggtttagttggtacctcaacacaaagtcggtcagcactgagtaaagttcatcatatcatcaattggcttgttaactgccactgttttgattgtttagaatgctgtatcgctgtcttttattcactcttcaccgcttgcaggtacctgagaaacatggcagtggtggccatttaagttactttcttgttgtatgcgcaattggtggagtggtaactgtctattgtatgcttgaaaaaactcagtatgtggatgttgatgaagatgtagtacttcctgactttgttgactggtctgctgcgcctgcatttgttgatatggttcatccaagctacaatttccattgcggttccttctgggctgtcgttgctgttaaatccattgaggcggagtatgccataaaaaatggtgtggttttgaatttgtcagttcaacaagttatagactgtgctgccattgagggctgcaaaggttcttcccttatgaaggcctatagatacatcaaggttgctggcttgaccactgaagagtcatatcctggcccaccatccccaggcaggtcatttttgcatggtctgtttcgtggttattgccggatggagggcaagcctgttgctgtgagaattgaaggtgttcagagggtacgggccacggaggatcacttgatgagagctcttcaatcttcccctgttgctgtgtatgttaacgtaaatgaccgatttagaaaataccgcggggagggttatcttgatatcaatgactgcccacctcgttctgtaaagcctgggggaaggcatgttcttttgctagtaggctatggcaccgacagcgatggcaccaaatactggaaggtaatgaatacttgggggacatggtggggtaagcatggttacggcaagtttatcagggatggtcacccacacggtgtggcaggtatcaccgagtacaatgggtttaggcccgtgctcagcaagagctgttgcaagtaggttggttttaggcaagtagtttggttttaggcctgtgctcagcaagagctgttgcaagtagtttggttttaggtgcaaccctagaagtctgaatatgtaactctgacagccttttactgtgagcggcaaatataacctgctg

SEQ ID NO: 67540 - protein, 295 aa, Triticum aestivum
  peptide (1)..(295): Ceres Seq. ID no. 14303162
  misc_feature (58)..(279): Pfam Name: Papain family cysteine protease Pfam Description: Papain family cysteine protease
  misc_feature (58)..(279): Homolog of NCBI NO: 5761329 NR Description: cysteine endopeptidase [Oryza sativa]
  misc_feature (63)..(288): Homolog of NCBI NO: 18403438 NR Description: cysteine proteinase [Arabidopsis thaliana]
  misc_feature (44)..(279): Homolog of NCBI NO: 7435822 NR Description: ananain (EC 3.4.22.31) AN8 precursor - pineapple
  misc_feature (82)..(288): Homolog of NCBI NO: 18396939 NR Description: cysteine protease [Arabidopsis thaliana]
  misc_feature (51)..(279): Homolog of NCBI NO: 13432122 NR Description: Ananain precursor
  misc_feature (44)..(279): Homolog of NCBI NO: 7435820 NR Description: probable stem bromelain (EC 3.4.22.32) precursor
  misc_feature (58)..(282): Homolog of NCBI NO: 40255291 NR Description: cathepsin L-like [Mus musculus]
  misc_feature (44)..(279): Homolog of NCBI NO: 7435824 NR Description: ananain (EC 3.4.22.31) precursor AN11 - pineapple
  misc_feature (54)..(279): Homolog of NCBI NO: 7489849 NR Description: fruit bromelain (EC 3.4.22.33) FB1035 precursor -
  misc_feature (54)..(279): Homolog of NCBI NO: 7435828 NR Description: fruit bromelain (EC 3.4.22.33) FB18 precursor -
MLYRCLLFTLHRLQVPEKHGSGGHLSYFLVVCAIGGVVTVYCMLEKTQYVDVDEDVVLPDFVDWSAAPAFVDMVHPSYNFHCGSFWAVVAVKSIEAEYAIKNGVVLNLSVQQVIDCAAIEGCKGSSLMKAYRYIKVAGLTTEESYPGPPSPGRSFLHGLFRGYCRMEGKPVAVRIEGVQRVRATEDHLMRALQSSPVAVYVNVNDRFRKYRGEGYLDINDCPPRSVKPGGRHVLLLVGYGTDSDGTKYWKVMNTWGTWWGKHGYGKFIRDGHPHGVAGITEYNGFRPVLSKSCCK

SEQ ID NO: 67541 - protein, 253 aa, Triticum aestivum
  peptide (1)..(253): Ceres Seq. ID no. 14303163
  misc_feature (16)..(237): Pfam Name: Papain family cysteine protease Pfam Description: Papain family cysteine protease
  misc_feature (16)..(237): Homolog of NCBI NO: 5761329 NR Description: cysteine endopeptidase [Oryza sativa]
  misc_feature (21)..(246): Homolog of NCBI NO: 18403438 NR Description: cysteine proteinase [Arabidopsis thaliana]
  misc_feature (2)..(237): Homolog of NCBI NO: 7435822 NR Description: ananain (EC 3.4.22.31) AN8 precursor - pineapple
  misc_feature (40)..(246): Homolog of NCBI NO: 18396939 NR Description: cysteine protease [Arabidopsis thaliana]
  misc_feature (9)..(237): Homolog of NCBI NO: 13432122 NR Description: Ananain precursor
  misc_feature (2)..(237): Homolog of NCBI NO: 7435820 NR Description: probable stem bromelain (EC 3.4.22.32) precursor
  misc_feature (16)..(240): Homolog of NCBI NO: 40255291 NR Description: cathepsin L-like [Mus musculus]
  misc_feature (2)..(237): Homolog of NCBI NO: 7435824 NR Description: ananain (EC 3.4.22.31) precursor AN11 - pineapple
  misc_feature (12)..(237): Homolog of NCBI NO: 7489849 NR Description: fruit bromelain (EC 3.4.22.33) FB1035 precursor -
  misc_feature (12)..(237): Homolog of NCBI NO: 7435828 NR Description: fruit bromelain (EC 3.4.22.33) FB18 precursor -
MLEKTQYVDVDEDVVLPDFVDWSAAPAFVDMVHPSYNFHCGSFWAVVAVKSIEAEYAIKNGVVLNLSVQQVIDCAAIEGCKGSSLMKAYRYIKVAGLTTEESYPGPPSPGRSFLHGLFRGYCRMEGKPVAVRIEGVQRVRATEDHLMRALQSSPVAVYVNVNDRFRKYRGEGYLDINDCPPRSVKPGGRHVLLLVGYGTDSDGTKYWKVMNTWGTWWGKHGYGKFIRDGHPHGVAGITEYNGFRPVLSKSCCK

SEQ ID NO: 67542 - protein, 223 aa, Triticum aestivum
  peptide (1)..(223): Ceres Seq. ID no. 14303164
  misc_feature (1)..(207): Pfam Name: Papain family cysteine protease Pfam Description: Papain family cysteine protease
  misc_feature (1)..(207): Homolog of NCBI NO: 5761329 NR Description: cysteine endopeptidase [Oryza sativa]
  misc_feature (1)..(216): Homolog of NCBI NO: 18403438 NR Description: cysteine proteinase [Arabidopsis thaliana]
  misc_feature (1)..(207): Homolog of NCBI NO: 7435822 NR Description: ananain (EC 3.4.22.31) AN8 precursor - pineapple
  misc_feature (10)..(216): Homolog of NCBI NO: 18396939 NR Description: cysteine protease [Arabidopsis thaliana]
  misc_feature (1)..(207): Homolog of NCBI NO: 13432122 NR Description: Ananain precursor
  misc_feature (1)..(207): Homolog of NCBI NO: 7435820 NR Description: probable stem bromelain (EC 3.4.22.32) precursor
  misc_feature (1)..(210): Homolog of NCBI NO: 40255291 NR Description: cathepsin L-like [Mus musculus]
  misc_feature (1)..(207): Homolog of NCBI NO: 7435824 NR Description: ananain (EC 3.4.22.31) precursor AN11 - pineapple
  misc_feature (1)..(207): Homolog of NCBI NO: 7489849 NR Description: fruit bromelain (EC 3.4.22.33) FB1035 precursor -
  misc_feature (1)..(207): Homolog of NCBI NO: 7435828 NR Description: fruit bromelain (EC 3.4.22.33) FB18 precursor -
MVHPSYNFHCGSFWAVVAVKSIEAEYAIKNGVVLNLSVQQVIDCAAIEGCKGSSLMKAYRYIKVAGLTTEESYPGPPSPGRSFLHGLFRGYCRMEGKPVAVRIEGVQRVRATEDHLMRALQSSPVAVYVNVNDRFRKYRGEGYLDINDCPPRSVKPGGRHVLLLVGYGTDSDGTKYWKVMNTWGTWWGKHGYGKFIRDGHPHGVAGITEYNGFRPVLSKSCCK

SEQ ID NO: 67543 - DNA, 1712 bp, Triticum aestivum
  misc_feature (1)..(1712): Ceres Seq. ID no. 14302990
atcaggaaaaagaaaacccttcctccttcctccctccctcgctcgcacgcccaaaaagcccaaccaaccgcccggccccgacccccgaccaaacccgcaccggacgccgcgcgcgggcgctcgcgagagagggacgggagcggccgccgcgcctcgcgcctcgctcgctcgctcgccgacgcggtccggcggtggtgggggcctcgccgcgatggattgggcggcggtggcgtacacggcggccgcgctgctgtgcgccgcggcggccaccgtcatcacgctcggccacatctaccgccacctgctccactacgccgagcccatcttccagcgcttcatcgtccgcatcatcttcatggtcccggtctatgcagtgatgtcatttatttcccttatcctaccagacaatgcaatatattttacctctatccgagaaatctatgatgcttgggtcatctacaatttcttttcactctgcttggcatgggtgggaggacctggtgctgtggtggtgagtttgaatggccgaaccctgaaaccatcgtggtttctgatgacttgctgtttcccggctattcctctagatgggcgttttatacggagatgcaaacaaggctgtttgcagtttgttattcttaagcctatcctggtggttattaccttcatcctttatgctaaaggaaaatatgaagatggaaacttcagtgtcaaccaatcctatttatacatcactattatttacacaatctcatactcgatggcgttatatgctcttgcattgttctatgcggcatgcagagatctactccggccatataatcctgtcccaaagtttattataatcaaatcagttgtgtttctcacatactggcagggtgtcctggttttccttgctgccaagtctcgatttatcaagaatgctgaaaaagctgctgatctccagaactatgtattgtgcgttgagatgctcatagcagccattgggcacctatttgcctttccttacaaggagtatgcaggtgcaaatgctcgcccttcgggtggcttcagggaaagccttcttcatgctttaaaattcaacgatttctaccacgacactgttcaccagtttgctcctacctacaacgaatatgtgctgtacaaccacaatgagggagagagtgcaccaacaaagtttccttcagggagcgccgtgccaagtgtccgggatgtggagttggccggcatcaccgtgatgccgccctcaaatagtccagtgacctcaagcgtgtcatccaaccacgtagaccaggacgagtcaatgaccactccgatcaggaacaaagtggacccgcctggaggaatgtacgacctcacggacctgctcgacgtggacttgtctagctaccccgccaaggttcctgcgatctctgatgtaagaaaacaatgaccaggtgcgacagccaatgtgtctcggtagcgactgggggaaattgtggccttccattttgtcatagataacgctgtaaaaatgtgtgtgtactacttccggttccagcctttccccattgaagaaggggggtttattcatgactgcactgcagctgtgcgcacggcctctctcgccctactcttcgacatagttgttttggtgcgttgtgagctcaaggtgaactgttgtgacatgagactatgaataccatactaatagtttgctgatagcagttttggtg

SEQ ID NO: 67544 - protein, 475 aa, Triticum aestivum
  peptide (1)..(475): Ceres Seq. ID no. 14302991
  misc_feature (74)..(352): Pfam Name: Domain of unknown function Pfam Description: Domain of unknown function
  misc_feature (23)..(408): Homolog of NCBI NO: 26341248 NR Description: unnamed protein product [Mus musculus]
  misc_feature (84)..(357): Homolog of NCBI NO: 25148028 NR Description: putative protein, with at least 4 transmembrane
  misc_feature (82)..(146): Homolog of NCBI NO: 15230584 NR Description: expressed protein [Arabidopsis thaliana]
  misc_feature (197)..(468): Homolog of NCBI NO: 15230584 NR Description: expressed protein [Arabidopsis thaliana]
  misc_feature (82)..(150): Homolog of NCBI NO: 7485938 NR Description: hypothetical protein F21E10.13 - Arabidopsis
  misc_feature (150)..(471): Homolog of NCBI NO: 7485938 NR Description: hypothetical protein F21E10.13 - Arabidopsis
  misc_feature (82)..(468): Homolog of NCBI NO: 6671963 NR Description: unknown protein [Arabidopsis thaliana]
  misc_feature (82)..(471): Homolog of NCBI NO: 30690265 NR Description: expressed protein [Arabidopsis thaliana]
  misc_feature (73)..(475): Homolog of NCBI NO: 34900750 NR Description: OJ1341_A08.33 [Oryza sativa (japonica
  misc_feature (71)..(475): Homolog of NCBI NO: 34897328 NR Description: putative organic solute transporter [Oryza
SGKRKPFLLPPSLARTPKKPNQPPGPDPRPNPHRTPRAGARERGTGAAAAPRASLARSPTRSGGGGGLAAMDWAAVAYTAAALLCAAAATVITLGHIYRHLLHYAEPIFQRFIVRIIFMVPVYAVMSFISLILPDNAIYFTSIREIYDAWVIYNFFSLCLAWVGGPGAVVVSLNGRTLKPSWFLMTCCFPAIPLDGRFIRRCKQGCLQFVILKPILVVITFILYAKGKYEDGNFSVNQSYLYITIIYTISYSMALYALALFYAACRDLLRPYNPVPKFIIIKSVVFLTYWQGVLVFLAAKSRFIKNAEKAADLQNYVLCVEMLIAAIGHLFAFPYKEYAGANARPSGGFRESLLHALKFNDFYHDTVHQFAPTYNEYVLYNHNEGESAPTKFPSGSAVPSVRDVELAGITVMPPSNSPVTSSVSSNHVDQDESMTTPIRNKVDPPGGMYDLTDLLDVDLSSYPAKVPAISDVRKQ

SEQ ID NO: 67545 - protein, 405 aa, Triticum aestivum
  peptide (1)..(405): Ceres Seq. ID no. 14302992
  misc_feature (4)..(282): Pfam Name: Domain of unknown function Pfam Description: Domain of unknown function
  misc_feature (1)..(338): Homolog of NCBI NO: 26341248 NR Description: unnamed protein product [Mus musculus]
  misc_feature (14)..(287): Homolog of NCBI NO: 25148028 NR Description: putative protein, with at least 4 transmembrane
  misc_feature (12)..(76): Homolog of NCBI NO: 15230584 NR Description: expressed protein [Arabidopsis thaliana]
  misc_feature (127)..(398): Homolog of NCBI NO: 15230584 NR Description: expressed protein [Arabidopsis thaliana]
  misc_feature (12)..(80): Homolog of NCBI NO: 7485938 NR Description: hypothetical protein F21E10.13 - Arabidopsis
  misc_feature (80)..(401): Homolog of NCBI NO: 7485938 NR Description: hypothetical protein F21E10.13 - Arabidopsis
  misc_feature (12)..(398): Homolog of NCBI NO: 6671963 NR Description: unknown protein [Arabidopsis thaliana]
  misc_feature (12)..(401): Homolog of NCBI NO: 30690265 NR Description: expressed protein [Arabidopsis thaliana]
  misc_feature (3)..(405): Homolog of NCBI NO: 34900750 NR Description: OJ1341_A08.33 [Oryza sativa (japonica
  misc_feature (1)..(405): Homolog of NCBI NO: 34897328 NR Description: putative organic solute transporter [Oryza
MDWAAVAYTAAALLCAAAATVITLGHIYRHLLHYAEPIFQRFIVRIIFMVPVYAVMSFISLILPDNAIYFTSIREIYDAWVIYNFFSLCLAWVGGPGAVVVSLNGRTLKPSWFLMTCCFPAIPLDGRFIRRCKQGCLQFVILKPILVVITFILYAKGKYEDGNFSVNQSYLYITIIYTISYSMALYALALFYAACRDLLRPYNPVPKFIIIKSVVFLTYWQGVLVFLAAKSRFIKNAEKAADLQNYVLCVEMLIAAIGHLFAFPYKEYAGANARPSGGFRESLLHALKFNDFYHDTVHQFAPTYNEYVLYNHNEGESAPTKFPSGSAVPSVRDVELAGITVMPPSNSPVTSSVSSNHVDQDESMTTPIRNKVDPPGGMYDLTDLLDVDLSSYPAKVPAISDVRKQ

SEQ ID NO: 67546 - protein, 357 aa, Triticum aestivum
  peptide (1)..(357): Ceres Seq. ID no. 14302993
  misc_feature (1)..(234): Pfam Name: Domain of unknown function Pfam Description: Domain of unknown function
  misc_feature (1)..(290): Homolog of NCBI NO: 26341248 NR Description: unnamed protein product [Mus musculus]
  misc_feature (1)..(239): Homolog of NCBI NO: 25148028 NR Description: putative protein, with at least 4 transmembrane
  misc_feature (1)..(28): Homolog of NCBI NO: 15230584 NR Description: expressed protein [Arabidopsis thaliana]
  misc_feature (79)..(350): Homolog of NCBI NO: 15230584 NR Description: expressed protein [Arabidopsis thaliana]
  misc_feature (1)..(32): Homolog of NCBI NO: 7485938 NR Description: hypothetical protein F21E10.13 - Arabidopsis
  misc_feature (32)..(353): Homolog of NCBI NO: 7485938 NR Description: hypothetical protein F21E10.13 - Arabidopsis
  misc_feature (1)..(350): Homolog of NCBI NO: 6671963 NR Description: unknown protein [Arabidopsis thaliana]
  misc_feature (1)..(353): Homolog of NCBI NO: 30690265 NR Description: expressed protein [Arabidopsis thaliana]
  misc_feature (1)..(357): Homolog of NCBI NO: 34900750 NR Description: OJ1341_A08.33 [Oryza sativa (japonica
  misc_feature (1)..(357): Homolog of NCBI NO: 34897328 NR Description: putative organic solute transporter [Oryza
MVPVYAVMSFISLILPDNAIYFTSIREIYDAWVIYNFFSLCLAWVGGPGAVVVSLNGRTLKPSWFLMTCCFPAIPLDGRFIRRCKQGCLQFVILKPILVVITFILYAKGKYEDGNFSVNQSYLYITIIYTISYSMALYALALFYAACRDLLRPYNPVPKFIIIKSVVFLTYWQGVLVFLAAKSRFIKNAEKAADLQNYVLCVEMLIAAIGHLFAFPYKEYAGANARPSGGFRESLLHALKFNDFYHDTVHQFAPTYNEYVLYNHNEGESAPTKFPSGSAVPSVRDVELAGITVMPPSNSPVTSSVSSNHVDQDESMTTPIRNKVDPPGGMYDLTDLLDVDLSSYPAKVPAISDVRKQ

SEQ ID NO: 67547 - DNA, 1830 bp, Triticum aestivum
  misc_feature (1)..(1830): Ceres Seq. ID no. 13660129
actaaagggaacaaaagctgcagctccgccgcggyggcggccgctctataactastgkakcccccggkctgcakrtaattcgcrcgacgaccattacctagaacatcctaatckaaracgcctcacaatctctctccctctctctgtctccagcgcggggtgagctgagccatggctgagctgccgctcgcggggggcttgctggacctccgccccggcaagctctccccgaagcccccgcccccgccgctgcccatgcccggcgcggatgccccggcctcgccgcggccggagctgcgcgtcgacgagccgaatccacagattccacacacggcagctgacgccggtgagacgctggcctcgtcggaggcgccggtaccgaccgtcggctccggtgtcggtgtctgtgtcgaagcggagtccgagctggctggtggaagggcggttctcccggccgattgccagctcgatactgacggcaatggagttgagcttggtgccttggaggagagtgggactgtggtatcggacacgacggcgccggctggtttggaggaggtggatgcggatgcgggagcttcgccggaaggctctgccactcaggattctgacactggcgtggatgcagagtctagaggcgacgaccaaggggccacggaatccagagttaccatcccaccaacagcgggagaagttcacaacaaggtggattgggaaaagaacacttcagaagtgaagagttctgataagacggctccagtagcctcatcagcgcttttgttgacgtcaggtgctgcaatcttgcctcatccttcgaaggcagcgacaggcggagaagatgcttattttattgaagactatggttggtttggtgtggcagatggagttggtcagtggtcatttgaaggaatcaacgcagggctttatgcaagagagcttatggatggctgtaaaaaggtaattgcggaaagtgaaggaggctctgagcttgcgcctgagcaagttctctccaaggctgcagcagaagcaagctctcctggttcttcgactgtcttagttgctcactttgatggccagcttcttcatgtatcaaatattggagactcggggtttctggtgataaggaatggagaagtatgcgcaaaatcaaaaccaatggtttatggcttcaattttccacatcaaatcgagaaaggggttgatcccttaacccttgtagagaattataccattgacatagaggaaggcgatatcattatagcagcgaccgatggcctcttcgacaacgtctacgaacaagaaatggcagccatgatctcgaaatctttgcaggcagatctaaagccagcggagatggccgagcaccttgctgccagggcacatgaggtggggaggtctggagcagggagaagcccattttcagactctgccgtcgcggcgggttacctaggtttcagcggggggaaactggacgacacagccatcgttgtgtcgattgtccggagatccgaagcttgagctatagaaggcccccgaggtgacaagctattttggttgcaggcagctgcacgcactgtctatgaaagcgttgcatcagtagttcagaaactgcgacacgtgcaaagttcgcctgtgtaaagtagtctagttcaagaaccacaattcgcctatctaagtgatataaatttaagtttggtgttggtgctgtgtgtaaattttgggctgtagaaatatgatgcatgaaaatgtaattttgtgctcttgaatcgtgaggaagtggtaggaaggaaccaagccatctagtcaaagttgaaatataatcatgcattt

SEQ ID NO: 67548 - protein, 448 aa, Triticum aestivum
  peptide (1)..(448): Ceres Seq. ID no. 15220012
  misc_feature (216)..(412): Pfam Name: Protein phosphatase 2C Pfam Description: Protein phosphatase 2C
  misc_feature (202)..(443): Homolog of NCBI NO: 18402284 NR Description: expressed protein [Arabidopsis thaliana]
  misc_feature (195)..(444): Homolog of NCBI NO: 34896100 NR Description: B1189A09.35 [Oryza sativa (japonica
  misc_feature (190)..(447): Homolog of NCBI NO: 30683717 NR Description: expressed protein [Arabidopsis thaliana]
  misc_feature (190)..(447): Homolog of NCBI NO: 25366932 NR Description: hypothetical protein dl4315c [imported] -
  misc_feature (189)..(446): Homolog of NCBI NO: 15240071 NR Description: expressed protein [Arabidopsis thaliana]
  misc_feature (151)..(444): Homolog of NCBI NO: 7485658 NR Description: hypothetical protein F17M5.260 - Arabidopsis
  misc_feature (44)..(444): Homolog of NCBI NO: 18418226 NR Description: protein phosphatase 2C (PP2C) -related
  misc_feature (1)..(174): Homolog of NCBI NO: 37533570 NR Description: putative protein phosphatase 2C
  misc_feature (45)..(232): Homolog of NCBI NO: 37533570 NR Description: putative protein phosphatase 2C
  misc_feature (216)..(447): Homolog of NCBI NO: 37533570 NR Description: putative protein phosphatase 2C
MAELPLAGGLLDLRPGKLSPKPPPPPLPMPGADAPASPRPELRVDEPNPQIPHTAADAGETLASSEAPVPTVGSGVGVCVEAESELAGGRAVLPADCQLDTDGNGVELGALEESGTVVSDTTAPAGLEEVDADAGASPEGSATQDSDTGVDAESRGDDQGATESRVTIPPTAGEVHNKVDWEKNTSEVKSSDKTAPVASSALLLTSGAAILPHPSKAATGGEDAYFIEDYGWFGVADGVGQWSFEGINAGLYARELMDGCKKVIAESEGGSELAPEQVLSKAAAEASSPGSSTVLVAHFDGQLLHVSNIGDSGFLVIRNGEVCAKSKPMVYGFNFPHQIEKGVDPLTLVENYTIDIEEGDIIIAATDGLFDNVYEQEMAAMISKSLQADLKPAEMAEHLAARAHEVGRSGAGRSPFSDSAVAAGYLGFSGGKLDDTAIVVSIVRRSEA

SEQ ID NO: 67549 - protein, 420 aa, Triticum aestivum
  peptide (1)..(420): Ceres Seq. ID no. 15220013
  misc_feature (188)..(384): Pfam Name: Protein phosphatase 2C Pfam Description: Protein phosphatase 2C
  misc_feature (174)..(415): Homolog of NCBI NO: 18402284 NR Description: expressed protein [Arabidopsis thaliana]
  misc_feature (167)..(416): Homolog of NCBI NO: 34896100 NR Description: B1189A09.35 [Oryza sativa (japonica
  misc_feature (162)..(419): Homolog of NCBI NO: 30683717 NR Description: expressed protein [Arabidopsis thaliana]
  misc_feature (162)..(419): Homolog of NCBI NO: 25366932 NR Description: hypothetical protein dl4315c [imported] -
  misc_feature (161)..(418): Homolog of NCBI NO: 15240071 NR Description: expressed protein [Arabidopsis thaliana]
  misc_feature (123)..(416): Homolog of NCBI NO: 7485658 NR Description: hypothetical protein F17M5.260 - Arabidopsis
  misc_feature (16)..(416): Homolog of NCBI NO: 18418226 NR Description: protein phosphatase 2C (PP2C) -related
  misc_feature (1)..(146): Homolog of NCBI NO: 37533570 NR Description: putative protein phosphatase 2C
  misc_feature (17)..(204): Homolog of NCBI NO: 37533570 NR Description: putative protein phosphatase 2C
  misc_feature (188)..(419): Homolog of NCBI NO: 37533570 NR Description: putative protein phosphatase 2C
MPGADAPASPRPELRVDEPNPQIPHTAADAGETLASSEAPVPTVGSGVGVCVEAESELAGGRAVLPADCQLDTDGNGVELGALEESGTVVSDTTAPAGLEEVDADAGASPEGSATQDSDTGVDAESRGDDQGATESRVTIPPTAGEVHNKVDWEKNTSEVKSSDKTAPVASSALLLTSGAAILPHPSKAATGGEDAYFIEDYGWFGVADGVGQWSFEGINAGLYARELMDGCKKVIAESEGGSELAPEQVLSKAAAEASSPGSSTVLVAHFDGQLLHVSNIGDSGFLVIRNGEVCAKSKPMVYGFNFPHQIEKGVDPLTLVENYTIDIEEGDIIIAATDGLFDNVYEQEMAAMISKSLQADLKPAEMAEHLAARAHEVGRSGAGRSPFSDSAVAAGYLGFSGGKLDDTAIVVSIVRRSEA

SEQ ID NO: 67550 - DNA, 732 bp, Triticum aestivum
  misc_feature (1)..(732): Ceres Seq. ID no. 13660311
ctctccagcctctgcctgtcccctccaccctgcctgcagcctccccctcgtctcctccgttcccgattaaatcgcaatccaaaacctctcccccggaactccagcccccgtgccccgcctcgccccgccatgtcgccggccgctggaggcgccgcgcccacgcaaccggcggccagcgccgccccggcgccgacggtgatcgccgcgccgccgccgccccaggccccgtcgcgggagaacccgcgcgatccggccgcgcaggcggagggggccgatcccggcaatgcggcggcgaggaagacggcgtggaacgtgccgccgccgcccccggcacccgtcggcggcatcatgggcggcgacgagtcgtggccggcgctcgccgacacggccgcgcgggcctggcccaagtcctcctcctccgactccctcaagtccctctccgacggctccgccccctccgcgccggaggatccgattgtgccactggtgccgctgccgcagccacagtcagtttctactctgatctccactgcctcaagtccaggctctgcctctacttctcctcctcccactgccaccaccacggcctcgccgccacagaacagcagcacaggccagccaattttagttcggcatggtggcagtaacggtggtaacaatggagagggcggcggtggcaatgtgagcactcatagccagagcactggtaattacagtagtgatgggaacagc

SEQ ID NO: 67551 - protein, 244 aa, Triticum aestivum
  peptide (1)..(244): Ceres Seq. ID no. 13660312
  misc_feature (8)..(110): Pfam Name: Extensin-like region Pfam Description: Extensin-like region
  misc_feature (8)..(112): Homolog of NCBI NO: 28912428 NR Description: serine-proline rich repeat protein [Lupinus
  misc_feature (7)..(199): Homolog of NCBI NO: 1076211 NR Description: hypothetical protein VSP-3 - Chlamydomonas
  misc_feature (9)..(222): Homolog of NCBI NO: 5305335 NR Description: proline-rich mucin homolog [Mycobacterium
  misc_feature (7)..(210): Homolog of NCBI NO: 1076802 NR Description: extensin-like protein - maize
  misc_feature (2)..(202): Homolog of NCBI NO: 23017082 NR Description: hypothetical protein [Thermobifida fusca]
  misc_feature (7)..(207): Homolog of NCBI NO: 27375632 NR Description: blr0521 [Bradyrhizobium japonicum]
  misc_feature (7)..(199): Homolog of NCBI NO: 81286 NR Description: extensin - Volvox carteri (fragment)
  misc_feature (6)..(207): Homolog of NCBI NO: 1076802 NR Description: extensin-like protein - maize
  misc_feature (7)..(224): Homolog of NCBI NO: 31414574 NR Description: large tegument protein [Cercopithecine
  misc_feature (44)..(242): Homolog of NCBI NO: 32526660 NR Description: unknown protein [Oryza sativa (japonica
LSSLCLSPPPCLQPPPRLLRSRLNRNPKPLPRNSSPRAPPRPAMSPAAGGAAPTQPAASAAPAPTVIAAPPPPQAPSRENPRDPAAQAEGADPGNAAARKTAWNVPPPPPAPVGGIMGGDESWPALADTAARAWPKSSSSDSLKSLSDGSAPSAPEDPIVPLVPLPQPQSVSTLISTASSPGSASTSPPPTATTTASPPQNSSTGQPILVRHGGSNGGNNGEGGGGNVSTHSQSTGNYSSDGNS

SEQ ID NO: 67552 - protein, 214 aa, Triticum aestivum
  peptide (1)..(214): Ceres Seq. ID no. 13660313
  misc_feature (35)..(88): Pfam Name: Collagen triple helix repeat (20 copies) Pfam Description: Collagen triple helix repeat (20 copies)
LQPLPVPSTLPAASPSSPPFPIKSQSKTSPPELQPPCPASPRHVAGRWRRRAHATGGQRRPGADGDRRAAAAPGPVAGEPARSGRAGGGGRSRQCGGEEDGVERAAAAPGTRRRHHGRRRVVAGARRHGRAGLAQVLLLRLPQVPLRRLRPLRAGGSDCATGAAAAATVSFYSDLHCLKSRLCLYFSSSHCHHHGLAATEQQHRPANFSSAWWQ

SEQ ID NO: 67553 - protein, 201 aa, Triticum aestivum
  peptide (1)..(201): Ceres Seq. ID no. 13660314
  misc_feature (1)..(67): Pfam Name: Extensin-like region Pfam Description: Extensin-like region
  misc_feature (1)..(69): Homolog of NCBI NO: 28912428 NR Description: serine-proline rich repeat protein [Lupinus
  misc_feature (1)..(156): Homolog of NCBI NO: 1076211 NR Description: hypothetical protein VSP-3 - Chlamydomonas
  misc_feature (1)..(179): Homolog of NCBI NO: 5305335 NR Description: proline-rich mucin homolog [Mycobacterium
  misc_feature (1)..(167): Homolog of NCBI NO: 1076802 NR Description: extensin-like protein - maize
  misc_feature (1)..(159): Homolog of NCBI NO: 23017082 NR Description: hypothetical protein [Thermobifida fusca]
  misc_feature (1)..(164): Homolog of NCBI NO: 27375632 NR Description: blr0521 [Bradyrhizobium japonicum]
  misc_feature (1)..(156): Homolog of NCBI NO: 81286 NR Description: extensin - Volvox carteri (fragment)
  misc_feature (1)..(164): Homolog of NCBI NO: 1076802 NR Description: extensin-like protein - maize
  misc_feature (1)..(181): Homolog of NCBI NO: 31414574 NR Description: large tegument protein [Cercopithecine
  misc_feature (1)..(199): Homolog of NCBI NO: 32526660 NR Description: unknown protein [Oryza sativa (japonica
MSPAAGGAAPTQPAASAAPAPTVIAAPPPPQAPSRENPRDPAAQAEGADPGNAAARKTAWNVPPPPPAPVGGIMGGDESWPALADTAARAWPKSSSSDSLKSLSDGSAPSAPEDPIVPLVPLPQPQSVSTLISTASSPGSASTSPPPTATTTASPPQNSSTGQPILVRHGGSNGGNNGEGGGGNVSTHSQSTGNYSSDGNS

SEQ ID NO: 67554 - DNA, 1909 bp, Triticum aestivum
  misc_feature (1)..(1909): Ceres Seq. ID no. 15169561
atcccccatcatctatcgccagagaaatctctaggcacaatggctcacacccctggctcgtcctcacgacctcatggtcccctccccggcgactgggcgaggtactccgtctcgcgcctctggctgagcgagctgcagaggcaggggtaccttccccccaccggcgctcgttcctgtccgcacaagactgatttccatggatggccaagcatttgtcgagaacttccctgctccaaacaacgaagagagggtatgcttcgtgccttccttctccagggtctgggttttcccgttcacccattcctgcaaggtctattggaattttacgggatccagctccacaaccttacccaagaatccatactacatatttgcggcttcgtggcgctttgtgagatattcctgagttgcaaggcccactttgatctatggagaaaatatttttgccttgttcctcgtacccatgaaaggtcaatctttgaagtaggccgggccaaggtctggcggatagctgggacagggtgtcccatcgggacccatgaaaagatcctgaagaatggacctcataatggttctaaatcaaagatgtccccctctatccagtccggagagggctacccgaatactccagcgccccgctaaagaagcagttcaattggtgacccaagagtccttccaagagaacaatgcagaggtgcgccttctagccaccaatgtttggttgctagctcacagcaaactgaccatggtcaaggtaatggccattgccatatttcggtgcgggcaacaatttcagcaaagaatgcatcctttgtggtgctacaacgggacgagcgacgcgacccgctacaagtgacaagggaccgacaaccaagcggctatggccaagatactagccgacctcttcaagggagaggaagaagacttagttcagctgggtattcgggacgggtgctccagctacaatccgcctgaatgggtaagttttaatcccttgttttaagttcaaagactgtgtctggacattcgtcggatctattccccttttgaacagagttggaggcctcggatcgaatccgtctattcccaattccccacagccagaatatcattatcatgatgatgacccgaggtatcatgtcgatccgaagacatctttcgatttcgaggacggggtcttttatcaagagagccttgacgacaccaaggtcaccctaacagtggaccatcccggggcacttccttcttctataggtcgtcgcactgcgcgcctatggaaggagcatgagatatgacggcctcgacccgtaatggggcgtccaagcagaaggcctccgctggagcggcaatgatggccccctcggctcaaagaagaaaagttccttggcgctaatccggagactctctgggcgtgccgaggcgcaatcccaaccttggatcttcggcgcaggctagggaccatgttggtcctgcggtgaccagcgccctccggaggatcctgacgaagtctcggtcaccaattctgaagtagaaagtgtgatgaatcactgttaggcataatcttgagtttgtgtctagttttctagttggcttgcatgccacgtaggtaagctaagttttagttttgatagtactagttggtatacagtttggttgagtccaacgtgttaggtatcctgatgctagtagtactaggatgagtcggtataggattaacttagcggcttcccgttggttttgtggagtcgtacgtggaagagcttatggctgagtccggtttggactcaagagcattagtcggttggtccttgcatgtaaattttcccgtgaagggctgcagctttgtaacgtggggggggaaaattgaaaagaaataaaaagaagaaggggcccgacccgttcccttggg

SEQ ID NO: 67555 - protein, 213 aa, Triticum aestivum
  peptide (1)..(213): Ceres Seq. ID no. 15169562
  misc_feature (32)..(173): Pfam Name: Putative gypsy type transposon Pfam Description: Putative gypsy type transposon
  misc_feature (30)..(173): Homolog of NCBI NO: 23477826 NR Description: Putative gypsy-type retrotransposon RIRE2
  misc_feature (30)..(173): Homolog of NCBI NO: 38346694 NR Description: OSJNBa0080E14.10 [Oryza sativa (japonica
  misc_feature (30)..(173): Homolog of NCBI NO: 37536648 NR Description: gypsy-type retrotransposon RIRE2 protein
  misc_feature (30)..(173): Homolog of NCBI NO: 38344379 NR Description: OSJNBb0054B09.1 [Oryza sativa (japonica
  misc_feature (30)..(173): Homolog of NCBI NO: 34894224 NR Description: putative gypsy-type retrotransposon RIRE2 orf3
  misc_feature (32)..(173): Homolog of NCBI NO: 37533226 NR Description: hypothetical protein similar to putative
  misc_feature (5)..(149): Homolog of NCBI NO: 33113962 NR Description: putative gypsy-type retrotransposon [Zea mays]
  misc_feature (30)..(173): Homolog of NCBI NO: 34906278 NR Description: putative gypsy-type retrotransposon RIRE2 orf3
  misc_feature (30)..(173): Homolog of NCBI NO: 34906434 NR Description: putative gypsy-type retrotransposon RIRE2 orf3
  misc_feature (30)..(173): Homolog of NCBI NO: 5902448 NR Description: orf3 [Oryza sativa (japonica cultivar-group)]
IPHHLSPEKSLGTMAHTPGSSSRPHGPLPGDWARYSVSRLWLSELQRQGYLPPTGARSCPHKTDFHGWPSICRELPCSKQRREGMLRAFLLQGLGFPVHPFLQGLLEFYGIQLHNLTQESILHICGFVALCEIFLSCKAHFDLWRKYFCLVPRTHERSIFEVGRAKVWRIAGTGCPIGTHEKILKNGPHNGSKSKMSPSIQSGEGYPNTPAPR

SEQ ID NO: 67556 - protein, 200 aa, Triticum aestivum
  peptide (1)..(200): Ceres Seq. ID no. 15169563
  misc_feature (19)..(160): Pfam Name: Putative gypsy type transposon Pfam Description: Putative gypsy type transposon
  misc_feature (17)..(160): Homolog of NCBI NO: 23477826 NR Description: Putative gypsy-type retrotransposon RIRE2
  misc_feature (17)..(160): Homolog of NCBI NO: 38346694 NR Description: OSJNBa0080E14.10 [Oryza sativa (japonica
  misc_feature (17)..(160): Homolog of NCBI NO: 37536648 NR Description: gypsy-type retrotransposon RIRE2 protein
  misc_feature (17)..(160): Homolog of NCBI NO: 38344379 NR Description: OSJNBb0054B09.1 [Oryza sativa (japonica
  misc_feature (17)..(160): Homolog of NCBI NO: 34894224 NR Description: putative gypsy-type retrotransposon RIRE2 orf3
  misc_feature (19)..(160): Homolog of NCBI NO: 37533226 NR Description: hypothetical protein similar to putative
  misc_feature (1)..(136): Homolog of NCBI NO: 33113962 NR Description: putative gypsy-type retrotransposon [Zea mays]
  misc_feature (17)..(160): Homolog of NCBI NO: 34906278 NR Description: putative gypsy-type retrotransposon RIRE2 orf3
  misc_feature (17)..(160): Homolog of NCBI NO: 34906434 NR Description: putative gypsy-type retrotransposon RIRE2 orf3
  misc_feature (17)..(160): Homolog of NCBI NO: 5902448 NR Description: orf3 [Oryza sativa (japonica cultivar-group)]
MAHTPGSSSRPHGPLPGDWARYSVSRLWLSELQRQGYLPPTGARSCPHKTDFHGWPSICRELPCSKQRREGMLRAFLLQGLGFPVHPFLQGLLEFYGIQLHNLTQESILHICGFVALCEIFLSCKAHFDLWRKYFCLVPRTHERSIFEVGRAKVWRIAGTGCPIGTHEKILKNGPHNGSKSKMSPSIQSGEGYPNTPAPR

SEQ ID NO: 67557 - protein, 129 aa, Triticum aestivum
  peptide (1)..(129): Ceres Seq. ID no. 15169564
  misc_feature (1)..(89): Pfam Name: Putative gypsy type transposon Pfam Description: Putative gypsy type transposon
  misc_feature (1)..(89): Homolog of NCBI NO: 23477826 NR Description: Putative gypsy-type retrotransposon RIRE2
  misc_feature (1)..(89): Homolog of NCBI NO: 38346694 NR Description: OSJNBa0080E14.10 [Oryza sativa (japonica
  misc_feature (1)..(89): Homolog of NCBI NO: 37536648 NR Description: gypsy-type retrotransposon RIRE2 protein
  misc_feature (1)..(89): Homolog of NCBI NO: 38344379 NR Description: OSJNBb0054B09.1 [Oryza sativa (japonica
  misc_feature (1)..(89): Homolog of NCBI NO: 34894224 NR Description: putative gypsy-type retrotransposon RIRE2 orf3
  misc_feature (1)..(89): Homolog of NCBI NO: 37533226 NR Description: hypothetical protein similar to putative
  misc_feature (1)..(65): Homolog of NCBI NO: 33113962 NR Description: putative gypsy-type retrotransposon [Zea mays]
  misc_feature (1)..(89): Homolog of NCBI NO: 34906278 NR Description: putative gypsy-type retrotransposon RIRE2 orf3
  misc_feature (1)..(89): Homolog of NCBI NO: 34906434 NR Description: putative gypsy-type retrotransposon RIRE2 orf3
  misc_feature (1)..(89): Homolog of NCBI NO: 5902448 NR Description: orf3 [Oryza sativa (japonica cultivar-group)]
MLRAFLLQGLGFPVHPFLQGLLEFYGIQLHNLTQESILHICGFVALCEIFLSCKAHFDLWRKYFCLVPRTHERSIFEVGRAKVWRIAGTGCPIGTHEKILKNGPHNGSKSKMSPSIQSGEGYPNTPAPR

SEQ ID NO: 67558 - DNA, 2251 bp, Triticum aestivum
  misc_feature (1)..(2251): Ceres Seq. ID no. 13501807
tttttttctccccttcgatatccccgataaaacctccatctccatccccatccccgcccctcctatcgccacttcgccagccagctcgcccgcccgcccgcctagtcttctccgaaggaaggaacgaaggaaggaagcggccgcacgctcatggccctctcctgcatgaggtgcccggcggcggcggccggcggcggccccctcgcgcgccgcccgcaaccgccgccctcctcgtccctcgccttctccttcgccagatgcggagccgccaaggggtggcgcatccacgccgtcgccgggaaaggagtgaaagctcccatggatgctgtggagaacgctgtcgcccccgccgccccgtcaacggtggcaaatggcacttcttcagcaatcaccgtcgaggaatttgaagatttagcctctctagtgaaggatgatgaggcgtcggttagcatcaccgtagttggagcgtctggtgaccttgcgaagaagaagatatttcctgcccttttcgctctttactatgaaggttgtcttcccaagcatttctccatctttggctatgcgcggagtaaaatgacagatgctgaactgagagacatggtcagcaaaacactgacttgcaggattgataaaagggagaactgtagtgagaaaatggaagagtttctgaaacgatgcttctaccactcaggtcaatatgactcagaggaagatttcagggagctaggcaagaagatcaaacaacatgagggtcccagagtatctaaccatcttttctacttgtcgatacctccaaatatattcctggatgttgtaaaatgtgcaagcaaatcagcatcatctgtgagtggctggacaagggtaattgttgaaaaaccctttggccgggactcagagtcttctgctgccctaacgaaaggtctgaagcagtacctgacagaggaccaaatcttcaggattgaccattacttgggaaaggaactggtggagaacttgtctgtccttcgcttctcgaatcttgtttttgagcctctgtggtcaaggcaatatattaggaatgtgcaactgatattctcggaagactttggcactgaagggcgaggagggtactttgatagctatggtattatccgagacataatgcagaatcatcttcttcagatactagctctatttgcaatggaaactcctattagcttggaagcagaggacatacgaaatgagaaggttaaagttttgcgctccatgaagccattgcgactagaagatgtggtaataggacagtataaaagtcatacaaagggtggtattacataccctggatacactgaagataagacggtgcccaagggtagtctgactccaacatttgctgcagctgcgctttttataaataacgctagatgggatggagttccctttctcatgaaggctggaaaagctttgcatactaaacaggctgagattagagtacagtttcgacatgttcctggaaatctctacaaggggtcttttggaaccgatcttgacagggctactaatgaacttgtgatacgcgtgcaaccagatgaaggaatttacctaaagattaacaacaagattcctggtcttggtatgagactagataggagtaatctgaatcttcactatgcagcaaggtaccccaaggagataccagatgcgtacgagaggctcctgctcgacgcgatagaaggagagcgaaggctcttcatccggtcggacgagctggacgcagcgtgggagctcttcacgcccctcctgaaggagctggagcagaagcggatggcccccgagctatacccctacgggagccgcgggcccatgggcgcccactacctggcagccaagtacaaggtgagatggggcgacctgggtggctcggaacactaggaagagagcgtggtttcacacgggaggtgatgatttctgtttttggcgtcgcaatttctgcaaaaggccttgcagcgcacgcccagctagtgggggtgtgcgaggaacagatctgaataagggtgagcggttggcgatgcttgtgttcatcgatcgatcgaccgtgagtgagtatatttgttggtaccactggcttacatattctatgattcttaagaggaagcccagagcagaaagctcattcatcctggctgttcgtcggctcatttggttgtctggctgggccgggctgttgtattgggactgctgattgtgtaactgcaaaagctgttacttcttt

SEQ ID NO: 67559 - protein, 586 aa, Triticum aestivum
  peptide (1)..(586): Ceres Seq. ID no. 15223152
  misc_feature (72)..(585): Homolog of NCBI NO: 7431270 NR Description: glucose-6-phosphate 1-dehydrogenase (EC
  misc_feature (26)..(581): Homolog of NCBI NO: 15221719 NR Description: glucose-6-phosphate 1-dehydrogenase [Arabidopsis
  misc_feature (95)..(581): Homolog of NCBI NO: 24745908 NR Description: glucose 6-phosphate dehydrogenase [Solanum
  misc_feature (95)..(581): Homolog of NCBI NO: 5734502 NR Description: glucose-6-phosphate 1-dehydrogenase [Solanum
  misc_feature (43)..(581): Homolog of NCBI NO: 3023817 NR Description: Glucose-6-phosphate 1-dehydrogenase, chloroplast
  misc_feature (96)..(581): Homolog of NCBI NO: 2146735 NR Description: glucose-6-phosphate 1-dehydrogenase (EC 1.1.1.49)
  misc_feature (43)..(581): Homolog of NCBI NO: 9392607 NR Description: plastidic glucose 6-phosphate dehydrogenase
  misc_feature (96)..(581): Homolog of NCBI NO: 18086448 NR Description: AT5g13110/T19L5_70 [Arabidopsis thaliana]
  misc_feature (96)..(581): Homolog of NCBI NO: 22326761 NR Description: glucose-6-phosphate 1-dehydrogenase [Arabidopsis
  misc_feature (96)..(581): Homolog of NCBI NO: 9955555 NR Description: glucose-6-phosphate 1-dehydrogenase [Arabidopsis
MALSCMRCPAAAAGGGPLARRPQPPPSSSLAFSFARCGAAKGWRIHAVAGKGVKAPMDAVENAVAPAAPSTVANGTSSAITVEEFEDLASLVKDDEASVSITVVGASGDLAKKKIFPALFALYYEGCLPKHFSIFGYARSKMTDAELRDMVSKTLTCRIDKRENCSEKMEEFLKRCFYHSGQYDSEEDFRELGKKIKQHEGPRVSNHLFYLSIPPNIFLDVVKCASKSASSVSGWTRVIVEKPFGRDSESSAALTKGLKQYLTEDQIFRIDHYLGKELVENLSVLRFSNLVFEPLWSRQYIRNVQLIFSEDFGTEGRGGYFDSYGIIRDIMQNHLLQILALFAMETPISLEAEDIRNEKVKVLRSMKPLRLEDVVIGQYKSHTKGGITYPGYTEDKTVPKGSLTPTFAAAALFINNARWDGVPFLMKAGKALHTKQAEIRVQFRHVPGNLYKGSFGTDLDRATNELVIRVQPDEGIYLKINNKIPGLGMRLDRSNLNLHYAARYPKEIPDAYERLLLDAIEGERRLFIRSDELDAAWELFTPLLKELEQKRMAPELYPYGSRGPMGAHYLAAKYKVRWGDLGGSEH

SEQ ID NO: 67560 - protein, 581 aa, Triticum aestivum
  peptide (1)..(581): Ceres Seq. ID no. 15223153
  misc_feature (67)..(580): Homolog of NCBI NO: 7431270 NR Description: glucose-6-phosphate 1-dehydrogenase (EC
  misc_feature (21)..(576): Homolog of NCBI NO: 15221719 NR Description: glucose-6-phosphate 1-dehydrogenase [Arabidopsis
  misc_feature (90)..(576): Homolog of NCBI NO: 24745908 NR Description: glucose 6-phosphate dehydrogenase [Solanum
  misc_feature (90)..(576): Homolog of NCBI NO: 5734502 NR Description: glucose-6-phosphate 1-dehydrogenase [Solanum
  misc_feature (38)..(576): Homolog of NCBI NO: 3023817 NR Description: Glucose-6-phosphate 1-dehydrogenase, chloroplast
  misc_feature (91)..(576): Homolog of NCBI NO: 2146735 NR Description: glucose-6-phosphate 1-dehydrogenase (EC 1.1.1.49)
  misc_feature (38)..(576): Homolog of NCBI NO: 9392607 NR Description: plastidic glucose 6-phosphate dehydrogenase
  misc_feature (91)..(576): Homolog of NCBI NO: 18086448 NR Description: AT5g13110/T19L5_70 [Arabidopsis thaliana]
  misc_feature (91)..(576): Homolog of NCBI NO: 22326761 NR Description: glucose-6-phosphate 1-dehydrogenase [Arabidopsis
  misc_feature (91)..(576): Homolog of NCBI NO: 9955555 NR Description: glucose-6-phosphate 1-dehydrogenase [Arabidopsis
MRCPAAAAGGGPLARRPQPPPSSSLAFSFARCGAAKGWRIHAVAGKGVKAPMDAVENAVAPAAPSTVANGTSSAITVEEFEDLASLVKDDEASVSITVVGASGDLAKKKIFPALFALYYEGCLPKHFSIFGYARSKMTDAELRDMVSKTLTCRIDKRENCSEKMEEFLKRCFYHSGQYDSEEDFRELGKKIKQHEGPRVSNHLFYLSIPPNIFLDVVKCASKSASSVSGWTRVIVEKPFGRDSESSAALTKGLKQYLTEDQIFRIDHYLGKELVENLSVLRFSNLVFEPLWSRQYIRNVQLIFSEDFGTEGRGGYFDSYGIIRDIMQNHLLQILALFAMETPISLEAEDIRNEKVKVLRSMKPLRLEDVVIGQYKSHTKGGITYPGYTEDKTVPKGSLTPTFAAAALFINNARWDGVPFLMKAGKALHTKQAEIRVQFRHVPGNLYKGSFGTDLDRATNELVIRVQPDEGIYLKINNKIPGLGMRLDRSNLNLHYAARYPKEIPDAYERLLLDAIEGERRLFIRSDELDAAWELFTPLLKELEQKRMAPELYPYGSRGPMGAHYLAAKYKVRWGDLGGSEH

SEQ ID NO: 67561 - protein, 530 aa, Triticum aestivum
  peptide (1)..(530): Ceres Seq. ID no. 15223154
  misc_feature (16)..(529): Homolog of NCBI NO: 7431270 NR Description: glucose-6-phosphate 1-dehydrogenase (EC
  misc_feature (1)..(525): Homolog of NCBI NO: 15221719 NR Description: glucose-6-phosphate 1-dehydrogenase [Arabidopsis
  misc_feature (39)..(525): Homolog of NCBI NO: 24745908 NR Description: glucose 6-phosphate dehydrogenase [Solanum
  misc_feature (39)..(525): Homolog of NCBI NO: 5734502 NR Description: glucose-6-phosphate 1-dehydrogenase [Solanum
  misc_feature (1)..(525): Homolog of NCBI NO: 3023817 NR Description: Glucose-6-phosphate 1-dehydrogenase, chloroplast
  misc_feature (40)..(525): Homolog of NCBI NO: 2146735 NR Description: glucose-6-phosphate 1-dehydrogenase (EC 1.1.1.49)
  misc_feature (1)..(525): Homolog of NCBI NO: 9392607 NR Description: plastidic glucose 6-phosphate dehydrogenase
  misc_feature (40)..(525): Homolog of NCBI NO: 18086448 NR Description: AT5g13110/T19L5_70 [Arabidopsis thaliana]
  misc_feature (40)..(525): Homolog of NCBI NO: 22326761 NR Description: glucose-6-phosphate 1-dehydrogenase [Arabidopsis
  misc_feature (40)..(525): Homolog of NCBI NO: 9955555 NR Description: glucose-6-phosphate 1-dehydrogenase [Arabidopsis
MDAVENAVAPAAPSTVANGTSSAITVEEFEDLASLVKDDEASVSITVVGASGDLAKKKIFPALFALYYEGCLPKHFSIFGYARSKMTDAELRDMVSKTLTCRIDKRENCSEKMEEFLKRCFYHSGQYDSEEDFRELGKKIKQHEGPRVSNHLFYLSIPPNIFLDVVKCASKSASSVSGWTRVIVEKPFGRDSESSAALTKGLKQYLTEDQIFRIDHYLGKELVENLSVLRFSNLVFEPLWSRQYIRNVQLIFSEDFGTEGRGGYFDSYGIIRDIMQNHLLQILALFAMETPISLEAEDIRNEKVKVLRSMKPLRLEDVVIGQYKSHTKGGITYPGYTEDKTVPKGSLTPTFAAAALFINNARWDGVPFLMKAGKALHTKQAEIRVQFRHVPGNLYKGSFGTDLDRATNELVIRVQPDEGIYLKINNKIPGLGMRLDRSNLNLHYAARYPKEIPDAYERLLLDAIEGERRLFIRSDELDAAWELFTPLLKELEQKRMAPELYPYGSRGPMGAHYLAAKYKVRWGDLGGSEH

SEQ ID NO: 67562 - DNA, 738 bp, Triticum aestivum
  misc_feature (1)..(738): Ceres Seq. ID no. 12622778
gatttttcattatgtagtttattctttttcgtgctaatggggcatgttttaatttctatgcagttacaggcgcattgtagaatacaaaacagcttactattcattctatttgccggtcggttgtgcactgctgttgtccggtgggagtttggatgattatgttcaagtgaagcatatcctagttgaaatgggtatttacttccaaattcaggacgattatcttgactgttttggtgatccagaagttatgggcaagattggaactgatatcgaagacttcaagtgctcttggctgtttgttcaagcactagtgcgtgtcgatgagaggcaaaaagacatcttatttgaaaattacgggaaatcagatcctgcttgtgttgcaaaagtgaaggcgctgtataaagagctcaatctggaggcggtgttctctgagtacgaaagggagatttacgaaaagctgatctcagacatcgaagcgcagccgaatgaagctgtgcaggcagtgttgaaatcgtttttgcataaaatctacagaaggatgaagtaggaatgttcttgcgtacaaagagattgttgggtggaatgagttctttggtgtcggcgcatgcaagatgaatagtagtattaaatacttatgaataagcagtatgactgatcatattgaatagtcagagtttttgctttatattcgcgaacaacaaagcatttccatgcaaaagaacagaatataagaaattt

SEQ ID NO: 67563 - protein, 119 aa, Triticum aestivum
  peptide (1)..(119): Ceres Seq. ID no. 12622779
  misc_feature (1)..(82): Pfam Name: Polyprenyl synthetase Pfam Description: Polyprenyl synthetase
  misc_feature (1)..(119): Homolog of NCBI NO: 1346028 NR Description: Farnesyl pyrophosphate synthetase 1 (FPP
  misc_feature (1)..(119): Homolog of NCBI NO: 14573639 NR Description: farnesyldiphosphate synthase [x Citrofortunella
  misc_feature (1)..(119): Homolog of NCBI NO: 7433992 NR Description: farnesyl-pyrophosphate synthetase - Para rubber
  misc_feature (1)..(119): Homolog of NCBI NO: 18958450 NR Description: farnesyl pyrophosphare synthase [Musa acuminata]
  misc_feature (1)..(119): Homolog of NCBI NO: 25458583 NR Description: probable farnesyl pyrophosphate synthase
  misc_feature (1)..(119): Homolog of NCBI NO: 4115416 NR Description: farnesyl diphosphate synthase
  misc_feature (1)..(119): Homolog of NCBI NO: 33340604 NR Description: truncated geranylgeranyl-diphosphate synthase
  misc_feature (1)..(119): Homolog of NCBI NO: 1346033 NR Description: Farnesyl pyrophosphate synthetase (FPP
  misc_feature (1)..(119): Homolog of NCBI NO: 34911542 NR Description: putative farnesyl-pyrophosphate synthetase
  misc_feature (1)..(119): Homolog of NCBI NO: 34911444 NR Description: putative farnesyl-pyrophosphate synthetase
MGIYFQIQDDYLDCFGDPEVMGKIGTDIEDFKCSWLFVQALVRVDERQKDILFENYGKSDPACVAKVKALYKELNLEAVFSEYEREIYEKLISDIEAQPNEAVQAVLKSFLHKIYRRMK

SEQ ID NO: 67564 - protein, 99 aa, Triticum aestivum
  peptide (1)..(99): Ceres Seq. ID no. 12622780
  misc_feature (1)..(62): Pfam Name: Polyprenyl synthetase Pfam Description: Polyprenyl synthetase
  misc_feature (1)..(99): Homolog of NCBI NO: 1346028 NR Description: Farnesyl pyrophosphate synthetase 1 (FPP
  misc_feature (1)..(99): Homolog of NCBI NO: 14573639 NR Description: farnesyldiphosphate synthase [x Citrofortunella
  misc_feature (1)..(99): Homolog of NCBI NO: 7433992 NR Description: farnesyl-pyrophosphate synthetase - Para rubber
  misc_feature (1)..(99): Homolog of NCBI NO: 18958450 NR Description: farnesyl pyrophosphare synthase [Musa acuminata]
  misc_feature (1)..(99): Homolog of NCBI NO: 25458583 NR Description: probable farnesyl pyrophosphate synthase
  misc_feature (1)..(99): Homolog of NCBI NO: 4115416 NR Description: farnesyl diphosphate synthase
  misc_feature (1)..(99): Homolog of NCBI NO: 33340604 NR Description: truncated geranylgeranyl-diphosphate synthase
  misc_feature (1)..(99): Homolog of NCBI NO: 1346033 NR Description: Farnesyl pyrophosphate synthetase (FPP
  misc_feature (1)..(99): Homolog of NCBI NO: 34911542 NR Description: putative farnesyl-pyrophosphate synthetase
  misc_feature (1)..(99): Homolog of NCBI NO: 34911444 NR Description: putative farnesyl-pyrophosphate synthetase
MGKIGTDIEDFKCSWLFVQALVRVDERQKDILFENYGKSDPACVAKVKALYKELNLEAVFSEYEREIYEKLISDIEAQPNEAVQAVLKSFLHKIYRRMK

SEQ ID NO: 67565 - DNA, 2080 bp, Triticum aestivum
  misc_feature (1)..(2080): Ceres Seq. ID no. 13659971
gaaatagttttcgcagagccgttaagctcacctccttcgaggccggctgctccacctccacctccacctaatccccattcgcctcgcctccccgcccaccgccaccacccgtcgatggcggccatcaagccgccgccgcctgaccggccgccgcaggccgcgcggctgccgtccccttcctcttcctcctcggcggtggcggcggccaagcgaggcgccacaggctcccgcgggctgctcatggggcgctacgagctgggccgcgtcctgggcaaaggcaccttcgccaaggtgtaccacgcgcggcacgtgcagaccggcgagagcgtggccatcaaggtgctcgaccgggagaaggccgtgcggagcggcctcgtctcgcacatcaagcgcgagatcgccgtgctccgctgcgtgcgccaccccaacatcgtgcacctcttcgaggtcatggccaccaagaccaagatctacttcgtcatggagctcgtccgcggcggcgagctcttctcccgcgtctccaagggccgcctcaaggaggacattgcgcgccgctacttccagcacctcatctccgccgtcggcttctgccacacccgcggggtcttccaccgggacctcaagccggagaacctcctcgtcgacgaggcgggcaacctcaaggtgtccgacttcggcctctccgccgtcgccgagccgttccagccagagggtctcctccacaccttctgcggcacgccggcctacgtcgcgcccgaagtcctcgcccgccgtggatacgaaggcgccaaggccgacatatggtcctgcggtgtcatcctctttgttctcatggccggatacctccctttccatgaccagaacctcatggccatgtaccgtaaggtttacaagggagagttccgatgtccaaggtggttctccaaggaccttactagcttgatcatgcgttttcttgacacaaacccaagcaccaggatcaccttgccggaggtcatggagagccggtggttcaagaaaggtttccggccagtcaagttctatattgaagatgaccagctgtacaacgtcattgatgccgagaatgatatgctcgacttgggtctccctgaccctcttcctcaaccattgcttcctccaccttcatctccatctccgcaagaagttgatggagatgactcagggtcagaatccgacgcatcagtcgtgtcctgccctgccacatcgtcatttgaagagcgccacaggctccgcgggccactcccacgccccgcaagccttaacgcgtttgatatcatatcattctcaaggggattcaacttgtcggggctgtttgaggaaaaaggggacgaggtgagattcatctcgagtgaacctatgtcgggcattataacgaaattagaggagatcgcaaatgtgaagagcttcgcggtgcggaagaaggattggcgggtgagcctagagggcacaagggaaggggttaaggggccactaacaatctgcgcggagatatttgaactcacaccctcccttgtagtagtggaggtaaaaaagaaggcgggggataaggaagagtatgatgatttctgcaacaaggaattgaagccaggaatgcagcatcttgtgcaccagatggccccagttccaattacacctaccatttctgagtaggccgaaaggccttcaaggtaacaggcgccaccgcccctagagctaacggggatagggggagcgactctccaagctagaaagaaactggagtcgggtgcaactgacaggagcaagagttcttgtagtctcgggcactgacgatgatgagcgcggttacttggttaactctggagagcatacgtaatgttatccgagacgggagctagattgtggctgtatatggtgtcaccctagctgctgtttaaatgtttgtacttttctctacttaatttgctgatgatgattgtgtatgtactcccgctgttggtttatcagcagaaccgaataattttgggcaatcgttaattcaaggaccaaactgattgaggaataaattgggtgcaacatgcattgcatgcaccctttggcc

SEQ ID NO: 67566 - protein, 556 aa, Triticum aestivum
  peptide (1)..(556): Ceres Seq. ID no. 15219995
  misc_feature (84)..(338): Pfam Name: Protein kinase domain Pfam Description: Protein kinase domain
  misc_feature (70)..(359): Homolog of NCBI NO: 15242507 NR Description: CBL-interacting protein kinase 19 [Arabidopsis
  misc_feature (387)..(544): Homolog of NCBI NO: 15218854 NR Description: CBL-interacting protein kinase 18 [Arabidopsis
  misc_feature (5)..(354): Homolog of NCBI NO: 15218854 NR Description: CBL-interacting protein kinase 18 [Arabidopsis
  misc_feature (388)..(541): Homolog of NCBI NO: 15233981 NR Description: CBL-interacting protein kinase 12 [Arabidopsis
  misc_feature (77)..(359): Homolog of NCBI NO: 15233981 NR Description: CBL-interacting protein kinase 12 [Arabidopsis
  misc_feature (39)..(556): Homolog of NCBI NO: 34909718 NR Description: OsPK7 [Oryza sativa (japonica cultivar-group)]
  misc_feature (50)..(556): Homolog of NCBI NO: 5821067 NR Description: OsPK4 [Oryza sativa]
  misc_feature (39)..(549): Homolog of NCBI NO: 6651177 NR Description: protein kinase PK4 [Zea mays]
  misc_feature (39)..(556): Homolog of NCBI NO: 626040 NR Description: protein kinase SNF1 homolog wpk4-p58 - wheat
  misc_feature (39)..(556): Homolog of NCBI NO: 3928519 NR Description: wpk4 protein kinase [Triticum aestivum]
EIVFAEPLSSPPSRPAAPPPPPPNPHSPRLPAHRHHPSMAAIKPPPPDRPPQAARLPSPSSSSSAVAAAKRGATGSRGLLMGRYELGRVLGKGTFAKVYHARHVQTGESVAIKVLDREKAVRSGLVSHIKREIAVLRCVRHPNIVHLFEVMATKTKIYFVMELVRGGELFSRVSKGRLKEDIARRYFQHLISAVGFCHTRGVFHRDLKPENLLVDEAGNLKVSDFGLSAVAEPFQPEGLLHTFCGTPAYVAPEVLARRGYEGAKADIWSCGVILFVLMAGYLPFHDQNLMAMYRKVYKGEFRCPRWFSKDLTSLIMRFLDTNPSTRITLPEVMESRWFKKGFRPVKFYIEDDQLYNVIDAENDMLDLGLPDPLPQPLLPPPSSPSPQEVDGDDSGSESDASVVSCPATSSFEERHRLRGPLPRPASLNAFDIISFSRGFNLSGLFEEKGDEVRFISSEPMSGIITKLEEIANVKSFAVRKKDWRVSLEGTREGVKGPLTICAEIFELTPSLVVVEVKKKAGDKEEYDDFCNKELKPGMQHLVHQMAPVPITPTISE

SEQ ID NO: 67567 - protein, 518 aa, Triticum aestivum
  peptide (1)..(518): Ceres Seq. ID no. 15219996
  misc_feature (46)..(300): Pfam Name: Protein kinase domain Pfam Description: Protein kinase domain
  misc_feature (32)..(321): Homolog of NCBI NO: 15242507 NR Description: CBL-interacting protein kinase 19 [Arabidopsis
  misc_feature (349)..(506): Homolog of NCBI NO: 15218854 NR Description: CBL-interacting protein kinase 18 [Arabidopsis
  misc_feature (1)..(316): Homolog of NCBI NO: 15218854 NR Description: CBL-interacting protein kinase 18 [Arabidopsis
  misc_feature (350)..(503): Homolog of NCBI NO: 15233981 NR Description: CBL-interacting protein kinase 12 [Arabidopsis
  misc_feature (39)..(321): Homolog of NCBI NO: 15233981 NR Description: CBL-interacting protein kinase 12 [Arabidopsis
  misc_feature (1)..(518): Homolog of NCBI NO: 34909718 NR Description: OsPK7 [Oryza sativa (japonica cultivar-group)]
  misc_feature (12)..(518): Homolog of NCBI NO: 5821067 NR Description: OsPK4 [Oryza sativa]
  misc_feature (1)..(511): Homolog of NCBI NO: 6651177 NR Description: protein kinase PK4 [Zea mays]
  misc_feature (1)..(518): Homolog of NCBI NO: 626040 NR Description: protein kinase SNF1 homolog wpk4-p58 - wheat
  misc_feature (1)..(518): Homolog of NCBI NO: 3928519 NR Description: wpk4 protein kinase [Triticum aestivum]
MAAIKPPPPDRPPQAARLPSPSSSSSAVAAAKRGATGSRGLLMGRYELGRVLGKGTFAKVYHARHVQTGESVAIKVLDREKAVRSGLVSHIKREIAVLRCVRHPNIVHLFEVMATKTKIYFVMELVRGGELFSRVSKGRLKEDIARRYFQHLISAVGFCHTRGVFHRDLKPENLLVDEAGNLKVSDFGLSAVAEPFQPEGLLHTFCGTPAYVAPEVLARRGYEGAKADIWSCGVILFVLMAGYLPFHDQNLMAMYRKVYKGEFRCPRWFSKDLTSLIMRFLDTNPSTRITLPEVMESRWFKKGFRPVKFYIEDDQLYNVIDAENDMLDLGLPDPLPQPLLPPPSSPSPQEVDGDDSGSESDASVVSCPATSSFEERHRLRGPLPRPASLNAFDIISFSRGFNLSGLFEEKGDEVRFISSEPMSGIITKLEEIANVKSFAVRKKDWRVSLEGTREGVKGPLTICAEIFELTPSLVVVEVKKKAGDKEEYDDFCNKELKPGMQHLVHQMAPVPITPTISE

SEQ ID NO: 67568 - protein, 476 aa, Triticum aestivum
  peptide (1)..(476): Ceres Seq. ID no. 15219997
  misc_feature (4)..(258): Pfam Name: Protein kinase domain Pfam Description: Protein kinase domain
  misc_feature (1)..(279): Homolog of NCBI NO: 15242507 NR Description: CBL-interacting protein kinase 19 [Arabidopsis
  misc_feature (307)..(464): Homolog of NCBI NO: 15218854 NR Description: CBL-interacting protein kinase 18 [Arabidopsis
  misc_feature (1)..(274): Homolog of NCBI NO: 15218854 NR Description: CBL-interacting protein kinase 18 [Arabidopsis
  misc_feature (308)..(461): Homolog of NCBI NO: 15233981 NR Description: CBL-interacting protein kinase 12 [Arabidopsis
  misc_feature (1)..(279): Homolog of NCBI NO: 15233981 NR Description: CBL-interacting protein kinase 12 [Arabidopsis
  misc_feature (1)..(476): Homolog of NCBI NO: 34909718 NR Description: OsPK7 [Oryza sativa (japonica cultivar-group)]
  misc_feature (1)..(476): Homolog of NCBI NO: 5821067 NR Description: OsPK4 [Oryza sativa]
  misc_feature (1)..(469): Homolog of NCBI NO: 6651177 NR Description: protein kinase PK4 [Zea mays]
  misc_feature (1)..(476): Homolog of NCBI NO: 626040 NR Description: protein kinase SNF1 homolog wpk4-p58 - wheat
  misc_feature (1)..(476): Homolog of NCBI NO: 3928519 NR Description: wpk4 protein kinase [Triticum aestivum]
MGRYELGRVLGKGTFAKVYHARHVQTGESVAIKVLDREKAVRSGLVSHIKREIAVLRCVRHPNIVHLFEVMATKTKIYFVMELVRGGELFSRVSKGRLKEDIARRYFQHLISAVGFCHTRGVFHRDLKPENLLVDEAGNLKVSDFGLSAVAEPFQPEGLLHTFCGTPAYVAPEVLARRGYEGAKADIWSCGVILFVLMAGYLPFHDQNLMAMYRKVYKGEFRCPRWFSKDLTSLIMRFLDTNPSTRITLPEVMESRWFKKGFRPVKFYIEDDQLYNVIDAENDMLDLGLPDPLPQPLLPPPSSPSPQEVDGDDSGSESDASVVSCPATSSFEERHRLRGPLPRPASLNAFDIISFSRGFNLSGLFEEKGDEVRFISSEPMSGIITKLEEIANVKSFAVRKKDWRVSLEGTREGVKGPLTICAEIFELTPSLVVVEVKKKAGDKEEYDDFCNKELKPGMQHLVHQMAPVPITPTISE

SEQ ID NO: 67569 - DNA, 1204 bp, Triticum aestivum
  misc_feature (1)..(1204): Ceres Seq. ID no. 14303652
aaaaccaatcgtacgctcgctcgctcatcaatttcagcagccattccacgaccgcccagagaagactcgcctcctcccgagctcccctctccgtcctcgtcgtctccctctcccgcttccccccacccaaccaacacgctacgccaggcgcgagaggcaccagcggccatgaagggcggcggagccatcaggagcggcggcgggggaggcggcgggctgatgcggacgcggctgcggctccccgtggtgctcctctcctgctccctcttcttcctcgccggcttcctcggctccctcctcttcacccaggatccgcagggggaggaggacgtggagcggccgctgcggagggagcggctcatggaggcggtctggccggagatggcgtacggggagtccggcgagcccacgccctccttgatcccttaccagattttgagctggcaaccccgtgcattatattttccacaatttgcaacagcagaacagtgtgagaatgtagtaaaaactgcgaaggcacggcttaggccatcaacattggccttaaggaaaggagaaagcgaggagactaccaaaggaataaggacaagctcaggcacattccttagtgccgaagaagatccaactggagcccttgcagaaattgaaacgaagattgcaaaggctaccatgatgccaagaagtcatggagagccatttaatgtccttctgtatgagattggacagaagtatgcttcacactatgatgcatttgacccggctcaatatggtccacaaaaaagtcaaagggtggcatctttcttgctctacctcacggatgtcgaggaaggtggagaaaccatgttcccatatgagaatggggataatatgaacataggctacgactacgaacagtgcatcggcttaaaggtgaaaccgaggaagggggatggcctcttgttttactcccttatgctaaatggtaccattgatccgacttcacttcatggaagctgcccagtggtcaaaggagagaaatgggtcgccacaaaatggattagagacagaggctccacgtcctaaatagatcaacacatacatagtaatcatttttttctacaccatcttgtacctgtacattacatttattcaatttccatcggccttcatgaaccagtgaggtaggggaaaaaacaacttgcagtttccatctgctaatttgacg

SEQ ID NO: 67570 - protein, 353 aa, Triticum aestivum
  peptide (1)..(353): Ceres Seq. ID no. 14303653
  misc_feature (229)..(348): Pfam Name: 2OG-Fe(II) oxygenase superfamily Pfam Description: 2OG-Fe(II) oxygenase superfamily
  misc_feature (144)..(346): Homolog of NCBI NO: 18394842 NR Description: oxidoreductase, 2OG-Fe(II) oxygenase family
  misc_feature (147)..(349): Homolog of NCBI NO: 28393447 NR Description: putative prolyl 4-hydroxylase [Arabidopsis
  misc_feature (144)..(346): Homolog of NCBI NO: 21537370 NR Description: putative prolyl 4-hydroxylase, alpha subunit
  misc_feature (139)..(349): Homolog of NCBI NO: 30689216 NR Description: oxidoreductase, 2OG-Fe(II) oxygenase family
  misc_feature (146)..(349): Homolog of NCBI NO: 29150365 NR Description: putative oxidoreductase [Oryza sativa (japonica
  misc_feature (77)..(349): Homolog of NCBI NO: 30681957 NR Description: oxidoreductase -related [Arabidopsis thaliana]
  misc_feature (128)..(324): Homolog of NCBI NO: 7485609 NR Description: hypothetical protein F17I5.100 - Arabidopsis
  misc_feature (75)..(349): Homolog of NCBI NO: 18418321 NR Description: oxidoreductase, 2OG-Fe(II) oxygenase family
  misc_feature (78)..(349): Homolog of NCBI NO: 40809925 NR Description: prolyl 4-hydroxylase [Nicotiana tabacum]
  misc_feature (59)..(349): Homolog of NCBI NO: 14488368 NR Description: putative dioxygenase [Oryza sativa (japonica
KTNRTLARSSISAAIPRPPREDSPPPELPSPSSSSPSPASPHPTNTLRQAREAPAAMKGGGAIRSGGGGGGGLMRTRLRLPVVLLSCSLFFLAGFLGSLLFTQDPQGEEDVERPLRRERLMEAVWPEMAYGESGEPTPSLIPYQILSWQPRALYFPQFATAEQCENVVKTAKARLRPSTLALRKGESEETTKGIRTSSGTFLSAEEDPTGALAEIETKIAKATMMPRSHGEPFNVLLYEIGQKYASHYDAFDPAQYGPQKSQRVASFLLYLTDVEEGGETMFPYENGDNMNIGYDYEQCIGLKVKPRKGDGLLFYSLMLNGTIDPTSLHGSCPVVKGEKWVATKWIRDRGSTS

SEQ ID NO: 67571 - protein, 297 aa, Triticum aestivum
  peptide (1)..(297): Ceres Seq. ID no. 14303654
  misc_feature (173)..(292): Pfam Name: 2OG-Fe(II) oxygenase superfamily Pfam Description: 2OG-Fe(II) oxygenase superfamily
  misc_feature (88)..(290): Homolog of NCBI NO: 18394842 NR Description: oxidoreductase, 2OG-Fe(II) oxygenase family
  misc_feature (91)..(293): Homolog of NCBI NO: 28393447 NR Description: putative prolyl 4-hydroxylase [Arabidopsis
  misc_feature (88)..(290): Homolog of NCBI NO: 21537370 NR Description: putative prolyl 4-hydroxylase, alpha subunit
  misc_feature (83)..(293): Homolog of NCBI NO: 30689216 NR Description: oxidoreductase, 2OG-Fe(II) oxygenase family
  misc_feature (90)..(293): Homolog of NCBI NO: 29150365 NR Description: putative oxidoreductase [Oryza sativa (japonica
  misc_feature (21)..(293): Homolog of NCBI NO: 30681957 NR Description: oxidoreductase -related [Arabidopsis thaliana]
  misc_feature (72)..(268): Homolog of NCBI NO: 7485609 NR Description: hypothetical protein F17I5.100 - Arabidopsis
  misc_feature (19)..(293): Homolog of NCBI NO: 18418321 NR Description: oxidoreductase, 2OG-Fe(II) oxygenase family
  misc_feature (22)..(293): Homolog of NCBI NO: 40809925 NR Description: prolyl 4-hydroxylase [Nicotiana tabacum]
  misc_feature (3)..(293): Homolog of NCBI NO: 14488368 NR Description: putative dioxygenase [Oryza sativa (japonica
MKGGGAIRSGGGGGGGLMRTRLRLPVVLLSCSLFFLAGFLGSLLFTQDPQGEEDVERPLRRERLMEAVWPEMAYGESGEPTPSLIPYQILSWQPRALYFPQFATAEQCENVVKTAKARLRPSTLALRKGESEETTKGIRTSSGTFLSAEEDPTGALAEIETKIAKATMMPRSHGEPFNVLLYEIGQKYASHYDAFDPAQYGPQKSQRVASFLLYLTDVEEGGETMFPYENGDNMNIGYDYEQCIGLKVKPRKGDGLLFYSLMLNGTIDPTSLHGSCPVVKGEKWVATKWIRDRGSTS

SEQ ID NO: 67572 - protein, 280 aa, Triticum aestivum
  peptide (1)..(280): Ceres Seq. ID no. 14303655
  misc_feature (156)..(275): Pfam Name: 2OG-Fe(II) oxygenase superfamily Pfam Description: 2OG-Fe(II) oxygenase superfamily
  misc_feature (71)..(273): Homolog of NCBI NO: 18394842 NR Description: oxidoreductase, 2OG-Fe(II) oxygenase family
  misc_feature (74)..(276): Homolog of NCBI NO: 28393447 NR Description: putative prolyl 4-hydroxylase [Arabidopsis
  misc_feature (71)..(273): Homolog of NCBI NO: 21537370 NR Description: putative prolyl 4-hydroxylase, alpha subunit
  misc_feature (66)..(276): Homolog of NCBI NO: 30689216 NR Description: oxidoreductase, 2OG-Fe(II) oxygenase family
  misc_feature (73)..(276): Homolog of NCBI NO: 29150365 NR Description: putative oxidoreductase [Oryza sativa (japonica
  misc_feature (4)..(276): Homolog of NCBI NO: 30681957 NR Description: oxidoreductase -related [Arabidopsis thaliana]
  misc_feature (55)..(251): Homolog of NCBI NO: 7485609 NR Description: hypothetical protein F17I5.100 - Arabidopsis
  misc_feature (2)..(276): Homolog of NCBI NO: 18418321 NR Description: oxidoreductase, 2OG-Fe(II) oxygenase family
  misc_feature (5)..(276): Homolog of NCBI NO: 40809925 NR Description: prolyl 4-hydroxylase [Nicotiana tabacum]
  misc_feature (1)..(276): Homolog of NCBI NO: 14488368 NR Description: putative dioxygenase [Oryza sativa (japonica
MRTRLRLPVVLLSCSLFFLAGFLGSLLFTQDPQGEEDVERPLRRERLMEAVWPEMAYGESGEPTPSLIPYQILSWQPRALYFPQFATAEQCENVVKTAKARLRPSTLALRKGESEETTKGIRTSSGTFLSAEEDPTGALAEIETKIAKATMMPRSHGEPFNVLLYEIGQKYASHYDAFDPAQYGPQKSQRVASFLLYLTDVEEGGETMFPYENGDNMNIGYDYEQCIGLKVKPRKGDGLLFYSLMLNGTIDPTSLHGSCPVVKGEKWVATKWIRDRGSTS

SEQ ID NO: 67573 - DNA, 1389 bp, Triticum aestivum
  misc_feature (1)..(1389): Ceres Seq. ID no. 13663942
atacttctggctagtcaaactgtgatccctcgctcctccgcaccgccgccgccgctgcgatgtccaccgccgccgccgccgccggccgaggtctcaaatccgtctcccgcgccgccttctcctggaagccgacgggccgggcgcagcagacgctcgcggcggcggtgagcaggtcgggcgtgggactccactcgggcgcgcgcgccaccgccaggttgctccctgcgcgcgccggcgaggggaggtacttcgtcgtggaggaggcgagggtggcggcggaggcggggaatgccgagccacagtctccgctctgcaccacgctgcggagcgggagcggcggcgcgcgggtgcgcacggtggagcacctgctctcggccatggaggcgttcggtgtcgacaactgccgcgtcgaggtcagcggcggcgatgagatccctttgcttgatggatcagcgcaagagtgggtggaggccattcggggtgcaggtctgtgtgcggccgaggatatcggtggacagaagttggagaaactggcacccaagatcgacgagcctgtttacctgcgtaaggacgattgctttgtagctgcattcccttcctcgcaaatccacatcacctatggaattgattttccaaaggcgccagcgattggttgtcaatggttcaatactttcctggatgctgatatatactcaagcaagatagctcctgcaagaactttctgtatttttgaagaggttgaaaaaatgcgtgatgccgggcttataaaaggaggatcactggaaaatgctatggtttgcagtatgtctggtggttggcttaacccaccacttcgttttgatgatgaaccttgccgccacaagattttagatcttataggtgacttctcacttcttgcacggaatggcagccagggttttccaattgctcatgtagttgcctacaaggctggccatgccctgcacaccagtttcctacaccatttatcgggggagaccagtgtggaccaaggaacgcttgcttggtgatcttgaagcgtgtgcatgtggagcgggtactgttcatatgttggtgatagtgatgctcgacaggaagacggcagatttcagcatataccgtactaataaccatctgatggccctcgccctcactctgacagtcggaccggttgtactgtacatctcctccatctttggcaagtgatttctttagttcacgagccatatacagtatcattatcacatgctttggggagattgatccgaagaattatgtttgtacaccatgtgttatagttgtacctgaacacgtttcagtaaaaaaaaaaaaaaaaaagcttatcgataccgtcgactgtttaaacacaataaagttggaacgggagggggg

SEQ ID NO: 67574 - protein, 322 aa, Triticum aestivum
  peptide (1)..(322): Ceres Seq. ID no. 13663943
  misc_feature (29)..(314): Pfam Name: UDP-3-O-acyl N-acetylglycosamine deacetylase Pfam Description: UDP-3-O-acyl N-acetylglycosamine deacetylase
  misc_feature (14)..(251): Homolog of NCBI NO: 20453133 NR Description: At1g25190/F4F7_4 [Arabidopsis thaliana]
  misc_feature (29)..(302): Homolog of NCBI NO: 17229762 NR Description: UDP-3-O-acyl N-acetylglucosamine deacetylase
  misc_feature (14)..(272): Homolog of NCBI NO: 15221809 NR Description: F5A9.18 [Arabidopsis thaliana]
  misc_feature (14)..(296): Homolog of NCBI NO: 15221839 NR Description: F5A9.8 [Arabidopsis thaliana]
  misc_feature (14)..(296): Homolog of NCBI NO: 30689101 NR Description: expressed protein [Arabidopsis thaliana]
  misc_feature (14)..(296): Homolog of NCBI NO: 25518507 NR Description: hypothetical protein F4F7.4 [imported] -
  misc_feature (14)..(296): Homolog of NCBI NO: 25518320 NR Description: hypothetical protein F4F7.1 [imported] -
  misc_feature (14)..(310): Homolog of NCBI NO: 26451306 NR Description: unknown protein [Arabidopsis thaliana]
  misc_feature (7)..(247): Homolog of NCBI NO: 35190846 NR Description: OJ1743A09.22 [Oryza sativa (japonica
  misc_feature (7)..(321): Homolog of NCBI NO: 34902272 NR Description: Hypothetical protein [Oryza sativa (japonica
MSTAAAAAGRGLKSVSRAAFSWKPTGRAQQTLAAAVSRSGVGLHSGARATARLLPARAGEGRYFVVEEARVAAEAGNAEPQSPLCTTLRSGSGGARVRTVEHLLSAMEAFGVDNCRVEVSGGDEIPLLDGSAQEWVEAIRGAGLCAAEDIGGQKLEKLAPKIDEPVYLRKDDCFVAAFPSSQIHITYGIDFPKAPAIGCQWFNTFLDADIYSSKIAPARTFCIFEEVEKMRDAGLIKGGSLENAMVCSMSGGWLNPPLRFDDEPCRHKILDLIGDFSLLARNGSQGFPIAHVVAYKAGHALHTSFLHHLSGETSVDQGTLAW

SEQ ID NO: 67575 - protein, 216 aa, Triticum aestivum
  peptide (1)..(216): Ceres Seq. ID no. 13663944
  misc_feature (1)..(208): Pfam Name: UDP-3-O-acyl N-acetylglycosamine deacetylase Pfam Description: UDP-3-O-acyl N-acetylglycosamine deacetylase
  misc_feature (1)..(145): Homolog of NCBI NO: 20453133 NR Description: At1g25190/F4F7_4 [Arabidopsis thaliana]
  misc_feature (1)..(196): Homolog of NCBI NO: 17229762 NR Description: UDP-3-O-acyl N-acetylglucosamine deacetylase
  misc_feature (1)..(166): Homolog of NCBI NO: 15221809 NR Description: F5A9.18 [Arabidopsis thaliana]
  misc_feature (1)..(190): Homolog of NCBI NO: 15221839 NR Description: F5A9.8 [Arabidopsis thaliana]
  misc_feature (1)..(190): Homolog of NCBI NO: 30689101 NR Description: expressed protein [Arabidopsis thaliana]
  misc_feature (1)..(190): Homolog of NCBI NO: 25518507 NR Description: hypothetical protein F4F7.4 [imported] -
  misc_feature (1)..(190): Homolog of NCBI NO: 25518320 NR Description: hypothetical protein F4F7.1 [imported] -
  misc_feature (1)..(204): Homolog of NCBI NO: 26451306 NR Description: unknown protein [Arabidopsis thaliana]
  misc_feature (1)..(141): Homolog of NCBI NO: 35190846 NR Description: OJ1743A09.22 [Oryza sativa (japonica
  misc_feature (1)..(215): Homolog of NCBI NO: 34902272 NR Description: Hypothetical protein [Oryza sativa (japonica
MEAFGVDNCRVEVSGGDEIPLLDGSAQEWVEAIRGAGLCAAEDIGGQKLEKLAPKIDEPVYLRKDDCFVAAFPSSQIHITYGIDFPKAPAIGCQWFNTFLDADIYSSKIAPARTFCIFEEVEKMRDAGLIKGGSLENAMVCSMSGGWLNPPLRFDDEPCRHKILDLIGDFSLLARNGSQGFPIAHVVAYKAGHALHTSFLHHLSGETSVDQGTLAW

SEQ ID NO: 67576 - DNA, 1472 bp, Triticum aestivum
  misc_feature (1)..(1472): Ceres Seq. ID no. 13660172
cattcctatgatagtatcttttttctgaaataattgccagggtagtattggtttgatgcaaagtacaatcccttgatttgttgaagaatgttttttatattccctaacattcatttgcttggcaagatagagtcttgtccgaatgaagaagttcttctatgaagacaaagatttgatttgagaaaattagtttcgtgaagagaagataaagagagttgtattgggtagtccatgagaagattaaatgaagcgaagttcatttgaagtacttttgagacttttcaaacattgaggaacttgaagcgaatgattttacgaagatgctctttatgaggatcaccgtacttagtcattatacaagaaatttgtacaagaaacttggatactagggcctggacatgtagctgtgttttgcaacacttgcttccatgttgatggaaaatgtgtgtaagttgttgactgtgcgtcgtcaagattcatagagggcacactgcatttgaactgtgatggtaacatgagaggcccacacactctatngaatacttcttgccctcttttttgtctgttatcccattaatttcatttatcctactttgtctaatgaagtcgttatacgcagggagccccgagggtttgcatttgtggagtttgttgacccttatgatgcctctgatgcacaatatcacttgaaccacacagtattttttggccgagagataactgttgttgttgctgccgagtcacggaaaaggccagatgatatgcgtaatagggctagaatcagggggtattctggtgaacctgaaaggcgtcattcccgttatgggaggtctcgttcccgttcatgttcctactctcctcgctatcggggccgtcctcggtcaaggtcaaggtcaaggtcatactctcctgctccaagacggcgagatgactactctgcttccccgccaagatcacatcacacacagtctcctaggcgtctgccaaaagaacatgaagaagacgagcggagatcctattctcctgctggtagaggtggcggcgagcgtgatgccaatactaatggaaagaggtcaccaccatctgacattgatggatcacctccacgcatccggaggtcacccaggcaatcctcaggatcacccgtggggtcgcgctcaaggtcccctgaagcttctcctgcccgcagcgactgatgaaattggtgcctcccatattgccgcgtctcccacagcggcgcggccatgtactctatctctagcttcattgtctgagtaaaacccatctgggatgtgttggctagtgttgcggtgcctctttagttagcagatatgactggttggctgttcttttgctgcttggtgttgttgaaccttgtaccatggtagtgttttaatgtgaactgagccacaactgagccacaattgtgtttggatttgtgattttaaatgcattttgaatgcctttaactt

SEQ ID NO: 67577 - protein, 173 aa, Triticum aestivum
  peptide (1)..(173): Ceres Seq. ID no. 13660173
MICVIGLESGGILVNLKGVIPVMGGLVPVHVPTLLAIGAVLGQGQGQGHTLLLQDGEMTTLLPRQDHITHSLLGVCQKNMKKTSGDPILLLVEVAASVMPILMERGHHHLTLMDHLHASGGHPGNPQDHPWGRAQGPLKLLLPAATDEIGASHIAASPTAARPCTLSLASLSE

SEQ ID NO: 67578 - protein, 151 aa, Triticum aestivum
  peptide (1)..(151): Ceres Seq. ID no. 13660174
MGGLVPVHVPTLLAIGAVLGQGQGQGHTLLLQDGEMTTLLPRQDHITHSLLGVCQKNMKKTSGDPILLLVEVAASVMPILMERGHHHLTLMDHLHASGGHPGNPQDHPWGRAQGPLKLLLPAATDEIGASHIAASPTAARPCTLSLASLSE

SEQ ID NO: 67579 - protein, 144 aa, Triticum aestivum
  peptide (1)..(144): Ceres Seq. ID no. 13660175
  misc_feature (1)..(92): Homolog of NCBI NO: 18405316 NR Description: arginine/serine-rich protein [Arabidopsis
  misc_feature (1)..(135): Homolog of NCBI NO: 15231285 NR Description: arginine/serine-rich splicing factor SCL30a
  misc_feature (1)..(135): Homolog of NCBI NO: 9843661 NR Description: SC35-like splicing factor SCL30a, 30a kD
  misc_feature (1)..(143): Homolog of NCBI NO: 11358671 NR Description: probable RNA binding protein - Arabidopsis
  misc_feature (1)..(144): Homolog of NCBI NO: 15293081 NR Description: unknown protein [Arabidopsis thaliana]
  misc_feature (1)..(143): Homolog of NCBI NO: 11358835 NR Description: serine/arginine-rich protein [imported] -
  misc_feature (1)..(88): Homolog of NCBI NO: 31249706 NR Description: putative splicing factor [Oryza sativa (japonica
  misc_feature (1)..(140): Homolog of NCBI NO: 18410283 NR Description: arginine/serine-rich protein SCL30 [Arabidopsis
  misc_feature (1)..(140): Homolog of NCBI NO: 9843657 NR Description: SC35-like splicing factor SCL30, 30 kD
  misc_feature (1)..(144): Homolog of NCBI NO: 32352198 NR Description: pre-mRNA splicing factor [Oryza sativa (japonica
MRNRARIRGYSGEPERRHSRYGRSRSRSCSYSPRYRGRPRSRSRSRSYSPAPRRRDDYSASPPRSHHTQSPRRLPKEHEEDERRSYSPAGRGGGERDANTNGKRSPPSDIDGSPPRIRRSPRQSSGSPVGSRSRSPEASPARSD

SEQ ID NO: 67580 - DNA, 1734 bp, Triticum aestivum
  misc_feature (1)..(1734): Ceres Seq. ID no. 14303539
acggtttccaccagatgtgtactcgtgcggtgtgtgcccgcgcacttctggcagcactgcgcacagcgcacgtagagcgtcgttcatcggcacatcaacttttcatggctctgtatgtctccggaatctaccatggcacactgtcacagaagatcaacatcctctgattgcccgatccagcgtgccagcaaaagagcaaagcgtcatcctaggtacaggcgtacagccattagccagacaccactccttgcttccagttccaccccgcgctcgtagaagcacctcccaacggagaccgatggccgctgctaagccagcctgctccgctcccgccaattccgccgacgcagccaaaccggcggcggcgccagaacccgagcagcagctgctggaggtggcggaggaggaggtggtcgtctacttcaagcccaacgccaagtgccgcgtcgacctccgcctccgctcgctgcacccgacgctccccgtcgccttcaaggtgcagacctcctccccgctcaagttcctcgtcagcccgccgcgcggcgccctgcagccgctctccacggccaccatccgcgtcgtgctccgcccgcagccgcacgcgccgccgtccttcccgcgctcccgcgccgaccgcttcctcgtcctctcctccctctccgccgcgcacctcgactccgcggcctccgtgcccggcggcgccggcgtcggcatcggcgccatccgcctccgcgtgttcttcggcgggccctacctgctccgcctcgccgcggacgccggggactccgcggccgtgcgcctcatcctgcgccggcagccgcacctcctgccggttctcgaccccgaggcggccgtgccggacgccgagccgtgggcgccgctgcacgcggctgccgcgcggggcgactgcggagaggtgaggaggctggggcaggaggcgctcgcggcgcgcgacaaggacggcaggacggctctgcacgttgcggccgccgccggggaagcagaggccgtggcagagctggtggacatgggcgccgactccgccgcggccgacgcgcgcgggcggactccgctggacgtggcacgagagaagggctacaaggaggtggtggacgtgctgcagcggtgggagcaggtgatgacggcggcgaggcggggcgacctccggagcctggagttcctcctcagcaagcgcacgggcctccgcggccgcgaccagtacgggctgacggcgctccacgtggccgccatcaagggccactgcgacgccatcgccctgctggcggggtcggggtgcatggacgtggagtgcgaggacgtggaagggcaccggccgctgcacctcgccgtcgagggcggctgcgccgacgccgtcgacctgctgctcgacatgggcgccgacgcccacgccaggaccaagcggggcgccacgccgctccagatggccgacaccatgggctatgacgacatctcgaagctgctgcgcgcccggggcgccgacgaggcggcggcggcggcggcggcaggtgacgcgcagctgtgcatcgcgtcgtcgtcttcctcgtcgatatcctgtgcataaggcctggtttgcgtctcccattcagagttgatcgcaaagacaatgttaatactgcactgtataggtgacagaagtgattactgttttttttctgtggctgttgatatggacttaacaataagatgggactttgcgttcccctgagcagttct

SEQ ID NO: 67581 - protein, 526 aa, Triticum aestivum
  peptide (1)..(526): Ceres Seq. ID no. 14303540
  misc_feature (441)..(473): Pfam Name: Ankyrin repeat Pfam Description: Ankyrin repeat
  misc_feature (382)..(499): Homolog of NCBI NO: 28373837 NR Description: Chain A, 4ank: A Designed Ankyrin Repeat Protein
  misc_feature (293)..(499): Homolog of NCBI NO: 27461955 NR Description: tankyrase 1 [Gallus gallus]
  misc_feature (293)..(500): Homolog of NCBI NO: 27461955 NR Description: tankyrase 1 [Gallus gallus]
  misc_feature (294)..(509): Homolog of NCBI NO: 34883007 NR Description: similar to ankyrin 3, epithelial isoform b
  misc_feature (321)..(495): Homolog of NCBI NO: 28274854 NR Description: ankyrin repeat protein E4_8 [synthetic construct]
  misc_feature (321)..(495): Homolog of NCBI NO: 28274852 NR Description: ankyrin repeat protein E4_2 [synthetic construct]
  misc_feature (256)..(498): Homolog of NCBI NO: 23055190 NR Description: hypothetical protein [Geobacter metallireducens]
  misc_feature (250)..(525): Homolog of NCBI NO: 29244412 NR Description: hypothetical protein A130096K20 [Mus musculus]
  misc_feature (297)..(500): Homolog of NCBI NO: 18312929 NR Description: hypothetical protein with 4 ankyrin repeats
  misc_feature (100)..(526): Homolog of NCBI NO: 34907942 NR Description: B1088C09.19 [Oryza sativa (japonica
RFPPDVYSCGVCPRTSGSTAHSARRASFIGTSTFHGSVCLRNLPWHTVTEDQHPLIARSSVPAKEQSVILGTGVQPLARHHSLLPVPPRARRSTSQRRPMAAAKPACSAPANSADAAKPAAAPEPEQQLLEVAEEEVVVYFKPNAKCRVDLRLRSLHPTLPVAFKVQTSSPLKFLVSPPRGALQPLSTATIRVVLRPQPHAPPSFPRSRADRFLVLSSLSAAHLDSAASVPGGAGVGIGAIRLRVFFGGPYLLRLAADAGDSAAVRLILRRQPHLLPVLDPEAAVPDAEPWAPLHAAAARGDCGEVRRLGQEALAARDKDGRTALHVAAAAGEAEAVAELVDMGADSAAADARGRTPLDVAREKGYKEVVDVLQRWEQVMTAARRGDLRSLEFLLSKRTGLRGRDQYGLTALHVAAIKGHCDAIALLAGSGCMDVECEDVEGHRPLHLAVEGGCADAVDLLLDMGADAHARTKRGATPLQMADTMGYDDISKLLRARGADEAAAAAAAGDAQLCIASSSSSSISCA

SEQ ID NO: 67582 - protein, 427 aa, Triticum aestivum
  peptide (1)..(427): Ceres Seq. ID no. 14303541
  misc_feature (342)..(374): Pfam Name: Ankyrin repeat Pfam Description: Ankyrin repeat
  misc_feature (283)..(400): Homolog of NCBI NO: 28373837 NR Description: Chain A, 4ank: A Designed Ankyrin Repeat Protein
  misc_feature (194)..(400): Homolog of NCBI NO: 27461955 NR Description: tankyrase 1 [Gallus gallus]
  misc_feature (194)..(401): Homolog of NCBI NO: 27461955 NR Description: tankyrase 1 [Gallus gallus]
  misc_feature (195)..(410): Homolog of NCBI NO: 34883007 NR Description: similar to ankyrin 3, epithelial isoform b
  misc_feature (222)..(396): Homolog of NCBI NO: 28274854 NR Description: ankyrin repeat protein E4_8 [synthetic construct]
  misc_feature (222)..(396): Homolog of NCBI NO: 28274852 NR Description: ankyrin repeat protein E4_2 [synthetic construct]
  misc_feature (157)..(399): Homolog of NCBI NO: 23055190 NR Description: hypothetical protein [Geobacter metallireducens]
  misc_feature (151)..(426): Homolog of NCBI NO: 29244412 NR Description: hypothetical protein A130096K20 [Mus musculus]
  misc_feature (198)..(401): Homolog of NCBI NO: 18312929 NR Description: hypothetical protein with 4 ankyrin repeats
  misc_feature (1)..(427): Homolog of NCBI NO: 34907942 NR Description: B1088C09.19 [Oryza sativa (japonica
MAAAKPACSAPANSADAAKPAAAPEPEQQLLEVAEEEVVVYFKPNAKCRVDLRLRSLHPTLPVAFKVQTSSPLKFLVSPPRGALQPLSTATIRVVLRPQPHAPPSFPRSRADRFLVLSSLSAAHLDSAASVPGGAGVGIGAIRLRVFFGGPYLLRLAADAGDSAAVRLILRRQPHLLPVLDPEAAVPDAEPWAPLHAAAARGDCGEVRRLGQEALAARDKDGRTALHVAAAAGEAEAVAELVDMGADSAAADARGRTPLDVAREKGYKEVVDVLQRWEQVMTAARRGDLRSLEFLLSKRTGLRGRDQYGLTALHVAAIKGHCDAIALLAGSGCMDVECEDVEGHRPLHLAVEGGCADAVDLLLDMGADAHARTKRGATPLQMADTMGYDDISKLLRARGADEAAAAAAAGDAQLCIASSSSSSISCA

SEQ ID NO: 67583 - DNA, 1909 bp, Triticum aestivum
  misc_feature (1)..(1909): Ceres Seq. ID no. 13500385
agaacatcctaatcgaaaaatccacagcaacagcttcctcttcctcctcagacccaccctcgctacctcctagctgcatctgctgctaagctccgcctccacccgcgcgctgtctgctagctcgtcgcgttgaaggtcgttcaggagcattttgaaggttgaaagtaaccttcggctgttggaagatgtatcgggccaagagagccgcattgtcaccaaaggtgaagcgccgtgtcggcaagtatgagctcggccgcaccatcggggaagggacctttgcaaaggtcaggttcgcaaagaacactgaaactatggagcctgttgctatcaaaatcctcgacaaggagaaggttcagaagctcagattggttgaacagattaggcgcgaaatttgtactatgaagttaataaagcatcctaatgttgttcgactgcacgaggtgatgggaagtaaagcaagaattttcattgttctggaatacattactggaggggaactctttgataccatttataccaatggaaggttgaaagaagaggaggcacgcaaatactttcagcaactgataaatgccgttgactattgccacagcaggggtgtgtatcacagagatttgaagttagaaaatttgttgcttgatgctgctggaaacctcaaagtgtccgacttcggtttaagtgctttaactgagcaagtgaaggctgacgggttgctgcacacaacatgcgggactccgaactatgttgctcctgaggtgattgaggatagaggttatgatggtgcagctgcagatatctggtcttgcggggtaatcctttttattctgcttgccgggtttttacctttcgaggatgaaaacatcatcgccctttataagaagatctcagaagctcaattcacatgtccctcttggttttctactggagctaagaagctgatcaccagaattctggaccctaatcctgcaactcgtatcaccattcctcagatactggaggatccttggttcaaaaagggattcaagccacctgtttttgacgataagtatgaaactagctttgatgatgtctatgctgcatttggagactcagaggaccagcatgtgaaagaggagactgaacataagccaacctcaatgaatgcatttgaactgatttcactgaatcagggactgaatctggacaacttgttcgaggcaaaggaggagcataaaagagagacacgattcacctcgcaatgccctccaaaagaaatcatcagcaagattgcagaagctgcaaggccacttggttttgacattcagaagaaaaactacaagatgcggatggagaacccgaaagcaggtagaaaaggcaatctcaatgttgcaaccgaggtgtttcaagtagctccatccctacatgtggttgagctgaaaaaggcgaagggggatactctggaatttcaaatgttctacagatctctgtcgacccagctcaaggacgtagtttggaagtgcggcggcgaggtagaagataacggcaccgcggcatgaagcacgttttccatgtacatagtccctactgtagttcatatgtgggatggatggcgggtgggctgcggaatgggttgtgcagatcgagttctttcgttggtttgttaatgatgatgatgatgatgaataggctccgatgaaacagcgggcgcgcagcccactgtggaagagcctatctatggcttcgttagtttgcttattattacatattcatggtccagagggagattaaagctagaggcgaaaggccgattgttgtaagattgtattggtaggaggttatattgaacagcgcaatgtgttgaactttgttctctactctacttagcattgtactgtagctatagccggaataataaataaataaaccgctg

SEQ ID NO: 67584 - protein, 449 aa, Triticum aestivum
  peptide (1)..(449): Ceres Seq. ID no. 13500386
  misc_feature (20)..(275): Pfam Name: Protein kinase domain Pfam Description: Protein kinase domain
  misc_feature (1)..(444): Homolog of NCBI NO: 14423524 NR Description: similar to wpk4 protein kinase [Arabidopsis
  misc_feature (1)..(444): Homolog of NCBI NO: 15223317 NR Description: CBL-interacting protein kinase 9 [Arabidopsis
  misc_feature (14)..(447): Homolog of NCBI NO: 25387051 NR Description: probable serine/threonine kinase
  misc_feature (16)..(437): Homolog of NCBI NO: 34902248 NR Description: Putative serine/threonine kinase
  misc_feature (14)..(447): Homolog of NCBI NO: 18397430 NR Description: CBL-interacting protein kinase 23 [Arabidopsis
  misc_feature (11)..(439): Homolog of NCBI NO: 30688193 NR Description: NAF specific protein kinase family [Arabidopsis
  misc_feature (12)..(436): Homolog of NCBI NO: 30683336 NR Description: CBL-interacting protein kinase 3 [Arabidopsis
  misc_feature (12)..(437): Homolog of NCBI NO: 7446371 NR Description: probable serine/threonine kinase (EC 2.7.1.-)
  misc_feature (12)..(437): Homolog of NCBI NO: 7446372 NR Description: probable serine/threonine kinase (EC 2.7.1.-)
  misc_feature (1)..(444): Homolog of NCBI NO: 22324433 NR Description: putative serine/threonine kinase
MYRAKRAALSPKVKRRVGKYELGRTIGEGTFAKVRFAKNTETMEPVAIKILDKEKVQKLRLVEQIRREICTMKLIKHPNVVRLHEVMGSKARIFIVLEYITGGELFDTIYTNGRLKEEEARKYFQQLINAVDYCHSRGVYHRDLKLENLLLDAAGNLKVSDFGLSALTEQVKADGLLHTTCGTPNYVAPEVIEDRGYDGAAADIWSCGVILFILLAGFLPFEDENIIALYKKISEAQFTCPSWFSTGAKKLITRILDPNPATRITIPQILEDPWFKKGFKPPVFDDKYETSFDDVYAAFGDSEDQHVKEETEHKPTSMNAFELISLNQGLNLDNLFEAKEEHKRETRFTSQCPPKEIISKIAEAARPLGFDIQKKNYKMRMENPKAGRKGNLNVATEVFQVAPSLHVVELKKAKGDTLEFQMFYRSLSTQLKDVVWKCGGEVEDNGTAA

SEQ ID NO: 67585 - protein, 407 aa, Triticum aestivum
  peptide (1)..(407): Ceres Seq. ID no. 13500387
  misc_feature (1)..(233): Pfam Name: Protein kinase domain Pfam Description: Protein kinase domain
  misc_feature (1)..(402): Homolog of NCBI NO: 14423524 NR Description: similar to wpk4 protein kinase [Arabidopsis
  misc_feature (1)..(402): Homolog of NCBI NO: 15223317 NR Description: CBL-interacting protein kinase 9 [Arabidopsis
  misc_feature (1)..(405): Homolog of NCBI NO: 25387051 NR Description: probable serine/threonine kinase
  misc_feature (1)..(395): Homolog of NCBI NO: 34902248 NR Description: Putative serine/threonine kinase
  misc_feature (1)..(405): Homolog of NCBI NO: 18397430 NR Description: CBL-interacting protein kinase 23 [Arabidopsis
  misc_feature (1)..(397): Homolog of NCBI NO: 30688193 NR Description: NAF specific protein kinase family [Arabidopsis
  misc_feature (1)..(394): Homolog of NCBI NO: 30683336 NR Description: CBL-interacting protein kinase 3 [Arabidopsis
  misc_feature (1)..(395): Homolog of NCBI NO: 7446371 NR Description: probable serine/threonine kinase (EC 2.7.1.-)
  misc_feature (1)..(395): Homolog of NCBI NO: 7446372 NR Description: probable serine/threonine kinase (EC 2.7.1.-)
  misc_feature (1)..(402): Homolog of NCBI NO: 22324433 NR Description: putative serine/threonine kinase
MEPVAIKILDKEKVQKLRLVEQIRREICTMKLIKHPNVVRLHEVMGSKARIFIVLEYITGGELFDTIYTNGRLKEEEARKYFQQLINAVDYCHSRGVYHRDLKLENLLLDAAGNLKVSDFGLSALTEQVKADGLLHTTCGTPNYVAPEVIEDRGYDGAAADIWSCGVILFILLAGFLPFEDENIIALYKKISEAQFTCPSWFSTGAKKLITRILDPNPATRITIPQILEDPWFKKGFKPPVFDDKYETSFDDVYAAFGDSEDQHVKEETEHKPTSMNAFELISLNQGLNLDNLFEAKEEHKRETRFTSQCPPKEIISKIAEAARPLGFDIQKKNYKMRMENPKAGRKGNLNVATEVFQVAPSLHVVELKKAKGDTLEFQMFYRSLSTQLKDVVWKCGGEVEDNGTAA

SEQ ID NO: 67586 - protein, 378 aa, Triticum aestivum
  peptide (1)..(378): Ceres Seq. ID no. 13500388
  misc_feature (1)..(204): Pfam Name: Protein kinase domain Pfam Description: Protein kinase domain
  misc_feature (1)..(373): Homolog of NCBI NO: 14423524 NR Description: similar to wpk4 protein kinase [Arabidopsis
  misc_feature (1)..(373): Homolog of NCBI NO: 15223317 NR Description: CBL-interacting protein kinase 9 [Arabidopsis
  misc_feature (1)..(376): Homolog of NCBI NO: 25387051 NR Description: probable serine/threonine kinase
  misc_feature (1)..(366): Homolog of NCBI NO: 34902248 NR Description: Putative serine/threonine kinase
  misc_feature (1)..(376): Homolog of NCBI NO: 18397430 NR Description: CBL-interacting protein kinase 23 [Arabidopsis
  misc_feature (1)..(368): Homolog of NCBI NO: 30688193 NR Description: NAF specific protein kinase family [Arabidopsis
  misc_feature (1)..(365): Homolog of NCBI NO: 30683336 NR Description: CBL-interacting protein kinase 3 [Arabidopsis
  misc_feature (1)..(366): Homolog of NCBI NO: 7446371 NR Description: probable serine/threonine kinase (EC 2.7.1.-)
  misc_feature (1)..(366): Homolog of NCBI NO: 7446372 NR Description: probable serine/threonine kinase (EC 2.7.1.-)
  misc_feature (1)..(373): Homolog of NCBI NO: 22324433 NR Description: putative serine/threonine kinase
MKLIKHPNVVRLHEVMGSKARIFIVLEYITGGELFDTIYTNGRLKEEEARKYFQQLINAVDYCHSRGVYHRDLKLENLLLDAAGNLKVSDFGLSALTEQVKADGLLHTTCGTPNYVAPEVIEDRGYDGAAADIWSCGVILFILLAGFLPFEDENIIALYKKISEAQFTCPSWFSTGAKKLITRILDPNPATRITIPQILEDPWFKKGFKPPVFDDKYETSFDDVYAAFGDSEDQHVKEETEHKPTSMNAFELISLNQGLNLDNLFEAKEEHKRETRFTSQCPPKEIISKIAEAARPLGFDIQKKNYKMRMENPKAGRKGNLNVATEVFQVAPSLHVVELKKAKGDTLEFQMFYRSLSTQLKDVVWKCGGEVEDNGTAA

SEQ ID NO: 67587 - DNA, 622 bp, Triticum aestivum
  misc_feature (1)..(622): Ceres Seq. ID no. 13660351
tcggtatagcagctcccgtccactaccttgctcctcgccgcaatccccacattcatagcgagaatccccaaatcccaaccctgactgacgaccggcggatctgttccggcgcctcctcccgccgtcgaccatggcgtcttccaactccggcggcatccccatcaatgtggaacaggattcggacggctcggcccagagcacagctgatatgactgcttttgtgcaaaatcttctagttcagatgcaaaccaggttccaaactatgtcagagaacatcattacaaagatagatgaaatgggtgcaagaatcgatgaattggagttgagcataaatgacctcaaggctgaaatgggcagcgatggtatgacccctactaaagtgaaggacgaagaatcaaagccagcagacagctctgcctgagtcaagcagaagtagcagaagcaagtcgtattagtcttgggttcatgtcaatatcatcagccattcatcactaacttcatgcatgttatgagatgttattcgcactgttatatgcatttgagatatgcagtacctttcgatgagagatttctctgtacgcattgatgcttgctgagtggtctgctataaattttagtactc

SEQ ID NO: 67588 - protein, 96 aa, Triticum aestivum
  peptide (1)..(96): Ceres Seq. ID no. 13660352
  misc_feature (16)..(83): Homolog of NCBI NO: 30523300 NR Description: HSBP1-like protein [Drosophila simulans]
  misc_feature (12)..(83): Homolog of NCBI NO: 30523296 NR Description: HSBP1-like protein [Drosophila yakuba]
  misc_feature (12)..(83): Homolog of NCBI NO: 24583901 NR Description: CG5446-PA [Drosophila melanogaster]
  misc_feature (16)..(59): Homolog of NCBI NO: 30683411 NR Description: expressed protein [Arabidopsis thaliana]
  misc_feature (16)..(95): Homolog of NCBI NO: 26453171 NR Description: unknown protein [Arabidopsis thaliana]
  misc_feature (16)..(95): Homolog of NCBI NO: 20257532 NR Description: heat shock factor-binding protein 1 [Zea mays]
  misc_feature (4)..(96): Homolog of NCBI NO: 34898646 NR Description: contains ESTs C73279(E3629),C73279(E3629)~unknown
  misc_feature (1)..(96): Homolog of NCBI NO: 38349095 NR Description: heat shock factor binding protein 2 [Zea mays]
  misc_feature (4)..(96): Homolog of NCBI NO: 32352188 NR Description: hypothetical protein [Oryza sativa (japonica
  misc_feature (4)..(96): Homolog of NCBI NO: 11862947 NR Description: hypothetical protein [Oryza sativa (japonica
MASSNSGGIPINVEQDSDGSAQSTADMTAFVQNLLVQMQTRFQTMSENIITKIDEMGARIDELELSINDLKAEMGSDGMTPTKVKDEESKPADSSA

SEQ ID NO: 67589 - protein, 70 aa, Triticum aestivum
  peptide (1)..(70): Ceres Seq. ID no. 13660353
  misc_feature (1)..(57): Homolog of NCBI NO: 30523300 NR Description: HSBP1-like protein [Drosophila simulans]
  misc_feature (1)..(57): Homolog of NCBI NO: 30523296 NR Description: HSBP1-like protein [Drosophila yakuba]
  misc_feature (1)..(57): Homolog of NCBI NO: 24583901 NR Description: CG5446-PA [Drosophila melanogaster]
  misc_feature (1)..(33): Homolog of NCBI NO: 30683411 NR Description: expressed protein [Arabidopsis thaliana]
  misc_feature (1)..(69): Homolog of NCBI NO: 26453171 NR Description: unknown protein [Arabidopsis thaliana]
  misc_feature (1)..(69): Homolog of NCBI NO: 20257532 NR Description: heat shock factor-binding protein 1 [Zea mays]
  misc_feature (1)..(70): Homolog of NCBI NO: 34898646 NR Description: contains ESTs C73279(E3629),C73279(E3629)~unknown
  misc_feature (1)..(70): Homolog of NCBI NO: 38349095 NR Description: heat shock factor binding protein 2 [Zea mays]
  misc_feature (1)..(70): Homolog of NCBI NO: 32352188 NR Description: hypothetical protein [Oryza sativa (japonica
  misc_feature (1)..(70): Homolog of NCBI NO: 11862947 NR Description: hypothetical protein [Oryza sativa (japonica
MTAFVQNLLVQMQTRFQTMSENIITKIDEMGARIDELELSINDLKAEMGSDGMTPTKVKDEESKPADSSA

SEQ ID NO: 67590 - protein, 69 aa, Triticum aestivum
  peptide (1)..(69): Ceres Seq. ID no. 13660354
GIAAPVHYLAPRRNPHIHSENPQIPTLTDDRRICSGASSRRRPWRLPTPAASPSMWNRIRTARPRAQLI

SEQ ID NO: 67591 - DNA, 987 bp, Triticum aestivum
  misc_feature (1)..(987): Ceres Seq. ID no. 13660598
atgcgcagaccgtgggtgggaggcccacgcgtctgtgagattacgtgatatttcggccaagaatccacctacgcgtagttctgccgcacgttacgtggataaaaaggcaggaccgttcggggggcgaagaattgcgcacagcaaccaaccgtgtcagggaaggaattgaggcgagcgagagagaaccccacatcacatggcgaacggcgtgggctcggcgaaggcggagatctgcgccgggctgggcatgccgatggcggagctggagcaggtgttccggcgctacgacgccaacggcgacggcaagatctcggcggacgagctggcgtccgtgctgctcgcgctgggcgcgcccccgggggccaggggaggtgcagagcatgatggaggagatggacgccgacagggacggcttcgtcgacctccacgagttcgccgccttccactgcgggccctgcaagggcggcgcggccgcagacgccaaggagcaggaggccgccacggaggcggagctcaaggaggccttccggatgtacgacgccgaccgcaacgggctcatctccgcgcgggagcttcaccgcgtgctccgccagctcggggagaagtgctccgttgctgactgctcgcgcatgattcgatccgtcgacgccgacggcgacggcagcgtcaacttcgaggaattcaagaagatgatgggcggcggagggaggagctaggtcggtaagggccggccatgagcaaacaatgctgcatctgcatgcctcgttgagggttttgttcctccatggtgcttaatttaatttaattaatctcaaagtgaaaggcttaggctccccgtaatgcgaatactaatgatgatgcgggtgaagtgattaattatgtaaatctaatcttctagtagtagtagtactactaatgatgatgggtgtactaagaaatttggtctggggttgtttgcaatgaattagaactcgtttgaaactcttc

SEQ ID NO: 67592 - protein, 140 aa, Triticum aestivum
  peptide (1)..(140): Ceres Seq. ID no. 13660599
  misc_feature (22)..(51): Homolog of NCBI NO: 15221030 NR Description: calcium-binding protein, putative [Arabidopsis
  misc_feature (20)..(50): Homolog of NCBI NO: 21618074 NR Description: calmodulin-related protein [Arabidopsis thaliana]
  misc_feature (25)..(51): Homolog of NCBI NO: 13397927 NR Description: putative calmodulin-related protein [Medicago
  misc_feature (20)..(50): Homolog of NCBI NO: 18408502 NR Description: calmodulin-related protein, putative [Arabidopsis
  misc_feature (22)..(52): Homolog of NCBI NO: 14423648 NR Description: Calcium-binding allergen Ole e 8 (PCA18/PCA23)
  misc_feature (22)..(52): Homolog of NCBI NO: 6901654 NR Description: calcium-binding protein [Olea europaea]
  misc_feature (20)..(52): Homolog of NCBI NO: 14589311 NR Description: calcium binding protein [Sesbania rostrata]
  misc_feature (20)..(50): Homolog of NCBI NO: 15240340 NR Description: calmodulin-related protein 2, touch-induced
  misc_feature (21)..(61): Homolog of NCBI NO: 34895640 NR Description: OSJNBa0083M16.33 [Oryza sativa (japonica
  misc_feature (6)..(140): Homolog of NCBI NO: 29367367 NR Description: calmodulin-related protein
MANGVGSAKAEICAGLGMPMAELEQVFRRYDANGDGKISADELASVLLALGAPPGARGGAEHDGGDGRRQGRLRRPPRVRRLPLRALQGRRGRRRQGAGGRHGGGAQGGLPDVRRRPQRAHLRAGASPRAPPARGEVLRC

SEQ ID NO: 67593 - protein, 123 aa, Triticum aestivum
  peptide (1)..(123): Ceres Seq. ID no. 13660600
  misc_feature (5)..(34): Homolog of NCBI NO: 15221030 NR Description: calcium-binding protein, putative [Arabidopsis
  misc_feature (3)..(33): Homolog of NCBI NO: 21618074 NR Description: calmodulin-related protein [Arabidopsis thaliana]
  misc_feature (8)..(34): Homolog of NCBI NO: 13397927 NR Description: putative calmodulin-related protein [Medicago
  misc_feature (3)..(33): Homolog of NCBI NO: 18408502 NR Description: calmodulin-related protein, putative [Arabidopsis
  misc_feature (5)..(35): Homolog of NCBI NO: 14423648 NR Description: Calcium-binding allergen Ole e 8 (PCA18/PCA23)
  misc_feature (5)..(35): Homolog of NCBI NO: 6901654 NR Description: calcium-binding protein [Olea europaea]
  misc_feature (3)..(35): Homolog of NCBI NO: 14589311 NR Description: calcium binding protein [Sesbania rostrata]
  misc_feature (3)..(33): Homolog of NCBI NO: 15240340 NR Description: calmodulin-related protein 2, touch-induced
  misc_feature (4)..(44): Homolog of NCBI NO: 34895640 NR Description: OSJNBa0083M16.33 [Oryza sativa (japonica
  misc_feature (1)..(123): Homolog of NCBI NO: 29367367 NR Description: calmodulin-related protein
MPMAELEQVFRRYDANGDGKISADELASVLLALGAPPGARGGAEHDGGDGRRQGRLRRPPRVRRLPLRALQGRRGRRRQGAGGRHGGGAQGGLPDVRRRPQRAHLRAGASPRAPPARGEVLRC

SEQ ID NO: 67594 - protein, 121 aa, Triticum aestivum
  peptide (1)..(121): Ceres Seq. ID no. 13660601
  misc_feature (3)..(32): Homolog of NCBI NO: 15221030 NR Description: calcium-binding protein, putative [Arabidopsis
  misc_feature (1)..(31): Homolog of NCBI NO: 21618074 NR Description: calmodulin-related protein [Arabidopsis thaliana]
  misc_feature (6)..(32): Homolog of NCBI NO: 13397927 NR Description: putative calmodulin-related protein [Medicago
  misc_feature (1)..(31): Homolog of NCBI NO: 18408502 NR Description: calmodulin-related protein, putative [Arabidopsis
  misc_feature (3)..(33): Homolog of NCBI NO: 14423648 NR Description: Calcium-binding allergen Ole e 8 (PCA18/PCA23)
  misc_feature (3)..(33): Homolog of NCBI NO: 6901654 NR Description: calcium-binding protein [Olea europaea]
  misc_feature (1)..(33): Homolog of NCBI NO: 14589311 NR Description: calcium binding protein [Sesbania rostrata]
  misc_feature (1)..(31): Homolog of NCBI NO: 15240340 NR Description: calmodulin-related protein 2, touch-induced
  misc_feature (2)..(42): Homolog of NCBI NO: 34895640 NR Description: OSJNBa0083M16.33 [Oryza sativa (japonica
  misc_feature (1)..(121): Homolog of NCBI NO: 29367367 NR Description: calmodulin-related protein
MAELEQVFRRYDANGDGKISADELASVLLALGAPPGARGGAEHDGGDGRRQGRLRRPPRVRRLPLRALQGRRGRRRQGAGGRHGGGAQGGLPDVRRRPQRAHLRAGASPRAPPARGEVLRC

SEQ ID NO: 67595 - protein, 111 aa, Triticum aestivum
  peptide (1)..(111): Ceres Seq. ID no. 13660602
  misc_feature (80)..(108): Pfam Name: EF hand Pfam Description: EF hand
  misc_feature (1)..(110): Homolog of NCBI NO: 15221781 NR Description: polcalcin (calcium-binding pollen allergen),
  misc_feature (1)..(105): Homolog of NCBI NO: 15221030 NR Description: calcium-binding protein, putative [Arabidopsis
  misc_feature (1)..(105): Homolog of NCBI NO: 21618074 NR Description: calmodulin-related protein [Arabidopsis thaliana]
  misc_feature (1)..(105): Homolog of NCBI NO: 18408502 NR Description: calmodulin-related protein, putative [Arabidopsis
  misc_feature (1)..(105): Homolog of NCBI NO: 13397927 NR Description: putative calmodulin-related protein [Medicago
  misc_feature (1)..(105): Homolog of NCBI NO: 14423648 NR Description: Calcium-binding allergen Ole e 8 (PCA18/PCA23)
  misc_feature (1)..(105): Homolog of NCBI NO: 14589311 NR Description: calcium binding protein [Sesbania rostrata]
  misc_feature (1)..(105): Homolog of NCBI NO: 6901654 NR Description: calcium-binding protein [Olea europaea]
  misc_feature (1)..(109): Homolog of NCBI NO: 15240340 NR Description: calmodulin-related protein 2, touch-induced
  misc_feature (1)..(105): Homolog of NCBI NO: 34895640 NR Description: OSJNBa0083M16.33 [Oryza sativa (japonica
MMEEMDADRDGFVDLHEFAAFHCGPCKGGAAADAKEQEAATEAELKEAFRMYDADRNGLISARELHRVLRQLGEKCSVADCSRMIRSVDADGDGSVNFEEFKKMMGGGGRS

SEQ ID NO: 67596 - DNA, 1729 bp, Triticum aestivum
  misc_feature (1)..(1729): Ceres Seq. ID no. 13579945
gtccatcacccatcagttcctcccccctttgtctcatcccagttcctccccccaccaagaacctagggttagggttagggaggcggcggctgctttattcccgatcccgcccgatcgccatggtcatcgcaggcgagccagagccggaggaggtggccgtcatgttctccgataggttgagggcggaggaggagaccgtcgtcttccccggctgggtgatgctggatcgcatcggccgcacccactgcgacggcgacctaggagctgctcgtgaggctgtcaacgggaacaagaccgccgttcaagtcgagatggacagcggccactccttctacgtgtccttcaccctcgcgcctcctccacaaggggcctcttaccttgatctccactggccgctggaaggctcagccaaatccgtgcccccctacaagcagcctgcctatcccttcgtccgggcaatcgacaaggacctcgtcctcttccacatctccatcccgagcctgcctcaccgcaacttcgtcccgccagatctgttcgtctacaatgccgctggtcaccccccctcggtgcagcagctccctctgtacaggagaaggtcattcctcagggttaacttcaccacaggcatcctgcggcgccaaaacggcagctacatcgtttccgacctcaatgtctacccaaaaaaggagggcactggtaataattccatgtgcgccgaactctgcgtcttcaactccaatacacgggcgtggagcttcttcagcaaggatgctccgcagccccaggaccagagcaatggccagttccccaccctctggtcaaccgaccatgtgcttgcttttgacggccgtttcctgtgctgggttgactacttcagcggtgtcctgctatccgacttctccaatctgcgctcccgggtgctccacttcgtccctttccctggagaaggagagtaccctgctaaggtacgggttcaaaggtgcttcccagacagattccgaagcgtgtccatcagcaacggcaagatgtgcttcgtccacattgacaatgacttccatgagagaatccacactggctcgcaagggcagcagcctcgcaaaaaaatcaccatttggactttgaacatgatggatggtaactccaggttcaagtgggagccacatcatgtgatcgacctggatcgtctttggctgacacctagtgtacctcggcgtcttcctgagtatccaatcatcgcccccaataacccggatgttctgtactgcctgttaaggaagcaggaatttcatggtgaggcctccatgatcatggttgacatgaaccctgcatctccgtggttgtgtactccatatatcaatcggcggtctgtgcatgtgaaagatcacaaaagcgagtttcctaatatgcccctccttccaactgtcttcttcaaataccttgaaagttcaacagggatgccatgggacaatgacaagtttgcaactcgtccttcaaagaaattaaggtctgcaacgtgtgaagacctggagtctggtgactggtgttgaacatttcgggtatgctcatattgaaaatgatgtttgtcagtggtctggtacagttagaaccaagtcaggcaaaatatggcattgatgtgatgaagatgatgcactgatgttatctatttgagtgaacgatgcatgttcctgtaatcgtatgtttaattaagagccagtatgttttaagatcc

SEQ ID NO: 67597 - protein, 514 aa, Triticum aestivum
  peptide (1)..(514): Ceres Seq. ID no. 13579946
  misc_feature (69)..(456): Homolog of NCBI NO: 34910284 NR Description: OSJNBa0089K24.29 [Oryza sativa (japonica
PSPISSSPLCLIPVPPPTKNLGLGLGRRRLLYSRSRPIAMVIAGEPEPEEVAVMFSDRLRAEEETVVFPGWVMLDRIGRTHCDGDLGAAREAVNGNKTAVQVEMDSGHSFYVSFTLAPPPQGASYLDLHWPLEGSAKSVPPYKQPAYPFVRAIDKDLVLFHISIPSLPHRNFVPPDLFVYNAAGHPPSVQQLPLYRRRSFLRVNFTTGILRRQNGSYIVSDLNVYPKKEGTGNNSMCAELCVFNSNTRAWSFFSKDAPQPQDQSNGQFPTLWSTDHVLAFDGRFLCWVDYFSGVLLSDFSNLRSRVLHFVPFPGEGEYPAKVRVQRCFPDRFRSVSISNGKMCFVHIDNDFHERIHTGSQGQQPRKKITIWTLNMMDGNSRFKWEPHHVIDLDRLWLTPSVPRRLPEYPIIAPNNPDVLYCLLRKQEFHGEASMIMVDMNPASPWLCTPYINRRSVHVKDHKSEFPNMPLLPTVFFKYLESSTGMPWDNDKFATRPSKKLRSATCEDLESGDWC

SEQ ID NO: 67598 - protein, 475 aa, Triticum aestivum
  peptide (1)..(475): Ceres Seq. ID no. 13579947
  misc_feature (30)..(417): Homolog of NCBI NO: 34910284 NR Description: OSJNBa0089K24.29 [Oryza sativa (japonica
MVIAGEPEPEEVAVMFSDRLRAEEETVVFPGWVMLDRIGRTHCDGDLGAAREAVNGNKTAVQVEMDSGHSFYVSFTLAPPPQGASYLDLHWPLEGSAKSVPPYKQPAYPFVRAIDKDLVLFHISIPSLPHRNFVPPDLFVYNAAGHPPSVQQLPLYRRRSFLRVNFTTGILRRQNGSYIVSDLNVYPKKEGTGNNSMCAELCVFNSNTRAWSFFSKDAPQPQDQSNGQFPTLWSTDHVLAFDGRFLCWVDYFSGVLLSDFSNLRSRVLHFVPFPGEGEYPAKVRVQRCFPDRFRSVSISNGKMCFVHIDNDFHERIHTGSQGQQPRKKITIWTLNMMDGNSRFKWEPHHVIDLDRLWLTPSVPRRLPEYPIIAPNNPDVLYCLLRKQEFHGEASMIMVDMNPASPWLCTPYINRRSVHVKDHKSEFPNMPLLPTVFFKYLESSTGMPWDNDKFATRPSKKLRSATCEDLESGDWC

SEQ ID NO: 67599 - protein, 461 aa, Triticum aestivum
  peptide (1)..(461): Ceres Seq. ID no. 13579948
  misc_feature (16)..(403): Homolog of NCBI NO: 34910284 NR Description: OSJNBa0089K24.29 [Oryza sativa (japonica
MFSDRLRAEEETVVFPGWVMLDRIGRTHCDGDLGAAREAVNGNKTAVQVEMDSGHSFYVSFTLAPPPQGASYLDLHWPLEGSAKSVPPYKQPAYPFVRAIDKDLVLFHISIPSLPHRNFVPPDLFVYNAAGHPPSVQQLPLYRRRSFLRVNFTTGILRRQNGSYIVSDLNVYPKKEGTGNNSMCAELCVFNSNTRAWSFFSKDAPQPQDQSNGQFPTLWSTDHVLAFDGRFLCWVDYFSGVLLSDFSNLRSRVLHFVPFPGEGEYPAKVRVQRCFPDRFRSVSISNGKMCFVHIDNDFHERIHTGSQGQQPRKKITIWTLNMMDGNSRFKWEPHHVIDLDRLWLTPSVPRRLPEYPIIAPNNPDVLYCLLRKQEFHGEASMIMVDMNPASPWLCTPYINRRSVHVKDHKSEFPNMPLLPTVFFKYLESSTGMPWDNDKFATRPSKKLRSATCEDLESGDWC

SEQ ID NO: 67600 - DNA, 496 bp, Triticum aestivum
  misc_feature (1)..(496): Ceres Seq. ID no. 13663935
aaaaacctccaaaacaattccaattcctcccctcccacagttccactccatccctcgcccccgcccctcctcgctccggagcctcctcccgggccaccgccatgctgcccgcgcgcttcctcaagctctcgctgctacgccgcctcggcaccgcccgtgcggccggagtgcccccgccgtggcagaccaggcaatttccggtgcggggttaccagcctcgaggttattctaccggaggaagctccaagtatgatagaccgatgagacagtttgctgaagataacgagtcaaattctcagccactaatatattacattgtcccatctgccattctagcctttgttggactagccacttatgttcactataatgatgagaggcgtgcagttcccttaggtaaacaagcacagcagaccagtattcccaaaaggtgcactaccaacagacctgcaatcggaggaccatttaagctctatgatacagaaaacaatgtggt

SEQ ID NO: 67601 - protein, 164 aa, Triticum aestivum
  peptide (1)..(164): Ceres Seq. ID no. 13663936
  misc_feature (110)..(163): Pfam Name: SCO1/SenC Pfam Description: SCO1/SenC
  misc_feature (85)..(163): Homolog of NCBI NO: 7487210 NR Description: hypothetical protein T19P19.130 - Arabidopsis
  misc_feature (34)..(163): Homolog of NCBI NO: 18420515 NR Description: expressed protein [Arabidopsis thaliana]
  misc_feature (34)..(163): Homolog of NCBI NO: 26450269 NR Description: unknown protein [Arabidopsis thaliana]
KPPKQFQFLPSHSSTPSLAPAPPRSGASSRATAMLPARFLKLSLLRRLGTARAAGVPPPWQTRQFPVRGYQPRGYSTGGSSKYDRPMRQFAEDNESNSQPLIYYIVPSAILAFVGLATYVHYNDERRAVPLGKQAQQTSIPKRCTTNRPAIGGPFKLYDTENNV

SEQ ID NO: 67602 - protein, 131 aa, Triticum aestivum
  peptide (1)..(131): Ceres Seq. ID no. 13663937
  misc_feature (77)..(130): Pfam Name: SCO1/SenC Pfam Description: SCO1/SenC
  misc_feature (52)..(130): Homolog of NCBI NO: 7487210 NR Description: hypothetical protein T19P19.130 - Arabidopsis
  misc_feature (1)..(130): Homolog of NCBI NO: 18420515 NR Description: expressed protein [Arabidopsis thaliana]
  misc_feature (1)..(130): Homolog of NCBI NO: 26450269 NR Description: unknown protein [Arabidopsis thaliana]
MLPARFLKLSLLRRLGTARAAGVPPPWQTRQFPVRGYQPRGYSTGGSSKYDRPMRQFAEDNESNSQPLIYYIVPSAILAFVGLATYVHYNDERRAVPLGKQAQQTSIPKRCTTNRPAIGGPFKLYDTENNV

SEQ ID NO: 67603 - protein, 87 aa, Triticum aestivum
  peptide (1)..(87): Ceres Seq. ID no. 13663938
KNLQNNSNSSPPTVPLHPSPPPLLAPEPPPGPPPCCPRASSSSRCYAASAPPVRPECPRRGRPGNFRCGVTSLEVILPEEAPSMIDR

SEQ ID NO: 67604 - DNA, 1515 bp, Triticum aestivum
  misc_feature (1)..(1515): Ceres Seq. ID no. 14302511
acccaaccaggcaaccaccacatcccggctccaactcctacatcgtgcgcgttccaactccggtagcgtactcctcctcagaaaaaactccggtggcgtactactagaaaacagcagagacggctgtgccctgctccaccttctcgccggtgccttctgctcgaggcaaacgaaacccatcctcctcctcctgcccctctctcccacgcttcccccttcgtctccgtcgaggagaggcgaggcgaggcgaggcggcgacgatgcaggtgaagcagaaggtctacgagctctacaaggggacggtggagcgggtcacgggcccgcgcactgtctcggcgttcctcgagaagggcgtcctctccgtccccgagttcatcctcgccggcgacaacctcgtatccaagtgccccacctggtcctgggaggcgggcgatccgagcaagagaaagccatacctcccctccgataagcagttcctcgtcaccaggaacgtgccctgcctaagacgagctgtggcggtcgaggaagagtatgatgcagcgggagctgaggttgttctcgatgatgatgaggatggcgaaggctggctcgcaacacatgggctgcaagcatcagagtcaaaagaggaggaagacataccgtctatggatacattggacatagggaaagttgaagagatcaaatctatcccctcctactttggtgctggtgaaaagccagatgacgaggaggatatacctgatatggacacctatgaagacacaggagatcattccacagctacccctcagccttcatattttgtcgcagaagagcctgatgatgacaacattcttctcaccagaacatatgatgtcagcatcacatatgacaagtactaccaaactccacgtgtctggcttacaggctatgatgaggcaagaatgccattaaagcctgaacttgtgtttcaagatatcagtcaagaccatgcacacaaaacggtgactatcgaagaccaccctcacttgttagtgggacagcacgcttcagtgcatccttgcaagcacgctgctgtgatgaaaaagatcattgatgttatagtgtctcaaggaggtgcaccagaagttgacaagtaccttttcatatttctgaaattcatggcttctgtcatacccaccattgagtatgattacactatggacttcgatctgggcagtacaagcacataagtcgcccattgaagaaaagctgaaacttccaagaaggcaggctggtcattgtcgccgaataattgctgctcttcggaaggatctgtacattgtgtccgtgtgtgttggttcgtctggaaatgaactttcaattgtaaactctgatgctctgcaggaagattgtgccgatttgtcctcttacggtgcagcgccgcactgatgacatttgtgattcttcgccaacaaatctgaattttgttgaaaaactgaaggatagtaaaatccctgcactgaaaaaaaaaaaaaaaaaaaaaaaaaaaaaaag

SEQ ID NO: 67605 - protein, 316 aa, Triticum aestivum
  peptide (1)..(316): Ceres Seq. ID no. 14302512
  misc_feature (6)..(161): Pfam Name: Autophagocytosis associated protein, N-terminal domain Pfam Description: Autophagocytosis associated protein, N-terminal
  misc_feature (5)..(311): Homolog of NCBI NO: 19705511 NR Description: preconditioning-inducible gene 1 protein [Rattus
  misc_feature (5)..(311): Homolog of NCBI NO: 13385890 NR Description: RIKEN cDNA 2610016C12 [Mus musculus]
  misc_feature (13)..(311): Homolog of NCBI NO: 34785406 NR Description: Unknown (protein for MGC:64156) [Danio rerio]
  misc_feature (187)..(310): Homolog of NCBI NO: 28828597 NR Description: hypothetical protein [Dictyostelium discoideum]
  misc_feature (4)..(167): Homolog of NCBI NO: 28828597 NR Description: hypothetical protein [Dictyostelium discoideum]
  misc_feature (1)..(235): Homolog of NCBI NO: 37536838 NR Description: autophagocytosis protein AUT1-like
  misc_feature (1)..(311): Homolog of NCBI NO: 9758466 NR Description: autophagocytosis protein AUT1-like [Arabidopsis
  misc_feature (1)..(316): Homolog of NCBI NO: 21595613 NR Description: autophagocytosis protein-like [Arabidopsis
  misc_feature (1)..(316): Homolog of NCBI NO: 18424474 NR Description: autophagocytosis protein - like [Arabidopsis
  misc_feature (1)..(315): Homolog of NCBI NO: 34903638 NR Description: B1015E06.2 [Oryza sativa (japonica
MQVKQKVYELYKGTVERVTGPRTVSAFLEKGVLSVPEFILAGDNLVSKCPTWSWEAGDPSKRKPYLPSDKQFLVTRNVPCLRRAVAVEEEYDAAGAEVVLDDDEDGEGWLATHGLQASESKEEEDIPSMDTLDIGKVEEIKSIPSYFGAGEKPDDEEDIPDMDTYEDTGDHSTATPQPSYFVAEEPDDDNILLTRTYDVSITYDKYYQTPRVWLTGYDEARMPLKPELVFQDISQDHAHKTVTIEDHPHLLVGQHASVHPCKHAAVMKKIIDVIVSQGGAPEVDKYLFIFLKFMASVIPTIEYDYTMDFDLGSTST

SEQ ID NO: 67606 - protein, 188 aa, Triticum aestivum
  peptide (1)..(188): Ceres Seq. ID no. 14302513
  misc_feature (61)..(179): Pfam Name: Autophagocytosis associated protein, C-terminal domain Pfam Description: Autophagocytosis associated protein, C-terminal
  misc_feature (1)..(183): Homolog of NCBI NO: 19705511 NR Description: preconditioning-inducible gene 1 protein [Rattus
  misc_feature (1)..(183): Homolog of NCBI NO: 13385890 NR Description: RIKEN cDNA 2610016C12 [Mus musculus]
  misc_feature (1)..(183): Homolog of NCBI NO: 34785406 NR Description: Unknown (protein for MGC:64156) [Danio rerio]
  misc_feature (59)..(182): Homolog of NCBI NO: 28828597 NR Description: hypothetical protein [Dictyostelium discoideum]
  misc_feature (1)..(39): Homolog of NCBI NO: 28828597 NR Description: hypothetical protein [Dictyostelium discoideum]
  misc_feature (1)..(107): Homolog of NCBI NO: 37536838 NR Description: autophagocytosis protein AUT1-like
  misc_feature (1)..(183): Homolog of NCBI NO: 9758466 NR Description: autophagocytosis protein AUT1-like [Arabidopsis
  misc_feature (1)..(188): Homolog of NCBI NO: 21595613 NR Description: autophagocytosis protein-like [Arabidopsis
  misc_feature (1)..(188): Homolog of NCBI NO: 18424474 NR Description: autophagocytosis protein - like [Arabidopsis
  misc_feature (1)..(187): Homolog of NCBI NO: 34903638 NR Description: B1015E06.2 [Oryza sativa (japonica
MDTLDIGKVEEIKSIPSYFGAGEKPDDEEDIPDMDTYEDTGDHSTATPQPSYFVAEEPDDDNILLTRTYDVSITYDKYYQTPRVWLTGYDEARMPLKPELVFQDISQDHAHKTVTIEDHPHLLVGQHASVHPCKHAAVMKKIIDVIVSQGGAPEVDKYLFIFLKFMASVIPTIEYDYTMDFDLGSTST

SEQ ID NO: 67607 - DNA, 434 bp, Triticum aestivum
  misc_feature (1)..(434): Ceres Seq. ID no. 13663708
agcaaaactcaccggtatctagccaagttagctcgagctccattgtcacaatacgagcgtctacacacccacattgcacctccagggccaggccaacctcgaacgccatggaagcccctctgcaccagctggcccccatgcagcaagcactgctcgcccgtcctcagaactgcaagcacgacgccgcggcgaccatggccgcgacggacatggcgtgcctccagcagcagcagcagctgatgcagctgcagccggcggtggcgaacccgaacacgccctcgggcgcggcacgggagcagtgcccgcggtgcgcgtctcacgacaccaagttctgctactacaacaactacaacacgtcgcagccgcgccacttctgccgcgcctgccgccgctactggacgctcgggggctcctccgcaacgtcccatcggggc

SEQ ID NO: 67608 - protein, 144 aa, Triticum aestivum
  peptide (1)..(144): Ceres Seq. ID no. 13663709
  misc_feature (93)..(141): Pfam Name: Dof domain, zinc finger Pfam Description: Dof domain, zinc finger
  misc_feature (41)..(137): Homolog of NCBI NO: 25406987 NR Description: hypothetical protein [imported] - Arabidopsis
  misc_feature (74)..(137): Homolog of NCBI NO: 15218846 NR Description: Dof zinc finger protein [Arabidopsis thaliana]
  misc_feature (63)..(137): Homolog of NCBI NO: 22329829 NR Description: Dof zinc finger protein [Arabidopsis thaliana]
  misc_feature (41)..(137): Homolog of NCBI NO: 30680246 NR Description: Dof zinc finger protein [Arabidopsis thaliana]
  misc_feature (86)..(137): Homolog of NCBI NO: 2130124 NR Description: DNA-binding protein Dof2 - maize (fragment)
  misc_feature (81)..(137): Homolog of NCBI NO: 21538787 NR Description: dof zinc finger protein [Hordeum vulgare subsp.
  misc_feature (20)..(137): Homolog of NCBI NO: 30684022 NR Description: Dof zinc finger protein [Arabidopsis thaliana]
  misc_feature (20)..(137): Homolog of NCBI NO: 25352305 NR Description: probable DOF zinc finger protein
  misc_feature (61)..(137): Homolog of NCBI NO: 1346559 NR Description: DNA-BINDING PROTEIN MNB1A
  misc_feature (47)..(141): Homolog of NCBI NO: 4996648 NR Description: Dof zinc finger protein [Oryza sativa]
QNSPVSSQVSSSSIVTIRASTHPHCTSRARPTSNAMEAPLHQLAPMQQALLARPQNCKHDAAATMAATDMACLQQQQQLMQLQPAVANPNTPSGAAREQCPRCASHDTKFCYYNNYNTSQPRHFCRACRRYWTLGGSSATSHRG

SEQ ID NO: 67609 - protein, 109 aa, Triticum aestivum
  peptide (1)..(109): Ceres Seq. ID no. 13663710
  misc_feature (58)..(106): Pfam Name: Dof domain, zinc finger Pfam Description: Dof domain, zinc finger
  misc_feature (6)..(102): Homolog of NCBI NO: 25406987 NR Description: hypothetical protein [imported] - Arabidopsis
  misc_feature (39)..(102): Homolog of NCBI NO: 15218846 NR Description: Dof zinc finger protein [Arabidopsis thaliana]
  misc_feature (28)..(102): Homolog of NCBI NO: 22329829 NR Description: Dof zinc finger protein [Arabidopsis thaliana]
  misc_feature (6)..(102): Homolog of NCBI NO: 30680246 NR Description: Dof zinc finger protein [Arabidopsis thaliana]
  misc_feature (51)..(102): Homolog of NCBI NO: 2130124 NR Description: DNA-binding protein Dof2 - maize (fragment)
  misc_feature (46)..(102): Homolog of NCBI NO: 21538787 NR Description: dof zinc finger protein [Hordeum vulgare subsp.
  misc_feature (1)..(102): Homolog of NCBI NO: 30684022 NR Description: Dof zinc finger protein [Arabidopsis thaliana]
  misc_feature (1)..(102): Homolog of NCBI NO: 25352305 NR Description: probable DOF zinc finger protein
  misc_feature (26)..(102): Homolog of NCBI NO: 1346559 NR Description: DNA-BINDING PROTEIN MNB1A
  misc_feature (12)..(106): Homolog of NCBI NO: 4996648 NR Description: Dof zinc finger protein [Oryza sativa]
MEAPLHQLAPMQQALLARPQNCKHDAAATMAATDMACLQQQQQLMQLQPAVANPNTPSGAAREQCPRCASHDTKFCYYNNYNTSQPRHFCRACRRYWTLGGSSATSHRG

SEQ ID NO: 67610 - protein, 99 aa, Triticum aestivum
  peptide (1)..(99): Ceres Seq. ID no. 13663711
  misc_feature (48)..(96): Pfam Name: Dof domain, zinc finger Pfam Description: Dof domain, zinc finger
  misc_feature (1)..(92): Homolog of NCBI NO: 25406987 NR Description: hypothetical protein [imported] - Arabidopsis
  misc_feature (29)..(92): Homolog of NCBI NO: 15218846 NR Description: Dof zinc finger protein [Arabidopsis thaliana]
  misc_feature (18)..(92): Homolog of NCBI NO: 22329829 NR Description: Dof zinc finger protein [Arabidopsis thaliana]
  misc_feature (1)..(92): Homolog of NCBI NO: 30680246 NR Description: Dof zinc finger protein [Arabidopsis thaliana]
  misc_feature (41)..(92): Homolog of NCBI NO: 2130124 NR Description: DNA-binding protein Dof2 - maize (fragment)
  misc_feature (36)..(92): Homolog of NCBI NO: 21538787 NR Description: dof zinc finger protein [Hordeum vulgare subsp.
  misc_feature (1)..(92): Homolog of NCBI NO: 30684022 NR Description: Dof zinc finger protein [Arabidopsis thaliana]
  misc_feature (1)..(92): Homolog of NCBI NO: 25352305 NR Description: probable DOF zinc finger protein
  misc_feature (16)..(92): Homolog of NCBI NO: 1346559 NR Description: DNA-BINDING PROTEIN MNB1A
  misc_feature (2)..(96): Homolog of NCBI NO: 4996648 NR Description: Dof zinc finger protein [Oryza sativa]
MQQALLARPQNCKHDAAATMAATDMACLQQQQQLMQLQPAVANPNTPSGAAREQCPRCASHDTKFCYYNNYNTSQPRHFCRACRRYWTLGGSSATSHRG

SEQ ID NO: 67611 - DNA, 860 bp, Triticum aestivum
  misc_feature (1)..(860): Ceres Seq. ID no. 12627045
aatcgattgggttgggttgggtttgcgggtggaccgatgacggtggccgccgcacgctgcctcattctcacccccacaatctcctcctcctccgccgttctccggctcccccggatcgcccgccgccgcccgctctcctgctcggcctcgccgctcgccgtgttcgccaccatggagtcgccgcccgagggctaccgcaccaacgtcggcatctgcctcgccgaccccaccctcaccaagatcttctccgcgtccaggatcgacatccccacggcgtggcagatgcctcagggtgggatagacccaggggaagagccacgagcagctgccatcagggaattgagggaagaaaccggtgttagatctgccgaggttgtcgccgaggcccccaattggttgacatatgatttccccgcggatgtcaaagacaagctgaatgctaggtggggaaccaactggaagggccaggctcagaagtggtttctatttaggcttacggggggtgatgacgagatcaacctgatgggcgatggatccgagaagccggagttctccgagtgggcatggatgacccctcagcaagtgattgagaaggctgttgatttcaagaaacctgtctacaaggagacactgaagcacttcgccccatatctacagtcagatccaacagcttcgtcatagactttgcagtctcccacgggctttatacgtagaggggctgtgtcaatcaataatttctcaaaaatgtattggggccacggagtatttctagaacgtctggcgtatcgccgccgcctgctatcccggcattggatccccgtagcccgatcatgcgcaacgagatgagtacgttgtgtcgc

SEQ ID NO: 67612 - protein, 226 aa, Triticum aestivum
  peptide (1)..(226): Ceres Seq. ID no. 12627046
  misc_feature (65)..(213): Pfam Name: NUDIX domain Pfam Description: NUDIX domain
  misc_feature (65)..(222): Homolog of NCBI NO: 22967686 NR Description: hypothetical protein [Rhodospirillum rubrum]
  misc_feature (65)..(220): Homolog of NCBI NO: 23015122 NR Description: hypothetical protein [Magnetospirillum
  misc_feature (65)..(218): Homolog of NCBI NO: 22959957 NR Description: hypothetical protein [Rhodobacter sphaeroides]
  misc_feature (58)..(225): Homolog of NCBI NO: 15220667 NR Description: diadenosine 5,5-P1,P4-tetraphosphate hydrolase,
  misc_feature (39)..(217): Homolog of NCBI NO: 15240003 NR Description: diadenosine 5,5-P1,P4-tetraphosphate
  misc_feature (36)..(219): Homolog of NCBI NO: 8567796 NR Description: diadenosine 5',5'''-P1,P4-tetraphosphate
  misc_feature (57)..(218): Homolog of NCBI NO: 14488439 NR Description: Chain A, Solution Structure Of The Nudix Enzyme
  misc_feature (56)..(218): Homolog of NCBI NO: 1888557 NR Description: diadenosine 5',5'''-P1,P4-tetraphosphate
  misc_feature (36)..(219): Homolog of NCBI NO: 15228345 NR Description: putative diadenosine 5',5'''-P1,P4-tetraphosphate
  misc_feature (13)..(226): Homolog of NCBI NO: 7489414 NR Description: probable bis(5'-nucleosyl)-tetraphosphatase
NRLGWVGFAGGPMTVAAARCLILTPTISSSSAVLRLPRIARRRPLSCSASPLAVFATMESPPEGYRTNVGICLADPTLTKIFSASRIDIPTAWQMPQGGIDPGEEPRAAAIRELREETGVRSAEVVAEAPNWLTYDFPADVKDKLNARWGTNWKGQAQKWFLFRLTGGDDEINLMGDGSEKPEFSEWAWMTPQQVIEKAVDFKKPVYKETLKHFAPYLQSDPTASS

SEQ ID NO: 67613 - protein, 214 aa, Triticum aestivum
  peptide (1)..(214): Ceres Seq. ID no. 12627047
  misc_feature (53)..(201): Pfam Name: NUDIX domain Pfam Description: NUDIX domain
  misc_feature (53)..(210): Homolog of NCBI NO: 22967686 NR Description: hypothetical protein [Rhodospirillum rubrum]
  misc_feature (53)..(208): Homolog of NCBI NO: 23015122 NR Description: hypothetical protein [Magnetospirillum
  misc_feature (53)..(206): Homolog of NCBI NO: 22959957 NR Description: hypothetical protein [Rhodobacter sphaeroides]
  misc_feature (46)..(213): Homolog of NCBI NO: 15220667 NR Description: diadenosine 5,5-P1,P4-tetraphosphate hydrolase,
  misc_feature (27)..(205): Homolog of NCBI NO: 15240003 NR Description: diadenosine 5,5-P1,P4-tetraphosphate
  misc_feature (24)..(207): Homolog of NCBI NO: 8567796 NR Description: diadenosine 5',5'''-P1,P4-tetraphosphate
  misc_feature (45)..(206): Homolog of NCBI NO: 14488439 NR Description: Chain A, Solution Structure Of The Nudix Enzyme
  misc_feature (44)..(206): Homolog of NCBI NO: 1888557 NR Description: diadenosine 5',5'''-P1,P4-tetraphosphate
  misc_feature (24)..(207): Homolog of NCBI NO: 15228345 NR Description: putative diadenosine 5',5'''-P1,P4-tetraphosphate
  misc_feature (1)..(214): Homolog of NCBI NO: 7489414 NR Description: probable bis(5'-nucleosyl)-tetraphosphatase
MTVAAARCLILTPTISSSSAVLRLPRIARRRPLSCSASPLAVFATMESPPEGYRTNVGICLADPTLTKIFSASRIDIPTAWQMPQGGIDPGEEPRAAAIRELREETGVRSAEVVAEAPNWLTYDFPADVKDKLNARWGTNWKGQAQKWFLFRLTGGDDEINLMGDGSEKPEFSEWAWMTPQQVIEKAVDFKKPVYKETLKHFAPYLQSDPTASS

SEQ ID NO: 67614 - protein, 169 aa, Triticum aestivum
  peptide (1)..(169): Ceres Seq. ID no. 12627048
  misc_feature (8)..(156): Pfam Name: NUDIX domain Pfam Description: NUDIX domain
  misc_feature (8)..(165): Homolog of NCBI NO: 22967686 NR Description: hypothetical protein [Rhodospirillum rubrum]
  misc_feature (8)..(163): Homolog of NCBI NO: 23015122 NR Description: hypothetical protein [Magnetospirillum
  misc_feature (8)..(161): Homolog of NCBI NO: 22959957 NR Description: hypothetical protein [Rhodobacter sphaeroides]
  misc_feature (1)..(168): Homolog of NCBI NO: 15220667 NR Description: diadenosine 5,5-P1,P4-tetraphosphate hydrolase,
  misc_feature (1)..(160): Homolog of NCBI NO: 15240003 NR Description: diadenosine 5,5-P1,P4-tetraphosphate
  misc_feature (1)..(162): Homolog of NCBI NO: 8567796 NR Description: diadenosine 5',5'''-P1,P4-tetraphosphate
  misc_feature (1)..(161): Homolog of NCBI NO: 14488439 NR Description: Chain A, Solution Structure Of The Nudix Enzyme
  misc_feature (1)..(161): Homolog of NCBI NO: 1888557 NR Description: diadenosine 5',5'''-P1,P4-tetraphosphate
  misc_feature (1)..(162): Homolog of NCBI NO: 15228345 NR Description: putative diadenosine 5',5'''-P1,P4-tetraphosphate
  misc_feature (1)..(169): Homolog of NCBI NO: 7489414 NR Description: probable bis(5'-nucleosyl)-tetraphosphatase
MESPPEGYRTNVGICLADPTLTKIFSASRIDIPTAWQMPQGGIDPGEEPRAAAIRELREETGVRSAEVVAEAPNWLTYDFPADVKDKLNARWGTNWKGQAQKWFLFRLTGGDDEINLMGDGSEKPEFSEWAWMTPQQVIEKAVDFKKPVYKETLKHFAPYLQSDPTASS

SEQ ID NO: 67615 - DNA, 682 bp, Triticum aestivum
  misc_feature (1)..(682): Ceres Seq. ID no. 12784091
atccgccgcgcgcggtgcagcttctcgtggatttccccctagctagctagagccacagctacagcaatggaagctctcgcctcgtcgccgcgggctctcttcgcccgcaccgcctctccgacgacggcgctggtcacgccagcaagatggacgccgtcatcgagcaggcgtgtcaaggccgccgccgccgccgagccggccggcgaggcgaagccggctgccgcagcggcgccgtcggcacccaagaagatcctcaagaagaagcccgtatactccatgaagaaagggcagatcgtgcgcgtcgagaaagaaaagtatctgaacagcatcaattacctatcagtggggcacccacccttctacaaggggctagactacatatatgaagaccgcggcgaggttttggacatcagaatctttgaagagaccggagagtatgctctgatcgcgtgggtggggattccaaccccgccggcatggctcccaacttatatgctcatcaagtcagacaaactcgactacgagaggatatgattgttggatgagcagttgcaagggagaacgatgttctctgaataaatcaatgttgctatgtggccatgttgtgacattgctccatggatgcaaaacgaagcagttgtaaattgaagaaacaatagtgaaatatatccaaagttttttt

SEQ ID NO: 67616 - protein, 155 aa, Triticum aestivum
  peptide (1)..(155): Ceres Seq. ID no. 12784092
  misc_feature (1)..(138): Homolog of NCBI NO: 34905786 NR Description: P0401G10.19 [Oryza sativa (japonica
  misc_feature (12)..(155): Homolog of NCBI NO: 18410719 NR Description: expressed protein
MEALASSPRALFARTASPTTALVTPARWTPSSSRRVKAAAAAEPAGEAKPAAAAAPSAPKKILKKKPVYSMKKGQIVRVEKEKYLNSINYLSVGHPPFYKGLDYIYEDRGEVLDIRIFEETGEYALIAWVGIPTPPAWLPTYMLIKSDKLDYERI

SEQ ID NO: 67617 - protein, 85 aa, Triticum aestivum
  peptide (1)..(85): Ceres Seq. ID no. 12784093
  misc_feature (1)..(68): Homolog of NCBI NO: 34905786 NR Description: P0401G10.19 [Oryza sativa (japonica
  misc_feature (1)..(85): Homolog of NCBI NO: 18410719 NR Description: expressed protein
MKKGQIVRVEKEKYLNSINYLSVGHPPFYKGLDYIYEDRGEVLDIRIFEETGEYALIAWVGIPTPPAWLPTYMLIKSDKLDYERI

SEQ ID NO: 67618 - protein, 79 aa, Triticum aestivum
  peptide (1)..(79): Ceres Seq. ID no. 12784094
MDAVIEQACQGRRRRRAGRRGEAGCRSGAVGTQEDPQEEARILHEERADRARRERKVSEQHQLPISGAPTLLQGARLHI

SEQ ID NO: 67619 - DNA, 739 bp, Triticum aestivum
  misc_feature (1)..(739): Ceres Seq. ID no. 12622129
agaggaaatcaatcaagaaggcgaggaggagcatcgtcggcgatggaggggtgggacaagggcacgaagagcgtggtgggcgagatcccgctgctgtcgacgcgggcgggcccccgggacggcgatccgtggcggcagcggctcaaggaggagtaccgcgccttcatcgcctacacctccgtcaacaaggccaaggacaatgactggttcagcatctccgccgccaacccggagggcacccgctgggagggtacctgctggtacgtccacaacctccgccgttacgagttccccctccagttagacatccccgtcgcctaccctcaggtcgcccccgagatcgagctccccaccctcgacggcaagacccacaagatgtaccgcggagggaagatctgcctcaccgtgcacttcaagccgctgtgggccaagaactgcccgcggttcgggctcgcgcacgctctctgcctcgggctcgcgccgtggctcgctgcggaggtgcccatcctggtcgattcgggcatggtgaagcacaaggacgacgaggctgctcctgcagatgccgctgctgcgtctggttctgccgctgcctcttagttgcaagacagttacagtatgtcttttctgttgttgctgacagtgacagttacagtatgatggttgtcaaggggattggaggattgaaaatccactcggttgtggactaataagagcaagcaatacatatactctagttgtc

SEQ ID NO: 67620 - protein, 198 aa, Triticum aestivum
  peptide (1)..(198): Ceres Seq. ID no. 12622130
  misc_feature (19)..(161): Homolog of NCBI NO: 34880929 NR Description: similar to RIKEN cDNA 1110021H02; EST AA062310
  misc_feature (19)..(179): Homolog of NCBI NO: 39590862 NR Description: Hypothetical protein CBG10119 [Caenorhabditis
  misc_feature (19)..(180): Homolog of NCBI NO: 19922352 NR Description: CG8386-PA [Drosophila melanogaster]
  misc_feature (19)..(180): Homolog of NCBI NO: 13528771 NR Description: Similar to hypothetical protein [Homo sapiens]
  misc_feature (19)..(180): Homolog of NCBI NO: 13384768 NR Description: RIKEN cDNA 1110021H02; EST AA062310 [Mus
  misc_feature (19)..(180): Homolog of NCBI NO: 7705481 NR Description: hypothetical protein HSPC155 [Homo sapiens]
  misc_feature (19)..(180): Homolog of NCBI NO: 6831734 NR Description: Protein CGI-126 (Protein HSPC155)
  misc_feature (15)..(188): Homolog of NCBI NO: 24899705 NR Description: Similar to CGI-126 protein [Arabidopsis thaliana]
  misc_feature (15)..(188): Homolog of NCBI NO: 18396376 NR Description: expressed protein
  misc_feature (15)..(198): Homolog of NCBI NO: 37532272 NR Description: unknown protein [Oryza sativa (japonica
RGNQSRRRGGASSAMEGWDKGTKSVVGEIPLLSTRAGPRDGDPWRQRLKEEYRAFIAYTSVNKAKDNDWFSISAANPEGTRWEGTCWYVHNLRRYEFPLQLDIPVAYPQVAPEIELPTLDGKTHKMYRGGKICLTVHFKPLWAKNCPRFGLAHALCLGLAPWLAAEVPILVDSGMVKHKDDEAAPADAAAASGSAAAS

SEQ ID NO: 67621 - protein, 184 aa, Triticum aestivum
  peptide (1)..(184): Ceres Seq. ID no. 12622131
  misc_feature (5)..(147): Homolog of NCBI NO: 34880929 NR Description: similar to RIKEN cDNA 1110021H02; EST AA062310
  misc_feature (5)..(165): Homolog of NCBI NO: 39590862 NR Description: Hypothetical protein CBG10119 [Caenorhabditis
  misc_feature (5)..(166): Homolog of NCBI NO: 19922352 NR Description: CG8386-PA [Drosophila melanogaster]
  misc_feature (5)..(166): Homolog of NCBI NO: 13528771 NR Description: Similar to hypothetical protein [Homo sapiens]
  misc_feature (5)..(166): Homolog of NCBI NO: 13384768 NR Description: RIKEN cDNA 1110021H02; EST AA062310 [Mus
  misc_feature (5)..(166): Homolog of NCBI NO: 7705481 NR Description: hypothetical protein HSPC155 [Homo sapiens]
  misc_feature (5)..(166): Homolog of NCBI NO: 6831734 NR Description: Protein CGI-126 (Protein HSPC155)
  misc_feature (1)..(174): Homolog of NCBI NO: 24899705 NR Description: Similar to CGI-126 protein [Arabidopsis thaliana]
  misc_feature (1)..(174): Homolog of NCBI NO: 18396376 NR Description: expressed protein
  misc_feature (1)..(184): Homolog of NCBI NO: 37532272 NR Description: unknown protein [Oryza sativa (japonica
MEGWDKGTKSVVGEIPLLSTRAGPRDGDPWRQRLKEEYRAFIAYTSVNKAKDNDWFSISAANPEGTRWEGTCWYVHNLRRYEFPLQLDIPVAYPQVAPEIELPTLDGKTHKMYRGGKICLTVHFKPLWAKNCPRFGLAHALCLGLAPWLAAEVPILVDSGMVKHKDDEAAPADAAAASGSAAAS

SEQ ID NO: 67622 - protein, 100 aa, Triticum aestivum
  peptide (1)..(100): Ceres Seq. ID no. 12622132
  misc_feature (17)..(100): Pfam Name: Cupin Pfam Description: Cupin
  misc_feature (33)..(100): Homolog of NCBI NO: 29250754 NR Description: GLP_49_64409_65443 [Giardia lamblia ATCC 50803]
  misc_feature (33)..(100): Homolog of NCBI NO: 29250754 NR Description: GLP_49_64409_65443 [Giardia lamblia ATCC 50803]
  misc_feature (12)..(100): Homolog of NCBI NO: 38175466 NR Description: putative high-affinity potassium transporter
EEINQEGEEEHRRRWRGGTRARRAWWARSRCCRRGRAPGTAIRGGSGSRRSTAPSSPTPPSTRPRTMTGSASPPPTRRAPAGRVPAGTSTTSAVTSSPSS

SEQ ID NO: 67623 - DNA, 915 bp, Triticum aestivum
  misc_feature (1)..(915): Ceres Seq. ID no. 15225803
ccatccattccggttccacctcctccgctcgtctcctactctcccgccatggccaccgcagcgcgcgccgtcgccgccgccgcgcgcccggcgcggccggtgctccagccgcggcgcctcccgtgcccatccgctcgccccgcgcggcctcgcgtcggccgcgccgtccgctgcatggcgcggcggcccgacgcctcgtactcgccgctgcggccggggcagggcggggaccgcgcgcccacggagatggcgccgctgttccccggctgcgactacgagcactggctcatcgtcatggacaagcccggcggcgagggcgccaccaagcaccagatgatcgactgctacatccagaccctcgccaaggtcgtgggcagcgaggaggagtcgaagaagaggatctacaacgtgtcctgtgagcgctactttgggtttgggtgcgagattgacgaggaaacgtccaacaagctggaaggcctcccgggtgttctttttgtgcttccggattcctatgttgatgctgagaacaaggactatggtgccgagttatttgtgaacggagagatcgtccaacgatcaccggaaaggcagagaagggtggagccggtgcctcagagagctcaagatagaccgcgttacagcgaccggactcgctatgtgaagaggagggagaaccaggcctaccaacggtgacatgtccccgtcggtgtaccgcacaagtggcccactgctatcgctccttgccctagatatagcaactgctccacgcccgaaatgcccctcgtcgtctttgctgcattgtagcctcgccatatctgggcgtttttttcttcacgaactgtaggttaaggactgcatgtactactgtgagtgacttgttccgttgttttggtaacggtatcttggtttgcggcg

SEQ ID NO: 67624 - protein, 230 aa, Triticum aestivum
  peptide (1)..(230): Ceres Seq. ID no. 15225804
  misc_feature (40)..(230): Homolog of NCBI NO: 6014904 NR Description: DAG PROTEIN, CHLOROPLAST PRECURSOR
  misc_feature (16)..(230): Homolog of NCBI NO: 38636775 NR Description: putative DAG protein [Oryza sativa (japonica
  misc_feature (47)..(225): Homolog of NCBI NO: 15226934 NR Description: expressed protein [Arabidopsis thaliana]
  misc_feature (56)..(225): Homolog of NCBI NO: 15223247 NR Description: plastid protein -related [Arabidopsis thaliana]
  misc_feature (34)..(225): Homolog of NCBI NO: 21617909 NR Description: plastid protein [Arabidopsis thaliana]
  misc_feature (35)..(225): Homolog of NCBI NO: 25370552 NR Description: DAG protein homolog [imported] - Arabidopsis
  misc_feature (34)..(225): Homolog of NCBI NO: 15226108 NR Description: plastid protein [Arabidopsis thaliana]
  misc_feature (34)..(225): Homolog of NCBI NO: 2440029 NR Description: DAL1 protein [Arabidopsis thaliana]
  misc_feature (37)..(226): Homolog of NCBI NO: 34897972 NR Description: putative plastid protein [Oryza sativa (japonica
  misc_feature (18)..(230): Homolog of NCBI NO: 38344141 NR Description: OSJNBa0041A02.8 [Oryza sativa (japonica
PSIPVPPPPLVSYSPAMATAARAVAAAARPARPVLQPRRLPCPSARPARPRVGRAVRCMARRPDASYSPLRPGQGGDRAPTEMAPLFPGCDYEHWLIVMDKPGGEGATKHQMIDCYIQTLAKVVGSEEESKKRIYNVSCERYFGFGCEIDEETSNKLEGLPGVLFVLPDSYVDAENKDYGAELFVNGEIVQRSPERQRRVEPVPQRAQDRPRYSDRTRYVKRRENQAYQR

SEQ ID NO: 67625 - protein, 214 aa, Triticum aestivum
  peptide (1)..(214): Ceres Seq. ID no. 15225805
  misc_feature (24)..(214): Homolog of NCBI NO: 6014904 NR Description: DAG PROTEIN, CHLOROPLAST PRECURSOR
  misc_feature (1)..(214): Homolog of NCBI NO: 38636775 NR Description: putative DAG protein [Oryza sativa (japonica
  misc_feature (31)..(209): Homolog of NCBI NO: 15226934 NR Description: expressed protein [Arabidopsis thaliana]
  misc_feature (40)..(209): Homolog of NCBI NO: 15223247 NR Description: plastid protein -related [Arabidopsis thaliana]
  misc_feature (18)..(209): Homolog of NCBI NO: 21617909 NR Description: plastid protein [Arabidopsis thaliana]
  misc_feature (19)..(209): Homolog of NCBI NO: 25370552 NR Description: DAG protein homolog [imported] - Arabidopsis
  misc_feature (18)..(209): Homolog of NCBI NO: 15226108 NR Description: plastid protein [Arabidopsis thaliana]
  misc_feature (18)..(209): Homolog of NCBI NO: 2440029 NR Description: DAL1 protein [Arabidopsis thaliana]
  misc_feature (21)..(210): Homolog of NCBI NO: 34897972 NR Description: putative plastid protein [Oryza sativa (japonica
  misc_feature (2)..(214): Homolog of NCBI NO: 38344141 NR Description: OSJNBa0041A02.8 [Oryza sativa (japonica
MATAARAVAAAARPARPVLQPRRLPCPSARPARPRVGRAVRCMARRPDASYSPLRPGQGGDRAPTEMAPLFPGCDYEHWLIVMDKPGGEGATKHQMIDCYIQTLAKVVGSEEESKKRIYNVSCERYFGFGCEIDEETSNKLEGLPGVLFVLPDSYVDAENKDYGAELFVNGEIVQRSPERQRRVEPVPQRAQDRPRYSDRTRYVKRRENQAYQR

SEQ ID NO: 67626 - protein, 172 aa, Triticum aestivum
  peptide (1)..(172): Ceres Seq. ID no. 15225806
  misc_feature (1)..(172): Homolog of NCBI NO: 6014904 NR Description: DAG PROTEIN, CHLOROPLAST PRECURSOR
  misc_feature (1)..(172): Homolog of NCBI NO: 38636775 NR Description: putative DAG protein [Oryza sativa (japonica
  misc_feature (1)..(167): Homolog of NCBI NO: 15226934 NR Description: expressed protein [Arabidopsis thaliana]
  misc_feature (1)..(167): Homolog of NCBI NO: 15223247 NR Description: plastid protein -related [Arabidopsis thaliana]
  misc_feature (1)..(167): Homolog of NCBI NO: 21617909 NR Description: plastid protein [Arabidopsis thaliana]
  misc_feature (1)..(167): Homolog of NCBI NO: 25370552 NR Description: DAG protein homolog [imported] - Arabidopsis
  misc_feature (1)..(167): Homolog of NCBI NO: 15226108 NR Description: plastid protein [Arabidopsis thaliana]
  misc_feature (1)..(167): Homolog of NCBI NO: 2440029 NR Description: DAL1 protein [Arabidopsis thaliana]
  misc_feature (1)..(168): Homolog of NCBI NO: 34897972 NR Description: putative plastid protein [Oryza sativa (japonica
  misc_feature (1)..(172): Homolog of NCBI NO: 38344141 NR Description: OSJNBa0041A02.8 [Oryza sativa (japonica
MARRPDASYSPLRPGQGGDRAPTEMAPLFPGCDYEHWLIVMDKPGGEGATKHQMIDCYIQTLAKVVGSEEESKKRIYNVSCERYFGFGCEIDEETSNKLEGLPGVLFVLPDSYVDAENKDYGAELFVNGEIVQRSPERQRRVEPVPQRAQDRPRYSDRTRYVKRRENQAYQR

SEQ ID NO: 67627 - DNA, 1476 bp, Triticum aestivum
  misc_feature (1)..(1476): Ceres Seq. ID no. 15176114
aacccaggtcgcgcacaaatccgccgcgcacgcacacaacctccatctcttcccccccccccccccccctcctctccctcccgcagaaccctagctctccacaagcctcttcgtcggcgatggcggcggctgagaacgccggggacgtggcggcgggggagagccgcaagctgttcgtgggtggcatcccgtcctcagcgcaggagacggagctgcggggccactttgcccgcttcggtgcggtgcgctcaatcgtcgtgatgcgggacaaggagtcgggccacggccgcgggttcgggttcgtcgagttcgaggacgaagaagcggccgccaaggcgctcggtgacggggagaggcccaagcacttcatctgcggccgactggtcgacgttaagagggcgcgtgctagacctccgcggaacttgggcgagcaacctgtgcatcagcatcagcatcagcatcagctggaacagggtccggttcagggtcaccaagacgctggggacagtaccggggccagtagtgacagtatgagctatgcttcaaagaaggtattcattggtggtttgcgtgacaacatcacagaggaggagttcagagcttactttgaggcgtttggcactgtaacagatgttgttgtgatatacgacagcctgacaagcaggtcaaggggttttggttttgtcacctttgattctgaggaagctgtgagaaaggtgatgaggcaaagctttcatgacttgaaagggacaagggtggaagcaaagatcgctatccccaaggatgctcagtattaccgtaatggccgaggtcgtggctcaagaacctttggtggaaggggtcctgttggctttgatggttcaacataccaaccgtacaataaccgacatggtttctacaatggctatatgccacaacctgttcccacacatccctactatcatggcctctattttggtatgggaggcaatccctatgcaaatgcatatccaaaccatgcagtcatggcaaatgttccaaacatggtggcaaggcgtccagtatatagcccatatcccccaatgtatcctggctatggttttgcatacagaagtggttatgcgggtgctgcgccttctgttccgtatggcgttaatggtggcagggattacatgaatgaccaagactctatggatgtacaagaacttgacagcgctgctaccattgctacaaagtttgaatacatgaagctaggttcacaatgacgttctgcagggcaaatatttctacactgatgacagcgggaagtcgcaactgtgaagacatgagctgagattctttggttgacaagtacatcattggaaattatcaacttacccccattccttgtttcaactgcatgtagactgaaaacattcaagtttcaactggctgttgagctcacatgccttgtaccaatgcttaaatccttttaatgtatcagaatcagaacatttg

SEQ ID NO: 67628 - protein, 413 aa, Triticum aestivum
  peptide (1)..(413): Ceres Seq. ID no. 15176115
  misc_feature (184)..(253): Pfam Name: RNA recognition motif. (a.k.a. RRM, RBD, or RNP domain) Pfam Description: RNA recognition motif. (a.k.a. RRM, RBD, or RNP
  misc_feature (56)..(350): Homolog of NCBI NO: 25456498 NR Description: RNA binding protein [imported] - Arabidopsis
  misc_feature (56)..(350): Homolog of NCBI NO: 15217975 NR Description: RNA-binding protein [Arabidopsis thaliana]
  misc_feature (53)..(136): Homolog of NCBI NO: 40539059 NR Description: putative RNA binding protein
  misc_feature (163)..(264): Homolog of NCBI NO: 40539059 NR Description: putative RNA binding protein
  misc_feature (56)..(136): Homolog of NCBI NO: 15226106 NR Description: heterogeneous nuclear ribonucleoprotein (hnRNP),
  misc_feature (156)..(376): Homolog of NCBI NO: 15226106 NR Description: heterogeneous nuclear ribonucleoprotein (hnRNP),
  misc_feature (56)..(136): Homolog of NCBI NO: 22328624 NR Description: heterogeneous nuclear ribonucleoprotein (hnRNP),
  misc_feature (156)..(389): Homolog of NCBI NO: 22328624 NR Description: heterogeneous nuclear ribonucleoprotein (hnRNP),
  misc_feature (56)..(381): Homolog of NCBI NO: 37535274 NR Description: putative RNA-binding protein
  misc_feature (37)..(413): Homolog of NCBI NO: 28201305 NR Description: putative RNA binding protein
PRSRTNPPRTHTTSISSPPPPPLLSLPQNPSSPQASSSAMAAAENAGDVAAGESRKLFVGGIPSSAQETELRGHFARFGAVRSIVVMRDKESGHGRGFGFVEFEDEEAAAKALGDGERPKHFICGRLVDVKRARARPPRNLGEQPVHQHQHQHQLEQGPVQGHQDAGDSTGASSDSMSYASKKVFIGGLRDNITEEEFRAYFEAFGTVTDVVVIYDSLTSRSRGFGFVTFDSEEAVRKVMRQSFHDLKGTRVEAKIAIPKDAQYYRNGRGRGSRTFGGRGPVGFDGSTYQPYNNRHGFYNGYMPQPVPTHPYYHGLYFGMGGNPYANAYPNHAVMANVPNMVARRPVYSPYPPMYPGYGFAYRSGYAGAAPSVPYGVNGGRDYMNDQDSMDVQELDSAATIATKFEYMKLGSQ

SEQ ID NO: 67629 - protein, 374 aa, Triticum aestivum
  peptide (1)..(374): Ceres Seq. ID no. 15176116
  misc_feature (145)..(214): Pfam Name: RNA recognition motif. (a.k.a. RRM, RBD, or RNP domain) Pfam Description: RNA recognition motif. (a.k.a. RRM, RBD, or RNP
  misc_feature (17)..(311): Homolog of NCBI NO: 25456498 NR Description: RNA binding protein [imported] - Arabidopsis
  misc_feature (17)..(311): Homolog of NCBI NO: 15217975 NR Description: RNA-binding protein [Arabidopsis thaliana]
  misc_feature (14)..(97): Homolog of NCBI NO: 40539059 NR Description: putative RNA binding protein
  misc_feature (124)..(225): Homolog of NCBI NO: 40539059 NR Description: putative RNA binding protein
  misc_feature (17)..(97): Homolog of NCBI NO: 15226106 NR Description: heterogeneous nuclear ribonucleoprotein (hnRNP),
  misc_feature (117)..(337): Homolog of NCBI NO: 15226106 NR Description: heterogeneous nuclear ribonucleoprotein (hnRNP),
  misc_feature (17)..(97): Homolog of NCBI NO: 22328624 NR Description: heterogeneous nuclear ribonucleoprotein (hnRNP),
  misc_feature (117)..(350): Homolog of NCBI NO: 22328624 NR Description: heterogeneous nuclear ribonucleoprotein (hnRNP),
  misc_feature (17)..(342): Homolog of NCBI NO: 37535274 NR Description: putative RNA-binding protein
  misc_feature (1)..(374): Homolog of NCBI NO: 28201305 NR Description: putative RNA binding protein
MAAAENAGDVAAGESRKLFVGGIPSSAQETELRGHFARFGAVRSIVVMRDKESGHGRGFGFVEFEDEEAAAKALGDGERPKHFICGRLVDVKRARARPPRNLGEQPVHQHQHQHQLEQGPVQGHQDAGDSTGASSDSMSYASKKVFIGGLRDNITEEEFRAYFEAFGTVTDVVVIYDSLTSRSRGFGFVTFDSEEAVRKVMRQSFHDLKGTRVEAKIAIPKDAQYYRNGRGRGSRTFGGRGPVGFDGSTYQPYNNRHGFYNGYMPQPVPTHPYYHGLYFGMGGNPYANAYPNHAVMANVPNMVARRPVYSPYPPMYPGYGFAYRSGYAGAAPSVPYGVNGGRDYMNDQDSMDVQELDSAATIATKFEYMKLGSQ

SEQ ID NO: 67630 - protein, 327 aa, Triticum aestivum
  peptide (1)..(327): Ceres Seq. ID no. 15176117
  misc_feature (98)..(167): Pfam Name: RNA recognition motif. (a.k.a. RRM, RBD, or RNP domain) Pfam Description: RNA recognition motif. (a.k.a. RRM, RBD, or RNP
  misc_feature (1)..(264): Homolog of NCBI NO: 25456498 NR Description: RNA binding protein [imported] - Arabidopsis
  misc_feature (1)..(264): Homolog of NCBI NO: 15217975 NR Description: RNA-binding protein [Arabidopsis thaliana]
  misc_feature (1)..(50): Homolog of NCBI NO: 40539059 NR Description: putative RNA binding protein
  misc_feature (77)..(178): Homolog of NCBI NO: 40539059 NR Description: putative RNA binding protein
  misc_feature (1)..(50): Homolog of NCBI NO: 15226106 NR Description: heterogeneous nuclear ribonucleoprotein (hnRNP),
  misc_feature (70)..(290): Homolog of NCBI NO: 15226106 NR Description: heterogeneous nuclear ribonucleoprotein (hnRNP),
  misc_feature (1)..(50): Homolog of NCBI NO: 22328624 NR Description: heterogeneous nuclear ribonucleoprotein (hnRNP),
  misc_feature (70)..(303): Homolog of NCBI NO: 22328624 NR Description: heterogeneous nuclear ribonucleoprotein (hnRNP),
  misc_feature (1)..(295): Homolog of NCBI NO: 37535274 NR Description: putative RNA-binding protein
  misc_feature (1)..(327): Homolog of NCBI NO: 28201305 NR Description: putative RNA binding protein
MRDKESGHGRGFGFVEFEDEEAAAKALGDGERPKHFICGRLVDVKRARARPPRNLGEQPVHQHQHQHQLEQGPVQGHQDAGDSTGASSDSMSYASKKVFIGGLRDNITEEEFRAYFEAFGTVTDVVVIYDSLTSRSRGFGFVTFDSEEAVRKVMRQSFHDLKGTRVEAKIAIPKDAQYYRNGRGRGSRTFGGRGPVGFDGSTYQPYNNRHGFYNGYMPQPVPTHPYYHGLYFGMGGNPYANAYPNHAVMANVPNMVARRPVYSPYPPMYPGYGFAYRSGYAGAAPSVPYGVNGGRDYMNDQDSMDVQELDSAATIATKFEYMKLGSQ

SEQ ID NO: 67631 - DNA, 1603 bp, Triticum aestivum
  misc_feature (1)..(1603): Ceres Seq. ID no. 13663832
ctagaacatcctaatcgaaaaatcaaatctttacacgttatcagccatgctagcctcgaccaacagagcacgaacaagaagagacgagaaggtgagatggcagggatgaacctgcatagaatcgccactgcccttgttcgattcatttgacgggagatccgtcgatctgccagacgccacagtgctggtgttcctcgccattggggcccaggcaacggccgccgtggtcgtcgtggtcgtcaggatcaccctggccccgccgccgcagagcaggcaggaccaagcaacccatctgccgccgtccaccacgcctaccaggcacccccgatgccggccttcgtcgctccgcaaatggactgggctcccgccgatgcagcagccctgttcctgggagaggaggacttcttcgacgccgctcaggccccgccaccgcccgggatcttctccggcaacggcatggacgtaggcgtggccttctgtctggtgcacggatacgccccttgccctgcccgcgatttctgccccgtgcacgggtacgggccgtgccctccaccgccggccactccaccaccagaaccggaggtcatcgacgagccgctcgcctacccggacctcccaatgccgacgcccgccgacgaagacgaggagcacttcgcccctccaggctatggccctgtgcccgccatgatggagtgggaggtgacgccgaacgaagaggaggagcagtggctcaactccgttgtgaagcaggagccaaccacgccggcggagaccaaagaacccggcgccaccatccccgacctcaacactgccacctgcgtgaagatcgaggaagcggcgtcgtcttccaaggccccagcatctccgccgcctccgcccccggcaagcccgctaacgcctccaccggcggctccccggatcctttgcccgtttcgcggcggcgctggagcagcaccgccccggcctccgctccggctcctgggcccctgcaggcctccacctccccggctacgccgcggggggaccctcctcctcctgaagatcgccggcgctgggcgccatcggcggcggccggcgggatcccgtggaggtggcggtggaaagggggggakkkmmycsaavcgccncccchccwtcccagtcccccttatccgctcgatgtctccatcagtggcgccgccatgggcctgggccgaaaggcctcgtgggctgtggcccatgttgcaacgactaggaaaaaaatacccaacgggttataggctagattgcagaaaaatccttttattatcgggatttcgtgcattagtccaactactagcactaatttagtgcttgtcatgttttagccccgtaaatttgggaattcgcagatacgttcaactactagtgctgtaattaagtattgtcatgttttagaccttgtatctcgatgtggttatatattgtactcgattaaattgtgtattgatgtttagaccatattatttctwhtdkdnnnaaaaaaaaaaaaaaaaaaaaaaaaaaaaaaaaaaaaaaaaaaataaaaaaaaaaaaaaaaargtttatcgataccgycaacctcaagggggggcccggwacccaa

SEQ ID NO: 67632 - protein, 333 aa, Triticum aestivum
  peptide (1)..(333): Ceres Seq. ID no. 15220254
  misc_feature (1)..(317): Pfam Name: Formin Homology 2 Domain Pfam Description: Formin Homology 2 Domain
  misc_feature (76)..(253): Homolog of NCBI NO: 23577835 NR Description: ORF1629 [Rachiplusia ou multiple
  misc_feature (58)..(226): Homolog of NCBI NO: 11994732 NR Description: contains similarity to cell wall-plasma membrane
  misc_feature (77)..(253): Homolog of NCBI NO: 9627751 NR Description: viral capsid associated protein
  misc_feature (77)..(253): Homolog of NCBI NO: 93052 NR Description: 61K protein - Autographa californica nuclear
  misc_feature (74)..(226): Homolog of NCBI NO: 15219860 NR Description: proline-rich protein family [Arabidopsis
  misc_feature (1)..(285): Homolog of NCBI NO: 15240851 NR Description: expressed protein [Arabidopsis thaliana]
  misc_feature (1)..(228): Homolog of NCBI NO: 5305335 NR Description: proline-rich mucin homolog [Mycobacterium
  misc_feature (1)..(226): Homolog of NCBI NO: 20138131 NR Description: Vegetative cell wall protein gp1 precursor
  misc_feature (1)..(226): Homolog of NCBI NO: 40741074 NR Description: hypothetical protein AN8715.2 [Aspergillus
  misc_feature (1)..(317): Homolog of NCBI NO: 15222464 NR Description: formin homology 2 (FH2) domain-containing protein
  misc_feature (262)..(262): Xaa is any aa, unknown or other
  misc_feature (263)..(263): Xaa is any aa, unknown or other
  misc_feature (264)..(264): Xaa is any aa, unknown or other
  misc_feature (265)..(265): Xaa is any aa, unknown or other
  misc_feature (267)..(267): Xaa is any aa, unknown or other
  misc_feature (269)..(269): Xaa is any aa, unknown or other
  misc_feature (270)..(270): Xaa is any aa, unknown or other
MPAFVAPQMDWAPADAAALFLGEEDFFDAAQAPPPPGIFSGNGMDVGVAFCLVHGYAPCPARDFCPVHGYGPCPPPPATPPPEPEVIDEPLAYPDLPMPTPADEDEEHFAPPGYGPVPAMMEWEVTPNEEEEQWLNSVVKQEPTTPAETKEPGATIPDLNTATCVKIEEAASSSKAPASPPPPPPASPLTPPPAAPRILCPFRGGAGAAPPRPPLRLLGPCRPPPPRLRRGGTLLLLKIAGAGRHRRRPAGSRGGGGGKGGXXXXRXPXXPVPLIRSMSPSVAPPWAWAERPRGLWPMLQRLGKKYPTGYRLDCRKILLLSGFRALVQLLALI

SEQ ID NO: 67633 - protein, 325 aa, Triticum aestivum
  peptide (1)..(325): Ceres Seq. ID no. 15220255
  misc_feature (1)..(309): Pfam Name: Formin Homology 2 Domain Pfam Description: Formin Homology 2 Domain
  misc_feature (68)..(245): Homolog of NCBI NO: 23577835 NR Description: ORF1629 [Rachiplusia ou multiple
  misc_feature (50)..(218): Homolog of NCBI NO: 11994732 NR Description: contains similarity to cell wall-plasma membrane
  misc_feature (69)..(245): Homolog of NCBI NO: 9627751 NR Description: viral capsid associated protein
  misc_feature (69)..(245): Homolog of NCBI NO: 93052 NR Description: 61K protein - Autographa californica nuclear
  misc_feature (66)..(218): Homolog of NCBI NO: 15219860 NR Description: proline-rich protein family [Arabidopsis
  misc_feature (1)..(277): Homolog of NCBI NO: 15240851 NR Description: expressed protein [Arabidopsis thaliana]
  misc_feature (1)..(220): Homolog of NCBI NO: 5305335 NR Description: proline-rich mucin homolog [Mycobacterium
  misc_feature (1)..(218): Homolog of NCBI NO: 20138131 NR Description: Vegetative cell wall protein gp1 precursor
  misc_feature (1)..(218): Homolog of NCBI NO: 40741074 NR Description: hypothetical protein AN8715.2 [Aspergillus
  misc_feature (1)..(309): Homolog of NCBI NO: 15222464 NR Description: formin homology 2 (FH2) domain-containing protein
  misc_feature (254)..(254): Xaa is any aa, unknown or other
  misc_feature (255)..(255): Xaa is any aa, unknown or other
  misc_feature (256)..(256): Xaa is any aa, unknown or other
  misc_feature (257)..(257): Xaa is any aa, unknown or other
  misc_feature (259)..(259): Xaa is any aa, unknown or other
  misc_feature (261)..(261): Xaa is any aa, unknown or other
  misc_feature (262)..(262): Xaa is any aa, unknown or other
MDWAPADAAALFLGEEDFFDAAQAPPPPGIFSGNGMDVGVAFCLVHGYAPCPARDFCPVHGYGPCPPPPATPPPEPEVIDEPLAYPDLPMPTPADEDEEHFAPPGYGPVPAMMEWEVTPNEEEEQWLNSVVKQEPTTPAETKEPGATIPDLNTATCVKIEEAASSSKAPASPPPPPPASPLTPPPAAPRILCPFRGGAGAAPPRPPLRLLGPCRPPPPRLRRGGTLLLLKIAGAGRHRRRPAGSRGGGGGKGGXXXXRXPXXPVPLIRSMSPSVAPPWAWAERPRGLWPMLQRLGKKYPTGYRLDCRKILLLSGFRALVQLLALI

SEQ ID NO: 67634 - protein, 290 aa, Triticum aestivum
  peptide (1)..(290): Ceres Seq. ID no. 15220256
  misc_feature (1)..(274): Pfam Name: Formin Homology 2 Domain Pfam Description: Formin Homology 2 Domain
  misc_feature (33)..(210): Homolog of NCBI NO: 23577835 NR Description: ORF1629 [Rachiplusia ou multiple
  misc_feature (15)..(183): Homolog of NCBI NO: 11994732 NR Description: contains similarity to cell wall-plasma membrane
  misc_feature (34)..(210): Homolog of NCBI NO: 9627751 NR Description: viral capsid associated protein
  misc_feature (34)..(210): Homolog of NCBI NO: 93052 NR Description: 61K protein - Autographa californica nuclear
  misc_feature (31)..(183): Homolog of NCBI NO: 15219860 NR Description: proline-rich protein family [Arabidopsis
  misc_feature (1)..(242): Homolog of NCBI NO: 15240851 NR Description: expressed protein [Arabidopsis thaliana]
  misc_feature (1)..(185): Homolog of NCBI NO: 5305335 NR Description: proline-rich mucin homolog [Mycobacterium
  misc_feature (1)..(183): Homolog of NCBI NO: 20138131 NR Description: Vegetative cell wall protein gp1 precursor
  misc_feature (1)..(183): Homolog of NCBI NO: 40741074 NR Description: hypothetical protein AN8715.2 [Aspergillus
  misc_feature (1)..(274): Homolog of NCBI NO: 15222464 NR Description: formin homology 2 (FH2) domain-containing protein
  misc_feature (219)..(219): Xaa is any aa, unknown or other
  misc_feature (220)..(220): Xaa is any aa, unknown or other
  misc_feature (221)..(221): Xaa is any aa, unknown or other
  misc_feature (222)..(222): Xaa is any aa, unknown or other
  misc_feature (224)..(224): Xaa is any aa, unknown or other
  misc_feature (226)..(226): Xaa is any aa, unknown or other
  misc_feature (227)..(227): Xaa is any aa, unknown or other
MDVGVAFCLVHGYAPCPARDFCPVHGYGPCPPPPATPPPEPEVIDEPLAYPDLPMPTPADEDEEHFAPPGYGPVPAMMEWEVTPNEEEEQWLNSVVKQEPTTPAETKEPGATIPDLNTATCVKIEEAASSSKAPASPPPPPPASPLTPPPAAPRILCPFRGGAGAAPPRPPLRLLGPCRPPPPRLRRGGTLLLLKIAGAGRHRRRPAGSRGGGGGKGGXXXXRXPXXPVPLIRSMSPSVAPPWAWAERPRGLWPMLQRLGKKYPTGYRLDCRKILLLSGFRALVQLLALI

SEQ ID NO: 67635 - DNA, 1128 bp, Triticum aestivum
  misc_feature (1)..(1128): Ceres Seq. ID no. 13660155
atccactactcacctagtcacctgcgttgtgtgtgtgcagctggtgctctgtcttccactcttccgttcatcgtctaggcgctgtccaacctgtcaagatggaatcctacgccaacggagccaaatttgattgcttgctgtttgacatggatgacaccctctacccactgatcttaggaatcaacttagcctgccgcaacaacatccaagactacatgctgaacaagcttcagatcgaggagagcctggtccccaagatgtgcctggatctgtacaaagaatatggaactacgatggccggtctgaagcttatgggttacgaattcgactacgacgaattccacgccagcgtgcacggtaaattgccatacgagaagctgaagccggaccctgtcctgaggaacctgctgctttcgatgccacagaggaaaatcatattcaccaattctgacgaggcccacgcggcgaccgtcctggagaagatggggctggagggatgcttcgaggggatcatatgcttcgagaccctgaaccccaagaatccaggtgacacagacgctagctctggcaagagggtcctctgcaagccgtccctggagtccatggaagccgtggtggagatcgccaagctcgaccccaagaagacagtgttcttcgacgacagcccgcgcaacatcgcctcagggaaagcggcaggcttccataccgtcatcgtagggagctcggcgctcgtgcccggggcggacgtggcgctagagagcatccacaacatcagggaggcgctgccggagctgtgggaggcgggcggcgaccacgtcgaggccgccgtcgacatccggtccgccgccgtggccgagaccacggtgctcgcgtgagccgccggcgctgcctgccagatgattaatatgcttcgtccgccttgactatattaacacaaaaaaggcggaggcgaacgactgaatccaggaaaaacccgtatatgctatggtttactcgaccatgatccatggtgatcagtgatcactgatgaatgcgtaggtattaaatgtacaggtgtactacttgtgtactgatgtgatcgaaacaccgtaataataagcaccgtaaatcttaaagattcgctcattg

SEQ ID NO: 67636 - protein, 258 aa, Triticum aestivum
  peptide (1)..(258): Ceres Seq. ID no. 15220014
  misc_feature (10)..(209): Pfam Name: haloacid dehalogenase-like hydrolase Pfam Description: haloacid dehalogenase-like hydrolase
  misc_feature (8)..(152): Homolog of NCBI NO: 30697236 NR Description: haloacid dehalogenase-like hydrolase family
  misc_feature (27)..(252): Homolog of NCBI NO: 30695534 NR Description: haloacid dehalogenase-related hydrolase family
  misc_feature (148)..(254): Homolog of NCBI NO: 30697234 NR Description: haloacid dehalogenase-like hydrolase family
  misc_feature (8)..(152): Homolog of NCBI NO: 30697234 NR Description: haloacid dehalogenase-like hydrolase family
  misc_feature (160)..(258): Homolog of NCBI NO: 7406669 NR Description: putative ripening-related protein [Vitis vinifera]
  misc_feature (9)..(148): Homolog of NCBI NO: 7406669 NR Description: putative ripening-related protein [Vitis vinifera]
  misc_feature (7)..(252): Homolog of NCBI NO: 11279021 NR Description: hypothetical protein F21F14.210 - Arabidopsis
  misc_feature (151)..(258): Homolog of NCBI NO: 40714684 NR Description: expressed protein [Oryza sativa (japonica
  misc_feature (1)..(149): Homolog of NCBI NO: 40714684 NR Description: expressed protein [Oryza sativa (japonica
  misc_feature (1)..(251): Homolog of NCBI NO: 34913328 NR Description: contains ESTs
MESYANGAKFDCLLFDMDDTLYPLILGINLACRNNIQDYMLNKLQIEESLVPKMCLDLYKEYGTTMAGLKLMGYEFDYDEFHASVHGKLPYEKLKPDPVLRNLLLSMPQRKIIFTNSDEAHAATVLEKMGLEGCFEGIICFETLNPKNPGDTDASSGKRVLCKPSLESMEAVVEIAKLDPKKTVFFDDSPRNIASGKAAGFHTVIVGSSALVPGADVALESIHNIREALPELWEAGGDHVEAAVDIRSAAVAETTVLA

SEQ ID NO: 67637 - protein, 242 aa, Triticum aestivum
  peptide (1)..(242): Ceres Seq. ID no. 15220015
  misc_feature (1)..(193): Pfam Name: haloacid dehalogenase-like hydrolase Pfam Description: haloacid dehalogenase-like hydrolase
  misc_feature (1)..(136): Homolog of NCBI NO: 30697236 NR Description: haloacid dehalogenase-like hydrolase family
  misc_feature (11)..(236): Homolog of NCBI NO: 30695534 NR Description: haloacid dehalogenase-related hydrolase family
  misc_feature (132)..(238): Homolog of NCBI NO: 30697234 NR Description: haloacid dehalogenase-like hydrolase family
  misc_feature (1)..(136): Homolog of NCBI NO: 30697234 NR Description: haloacid dehalogenase-like hydrolase family
  misc_feature (144)..(242): Homolog of NCBI NO: 7406669 NR Description: putative ripening-related protein [Vitis vinifera]
  misc_feature (1)..(132): Homolog of NCBI NO: 7406669 NR Description: putative ripening-related protein [Vitis vinifera]
  misc_feature (1)..(236): Homolog of NCBI NO: 11279021 NR Description: hypothetical protein F21F14.210 - Arabidopsis
  misc_feature (135)..(242): Homolog of NCBI NO: 40714684 NR Description: expressed protein [Oryza sativa (japonica
  misc_feature (1)..(133): Homolog of NCBI NO: 40714684 NR Description: expressed protein [Oryza sativa (japonica
  misc_feature (1)..(235): Homolog of NCBI NO: 34913328 NR Description: contains ESTs
MDDTLYPLILGINLACRNNIQDYMLNKLQIEESLVPKMCLDLYKEYGTTMAGLKLMGYEFDYDEFHASVHGKLPYEKLKPDPVLRNLLLSMPQRKIIFTNSDEAHAATVLEKMGLEGCFEGIICFETLNPKNPGDTDASSGKRVLCKPSLESMEAVVEIAKLDPKKTVFFDDSPRNIASGKAAGFHTVIVGSSALVPGADVALESIHNIREALPELWEAGGDHVEAAVDIRSAAVAETTVLA

SEQ ID NO: 67638 - protein, 219 aa, Triticum aestivum
  peptide (1)..(219): Ceres Seq. ID no. 15220016
  misc_feature (1)..(170): Pfam Name: haloacid dehalogenase-like hydrolase Pfam Description: haloacid dehalogenase-like hydrolase
  misc_feature (1)..(113): Homolog of NCBI NO: 30697236 NR Description: haloacid dehalogenase-like hydrolase family
  misc_feature (1)..(213): Homolog of NCBI NO: 30695534 NR Description: haloacid dehalogenase-related hydrolase family
  misc_feature (109)..(215): Homolog of NCBI NO: 30697234 NR Description: haloacid dehalogenase-like hydrolase family
  misc_feature (1)..(113): Homolog of NCBI NO: 30697234 NR Description: haloacid dehalogenase-like hydrolase family
  misc_feature (121)..(219): Homolog of NCBI NO: 7406669 NR Description: putative ripening-related protein [Vitis vinifera]
  misc_feature (1)..(109): Homolog of NCBI NO: 7406669 NR Description: putative ripening-related protein [Vitis vinifera]
  misc_feature (1)..(213): Homolog of NCBI NO: 11279021 NR Description: hypothetical protein F21F14.210 - Arabidopsis
  misc_feature (112)..(219): Homolog of NCBI NO: 40714684 NR Description: expressed protein [Oryza sativa (japonica
  misc_feature (1)..(110): Homolog of NCBI NO: 40714684 NR Description: expressed protein [Oryza sativa (japonica
  misc_feature (1)..(212): Homolog of NCBI NO: 34913328 NR Description: contains ESTs
MLNKLQIEESLVPKMCLDLYKEYGTTMAGLKLMGYEFDYDEFHASVHGKLPYEKLKPDPVLRNLLLSMPQRKIIFTNSDEAHAATVLEKMGLEGCFEGIICFETLNPKNPGDTDASSGKRVLCKPSLESMEAVVEIAKLDPKKTVFFDDSPRNIASGKAAGFHTVIVGSSALVPGADVALESIHNIREALPELWEAGGDHVEAAVDIRSAAVAETTVLA

SEQ ID NO: 67639 - DNA, 1827 bp, Triticum aestivum
  misc_feature (1)..(1827): Ceres Seq. ID no. 15170107
gaccggttaaacacacttcgacgctgacgggtgggcctcacgtggcaggaacggaaacacaccgcgaagctttggctaatccaacccacagagacggcgcgcatggcgaccgcggcggcggcggcggtggcgtcgctccggtacttcccctcttccgtcaggaaccgcagctatcccggaactatcggcggcggcgctgtggtcacgttttctccgcggcggggccgctgtgcgacggcggccgtggccgcgccttcgcgggaggcggagccggcctcctcgctcggggacctcacccgcgtagacttccccatcctcgaccaggaatttgatggtaacaaattagtttacttcgacaatggtgcaacatcacagaaaccctctcatgtgatgaaagccttagacgactactaccgattttataattcgaatgttcaccgtggcattcatgctctcagcgcaaaggctactgatgcatatgagagtgcaagaaggaaagttgcaaatttcgtcaatgcggctgatagtagagagattatttttactcgtaatgctacagaagctatcaatttagtagcttattcatggggcctatctaacttaaaacaaggagatgagattattcttacagttgcagagcatcatagtgcgattgttccttggcaatttgtatcccaaaaaactggtgctgtcctaaagtatgttgggctgactaaagaagaggttccagacatggagcagttaaaagggcttctgtcaagcaagacaaagattgttgttgtccatcatgtttcaaacgtcctgggttcaatgcttcctattgaggaggtcgtatcatgtgcaaacaaagttggagctaaagttcttgtagatgcttgtcaaagtgttcctcatatgccagttgatgttcagaagcttggtgcagattttcttgttgcatcctcgcataagatgtgtggccctacaggcgtcggattcttgcatggaaaatttgagatcttgtcatctatggagcctttcttaggtggtggtgaaatgattgcagatgtgttcgaagacaaatctacatatgctgagccgccttctagatttgaggctggaactcctgcaattggagaagctataggattgggggttgcgatagattatctgtcacactttggcatgcagacgatccacgagtatgagaaagagttggggtcgtacctttatgagagccttctctccgttccaaatgttcgtatctatggtccagcgccttctgcaagtgatcaccgtgctcctttatgttctttcaatgttgagaatgttcatccaacagatattgccgaaattcttgatctccagcatggcatagcgattcggtcagggcatcattgtgcacagattttgcatcgcacccttggtatcaatgcgagcgcccgtgctagtcttcacttttacaacacaaaagaggaggtggatgccttcatccatgggctaaaagctaccattgatttccttacttcccaccactagttcagttcagttagcaaacattagcttcctcgttgtctctcactagttgaagtgcgatagaaggcctacctgctcaaactgtctgatgtctttcagctttttcgtgtaaaccatgcacgggcaagtttatctactccagtactcttgccctctggaagtttcgagataaagtactgtcggctatgtagcctgggcggctccgtttatttcctatatataaaccgtattatacctggaccgttggccagttcatctgtaatttacgatctgtcaataactccataacagtaagcatggtggatacttgtg

SEQ ID NO: 67640 - protein, 471 aa, Triticum aestivum
  peptide (1)..(471): Ceres Seq. ID no. 15170108
  misc_feature (92)..(456): Pfam Name: Aminotransferase class-V Pfam Description: Aminotransferase class-V
  misc_feature (49)..(457): Homolog of NCBI NO: 22989826 NR Description: hypothetical protein [Burkholderia fungorum]
  misc_feature (60)..(468): Homolog of NCBI NO: 16331747 NR Description: NifS protein [Synechocystis sp. PCC 6803]
  misc_feature (60)..(466): Homolog of NCBI NO: 23040580 NR Description: hypothetical protein [Trichodesmium erythraeum
  misc_feature (57)..(468): Homolog of NCBI NO: 22299611 NR Description: cysteine desulfurase [Thermosynechococcus
  misc_feature (61)..(469): Homolog of NCBI NO: 34765746 NR Description: SufS [Synechococcus sp. PCC 7002]
  misc_feature (350)..(469): Homolog of NCBI NO: 6664318 NR Description: T27G7.17 [Arabidopsis thaliana]
  misc_feature (23)..(362): Homolog of NCBI NO: 6664318 NR Description: T27G7.17 [Arabidopsis thaliana]
  misc_feature (57)..(466): Homolog of NCBI NO: 17229987 NR Description: probable aminotransferase [Nostoc sp. PCC 7120]
  misc_feature (57)..(466): Homolog of NCBI NO: 23129616 NR Description: hypothetical protein [Nostoc punctiforme]
  misc_feature (23)..(469): Homolog of NCBI NO: 22329419 NR Description: nitrogen fixation protein. putative  (NifS)
MATAAAAAVASLRYFPSSVRNRSYPGTIGGGAVVTFSPRRGRCATAAVAAPSREAEPASSLGDLTRVDFPILDQEFDGNKLVYFDNGATSQKPSHVMKALDDYYRFYNSNVHRGIHALSAKATDAYESARRKVANFVNAADSREIIFTRNATEAINLVAYSWGLSNLKQGDEIILTVAEHHSAIVPWQFVSQKTGAVLKYVGLTKEEVPDMEQLKGLLSSKTKIVVVHHVSNVLGSMLPIEEVVSCANKVGAKVLVDACQSVPHMPVDVQKLGADFLVASSHKMCGPTGVGFLHGKFEILSSMEPFLGGGEMIADVFEDKSTYAEPPSRFEAGTPAIGEAIGLGVAIDYLSHFGMQTIHEYEKELGSYLYESLLSVPNVRIYGPAPSASDHRAPLCSFNVENVHPTDIAEILDLQHGIAIRSGHHCAQILHRTLGINASARASLHFYNTKEEVDAFIHGLKATIDFLTSHH

SEQ ID NO: 67641 - protein, 375 aa, Triticum aestivum
  peptide (1)..(375): Ceres Seq. ID no. 15170109
  misc_feature (1)..(360): Pfam Name: Aminotransferase class-V Pfam Description: Aminotransferase class-V
  misc_feature (1)..(361): Homolog of NCBI NO: 22989826 NR Description: hypothetical protein [Burkholderia fungorum]
  misc_feature (1)..(372): Homolog of NCBI NO: 16331747 NR Description: NifS protein [Synechocystis sp. PCC 6803]
  misc_feature (1)..(370): Homolog of NCBI NO: 23040580 NR Description: hypothetical protein [Trichodesmium erythraeum
  misc_feature (1)..(372): Homolog of NCBI NO: 22299611 NR Description: cysteine desulfurase [Thermosynechococcus
  misc_feature (1)..(373): Homolog of NCBI NO: 34765746 NR Description: SufS [Synechococcus sp. PCC 7002]
  misc_feature (254)..(373): Homolog of NCBI NO: 6664318 NR Description: T27G7.17 [Arabidopsis thaliana]
  misc_feature (1)..(266): Homolog of NCBI NO: 6664318 NR Description: T27G7.17 [Arabidopsis thaliana]
  misc_feature (1)..(370): Homolog of NCBI NO: 17229987 NR Description: probable aminotransferase [Nostoc sp. PCC 7120]
  misc_feature (1)..(370): Homolog of NCBI NO: 23129616 NR Description: hypothetical protein [Nostoc punctiforme]
  misc_feature (1)..(373): Homolog of NCBI NO: 22329419 NR Description: nitrogen fixation protein. putative  (NifS)
MKALDDYYRFYNSNVHRGIHALSAKATDAYESARRKVANFVNAADSREIIFTRNATEAINLVAYSWGLSNLKQGDEIILTVAEHHSAIVPWQFVSQKTGAVLKYVGLTKEEVPDMEQLKGLLSSKTKIVVVHHVSNVLGSMLPIEEVVSCANKVGAKVLVDACQSVPHMPVDVQKLGADFLVASSHKMCGPTGVGFLHGKFEILSSMEPFLGGGEMIADVFEDKSTYAEPPSRFEAGTPAIGEAIGLGVAIDYLSHFGMQTIHEYEKELGSYLYESLLSVPNVRIYGPAPSASDHRAPLCSFNVENVHPTDIAEILDLQHGIAIRSGHHCAQILHRTLGINASARASLHFYNTKEEVDAFIHGLKATIDFLTSHH

SEQ ID NO: 67642 - protein, 261 aa, Triticum aestivum
  peptide (1)..(261): Ceres Seq. ID no. 15170110
  misc_feature (1)..(246): Pfam Name: Aminotransferase class-V Pfam Description: Aminotransferase class-V
  misc_feature (1)..(247): Homolog of NCBI NO: 22989826 NR Description: hypothetical protein [Burkholderia fungorum]
  misc_feature (1)..(258): Homolog of NCBI NO: 16331747 NR Description: NifS protein [Synechocystis sp. PCC 6803]
  misc_feature (1)..(256): Homolog of NCBI NO: 23040580 NR Description: hypothetical protein [Trichodesmium erythraeum
  misc_feature (1)..(258): Homolog of NCBI NO: 22299611 NR Description: cysteine desulfurase [Thermosynechococcus
  misc_feature (1)..(259): Homolog of NCBI NO: 34765746 NR Description: SufS [Synechococcus sp. PCC 7002]
  misc_feature (140)..(259): Homolog of NCBI NO: 6664318 NR Description: T27G7.17 [Arabidopsis thaliana]
  misc_feature (1)..(152): Homolog of NCBI NO: 6664318 NR Description: T27G7.17 [Arabidopsis thaliana]
  misc_feature (1)..(256): Homolog of NCBI NO: 17229987 NR Description: probable aminotransferase [Nostoc sp. PCC 7120]
  misc_feature (1)..(256): Homolog of NCBI NO: 23129616 NR Description: hypothetical protein [Nostoc punctiforme]
  misc_feature (1)..(259): Homolog of NCBI NO: 22329419 NR Description: nitrogen fixation protein. putative  (NifS)
MEQLKGLLSSKTKIVVVHHVSNVLGSMLPIEEVVSCANKVGAKVLVDACQSVPHMPVDVQKLGADFLVASSHKMCGPTGVGFLHGKFEILSSMEPFLGGGEMIADVFEDKSTYAEPPSRFEAGTPAIGEAIGLGVAIDYLSHFGMQTIHEYEKELGSYLYESLLSVPNVRIYGPAPSASDHRAPLCSFNVENVHPTDIAEILDLQHGIAIRSGHHCAQILHRTLGINASARASLHFYNTKEEVDAFIHGLKATIDFLTSHH

SEQ ID NO: 67643 - DNA, 913 bp, Triticum aestivum
  misc_feature (1)..(913): Ceres Seq. ID no. 15172974
ccattttccccattcgttgggagtcaggacgagggagggaagagcccctgacgatgtcggtgccggaggcggggcaatcggcggggagggacgagcaggagatggacaattacgagcagcaccagaccagagtgctcatggcgctgatgcagggcttgtgcgccgcgaggtaccgcaaggccgacaacaccccctgcctcgtcgaccagggcctctacctgggttctgttggagcagcactgaacaacgaggctctgaagagcttgaacatcacccacatcttggttgttgccagatcactgaatcccgcctttccagcagaatttacatacaagaagatcgaggtacttgacagcccagacactgatttgggaaagcatttcggtgaatgctttactttcatagatgagggtatctgcactggtggcaatgtgctggttcactgctttgcaggtcggtcacggagtgtcacagttgttcttgcatatcttatgaagaagcatcagatgagcctgcaaagtgccatgtcactagttagaagcaaacgacctcaaatagcacccaatgcgggctttatatcccagctggtgaactttgagaagtctctgcaagatgcatggatccatgggaggattccgtaaagagagacctgaaggggactggaatatcaccaaagaactagccatgtgcagggaagtgtggaagttagctatccacgtgcagggaagtgtggaagttagctagccacgtgccagaaccatggctaggttttgagatcttataggtttcaattctagcttaccccaacttgtttgggactgaaaggctttgttgttgtgcatggatccaagtattagatgtcattggtaccatgactcaattgtattaatcgtattcactaagttttcactcg

SEQ ID NO: 67644 - protein, 212 aa, Triticum aestivum
  peptide (1)..(212): Ceres Seq. ID no. 15172975
  misc_feature (64)..(201): Pfam Name: Dual specificity phosphatase, catalytic domain Pfam Description: Dual specificity phosphatase, catalytic domain
  misc_feature (67)..(200): Homolog of NCBI NO: 24643332 NR Description: CG14211-PB [Drosophila melanogaster]
  misc_feature (71)..(212): Homolog of NCBI NO: 12845353 NR Description: unnamed protein product [Mus musculus]
  misc_feature (71)..(212): Homolog of NCBI NO: 13277360 NR Description: dual specificity phosphatase 19 [Mus musculus]
  misc_feature (71)..(212): Homolog of NCBI NO: 21624338 NR Description: dual-specificity phosphatase SKRP1 [Mus musculus]
  misc_feature (71)..(200): Homolog of NCBI NO: 18254478 NR Description: dual specificity phosphatase 19
  misc_feature (67)..(203): Homolog of NCBI NO: 18397475 NR Description: dual-specificity protein phosphatase -related
  misc_feature (67)..(203): Homolog of NCBI NO: 30679726 NR Description: dual-specificity protein phosphatase -related
  misc_feature (34)..(203): Homolog of NCBI NO: 9294518 NR Description: dual-specificity protein phosphatase-like protein
  misc_feature (18)..(203): Homolog of NCBI NO: 15229482 NR Description: dual-specificity protein phosphatase [Arabidopsis
  misc_feature (18)..(203): Homolog of NCBI NO: 34905574 NR Description: hypothetical protein~similar to Arabidopsis
IFPIRWESGRGREEPLTMSVPEAGQSAGRDEQEMDNYEQHQTRVLMALMQGLCAARYRKADNTPCLVDQGLYLGSVGAALNNEALKSLNITHILVVARSLNPAFPAEFTYKKIEVLDSPDTDLGKHFGECFTFIDEGICTGGNVLVHCFAGRSRSVTVVLAYLMKKHQMSLQSAMSLVRSKRPQIAPNAGFISQLVNFEKSLQDAWIHGRIP

SEQ ID NO: 67645 - protein, 195 aa, Triticum aestivum
  peptide (1)..(195): Ceres Seq. ID no. 15172976
  misc_feature (47)..(184): Pfam Name: Dual specificity phosphatase, catalytic domain Pfam Description: Dual specificity phosphatase, catalytic domain
  misc_feature (50)..(183): Homolog of NCBI NO: 24643332 NR Description: CG14211-PB [Drosophila melanogaster]
  misc_feature (54)..(195): Homolog of NCBI NO: 12845353 NR Description: unnamed protein product [Mus musculus]
  misc_feature (54)..(195): Homolog of NCBI NO: 13277360 NR Description: dual specificity phosphatase 19 [Mus musculus]
  misc_feature (54)..(195): Homolog of NCBI NO: 21624338 NR Description: dual-specificity phosphatase SKRP1 [Mus musculus]
  misc_feature (54)..(183): Homolog of NCBI NO: 18254478 NR Description: dual specificity phosphatase 19
  misc_feature (50)..(186): Homolog of NCBI NO: 18397475 NR Description: dual-specificity protein phosphatase -related
  misc_feature (50)..(186): Homolog of NCBI NO: 30679726 NR Description: dual-specificity protein phosphatase -related
  misc_feature (17)..(186): Homolog of NCBI NO: 9294518 NR Description: dual-specificity protein phosphatase-like protein
  misc_feature (1)..(186): Homolog of NCBI NO: 15229482 NR Description: dual-specificity protein phosphatase [Arabidopsis
  misc_feature (1)..(186): Homolog of NCBI NO: 34905574 NR Description: hypothetical protein~similar to Arabidopsis
MSVPEAGQSAGRDEQEMDNYEQHQTRVLMALMQGLCAARYRKADNTPCLVDQGLYLGSVGAALNNEALKSLNITHILVVARSLNPAFPAEFTYKKIEVLDSPDTDLGKHFGECFTFIDEGICTGGNVLVHCFAGRSRSVTVVLAYLMKKHQMSLQSAMSLVRSKRPQIAPNAGFISQLVNFEKSLQDAWIHGRIP

SEQ ID NO: 67646 - protein, 179 aa, Triticum aestivum
  peptide (1)..(179): Ceres Seq. ID no. 15172977
  misc_feature (31)..(168): Pfam Name: Dual specificity phosphatase, catalytic domain Pfam Description: Dual specificity phosphatase, catalytic domain
  misc_feature (34)..(167): Homolog of NCBI NO: 24643332 NR Description: CG14211-PB [Drosophila melanogaster]
  misc_feature (38)..(179): Homolog of NCBI NO: 12845353 NR Description: unnamed protein product [Mus musculus]
  misc_feature (38)..(179): Homolog of NCBI NO: 13277360 NR Description: dual specificity phosphatase 19 [Mus musculus]
  misc_feature (38)..(179): Homolog of NCBI NO: 21624338 NR Description: dual-specificity phosphatase SKRP1 [Mus musculus]
  misc_feature (38)..(167): Homolog of NCBI NO: 18254478 NR Description: dual specificity phosphatase 19
  misc_feature (34)..(170): Homolog of NCBI NO: 18397475 NR Description: dual-specificity protein phosphatase -related
  misc_feature (34)..(170): Homolog of NCBI NO: 30679726 NR Description: dual-specificity protein phosphatase -related
  misc_feature (1)..(170): Homolog of NCBI NO: 9294518 NR Description: dual-specificity protein phosphatase-like protein
  misc_feature (1)..(170): Homolog of NCBI NO: 15229482 NR Description: dual-specificity protein phosphatase [Arabidopsis
  misc_feature (1)..(170): Homolog of NCBI NO: 34905574 NR Description: hypothetical protein~similar to Arabidopsis
MDNYEQHQTRVLMALMQGLCAARYRKADNTPCLVDQGLYLGSVGAALNNEALKSLNITHILVVARSLNPAFPAEFTYKKIEVLDSPDTDLGKHFGECFTFIDEGICTGGNVLVHCFAGRSRSVTVVLAYLMKKHQMSLQSAMSLVRSKRPQIAPNAGFISQLVNFEKSLQDAWIHGRIP

SEQ ID NO: 67647 - DNA, 2128 bp, Triticum aestivum
  misc_feature (1)..(2128): Ceres Seq. ID no. 15170135
tcacgctctcggtttcctttcgtctcgtcccgttccgccgtcccgtgccggaccgccccacccaccacctccacctcccactccggagcagttcacagtctccactccacctcccacctataagtttcctcatcgccaccattcctcgtcccgttctcagttcctcactcccccccttccacaatcccctcgcttcgcacggcgaagcagccagagccagagcccgccttccagaaccagcccgcccgccatggcgagcttcgcgaggcaggagcaccagttcctcgccgagctcggcctcgcgccgcgcaacccgggctccttcgcctgcggcgcctggggcggctcgggccccgtcgtcaccaccaccaaccctagcaacaacgaggtcattgctgaggtcgtcgaggcgtccatggacgactacgagaaggggatgagcgcctgcttcgacgccgccaagacctggatggctgttccggcaccaaaacgaggagaaattgttaggcagattggtgatgcactgagagcaaagcttcatcaccttggcagacttctctcactcgagatggggaaaattctccctgaaggaattggggaggttcaggaaattattgacatgtgtgattatgctgtggggctaagtcgtcagctaaatggatccatcataccatctgaactcccaaaccatatgatgatggaggtctggaatcctcttggagttgttggtgtcatcactgcattcaatttcccttgcgccgtgctgggttggaatgcttgcattgctttggtgtgcggcaactgtgttgtctggaagggcgctccaactactccattgatcactatcgcaatgactaaaatagtggctagtgtatttgaaaagaacaacttgccaagtgcaatcttcacagctttttgtgggggtgctgaaattggccaagcaattgctcttgacacaaggatacctttggtttcattcacaggaagtacaaaggtaggtcaaatggttcagcaacaggttagcgcgagatttggtaaatgccttcttgaacttagtgggaacaacgccattattgtcatggatgatgcagacattccactagctgtgcgttctgttctgtttgctgctgttggcacagcaggacagcgatgcactacatgtcgtaggctgcttcttcacgaaagcatatatcaaacatttcttgatcaacttgttgaggtttataaacaagtccgtattggggatcctatggaaaagggcaccttgctgggaccactgcacactactacatcaaaggaaagctttttgaaaggcatccaaactatcaaatcccagggaggaaaaatccttttaggaggatctgctattgaatcagaagggaactttgttcagccaacaattgtggaaatttcacctgatgcgccagttgtgagggaagaattgtttggtcctgtcctttatgccatgaaatttctgacactgaaggaagcaattgaaatcaacaattctgttcctcaaggattgagcagttctatatttacaaggaaaccggatgctattttcaagtggattgggcctcatggcagtgattgtggtatagtgaatgtaaacatacccactaatggtgctgaaattggtggagcttttggtggagaaaaagcaaccggtggtgggcgagaagctggaagtgattcttggaagcagtacatgaggagggccacttgtacaatcaactatggaagcgagctgcctctagcacagggaattaactttggctagtttggtgctgaaggactgccagtgaaacgtcgtgctgcagcatggggattggggataatgtgttgagatatctggagcgtgcagccatcatcttcaggaaattctctgtgtcgatcattgcacccaaattgcgacgctgctgctgagtacatataataagagatgtgttgatctcatgtatgcattgttcatgccttttggcatgtttagccatctgtgccctggacctagtctattaataaactggaaaaatagcatatcttccggtgagagtaacattttacgcatgctaccttgagatcggactgctcgaaataaaaggagatcgtagccttcaggccgttgtgt

SEQ ID NO: 67648 - protein, 592 aa, Triticum aestivum
  peptide (1)..(592): Ceres Seq. ID no. 15170136
  misc_feature (88)..(574): Homolog of NCBI NO: 25090053 NR Description: Aldehyde dehydrogenase family 7 member A1
  misc_feature (94)..(592): Homolog of NCBI NO: 118514 NR Description: Aldehyde dehydrogenase family 7 member A1
  misc_feature (88)..(592): Homolog of NCBI NO: 15221042 NR Description: aldehyde dehydrogenase, putative (ALDH)
  misc_feature (87)..(592): Homolog of NCBI NO: 25090068 NR Description: Aldehyde dehydrogenase family 7 member A1
  misc_feature (84)..(592): Homolog of NCBI NO: 11995457 NR Description: aldehyde dehydrogenase [Oryza sativa]
HALGFLSSRPVPPSRAGPPHPPPPPPTPEQFTVSTPPPTYKFPHRHHSSSRSQFLTPPLPQSPRFARRSSQSQSPPSRTSPPAMASFARQEHQFLAELGLAPRNPGSFACGAWGGSGPVVTTTNPSNNEVIAEVVEASMDDYEKGMSACFDAAKTWMAVPAPKRGEIVRQIGDALRAKLHHLGRLLSLEMGKILPEGIGEVQEIIDMCDYAVGLSRQLNGSIIPSELPNHMMMEVWNPLGVVGVITAFNFPCAVLGWNACIALVCGNCVVWKGAPTTPLITIAMTKIVASVFEKNNLPSAIFTAFCGGAEIGQAIALDTRIPLVSFTGSTKVGQMVQQQVSARFGKCLLELSGNNAIIVMDDADIPLAVRSVLFAAVGTAGQRCTTCRRLLLHESIYQTFLDQLVEVYKQVRIGDPMEKGTLLGPLHTTTSKESFLKGIQTIKSQGGKILLGGSAIESEGNFVQPTIVEISPDAPVVREELFGPVLYAMKFLTLKEAIEINNSVPQGLSSSIFTRKPDAIFKWIGPHGSDCGIVNVNIPTNGAEIGGAFGGEKATGGGREAGSDSWKQYMRRATCTINYGSELPLAQGINFG

SEQ ID NO: 67649 - protein, 509 aa, Triticum aestivum
  peptide (1)..(509): Ceres Seq. ID no. 15170137
  misc_feature (5)..(491): Homolog of NCBI NO: 25090053 NR Description: Aldehyde dehydrogenase family 7 member A1
  misc_feature (11)..(509): Homolog of NCBI NO: 118514 NR Description: Aldehyde dehydrogenase family 7 member A1
  misc_feature (5)..(509): Homolog of NCBI NO: 15221042 NR Description: aldehyde dehydrogenase, putative (ALDH)
  misc_feature (4)..(509): Homolog of NCBI NO: 25090068 NR Description: Aldehyde dehydrogenase family 7 member A1
  misc_feature (1)..(509): Homolog of NCBI NO: 11995457 NR Description: aldehyde dehydrogenase [Oryza sativa]
MASFARQEHQFLAELGLAPRNPGSFACGAWGGSGPVVTTTNPSNNEVIAEVVEASMDDYEKGMSACFDAAKTWMAVPAPKRGEIVRQIGDALRAKLHHLGRLLSLEMGKILPEGIGEVQEIIDMCDYAVGLSRQLNGSIIPSELPNHMMMEVWNPLGVVGVITAFNFPCAVLGWNACIALVCGNCVVWKGAPTTPLITIAMTKIVASVFEKNNLPSAIFTAFCGGAEIGQAIALDTRIPLVSFTGSTKVGQMVQQQVSARFGKCLLELSGNNAIIVMDDADIPLAVRSVLFAAVGTAGQRCTTCRRLLLHESIYQTFLDQLVEVYKQVRIGDPMEKGTLLGPLHTTTSKESFLKGIQTIKSQGGKILLGGSAIESEGNFVQPTIVEISPDAPVVREELFGPVLYAMKFLTLKEAIEINNSVPQGLSSSIFTRKPDAIFKWIGPHGSDCGIVNVNIPTNGAEIGGAFGGEKATGGGREAGSDSWKQYMRRATCTINYGSELPLAQGINFG

SEQ ID NO: 67650 - protein, 454 aa, Triticum aestivum
  peptide (1)..(454): Ceres Seq. ID no. 15170138
  misc_feature (1)..(436): Homolog of NCBI NO: 25090053 NR Description: Aldehyde dehydrogenase family 7 member A1
  misc_feature (1)..(454): Homolog of NCBI NO: 118514 NR Description: Aldehyde dehydrogenase family 7 member A1
  misc_feature (1)..(454): Homolog of NCBI NO: 15221042 NR Description: aldehyde dehydrogenase, putative (ALDH)
  misc_feature (1)..(454): Homolog of NCBI NO: 25090068 NR Description: Aldehyde dehydrogenase family 7 member A1
  misc_feature (1)..(454): Homolog of NCBI NO: 11995457 NR Description: aldehyde dehydrogenase [Oryza sativa]
MDDYEKGMSACFDAAKTWMAVPAPKRGEIVRQIGDALRAKLHHLGRLLSLEMGKILPEGIGEVQEIIDMCDYAVGLSRQLNGSIIPSELPNHMMMEVWNPLGVVGVITAFNFPCAVLGWNACIALVCGNCVVWKGAPTTPLITIAMTKIVASVFEKNNLPSAIFTAFCGGAEIGQAIALDTRIPLVSFTGSTKVGQMVQQQVSARFGKCLLELSGNNAIIVMDDADIPLAVRSVLFAAVGTAGQRCTTCRRLLLHESIYQTFLDQLVEVYKQVRIGDPMEKGTLLGPLHTTTSKESFLKGIQTIKSQGGKILLGGSAIESEGNFVQPTIVEISPDAPVVREELFGPVLYAMKFLTLKEAIEINNSVPQGLSSSIFTRKPDAIFKWIGPHGSDCGIVNVNIPTNGAEIGGAFGGEKATGGGREAGSDSWKQYMRRATCTINYGSELPLAQGINFG

SEQ ID NO: 67651 - DNA, 1091 bp, Triticum aestivum
  misc_feature (1)..(1091): Ceres Seq. ID no. 12623011
agagtcgcaacgaaaccaaacaaaccacccgagtcgaccgcttcgagaagcctcgccaccaaggcacccagacccagacctcctcccgggaatcggaaccgcgtcccagccagccccaacccattcgtcgctcccctgatccatccggcgacgcggcggagcgaggaaccaaggctcgagcagcgggcgggcgggcggagaggagccggagagatggcggagaacccgcagctgttcgggaacgggatgcccgtgcccttccacggcgagatgttcgtcctcgcccgcgacggcgtcgagttccacgtcgacaagatcccctcggcgcccggcggtcacgcaaaaacaaagggcaccatatacctgtctaacataaggatggtgtttgtcgccgccaagcctgttgggaacttctttgcctttgatatgcccctgctgtacgtgcacggtgagaagttcaaccaaccgatatttcactgcaacaatatttctggattcgttgagccggttgttccagagagccagaacagggctctgtactcgacccacaccttcaagatcttgttcaaggaaggtggatgtggtacctttgtgccactcttcctgaacctgataacatcagtgcggcgctacaatcagtttgaagcccagcctgctactgtgccccgtgtggaccccatgcaggcagcgcaaactcctgtcgacgacatgatgcgccatgcgtatgtcgatccacatgatcctaccaagatcttcctccagcagcccgcaccggaatcccagctgaggaggagaaactaccacggccccgcggacaacgcgtactgatgctttggcctgattgcgaagtgcatgtgttttcgatgatctatgtggcgcacacgagcaatatatctgtttggtgtcattctggtgattctcactgaaggatgtgatggaagtatagtagtgtgatgatgatgtcagacaattgtgtgcttcactgttggattcaatccagatctaagtataataatgtacatacaaggtgatctgctggattgtatgttgctgatctcgtcgtatagagttaagaattggtctgaatgctg

SEQ ID NO: 67652 - protein, 275 aa, Triticum aestivum
  peptide (1)..(275): Ceres Seq. ID no. 12623012
  misc_feature (97)..(233): Homolog of NCBI NO: 19115900 NR Description: hypothetical protein [Schizosaccharomyces pombe]
  misc_feature (80)..(260): Homolog of NCBI NO: 39597760 NR Description: Hypothetical protein CBG14242 [Caenorhabditis
  misc_feature (72)..(260): Homolog of NCBI NO: 23619609 NR Description: hypothetical protein [Plasmodium falciparum 3D7]
  misc_feature (72)..(268): Homolog of NCBI NO: 23479181 NR Description: arabinogalactan protein [Plasmodium yoelii yoelii]
  misc_feature (72)..(273): Homolog of NCBI NO: 15239148 NR Description: putative protein
RVATKPNKPPESTASRSLATKAPRPRPPPGNRNRVPASPNPFVAPLIHPATRRSEEPRLEQRAGGRRGAGEMAENPQLFGNGMPVPFHGEMFVLARDGVEFHVDKIPSAPGGHAKTKGTIYLSNIRMVFVAAKPVGNFFAFDMPLLYVHGEKFNQPIFHCNNISGFVEPVVPESQNRALYSTHTFKILFKEGGCGTFVPLFLNLITSVRRYNQFEAQPATVPRVDPMQAAQTPVDDMMRHAYVDPHDPTKIFLQQPAPESQLRRRNYHGPADNAY

SEQ ID NO: 67653 - protein, 204 aa, Triticum aestivum
  peptide (1)..(204): Ceres Seq. ID no. 12623013
  misc_feature (26)..(162): Homolog of NCBI NO: 19115900 NR Description: hypothetical protein [Schizosaccharomyces pombe]
  misc_feature (9)..(189): Homolog of NCBI NO: 39597760 NR Description: Hypothetical protein CBG14242 [Caenorhabditis
  misc_feature (1)..(189): Homolog of NCBI NO: 23619609 NR Description: hypothetical protein [Plasmodium falciparum 3D7]
  misc_feature (1)..(197): Homolog of NCBI NO: 23479181 NR Description: arabinogalactan protein [Plasmodium yoelii yoelii]
  misc_feature (1)..(202): Homolog of NCBI NO: 15239148 NR Description: putative protein
MAENPQLFGNGMPVPFHGEMFVLARDGVEFHVDKIPSAPGGHAKTKGTIYLSNIRMVFVAAKPVGNFFAFDMPLLYVHGEKFNQPIFHCNNISGFVEPVVPESQNRALYSTHTFKILFKEGGCGTFVPLFLNLITSVRRYNQFEAQPATVPRVDPMQAAQTPVDDMMRHAYVDPHDPTKIFLQQPAPESQLRRRNYHGPADNAY

SEQ ID NO: 67654 - protein, 193 aa, Triticum aestivum
  peptide (1)..(193): Ceres Seq. ID no. 12623014
  misc_feature (15)..(151): Homolog of NCBI NO: 19115900 NR Description: hypothetical protein [Schizosaccharomyces pombe]
  misc_feature (1)..(178): Homolog of NCBI NO: 39597760 NR Description: Hypothetical protein CBG14242 [Caenorhabditis
  misc_feature (1)..(178): Homolog of NCBI NO: 23619609 NR Description: hypothetical protein [Plasmodium falciparum 3D7]
  misc_feature (1)..(186): Homolog of NCBI NO: 23479181 NR Description: arabinogalactan protein [Plasmodium yoelii yoelii]
  misc_feature (1)..(191): Homolog of NCBI NO: 15239148 NR Description: putative protein
MPVPFHGEMFVLARDGVEFHVDKIPSAPGGHAKTKGTIYLSNIRMVFVAAKPVGNFFAFDMPLLYVHGEKFNQPIFHCNNISGFVEPVVPESQNRALYSTHTFKILFKEGGCGTFVPLFLNLITSVRRYNQFEAQPATVPRVDPMQAAQTPVDDMMRHAYVDPHDPTKIFLQQPAPESQLRRRNYHGPADNAY

SEQ ID NO: 67655 - DNA, 1100 bp, Triticum aestivum
  misc_feature (1)..(1100): Ceres Seq. ID no. 13660597
aatcaggcaatgttttgctagtggttctgtggaatattttctcctttgtcctaatcaaactcagctattaggtacttcacaggtctgttatcaccctggaaaggtatattgctatttggtccaccaggaacaggaaagacaatgctggcaaaagctgtggctaccgagtgcaaaacaacttttttcaacatttcagcctcatcaattgtcagcaaatggcgtggtgactcggagaaactagtaaaagtcttatttgagcttgcaaggcatcatgcaccatctaccattttccttgatgagattgatgctatcattagccaacgtggtgaagctcgtagtgaacatgaagccagtcggcgactgaagactgaactattaatacagatggatgggttgactaagacagatgagcttgtttttgttctggcggccacaaatttaccatgggaactagatgcagcaatgttacgccgattggaaaaacgtattcttgtgcccttaccagaggcagaagctaggcatgctatgtttgaagagttccttccatcgactccagacacaatgaagattccatatgatgttcttgtggagaacactgaaggatattccggctctgatatacgccttgtttgtaaggaggcagcaatgcaaccacttagacggttaatggcagttctagaaggcagacaagaagaaatgccagaggatgagttgcctgaagttggcccaatagcggcagaagatatcgaacttgccttgaggaatacacggccgtctgctcatctccatgcacatagatatgagaaattcaatcaagattatggcagccatgtcattggctaaaggtgagcagtgaaaacaaggcttttgaccgcccgccttaggtttgtctaagcatgcctagaacatctttttgcaggagcatgttgatatgacctcgtttgcaccctgtatggagctttagtattcgtcggcagaaaggataattaccatccatgtatttccagctcgtaagcattgcttgtgcataatatttattccatcatcatgtatattaccatttatatcacaagcaataagccctttgggcattcaagctc

SEQ ID NO: 67656 - protein, 233 aa, Triticum aestivum
  peptide (1)..(233): Ceres Seq. ID no. 15220043
  misc_feature (1)..(173): Pfam Name: ATPase family associated with various cellular Pfam Description: ATPase family associated with various cellular
  misc_feature (1)..(229): Homolog of NCBI NO: 19909896 NR Description: katanin [Arabidopsis thaliana]
  misc_feature (1)..(229): Homolog of NCBI NO: 15220118 NR Description: CAD ATPase (AAA1) [Arabidopsis thaliana]
  misc_feature (1)..(229): Homolog of NCBI NO: 31241707 NR Description: ENSANGP00000018492 [Anopheles gambiae]
  misc_feature (1)..(229): Homolog of NCBI NO: 11071772 NR Description: probable AAA ATPase [Leishmania major]
  misc_feature (1)..(229): Homolog of NCBI NO: 34190544 NR Description: Unknown (protein for MGC:33211) [Homo sapiens]
  misc_feature (1)..(232): Homolog of NCBI NO: 25408335 NR Description: probable katanin [imported] - Arabidopsis thaliana
  misc_feature (1)..(232): Homolog of NCBI NO: 18403587 NR Description: katanin -related [Arabidopsis thaliana]
  misc_feature (1)..(232): Homolog of NCBI NO: 34909678 NR Description: katanin p60 subunit A 1-like
  misc_feature (1)..(232): Homolog of NCBI NO: 32352152 NR Description: katanin [Oryza sativa (japonica cultivar-group)]
  misc_feature (1)..(232): Homolog of NCBI NO: 34911050 NR Description: putative katanin [Oryza sativa (japonica
MLAKAVATECKTTFFNISASSIVSKWRGDSEKLVKVLFELARHHAPSTIFLDEIDAIISQRGEARSEHEASRRLKTELLIQMDGLTKTDELVFVLAATNLPWELDAAMLRRLEKRILVPLPEAEARHAMFEEFLPSTPDTMKIPYDVLVENTEGYSGSDIRLVCKEAAMQPLRRLMAVLEGRQEEMPEDELPEVGPIAAEDIELALRNTRPSAHLHAHRYEKFNQDYGSHVIG

SEQ ID NO: 67657 - protein, 152 aa, Triticum aestivum
  peptide (1)..(152): Ceres Seq. ID no. 15220044
  misc_feature (1)..(92): Pfam Name: ATPase family associated with various cellular Pfam Description: ATPase family associated with various cellular
  misc_feature (1)..(148): Homolog of NCBI NO: 19909896 NR Description: katanin [Arabidopsis thaliana]
  misc_feature (1)..(148): Homolog of NCBI NO: 15220118 NR Description: CAD ATPase (AAA1) [Arabidopsis thaliana]
  misc_feature (1)..(148): Homolog of NCBI NO: 31241707 NR Description: ENSANGP00000018492 [Anopheles gambiae]
  misc_feature (1)..(148): Homolog of NCBI NO: 11071772 NR Description: probable AAA ATPase [Leishmania major]
  misc_feature (1)..(148): Homolog of NCBI NO: 34190544 NR Description: Unknown (protein for MGC:33211) [Homo sapiens]
  misc_feature (1)..(151): Homolog of NCBI NO: 25408335 NR Description: probable katanin [imported] - Arabidopsis thaliana
  misc_feature (1)..(151): Homolog of NCBI NO: 18403587 NR Description: katanin -related [Arabidopsis thaliana]
  misc_feature (1)..(151): Homolog of NCBI NO: 34909678 NR Description: katanin p60 subunit A 1-like
  misc_feature (1)..(151): Homolog of NCBI NO: 32352152 NR Description: katanin [Oryza sativa (japonica cultivar-group)]
  misc_feature (1)..(151): Homolog of NCBI NO: 34911050 NR Description: putative katanin [Oryza sativa (japonica
MDGLTKTDELVFVLAATNLPWELDAAMLRRLEKRILVPLPEAEARHAMFEEFLPSTPDTMKIPYDVLVENTEGYSGSDIRLVCKEAAMQPLRRLMAVLEGRQEEMPEDELPEVGPIAAEDIELALRNTRPSAHLHAHRYEKFNQDYGSHVIG

SEQ ID NO: 67658 - protein, 126 aa, Triticum aestivum
  peptide (1)..(126): Ceres Seq. ID no. 15220045
  misc_feature (1)..(66): Pfam Name: ATPase family associated with various cellular Pfam Description: ATPase family associated with various cellular
  misc_feature (1)..(122): Homolog of NCBI NO: 19909896 NR Description: katanin [Arabidopsis thaliana]
  misc_feature (1)..(122): Homolog of NCBI NO: 15220118 NR Description: CAD ATPase (AAA1) [Arabidopsis thaliana]
  misc_feature (1)..(122): Homolog of NCBI NO: 31241707 NR Description: ENSANGP00000018492 [Anopheles gambiae]
  misc_feature (1)..(122): Homolog of NCBI NO: 11071772 NR Description: probable AAA ATPase [Leishmania major]
  misc_feature (1)..(122): Homolog of NCBI NO: 34190544 NR Description: Unknown (protein for MGC:33211) [Homo sapiens]
  misc_feature (1)..(125): Homolog of NCBI NO: 25408335 NR Description: probable katanin [imported] - Arabidopsis thaliana
  misc_feature (1)..(125): Homolog of NCBI NO: 18403587 NR Description: katanin -related [Arabidopsis thaliana]
  misc_feature (1)..(125): Homolog of NCBI NO: 34909678 NR Description: katanin p60 subunit A 1-like
  misc_feature (1)..(125): Homolog of NCBI NO: 32352152 NR Description: katanin [Oryza sativa (japonica cultivar-group)]
  misc_feature (1)..(125): Homolog of NCBI NO: 34911050 NR Description: putative katanin [Oryza sativa (japonica
MLRRLEKRILVPLPEAEARHAMFEEFLPSTPDTMKIPYDVLVENTEGYSGSDIRLVCKEAAMQPLRRLMAVLEGRQEEMPEDELPEVGPIAAEDIELALRNTRPSAHLHAHRYEKFNQDYGSHVIG

SEQ ID NO: 67659 - DNA, 778 bp, Triticum aestivum
  misc_feature (1)..(778): Ceres Seq. ID no. 13660340
acacacactcactcaagccagcgccactcgcaccacagtcatccactcacaagctaagctagcggcgcagtagctcacttcagtccagtcggcatggcggctccgaggggcgcggcagtggtgctggcgatggtgctcgcggccatggtggtggcgccgccggcgacggtgcacgcggccatatcctgctccacggtgtacagcacgctgatgccgtgcctgcagtacgtgcagcagggcggttcgccggcccggggctgctgcaccggcatccagaacctgctggcggaggccaacaacagccccgaccgccgcaccatctgcggctgcctcaagaacgtcgccaacggcgcctccggcgggccctacatcacccgcgccgccgcgctcccctccaagtgcaacgtcgccctcccctacaagatcagccccagcgtcgactgcaactcgatccactgaacgaactgaagcgccttggcccgtgtgtcgacgtacgtctgccgtgcgaggagtcccatgtccggagaataaattgctgctactagtactgaagcttagctaggccttggcggccagatccgtgtcgttctacctagtcgtcgtgtgtggttttagggtcgatggatctgtgtgcatgcagtccatggtgttctggcctgggtgtcggtaggctccgcaagcagagcagagtggtgaactgatattgtgtgcgtcgtactatgcgcgtgcctatgtaatgtgcgtgctttatctataaactatccctcgttaagtatct

SEQ ID NO: 67660 - protein, 121 aa, Triticum aestivum
  peptide (1)..(121): Ceres Seq. ID no. 13660341
  misc_feature (32)..(117): Pfam Name: Protease inhibitor/seed storage/LTP family Pfam Description: Protease inhibitor/seed storage/LTP family
  misc_feature (8)..(120): Homolog of NCBI NO: 28193997 NR Description: nonspecific lipid transfer protein 1
  misc_feature (5)..(120): Homolog of NCBI NO: 2506826 NR Description: Nonspecific lipid-transfer protein 1 precursor
  misc_feature (7)..(121): Homolog of NCBI NO: 7438279 NR Description: phospholipid transfer protein - rice
  misc_feature (8)..(120): Homolog of NCBI NO: 28194086 NR Description: lipid transfer protein isoform 4 [Vitis vinifera]
  misc_feature (5)..(118): Homolog of NCBI NO: 32966061 NR Description: lipid transfer protein LPT1
  misc_feature (5)..(121): Homolog of NCBI NO: 2497747 NR Description: NONSPECIFIC LIPID-TRANSFER PROTEIN 3 PRECURSOR
  misc_feature (5)..(121): Homolog of NCBI NO: 2497746 NR Description: NONSPECIFIC LIPID-TRANSFER PROTEIN 2 PRECURSOR
  misc_feature (5)..(121): Homolog of NCBI NO: 7438275 NR Description: lipid transfer protein LPT II - rice
  misc_feature (3)..(121): Homolog of NCBI NO: 34907830 NR Description: putative lipid transfer protein
  misc_feature (1)..(121): Homolog of NCBI NO: 6492243 NR Description: lipid transfer protein [Hordeum vulgare]
MAAPRGAAVVLAMVLAAMVVAPPATVHAAISCSTVYSTLMPCLQYVQQGGSPARGCCTGIQNLLAEANNSPDRRTICGCLKNVANGASGGPYITRAAALPSKCNVALPYKISPSVDCNSIH

SEQ ID NO: 67661 - protein, 109 aa, Triticum aestivum
  peptide (1)..(109): Ceres Seq. ID no. 13660342
  misc_feature (20)..(105): Pfam Name: Protease inhibitor/seed storage/LTP family Pfam Description: Protease inhibitor/seed storage/LTP family
  misc_feature (1)..(108): Homolog of NCBI NO: 28193997 NR Description: nonspecific lipid transfer protein 1
  misc_feature (1)..(108): Homolog of NCBI NO: 2506826 NR Description: Nonspecific lipid-transfer protein 1 precursor
  misc_feature (1)..(109): Homolog of NCBI NO: 7438279 NR Description: phospholipid transfer protein - rice
  misc_feature (1)..(108): Homolog of NCBI NO: 28194086 NR Description: lipid transfer protein isoform 4 [Vitis vinifera]
  misc_feature (1)..(106): Homolog of NCBI NO: 32966061 NR Description: lipid transfer protein LPT1
  misc_feature (1)..(109): Homolog of NCBI NO: 2497747 NR Description: NONSPECIFIC LIPID-TRANSFER PROTEIN 3 PRECURSOR
  misc_feature (1)..(109): Homolog of NCBI NO: 2497746 NR Description: NONSPECIFIC LIPID-TRANSFER PROTEIN 2 PRECURSOR
  misc_feature (1)..(109): Homolog of NCBI NO: 7438275 NR Description: lipid transfer protein LPT II - rice
  misc_feature (1)..(109): Homolog of NCBI NO: 34907830 NR Description: putative lipid transfer protein
  misc_feature (1)..(109): Homolog of NCBI NO: 6492243 NR Description: lipid transfer protein [Hordeum vulgare]
MVLAAMVVAPPATVHAAISCSTVYSTLMPCLQYVQQGGSPARGCCTGIQNLLAEANNSPDRRTICGCLKNVANGASGGPYITRAAALPSKCNVALPYKISPSVDCNSIH

SEQ ID NO: 67662 - protein, 104 aa, Triticum aestivum
  peptide (1)..(104): Ceres Seq. ID no. 13660343
  misc_feature (15)..(100): Pfam Name: Protease inhibitor/seed storage/LTP family Pfam Description: Protease inhibitor/seed storage/LTP family
  misc_feature (1)..(103): Homolog of NCBI NO: 28193997 NR Description: nonspecific lipid transfer protein 1
  misc_feature (1)..(103): Homolog of NCBI NO: 2506826 NR Description: Nonspecific lipid-transfer protein 1 precursor
  misc_feature (1)..(104): Homolog of NCBI NO: 7438279 NR Description: phospholipid transfer protein - rice
  misc_feature (1)..(103): Homolog of NCBI NO: 28194086 NR Description: lipid transfer protein isoform 4 [Vitis vinifera]
  misc_feature (1)..(101): Homolog of NCBI NO: 32966061 NR Description: lipid transfer protein LPT1
  misc_feature (1)..(104): Homolog of NCBI NO: 2497747 NR Description: NONSPECIFIC LIPID-TRANSFER PROTEIN 3 PRECURSOR
  misc_feature (1)..(104): Homolog of NCBI NO: 2497746 NR Description: NONSPECIFIC LIPID-TRANSFER PROTEIN 2 PRECURSOR
  misc_feature (1)..(104): Homolog of NCBI NO: 7438275 NR Description: lipid transfer protein LPT II - rice
  misc_feature (1)..(104): Homolog of NCBI NO: 34907830 NR Description: putative lipid transfer protein
  misc_feature (1)..(104): Homolog of NCBI NO: 6492243 NR Description: lipid transfer protein [Hordeum vulgare]
MVVAPPATVHAAISCSTVYSTLMPCLQYVQQGGSPARGCCTGIQNLLAEANNSPDRRTICGCLKNVANGASGGPYITRAAALPSKCNVALPYKISPSVDCNSIH

SEQ ID NO: 67663 - DNA, 1296 bp, Triticum aestivum
  misc_feature (1)..(1296): Ceres Seq. ID no. 13659759
gcatatctgcacacggtagcctactggtctcttcatccattgctgaggtgacaaagctagctgcattggattggagcgcaagaagatggagggggagacgaccaagaggctggccacgctggtgggctgcaactacgtgggcacgcgctacgagctccgcggctgcatcaacgacgtcgacgccgtgcgggacaccctcgtcgcccgcttcggcttcgcgccggccgacgtcgccgtgctcaccgacgggcgcggcgccgaggtgctcccgacgggagccaacatccggcgcgcgctggcggacatggtcgcccgcgccgctcccggggacgtgctcttcttccactacagcggccacggcacgctcgtcccgccgcaccacggcgactccggcgcggaggaggaagcgatcgtgccgaccgacttcaacctcatcacggacgtggacttccggcagctggtggaccgggtgccgccgggcgcgagcttcaccattgtgtccgactcgtgtcacagcggcggcctcatcgaccaggagaaggaacagatcgggccctccgtcggctccgaccccagcgcggggtccacggcgcccgcgcgcaccgcccggttccttccctacggcgcgatcctcgaccacctctccgccgtctcgggcatgccttcctcccaccacgtcgccgaccacctcgtggcgctcttcggcgccgatgccagcgccaagttccacgttcacggcggcagcggcaacggcagcaccccgtccaccacacccgcaccggcgccaacgccgccgcgcccggacgagggcatcctgctgagcgggtgccagacgaacgagacctcagcggacgtgccggcgtacgaggccagcggaggcaaggcatgcggggcgttcagtagcgcggtgcagagcgtgctggcggcgcaccctgcgccgctgagcaaccgggagctcgtggcgaaggccagggcggtgctggaagagcaggggttcgagcagcacccgtgtctctactgtaccgacgccaacgccgaggcacggttcctttcgcaggacaagaaggaggagacagcggtgggcgcggcaagcccggccatgtcggcggcgctgctgtagagcacgttcagctcacgagctacggagcgggcatgcgtttcatgtgtcgtgttttactgtttctgcgcacgtcgaattgaatgaggggccaaactcacgtgctatattgtttgtgtgtggatcaagtttataagtgtgtgtattatatatacacggatttgttatgactcacttgc

SEQ ID NO: 67664 - protein, 344 aa, Triticum aestivum
  peptide (1)..(344): Ceres Seq. ID no. 13659760
  misc_feature (8)..(324): Pfam Name: Caspase domain Pfam Description: Caspase domain
  misc_feature (239)..(322): Homolog of NCBI NO: 15219340 NR Description: hypothetical protein common family [Arabidopsis
  misc_feature (10)..(213): Homolog of NCBI NO: 15219340 NR Description: hypothetical protein common family [Arabidopsis
  misc_feature (239)..(322): Homolog of NCBI NO: 23343885 NR Description: metacaspase 1 [Lycopersicon esculentum]
  misc_feature (13)..(158): Homolog of NCBI NO: 23343885 NR Description: metacaspase 1 [Lycopersicon esculentum]
  misc_feature (237)..(322): Homolog of NCBI NO: 33304380 NR Description: metacaspase 7 [Arabidopsis thaliana]
  misc_feature (6)..(176): Homolog of NCBI NO: 33304380 NR Description: metacaspase 7 [Arabidopsis thaliana]
  misc_feature (237)..(322): Homolog of NCBI NO: 15219345 NR Description: putative latex-abundant protein [Arabidopsis
  misc_feature (6)..(176): Homolog of NCBI NO: 15219345 NR Description: putative latex-abundant protein [Arabidopsis
  misc_feature (7)..(324): Homolog of NCBI NO: 21554334 NR Description: latex-abundant protein-like [Arabidopsis thaliana]
  misc_feature (2)..(324): Homolog of NCBI NO: 15237648 NR Description: putative latex-abundant protein [Arabidopsis
MEGETTKRLATLVGCNYVGTRYELRGCINDVDAVRDTLVARFGFAPADVAVLTDGRGAEVLPTGANIRRALADMVARAAPGDVLFFHYSGHGTLVPPHHGDSGAEEEAIVPTDFNLITDVDFRQLVDRVPPGASFTIVSDSCHSGGLIDQEKEQIGPSVGSDPSAGSTAPARTARFLPYGAILDHLSAVSGMPSSHHVADHLVALFGADASAKFHVHGGSGNGSTPSTTPAPAPTPPRPDEGILLSGCQTNETSADVPAYEASGGKACGAFSSAVQSVLAAHPAPLSNRELVAKARAVLEEQGFEQHPCLYCTDANAEARFLSQDKKEETAVGAASPAMSAALL

SEQ ID NO: 67665 - protein, 272 aa, Triticum aestivum
  peptide (1)..(272): Ceres Seq. ID no. 13659761
  misc_feature (42)..(272): Pfam Name: Equine herpesvirus glycoprotein gp2 Pfam Description: Equine herpesvirus glycoprotein gp2
  misc_feature (38)..(272): Homolog of NCBI NO: 28574039 NR Description: Salivary gland secretion 1 CG3047-PA [Drosophila
  misc_feature (38)..(272): Homolog of NCBI NO: 28574039 NR Description: Salivary gland secretion 1 CG3047-PA [Drosophila
  misc_feature (38)..(272): Homolog of NCBI NO: 28574039 NR Description: Salivary gland secretion 1 CG3047-PA [Drosophila
  misc_feature (66)..(272): Homolog of NCBI NO: 15240933 NR Description: expressed protein [Arabidopsis thaliana]
  misc_feature (43)..(272): Homolog of NCBI NO: 11360494 NR Description: antifreeze glycopeptide AFGP polyprotein
  misc_feature (42)..(272): Homolog of NCBI NO: 11360494 NR Description: antifreeze glycopeptide AFGP polyprotein
  misc_feature (38)..(258): Homolog of NCBI NO: 28574039 NR Description: Salivary gland secretion 1 CG3047-PA [Drosophila
  misc_feature (43)..(272): Homolog of NCBI NO: 11360494 NR Description: antifreeze glycopeptide AFGP polyprotein
  misc_feature (42)..(272): Homolog of NCBI NO: 11360494 NR Description: antifreeze glycopeptide AFGP polyprotein
  misc_feature (27)..(272): Homolog of NCBI NO: 11360318 NR Description: probable mucin DKFZp434C196.1 - human (fragment)
ISAHGSLLVSSSIAEVTKLAALDWSARRWRGRRPRGWPRWWAATTWARATSSAAASTTSTPCGTPSSPASASRRPTSPCSPTGAAPRCSRREPTSGARWRTWSPAPLPGTCSSSTTAATARSSRRTTATPARRRKRSCRPTSTSSRTWTSGSWWTGCRRARASPLCPTRVTAAASSTRRRNRSGPPSAPTPARGPRRPRAPPGSFPTARSSTTSPPSRACLPPTTSPTTSWRSSAPMPAPSSTFTAAAATAAPRPPHPHRRQRRRARTRASC

SEQ ID NO: 67666 - protein, 271 aa, Triticum aestivum
  peptide (1)..(271): Ceres Seq. ID no. 13659762
  misc_feature (1)..(251): Pfam Name: Caspase domain Pfam Description: Caspase domain
  misc_feature (166)..(249): Homolog of NCBI NO: 15219340 NR Description: hypothetical protein common family [Arabidopsis
  misc_feature (1)..(140): Homolog of NCBI NO: 15219340 NR Description: hypothetical protein common family [Arabidopsis
  misc_feature (166)..(249): Homolog of NCBI NO: 23343885 NR Description: metacaspase 1 [Lycopersicon esculentum]
  misc_feature (1)..(85): Homolog of NCBI NO: 23343885 NR Description: metacaspase 1 [Lycopersicon esculentum]
  misc_feature (164)..(249): Homolog of NCBI NO: 33304380 NR Description: metacaspase 7 [Arabidopsis thaliana]
  misc_feature (1)..(103): Homolog of NCBI NO: 33304380 NR Description: metacaspase 7 [Arabidopsis thaliana]
  misc_feature (164)..(249): Homolog of NCBI NO: 15219345 NR Description: putative latex-abundant protein [Arabidopsis
  misc_feature (1)..(103): Homolog of NCBI NO: 15219345 NR Description: putative latex-abundant protein [Arabidopsis
  misc_feature (1)..(251): Homolog of NCBI NO: 21554334 NR Description: latex-abundant protein-like [Arabidopsis thaliana]
  misc_feature (1)..(251): Homolog of NCBI NO: 15237648 NR Description: putative latex-abundant protein [Arabidopsis
MVARAAPGDVLFFHYSGHGTLVPPHHGDSGAEEEAIVPTDFNLITDVDFRQLVDRVPPGASFTIVSDSCHSGGLIDQEKEQIGPSVGSDPSAGSTAPARTARFLPYGAILDHLSAVSGMPSSHHVADHLVALFGADASAKFHVHGGSGNGSTPSTTPAPAPTPPRPDEGILLSGCQTNETSADVPAYEASGGKACGAFSSAVQSVLAAHPAPLSNRELVAKARAVLEEQGFEQHPCLYCTDANAEARFLSQDKKEETAVGAASPAMSAALL

SEQ ID NO: 67667 - DNA, 1140 bp, Triticum aestivum
  misc_feature (1)..(1140): Ceres Seq. ID no. 14302860
accactcgaccagagtccacagtccacagtccatagtccgtccacagtgtactgaccaagtagtgctcagaattcagggagcccaccgccatggcttcccctaagcttctcctcctgctcgccaccctcctcccaagctgcggcctcctcctggcggacttcgccccgatgaccctcaccgtggtgaacaactgcgcgtacccgatttggccgggcatccaggggagcgccggcagcgaggtcctggaggggggcggcttcttcctcccgtcgctctcccaccgctccttcccggcgcccacccacgcctggtccggccgcatctgggcgcgcaccggctgcacgcctgcaggggccgggcagctccgctgcgccacgggcgactgcggcgggcggctccagtgcgggggcctcggcggcgcggcgcccgccacgctggcgcaggtctccctccaccacggcggcgacgaccagtcgtcgtacggggtgagcgtggtggacggcttcaacgtgggactgtcggttaccccgcacgagggccgcggcaactgccccgtcctcgcctgccgcaaggacctgacgcagagctgccccggcgagctgcaggtgcgcgcggcggcgggcggcggcgtggccgcgtgcaagagcggctgcctggccttcggcaccgacgagctgtgctgccgcaacgcgtacaacagcccggccgcctgccgcccctccaagtactcggacttcttcaagaacgagtgcccgcaggccttcacctacgcgcatgacagcccctcgctcacccaccagtgctccgcgccgcgcgagctcaaggtcatcttctgccactagactagaggtagtccagcggcgctcgcggtgccgccgccggccgtcagcagctatgtctgggtctgggatcgatgtggtgtagtgcgtgtcatctcatctgtcatgtgtgagtgttcgattaggctttggagactgccaggctgaccggagtgcttggtgtagttcgtgctctgtaggcgttcacctctcgtctagtagtatggtgttagctgctctgattccagtctgaaataacatgtttagatgggcattgatctgatcacatgtttcaatcacgccttttgtgcatttgagttc

SEQ ID NO: 67668 - protein, 250 aa, Triticum aestivum
  peptide (1)..(250): Ceres Seq. ID no. 14302861
  misc_feature (33)..(250): Pfam Name: Thaumatin family Pfam Description: Thaumatin family
  misc_feature (19)..(249): Homolog of NCBI NO: 15221033 NR Description: thaumatin-like protein [Arabidopsis thaliana]
  misc_feature (19)..(249): Homolog of NCBI NO: 2129751 NR Description: thaumatin-like protein - Arabidopsis thaliana
  misc_feature (19)..(249): Homolog of NCBI NO: 7442175 NR Description: thaumatin-like protein - turnip
  misc_feature (29)..(250): Homolog of NCBI NO: 27373047 NR Description: cytokinin binding protein [Arabidopsis thaliana]
  misc_feature (1)..(250): Homolog of NCBI NO: 21554129 NR Description: putative thaumatin [Arabidopsis thaliana]
  misc_feature (1)..(250): Homolog of NCBI NO: 15226956 NR Description: osmotin-like protein, putative [Arabidopsis
  misc_feature (1)..(250): Homolog of NCBI NO: 27373045 NR Description: cytokinin-binding protein [Brassica oleracea]
  misc_feature (7)..(250): Homolog of NCBI NO: 5823278 NR Description: osmotin-like protein [Benincasa hispida]
  misc_feature (1)..(250): Homolog of NCBI NO: 2501182 NR Description: OSMOTIN-LIKE PROTEIN PRECURSOR
  misc_feature (1)..(250): Homolog of NCBI NO: 34908134 NR Description: osmotin-like protein [Oryza sativa (japonica
MASPKLLLLLATLLPSCGLLLADFAPMTLTVVNNCAYPIWPGIQGSAGSEVLEGGGFFLPSLSHRSFPAPTHAWSGRIWARTGCTPAGAGQLRCATGDCGGRLQCGGLGGAAPATLAQVSLHHGGDDQSSYGVSVVDGFNVGLSVTPHEGRGNCPVLACRKDLTQSCPGELQVRAAAGGGVAACKSGCLAFGTDELCCRNAYNSPAACRPSKYSDFFKNECPQAFTYAHDSPSLTHQCSAPRELKVIFCH

SEQ ID NO: 67669 - protein, 224 aa, Triticum aestivum
  peptide (1)..(224): Ceres Seq. ID no. 14302862
  misc_feature (7)..(224): Pfam Name: Thaumatin family Pfam Description: Thaumatin family
  misc_feature (1)..(223): Homolog of NCBI NO: 15221033 NR Description: thaumatin-like protein [Arabidopsis thaliana]
  misc_feature (1)..(223): Homolog of NCBI NO: 2129751 NR Description: thaumatin-like protein - Arabidopsis thaliana
  misc_feature (1)..(223): Homolog of NCBI NO: 7442175 NR Description: thaumatin-like protein - turnip
  misc_feature (3)..(224): Homolog of NCBI NO: 27373047 NR Description: cytokinin binding protein [Arabidopsis thaliana]
  misc_feature (1)..(224): Homolog of NCBI NO: 21554129 NR Description: putative thaumatin [Arabidopsis thaliana]
  misc_feature (1)..(224): Homolog of NCBI NO: 15226956 NR Description: osmotin-like protein, putative [Arabidopsis
  misc_feature (1)..(224): Homolog of NCBI NO: 27373045 NR Description: cytokinin-binding protein [Brassica oleracea]
  misc_feature (1)..(224): Homolog of NCBI NO: 5823278 NR Description: osmotin-like protein [Benincasa hispida]
  misc_feature (1)..(224): Homolog of NCBI NO: 2501182 NR Description: OSMOTIN-LIKE PROTEIN PRECURSOR
  misc_feature (1)..(224): Homolog of NCBI NO: 34908134 NR Description: osmotin-like protein [Oryza sativa (japonica
MTLTVVNNCAYPIWPGIQGSAGSEVLEGGGFFLPSLSHRSFPAPTHAWSGRIWARTGCTPAGAGQLRCATGDCGGRLQCGGLGGAAPATLAQVSLHHGGDDQSSYGVSVVDGFNVGLSVTPHEGRGNCPVLACRKDLTQSCPGELQVRAAAGGGVAACKSGCLAFGTDELCCRNAYNSPAACRPSKYSDFFKNECPQAFTYAHDSPSLTHQCSAPRELKVIFCH

SEQ ID NO: 67670 - DNA, 858 bp, Triticum aestivum
  misc_feature (1)..(858): Ceres Seq. ID no. 13660855
atcctgtccgggagcacggagccgcttcgttatccgctggccgctgctgctgcttctctgcgagtgagcgagtgaggaaagaggacggcgacgatggccggcatggcggcgctgcagggcgccatgggggcgctctccgtctcggccgcgagcaccagcgcattctggggcaacccgctcgccgccaccttctccgccgcgccgtctggggtcagattcatggccaagacaagcccaattgaaatgaggcttaagcgatgggaacggaagaagtgtaagccaaacagtcttcctatgctgcacaagatgcatgttagggtcggcgacacggtgcaggtcatcgcaggccgtgagaaaggtaaagttggggaagtcgtacggctttataagcacaacagcactgtgatagtgaaggatctgaacttgaagtcaaagcacaagaaaggcactgaggatgaaccgggtgaaattgtcatgattgaaggccccattcatagctcgaacatgatgctctactcaaaggagaagaacgtgacgagtagggttgggcacaaaatcctcgaggatggcaccaaggtccgctacctgaagaagaccggtgaagtaatcgacagcgttgacaactgggtgaaggtgttcaaggaaggagattctgagtcatcatcgtagtatggaaatgctgcgcatgctctcaaccttagctgcgcttattgctgcccaaacgcttactcggctggtgccactgcttgtactgtcagtttttttctagcttcagagcctcttttgtaaattactactactactacaaagttgtcaccatttttgcaacgcttggtccaacaagaaggccttcgtttt

SEQ ID NO: 67671 - protein, 191 aa, Triticum aestivum; identical to SEQ ID NO: 51758
  peptide (1)..(191): Ceres Seq. ID no. 13660856
  misc_feature (74)..(107): Pfam Name: KOW motif Pfam Description: KOW motif
  misc_feature (62)..(173): Homolog of NCBI NO: 23124117 NR Description: hypothetical protein [Nostoc punctiforme]
  misc_feature (58)..(173): Homolog of NCBI NO: 23042779 NR Description: hypothetical protein [Trichodesmium erythraeum
  misc_feature (62)..(173): Homolog of NCBI NO: 22297636 NR Description: 50S ribosomal protein L24 [Thermosynechococcus
  misc_feature (123)..(190): Homolog of NCBI NO: 30696487 NR Description: 50S ribosomal protein L24, chloroplast precursor
  misc_feature (1)..(104): Homolog of NCBI NO: 30696487 NR Description: 50S ribosomal protein L24, chloroplast precursor
  misc_feature (1)..(190): Homolog of NCBI NO: 132821 NR Description: 50S RIBOSOMAL PROTEIN L24, CHLOROPLAST PRECURSOR
  misc_feature (4)..(191): Homolog of NCBI NO: 400989 NR Description: 50S RIBOSOMAL PROTEIN L24, CHLOROPLAST PRECURSOR
  misc_feature (1)..(190): Homolog of NCBI NO: 1694974 NR Description: plastid ribosomal protein [Arabidopsis thaliana]
  misc_feature (1)..(190): Homolog of NCBI NO: 30696483 NR Description: 50S ribosomal protein L24, chloroplast precursor
  misc_feature (4)..(190): Homolog of NCBI NO: 132819 NR Description: 50S RIBOSOMAL PROTEIN L24, CHLOROPLAST PRECURSOR

SEQ ID NO: 67672 - protein, 188 aa, Triticum aestivum; identical to SEQ ID NO: 51759
  peptide (1)..(188): Ceres Seq. ID no. 13660857
  misc_feature (71)..(104): Pfam Name: KOW motif Pfam Description: KOW motif
  misc_feature (59)..(170): Homolog of NCBI NO: 23124117 NR Description: hypothetical protein [Nostoc punctiforme]
  misc_feature (55)..(170): Homolog of NCBI NO: 23042779 NR Description: hypothetical protein [Trichodesmium erythraeum
  misc_feature (59)..(170): Homolog of NCBI NO: 22297636 NR Description: 50S ribosomal protein L24 [Thermosynechococcus
  misc_feature (120)..(187): Homolog of NCBI NO: 30696487 NR Description: 50S ribosomal protein L24, chloroplast precursor
  misc_feature (1)..(101): Homolog of NCBI NO: 30696487 NR Description: 50S ribosomal protein L24, chloroplast precursor
  misc_feature (1)..(187): Homolog of NCBI NO: 132821 NR Description: 50S RIBOSOMAL PROTEIN L24, CHLOROPLAST PRECURSOR
  misc_feature (1)..(188): Homolog of NCBI NO: 400989 NR Description: 50S RIBOSOMAL PROTEIN L24, CHLOROPLAST PRECURSOR
  misc_feature (1)..(187): Homolog of NCBI NO: 1694974 NR Description: plastid ribosomal protein [Arabidopsis thaliana]
  misc_feature (1)..(187): Homolog of NCBI NO: 30696483 NR Description: 50S ribosomal protein L24, chloroplast precursor
  misc_feature (1)..(187): Homolog of NCBI NO: 132819 NR Description: 50S RIBOSOMAL PROTEIN L24, CHLOROPLAST PRECURSOR

SEQ ID NO: 67673 - protein, 181 aa, Triticum aestivum; identical to SEQ ID NO: 51760
  peptide (1)..(181): Ceres Seq. ID no. 13660858
  misc_feature (64)..(97): Pfam Name: KOW motif Pfam Description: KOW motif
  misc_feature (52)..(163): Homolog of NCBI NO: 23124117 NR Description: hypothetical protein [Nostoc punctiforme]
  misc_feature (48)..(163): Homolog of NCBI NO: 23042779 NR Description: hypothetical protein [Trichodesmium erythraeum
  misc_feature (52)..(163): Homolog of NCBI NO: 22297636 NR Description: 50S ribosomal protein L24 [Thermosynechococcus
  misc_feature (113)..(180): Homolog of NCBI NO: 30696487 NR Description: 50S ribosomal protein L24, chloroplast precursor
  misc_feature (1)..(94): Homolog of NCBI NO: 30696487 NR Description: 50S ribosomal protein L24, chloroplast precursor
  misc_feature (1)..(180): Homolog of NCBI NO: 132821 NR Description: 50S RIBOSOMAL PROTEIN L24, CHLOROPLAST PRECURSOR
  misc_feature (1)..(181): Homolog of NCBI NO: 400989 NR Description: 50S RIBOSOMAL PROTEIN L24, CHLOROPLAST PRECURSOR
  misc_feature (1)..(180): Homolog of NCBI NO: 1694974 NR Description: plastid ribosomal protein [Arabidopsis thaliana]
  misc_feature (1)..(180): Homolog of NCBI NO: 30696483 NR Description: 50S ribosomal protein L24, chloroplast precursor
  misc_feature (1)..(180): Homolog of NCBI NO: 132819 NR Description: 50S RIBOSOMAL PROTEIN L24, CHLOROPLAST PRECURSOR

SEQ ID NO: 67674 - DNA, 1568 bp, Triticum aestivum
  misc_feature (1)..(1568): Ceres Seq. ID no. 14303531
aatataatttcgtaatcgccgaccgttgcctctcctccccccttccccgctccaccctgcccagccaacggctaccgtctccacgagagaaaagggggagatggcggcggagagccctagatccgcgccacggcggacaccggccgccaagagcggcgcgggcctgctcagcccccggttccgctcggcggcggagctggccggctgggacgaggagtccatcctcctcgctgcgctcgtcgtcgaggacaccccggtccgcgagtcccgccgcaagaggcggccctccggctcctccaccgcgggcggcagcgccggatctaacaccaggaagcggaggtcgcggaggcagtcggcggatgaggcaccgataccgcccgtggcgcttgtgctcgacgacgacgagaagccgaatgacaatgaagttgccaagaaggaggtgaagcaggcggaggaggagaaggagaaggtttctgtcgtggagggaaaggagaagtccggatctaccaaggaaggagaagcagcggcgaccggcgagctgccgtgcatggatcggctaagggaggagctatcttgcgctatttgcttggatgtctgctttcagccaagtaccacgccttgtggtcacagcttttgcatgcaatgcttaaaacatgccgcctctaagtgtggaaagcggtgcccaaaatgccgtcagttaatcagtaattcaagatcttgcactatcaacacagtactttggaacaccatccaactcctatttcctagcgaagttgaggcgaggaagagctccatggcctcatcctcagcaagcaaggacgatgtgaagcaaagcctgccaagaagcaacaactatacacaagttggcattaggaacaccagtggcagtagcagcttcaccacacaggactacactagaataggcaacagcaccaggagctccttagcagcagacggcagaagaagtatgccggtcccaggaaccatgaacaccagcagtgggagctttgacacacagggtaggagcacaagaagcagagacagtggcagaggctttgtccgggcgtcagagttggttggcaccaggagttcagcgcggtcaggccaatctgacgacgcttcacttgcatacaggttgcagcaggaggagttcatgacggctttcgataatgatgggggagagaggcagccacagaacaccatatctactgcccgagcaaatttgagagctatggcttcccgggccgagagggcagttctccttcgtgctcgtggctggcctctttagttttgactgattttcagtttcccagtacctgaatctttctctggaagaatgtagcataagtaccatggtgtgatcaatcacttgtattgtgtgaaagtaaaacgatgacaagccagccatatgtgtttcctgtaatacacacaaatttagattgctttactagataatggtcgtatagccctgcattttctctagctggattaaggaatttctcgatccggtagttagatcaaagaactcttttacatttttggaattataaaggaagctatttttttgg

SEQ ID NO: 67675 - protein, 395 aa, Triticum aestivum
  peptide (1)..(395): Ceres Seq. ID no. 14303532
  misc_feature (159)..(197): Pfam Name: Zinc finger, C3HC4 type (RING finger) Pfam Description: Zinc finger, C3HC4 type (RING finger)
  misc_feature (54)..(222): Homolog of NCBI NO: 10438137 NR Description: unnamed protein product [Homo sapiens]
  misc_feature (99)..(247): Homolog of NCBI NO: 26449305 NR Description: hypothetical protein [Macaca fascicularis]
  misc_feature (99)..(219): Homolog of NCBI NO: 23487732 NR Description: zinc finger protein-related [Plasmodium yoelii
  misc_feature (99)..(247): Homolog of NCBI NO: 37622896 NR Description: ring finger protein 127 [Homo sapiens]
  misc_feature (99)..(247): Homolog of NCBI NO: 21750228 NR Description: unnamed protein product [Homo sapiens]
  misc_feature (99)..(247): Homolog of NCBI NO: 10439066 NR Description: unnamed protein product [Homo sapiens]
  misc_feature (155)..(230): Homolog of NCBI NO: 18394639 NR Description: RING finger protein family [Arabidopsis thaliana]
  misc_feature (155)..(230): Homolog of NCBI NO: 21554128 NR Description: unknown [Arabidopsis thaliana]
  misc_feature (1)..(347): Homolog of NCBI NO: 15232143 NR Description: zinc finger (C3HC4-type RING finger) protein
  misc_feature (1)..(347): Homolog of NCBI NO: 11994635 NR Description: gene_id:K1G2.4~ref|NP_008959.1~similar to unknown
MAAESPRSAPRRTPAAKSGAGLLSPRFRSAAELAGWDEESILLAALVVEDTPVRESRRKRRPSGSSTAGGSAGSNTRKRRSRRQSADEAPIPPVALVLDDDEKPNDNEVAKKEVKQAEEEKEKVSVVEGKEKSGSTKEGEAAATGELPCMDRLREELSCAICLDVCFQPSTTPCGHSFCMQCLKHAASKCGKRCPKCRQLISNSRSCTINTVLWNTIQLLFPSEVEARKSSMASSSASKDDVKQSLPRSNNYTQVGIRNTSGSSSFTTQDYTRIGNSTRSSLAADGRRSMPVPGTMNTSSGSFDTQGRSTRSRDSGRGFVRASELVGTRSSARSGQSDDASLAYRLQQEEFMTAFDNDGGERQPQNTISTARANLRAMASRAERAVLLRARGWPL

SEQ ID NO: 67676 - protein, 246 aa, Triticum aestivum
  peptide (1)..(246): Ceres Seq. ID no. 14303533
  misc_feature (10)..(48): Pfam Name: Zinc finger, C3HC4 type (RING finger) Pfam Description: Zinc finger, C3HC4 type (RING finger)
  misc_feature (1)..(73): Homolog of NCBI NO: 10438137 NR Description: unnamed protein product [Homo sapiens]
  misc_feature (1)..(98): Homolog of NCBI NO: 26449305 NR Description: hypothetical protein [Macaca fascicularis]
  misc_feature (1)..(70): Homolog of NCBI NO: 23487732 NR Description: zinc finger protein-related [Plasmodium yoelii
  misc_feature (1)..(98): Homolog of NCBI NO: 37622896 NR Description: ring finger protein 127 [Homo sapiens]
  misc_feature (1)..(98): Homolog of NCBI NO: 21750228 NR Description: unnamed protein product [Homo sapiens]
  misc_feature (1)..(98): Homolog of NCBI NO: 10439066 NR Description: unnamed protein product [Homo sapiens]
  misc_feature (6)..(81): Homolog of NCBI NO: 18394639 NR Description: RING finger protein family [Arabidopsis thaliana]
  misc_feature (6)..(81): Homolog of NCBI NO: 21554128 NR Description: unknown [Arabidopsis thaliana]
  misc_feature (1)..(198): Homolog of NCBI NO: 15232143 NR Description: zinc finger (C3HC4-type RING finger) protein
  misc_feature (1)..(198): Homolog of NCBI NO: 11994635 NR Description: gene_id:K1G2.4~ref|NP_008959.1~similar to unknown
MDRLREELSCAICLDVCFQPSTTPCGHSFCMQCLKHAASKCGKRCPKCRQLISNSRSCTINTVLWNTIQLLFPSEVEARKSSMASSSASKDDVKQSLPRSNNYTQVGIRNTSGSSSFTTQDYTRIGNSTRSSLAADGRRSMPVPGTMNTSSGSFDTQGRSTRSRDSGRGFVRASELVGTRSSARSGQSDDASLAYRLQQEEFMTAFDNDGGERQPQNTISTARANLRAMASRAERAVLLRARGWPL

SEQ ID NO: 67677 - protein, 216 aa, Triticum aestivum
  peptide (1)..(216): Ceres Seq. ID no. 14303534
  misc_feature (1)..(43): Homolog of NCBI NO: 10438137 NR Description: unnamed protein product [Homo sapiens]
  misc_feature (1)..(68): Homolog of NCBI NO: 26449305 NR Description: hypothetical protein [Macaca fascicularis]
  misc_feature (1)..(40): Homolog of NCBI NO: 23487732 NR Description: zinc finger protein-related [Plasmodium yoelii
  misc_feature (1)..(68): Homolog of NCBI NO: 37622896 NR Description: ring finger protein 127 [Homo sapiens]
  misc_feature (1)..(68): Homolog of NCBI NO: 21750228 NR Description: unnamed protein product [Homo sapiens]
  misc_feature (1)..(68): Homolog of NCBI NO: 10439066 NR Description: unnamed protein product [Homo sapiens]
  misc_feature (1)..(51): Homolog of NCBI NO: 18394639 NR Description: RING finger protein family [Arabidopsis thaliana]
  misc_feature (1)..(51): Homolog of NCBI NO: 21554128 NR Description: unknown [Arabidopsis thaliana]
  misc_feature (1)..(168): Homolog of NCBI NO: 15232143 NR Description: zinc finger (C3HC4-type RING finger) protein
  misc_feature (1)..(168): Homolog of NCBI NO: 11994635 NR Description: gene_id:K1G2.4~ref|NP_008959.1~similar to unknown
MQCLKHAASKCGKRCPKCRQLISNSRSCTINTVLWNTIQLLFPSEVEARKSSMASSSASKDDVKQSLPRSNNYTQVGIRNTSGSSSFTTQDYTRIGNSTRSSLAADGRRSMPVPGTMNTSSGSFDTQGRSTRSRDSGRGFVRASELVGTRSSARSGQSDDASLAYRLQQEEFMTAFDNDGGERQPQNTISTARANLRAMASRAERAVLLRARGWPL

SEQ ID NO: 67678 - DNA, 1450 bp, Triticum aestivum
  misc_feature (1)..(1450): Ceres Seq. ID no. 13660685
gctgaccggacgaattgccccgtcgtctcttggtagcgacgggcatccaacaagaccgaccgaatcgcgatggagacctgggtccgcgccgccgtggaggccatccactcgtctcgagcccaagccgtcatctatctcgccggcggcgcctcccaggcgctcggttggctcctgtccgtgcccggcgcttctggcagcgtcctcgaggtcgtcgtgccctactccagggcctccatggcgcagctgctcggcaagttgcccctgcaattcacaagcaagcaggccgcggaggacatggcactggccgcgttcaaccgtgccctgaagctttctgggccaggtctacaagtaatgggtgttggatttactgggtcactcgctagcgcacgcccaaaacatggtgaccacaggttttatgtgtcaacgcgcacgcaaaattgcctcaggmcatcacatgtaacattgtcgaagggtttacggagcagagaggaagaagacaaggtctcaagctgttttgtgcttaaggcaatcgcagatgcatgcagaatttctgcaaccattcagtcagacgttcaagaacctgaaattccaaaagaaagtgtggaacaatttgatgaagaccaagagctccagcaagttattgatggtcaagtctgcatgaaagtttaccactttgctgatccaacggaaaagaacttcgacaggaaactaattctacctggttcattcaatcccttgcatgatggccaccttaggttgttagaagttgcatcaagcatgtgtgatgatgggtttccgtgctttgagatatcagcaataaatgcggacaaaccccccctgtctattgcagaaattaagcgccgtgtcgagcaattcagaaaagcagggaagaatgtgatcatatctaaccaaccgtacttttataagaaagcagaacttttcccaggcagtgcttttataattggtgcagacactgcagctaggcttgtaaatcctaagtattatggaggtgactacaacagaatgctggagattcttcttgaatgtaaaagcactggcacaacatttctggttggtggtcgagagattgaaggagtattcaaggtccttgaagaattaaatattccaacagagttgaaggacatgtttatctctataccagaggagaagttccgcatagacatttcatctactgaattaagaaaaaaacaagggctctgatgtctcgaacacttggtcctatcctacaccagattcaagatgtttttctcttgggcgaagctttgcaaatagtcatggcagtgtttgatttcgtagttttgccatgcaaataataactgttatgtttgtattagtaaaggcaaaaacacattccattagtactacagatgtcagaaggcgatggtggccctgttatttttttcttgaaacgccatgtaatctttctgtt

SEQ ID NO: 67679 - protein, 383 aa, Triticum aestivum
  peptide (1)..(383): Ceres Seq. ID no. 15220049
  misc_feature (5)..(152): Homolog of NCBI NO: 25371182 NR Description: hypothetical protein At2g01220 [imported] -
  misc_feature (2)..(382): Homolog of NCBI NO: 15232221 NR Description: expressed protein [Arabidopsis thaliana]
  misc_feature (2)..(382): Homolog of NCBI NO: 9294466 NR Description: gb|AAD14522.1~gene_id:MGF10.2~similar to unknown
  misc_feature (5)..(382): Homolog of NCBI NO: 26451899 NR Description: unknown protein [Arabidopsis thaliana]
  misc_feature (5)..(382): Homolog of NCBI NO: 21537099 NR Description: unknown [Arabidopsis thaliana]
  misc_feature (5)..(382): Homolog of NCBI NO: 30677893 NR Description: expressed protein [Arabidopsis thaliana]
  misc_feature (309)..(382): Homolog of NCBI NO: 34911372 NR Description: P0034C09.17 [Oryza sativa (japonica
  misc_feature (1)..(95): Homolog of NCBI NO: 34911372 NR Description: P0034C09.17 [Oryza sativa (japonica
  misc_feature (150)..(271): Homolog of NCBI NO: 34911372 NR Description: P0034C09.17 [Oryza sativa (japonica
  misc_feature (5)..(382): Homolog of NCBI NO: 30677890 NR Description: expressed protein [Arabidopsis thaliana]
  misc_feature (127)..(127): Xaa is any aa, unknown or other
METWVRAAVEAIHSSRAQAVIYLAGGASQALGWLLSVPGASGSVLEVVVPYSRASMAQLLGKLPLQFTSKQAAEDMALAAFNRALKLSGPGLQVMGVGFTGSLASARPKHGDHRFYVSTRTQNCLRXSHVTLSKGLRSREEEDKVSSCFVLKAIADACRISATIQSDVQEPEIPKESVEQFDEDQELQQVIDGQVCMKVYHFADPTEKNFDRKLILPGSFNPLHDGHLRLLEVASSMCDDGFPCFEISAINADKPPLSIAEIKRRVEQFRKAGKNVIISNQPYFYKKAELFPGSAFIIGADTAARLVNPKYYGGDYNRMLEILLECKSTGTTFLVGGREIEGVFKVLEELNIPTELKDMFISIPEEKFRIDISSTELRKKQGL

SEQ ID NO: 67680 - protein, 328 aa, Triticum aestivum
  peptide (1)..(328): Ceres Seq. ID no. 15220050
  misc_feature (1)..(97): Homolog of NCBI NO: 25371182 NR Description: hypothetical protein At2g01220 [imported] -
  misc_feature (1)..(327): Homolog of NCBI NO: 15232221 NR Description: expressed protein [Arabidopsis thaliana]
  misc_feature (1)..(327): Homolog of NCBI NO: 9294466 NR Description: gb|AAD14522.1~gene_id:MGF10.2~similar to unknown
  misc_feature (1)..(327): Homolog of NCBI NO: 26451899 NR Description: unknown protein [Arabidopsis thaliana]
  misc_feature (1)..(327): Homolog of NCBI NO: 21537099 NR Description: unknown [Arabidopsis thaliana]
  misc_feature (1)..(327): Homolog of NCBI NO: 30677893 NR Description: expressed protein [Arabidopsis thaliana]
  misc_feature (254)..(327): Homolog of NCBI NO: 34911372 NR Description: P0034C09.17 [Oryza sativa (japonica
  misc_feature (1)..(40): Homolog of NCBI NO: 34911372 NR Description: P0034C09.17 [Oryza sativa (japonica
  misc_feature (95)..(216): Homolog of NCBI NO: 34911372 NR Description: P0034C09.17 [Oryza sativa (japonica
  misc_feature (1)..(327): Homolog of NCBI NO: 30677890 NR Description: expressed protein [Arabidopsis thaliana]
  misc_feature (72)..(72): Xaa is any aa, unknown or other
MAQLLGKLPLQFTSKQAAEDMALAAFNRALKLSGPGLQVMGVGFTGSLASARPKHGDHRFYVSTRTQNCLRXSHVTLSKGLRSREEEDKVSSCFVLKAIADACRISATIQSDVQEPEIPKESVEQFDEDQELQQVIDGQVCMKVYHFADPTEKNFDRKLILPGSFNPLHDGHLRLLEVASSMCDDGFPCFEISAINADKPPLSIAEIKRRVEQFRKAGKNVIISNQPYFYKKAELFPGSAFIIGADTAARLVNPKYYGGDYNRMLEILLECKSTGTTFLVGGREIEGVFKVLEELNIPTELKDMFISIPEEKFRIDISSTELRKKQGL

SEQ ID NO: 67681 - protein, 308 aa, Triticum aestivum
  peptide (1)..(308): Ceres Seq. ID no. 15220051
  misc_feature (1)..(77): Homolog of NCBI NO: 25371182 NR Description: hypothetical protein At2g01220 [imported] -
  misc_feature (1)..(307): Homolog of NCBI NO: 15232221 NR Description: expressed protein [Arabidopsis thaliana]
  misc_feature (1)..(307): Homolog of NCBI NO: 9294466 NR Description: gb|AAD14522.1~gene_id:MGF10.2~similar to unknown
  misc_feature (1)..(307): Homolog of NCBI NO: 26451899 NR Description: unknown protein [Arabidopsis thaliana]
  misc_feature (1)..(307): Homolog of NCBI NO: 21537099 NR Description: unknown [Arabidopsis thaliana]
  misc_feature (1)..(307): Homolog of NCBI NO: 30677893 NR Description: expressed protein [Arabidopsis thaliana]
  misc_feature (234)..(307): Homolog of NCBI NO: 34911372 NR Description: P0034C09.17 [Oryza sativa (japonica
  misc_feature (1)..(20): Homolog of NCBI NO: 34911372 NR Description: P0034C09.17 [Oryza sativa (japonica
  misc_feature (75)..(196): Homolog of NCBI NO: 34911372 NR Description: P0034C09.17 [Oryza sativa (japonica
  misc_feature (1)..(307): Homolog of NCBI NO: 30677890 NR Description: expressed protein [Arabidopsis thaliana]
  misc_feature (52)..(52): Xaa is any aa, unknown or other
MALAAFNRALKLSGPGLQVMGVGFTGSLASARPKHGDHRFYVSTRTQNCLRXSHVTLSKGLRSREEEDKVSSCFVLKAIADACRISATIQSDVQEPEIPKESVEQFDEDQELQQVIDGQVCMKVYHFADPTEKNFDRKLILPGSFNPLHDGHLRLLEVASSMCDDGFPCFEISAINADKPPLSIAEIKRRVEQFRKAGKNVIISNQPYFYKKAELFPGSAFIIGADTAARLVNPKYYGGDYNRMLEILLECKSTGTTFLVGGREIEGVFKVLEELNIPTELKDMFISIPEEKFRIDISSTELRKKQGL

SEQ ID NO: 67682 - DNA, 911 bp, Triticum aestivum
  misc_feature (1)..(911): Ceres Seq. ID no. 12621905
cttccccgtgagctcgtgcgcctcgcagtcgtcgtgtggtagtcgcttcccccggctggactccttcctccgtgtccgtcgccttcgcctccccagatccggtccctatggcgaggaatccgggctgcgccgtctacataggtaacttggatgaaaaggtctcggagagggttttgtatgagattcttattcagatctctgggcaagacaaggcctcttcaaatgtcaatgttcctgtaacacctaaaatgaacccactaccaaatccacctcaaccaatgagatttggtgatactcctgtgtcacaacatagagtggtaaatggtaggattgcaggctatggtgtttctccaaatcattcttatgatttccattcccaagcatcaagtggggtagcaagtagaggattaagtgatggtacatatgattatagtagacgtgtatttggttctgttctgaatgatgttagccgtcgagctgacagacaaccagttccatacccgtcctactagcatactgagctccaatgaatgaaacatcggccagtgcagccattgttgtctcagcccttccgtagggtcatctgggtacttgccattacatccatgtaaatatggcttatggtagtgaatgtgcgtgtctgtctggttgttctgttgttttctgcatggtatggaggcctgtcgctgatggttaggttccatgccttatcttcctgataggatattgcccccactaatgttgctgtagtactttccctagtcatagggatggggttaccgtattctcagttcaaaatatgtgaactagtatgttatttgttgtttgtcatgtgagttggatctgtattatgttgggacatgaatgggtaaaaaaccctacaaatctgccatctgtctttaaacttatcc

SEQ ID NO: 67683 - protein, 134 aa, Triticum aestivum
  peptide (1)..(134): Ceres Seq. ID no. 12621906
  misc_feature (1)..(29): Homolog of NCBI NO: 34907328 NR Description: P0698A10.26 [Oryza sativa (japonica
  misc_feature (30)..(109): Homolog of NCBI NO: 34907328 NR Description: P0698A10.26 [Oryza sativa (japonica
MARNPGCAVYIGNLDEKVSERVLYEILIQISGQDKASSNVNVPVTPKMNPLPNPPQPMRFGDTPVSQHRVVNGRIAGYGVSPNHSYDFHSQASSGVASRGLSDGTYDYSRRVFGSVLNDVSRRADRQPVPYPSY

SEQ ID NO: 67684 - protein, 87 aa, Triticum aestivum
  peptide (1)..(87): Ceres Seq. ID no. 12621907
  misc_feature (1)..(62): Homolog of NCBI NO: 34907328 NR Description: P0698A10.26 [Oryza sativa (japonica
MNPLPNPPQPMRFGDTPVSQHRVVNGRIAGYGVSPNHSYDFHSQASSGVASRGLSDGTYDYSRRVFGSVLNDVSRRADRQPVPYPSY

SEQ ID NO: 67685 - protein, 77 aa, Triticum aestivum
  peptide (1)..(77): Ceres Seq. ID no. 12621908
  misc_feature (1)..(52): Homolog of NCBI NO: 34907328 NR Description: P0698A10.26 [Oryza sativa (japonica
MRFGDTPVSQHRVVNGRIAGYGVSPNHSYDFHSQASSGVASRGLSDGTYDYSRRVFGSVLNDVSRRADRQPVPYPSY

SEQ ID NO: 67686 - DNA, 1962 bp, Triticum aestivum
  misc_feature (1)..(1962): Ceres Seq. ID no. 13664013
catagcttcattccgtctcgatctctgccttctcctgagagactcgtatcagtcggctgcccaccatcgccggtccaagaagccgcctgctcgtcggctactccgccgccccactcgcccatccacccacctcccttccccggattcaggaccggatcggccttcccctctgtagatggacatcacaatcaattccttgacgtacaaaggttcgattccagatgcaattaatcaatcaagaagggagaaaaaactctttgtaatttacatatcaggtcaagatgaaacctcaagtagtttggaacagtctacattggttgatgaacatgtggctgcagtgataagcagatgttgcatattcttgcaactaaaacaaggcaatgttgacgcgcttcaattttcagctatctatccacagaagtctgtcccaagtatatctgtcgttggactgaatggtgctatgctatggaatcatgaggggtatattagcccagaagagcttaaggaaagcattgataaagcttgggctgcacttcaactgcaggagacagcggcaaccctgttagctgcatcacttgcttcaagaatgtctgaacctgcgaatactgcttcgacaactatgcctggtgaagatggttcatctacttcagaaaatcattccaattcatcaggtcaatcctcagagtcttctgcagtccgtgggtttgctaattctactgctttggtagcacaaccacctagtagcacaagccatgctgaacttctcaagacaagtaaaatcccaaaatcagattcagctccatgcaacataaccgctgaggaaaagctagattcagcatgtcaggctctgttgccagattttccagcaagctcaaatgtggacagttccacagatccaaatcagacaggcagtacaccttcgccaaaaaggaagaatatggtggatgggaatagccctaaagttccctccaagccagcttctagcataccaactaggagtactccacagttgcctgtggaacaagataaggcaactactagcagagctattgaagtgaccacagattctgcaaagacagatgatattcagctggccattcgtatgcctgatggacctagtctgcagattaaactgacaaaagaagatgttttaaggaaggtgaagacttttgtggatgaaaaccaagatagtgggattggatcatataatcttgcaatgctttatcctagaaaagtgttcacggaacaagatctggaaaccacattgtatgagctgggtattgaaacccgccaggcccttgttgtcgttccgaatcgtcaatctgttaaagtggtaaggcaccaatcgtcattgccatccagtgatctggatcgcactggggctacagacaggtcgggtggttggggttttctgggggcagcgttatcatacgtgaatccattgtcctacttgagaggaaatcccaccccatcaaatcctgatcgactgggaaatgaaggctcgcagcagtacagaccgaactctgaatcccaacctcttcgtagtgatggaagtcaacaaacagctactcatagctctggaaataccttgagaaggcggccccgacagttcggtggcaacattcacactctaagcagtgaagaacaagatccatctgataatagaaatgtcttctggaatgggaattctacagagtttggaggtgatgaaaagaaataggggatgaccggactgcatcgaagttagatgatacttgaaccatttaatggggaaataaatatgttgggaacgaactgaggtgttaaactacagtgcttatacatatgtttggaacaaattgaggtgttaaattacagtgcttatacataacaagtaatatggcacgtgcaaccctagaatttactttgttcaccccaggaatgacctttgttatttccgtacgagcatatataatttgatgt

SEQ ID NO: 67687 - protein, 514 aa, Triticum aestivum
  peptide (1)..(514): Ceres Seq. ID no. 13664014
  misc_feature (298)..(379): Pfam Name: UBX domain Pfam Description: UBX domain
  misc_feature (8)..(195): Homolog of NCBI NO: 23956178 NR Description: RIKEN cDNA 1300013G12 [Mus musculus]
  misc_feature (8)..(192): Homolog of NCBI NO: 1663704 NR Description: KIAA0242 protein [Homo sapiens]
  misc_feature (305)..(500): Homolog of NCBI NO: 1663704 NR Description: KIAA0242 protein [Homo sapiens]
  misc_feature (8)..(192): Homolog of NCBI NO: 24307965 NR Description: UBX domain containing 2
  misc_feature (305)..(500): Homolog of NCBI NO: 24307965 NR Description: UBX domain containing 2
  misc_feature (10)..(195): Homolog of NCBI NO: 40555755 NR Description: Unknown (protein for MGC:73362) [Danio rerio]
  misc_feature (283)..(507): Homolog of NCBI NO: 40555755 NR Description: Unknown (protein for MGC:73362) [Danio rerio]
  misc_feature (5)..(441): Homolog of NCBI NO: 25408846 NR Description: hypothetical protein At2g43210 [imported] -
  misc_feature (5)..(510): Homolog of NCBI NO: 30689298 NR Description: expressed protein [Arabidopsis thaliana]
  misc_feature (5)..(510): Homolog of NCBI NO: 20147205 NR Description: MFL8.1/MFL8.1 [Arabidopsis thaliana]
MDITINSLTYKGSIPDAINQSRREKKLFVIYISGQDETSSSLEQSTLVDEHVAAVISRCCIFLQLKQGNVDALQFSAIYPQKSVPSISVVGLNGAMLWNHEGYISPEELKESIDKAWAALQLQETAATLLAASLASRMSEPANTASTTMPGEDGSSTSENHSNSSGQSSESSAVRGFANSTALVAQPPSSTSHAELLKTSKIPKSDSAPCNITAEEKLDSACQALLPDFPASSNVDSSTDPNQTGSTPSPKRKNMVDGNSPKVPSKPASSIPTRSTPQLPVEQDKATTSRAIEVTTDSAKTDDIQLAIRMPDGPSLQIKLTKEDVLRKVKTFVDENQDSGIGSYNLAMLYPRKVFTEQDLETTLYELGIETRQALVVVPNRQSVKVVRHQSSLPSSDLDRTGATDRSGGWGFLGAALSYVNPLSYLRGNPTPSNPDRLGNEGSQQYRPNSESQPLRSDGSQQTATHSSGNTLRRRPRQFGGNIHTLSSEEQDPSDNRNVFWNGNSTEFGGDEKK

SEQ ID NO: 67688 - protein, 419 aa, Triticum aestivum
  peptide (1)..(419): Ceres Seq. ID no. 13664015
  misc_feature (203)..(284): Pfam Name: UBX domain Pfam Description: UBX domain
  misc_feature (1)..(100): Homolog of NCBI NO: 23956178 NR Description: RIKEN cDNA 1300013G12 [Mus musculus]
  misc_feature (1)..(97): Homolog of NCBI NO: 1663704 NR Description: KIAA0242 protein [Homo sapiens]
  misc_feature (210)..(405): Homolog of NCBI NO: 1663704 NR Description: KIAA0242 protein [Homo sapiens]
  misc_feature (1)..(97): Homolog of NCBI NO: 24307965 NR Description: UBX domain containing 2
  misc_feature (210)..(405): Homolog of NCBI NO: 24307965 NR Description: UBX domain containing 2
  misc_feature (1)..(100): Homolog of NCBI NO: 40555755 NR Description: Unknown (protein for MGC:73362) [Danio rerio]
  misc_feature (188)..(412): Homolog of NCBI NO: 40555755 NR Description: Unknown (protein for MGC:73362) [Danio rerio]
  misc_feature (1)..(346): Homolog of NCBI NO: 25408846 NR Description: hypothetical protein At2g43210 [imported] -
  misc_feature (1)..(415): Homolog of NCBI NO: 30689298 NR Description: expressed protein [Arabidopsis thaliana]
  misc_feature (1)..(415): Homolog of NCBI NO: 20147205 NR Description: MFL8.1/MFL8.1 [Arabidopsis thaliana]
MLWNHEGYISPEELKESIDKAWAALQLQETAATLLAASLASRMSEPANTASTTMPGEDGSSTSENHSNSSGQSSESSAVRGFANSTALVAQPPSSTSHAELLKTSKIPKSDSAPCNITAEEKLDSACQALLPDFPASSNVDSSTDPNQTGSTPSPKRKNMVDGNSPKVPSKPASSIPTRSTPQLPVEQDKATTSRAIEVTTDSAKTDDIQLAIRMPDGPSLQIKLTKEDVLRKVKTFVDENQDSGIGSYNLAMLYPRKVFTEQDLETTLYELGIETRQALVVVPNRQSVKVVRHQSSLPSSDLDRTGATDRSGGWGFLGAALSYVNPLSYLRGNPTPSNPDRLGNEGSQQYRPNSESQPLRSDGSQQTATHSSGNTLRRRPRQFGGNIHTLSSEEQDPSDNRNVFWNGNSTEFGGDEKK

SEQ ID NO: 67689 - protein, 377 aa, Triticum aestivum
  peptide (1)..(377): Ceres Seq. ID no. 13664016
  misc_feature (161)..(242): Pfam Name: UBX domain Pfam Description: UBX domain
  misc_feature (1)..(58): Homolog of NCBI NO: 23956178 NR Description: RIKEN cDNA 1300013G12 [Mus musculus]
  misc_feature (1)..(55): Homolog of NCBI NO: 1663704 NR Description: KIAA0242 protein [Homo sapiens]
  misc_feature (168)..(363): Homolog of NCBI NO: 1663704 NR Description: KIAA0242 protein [Homo sapiens]
  misc_feature (1)..(55): Homolog of NCBI NO: 24307965 NR Description: UBX domain containing 2
  misc_feature (168)..(363): Homolog of NCBI NO: 24307965 NR Description: UBX domain containing 2
  misc_feature (1)..(58): Homolog of NCBI NO: 40555755 NR Description: Unknown (protein for MGC:73362) [Danio rerio]
  misc_feature (146)..(370): Homolog of NCBI NO: 40555755 NR Description: Unknown (protein for MGC:73362) [Danio rerio]
  misc_feature (1)..(304): Homolog of NCBI NO: 25408846 NR Description: hypothetical protein At2g43210 [imported] -
  misc_feature (1)..(373): Homolog of NCBI NO: 30689298 NR Description: expressed protein [Arabidopsis thaliana]
  misc_feature (1)..(373): Homolog of NCBI NO: 20147205 NR Description: MFL8.1/MFL8.1 [Arabidopsis thaliana]
MSEPANTASTTMPGEDGSSTSENHSNSSGQSSESSAVRGFANSTALVAQPPSSTSHAELLKTSKIPKSDSAPCNITAEEKLDSACQALLPDFPASSNVDSSTDPNQTGSTPSPKRKNMVDGNSPKVPSKPASSIPTRSTPQLPVEQDKATTSRAIEVTTDSAKTDDIQLAIRMPDGPSLQIKLTKEDVLRKVKTFVDENQDSGIGSYNLAMLYPRKVFTEQDLETTLYELGIETRQALVVVPNRQSVKVVRHQSSLPSSDLDRTGATDRSGGWGFLGAALSYVNPLSYLRGNPTPSNPDRLGNEGSQQYRPNSESQPLRSDGSQQTATHSSGNTLRRRPRQFGGNIHTLSSEEQDPSDNRNVFWNGNSTEFGGDEKK

SEQ ID NO: 67690 - DNA, 1542 bp, Triticum aestivum
  misc_feature (1)..(1542): Ceres Seq. ID no. 12613390
ccaaacaaacgccaccgtcttccccacctctcccgtccccggtccggtccaccaaccgcctccaggccgcaaccatgcacggccgccgccatctggcggcctccctggcgagagccctgtcccaggccccctcccgctccatctcctccaccccgtccctcctccaaaccctcgacccgaccccgcagtcccctcccctcgccgcgcccgcggcggggcggctcgcggagatgcggaggcggctgcaggcggagacgccgtcgctgggggacttcgcgtactcggtggaggtggggacgcggaagaagccgctgcccaagcccaagtggatgaaggagacgatccccggcggggccaagtacgcggccatcaaggccaagctgcgggagctgaagctgcacactgtctgcgaggaggcgcgctgccccaacctcggcgagtgctggtcgggcggcgagaccggcaccgccactgccaccatcatgatcctcggtgacacctgcacgcgtggatgcagattttgcaatgtcaagacatcacgaacccctcctccaccagatcctaatgagcctgccaatgttgcgcaagctattgcatcgtggggccttgaatatatagtcatcacaagtgtggaccgggatgatttacctgatcaggggagcggccattttgctgaaacagtacagaggttgaagactttaaagccagatatgcttattgaagcgcttgttcctgatttccaaggagatcgaagttgtgtagaaaaggtagcaacttccgggttgcatgtttttgcacacaatattgaaacggtggaagagcttcaaagaagtgtgcgagaccaccgtgcaaattttaagcaatcaatggatgttctgaaaatggcgaaggagtatgcccctcctggcaccctcacaaagacatcagtcatgctgggttgtggggagactcccgatcaggttatcagcacaatggaaaaggtgcgagctgctggtgttgatgtcattacatttggtcagtacatgaggccgtcaaagcgacatatgccagtgtctgagtatattacacctgaagccttcgagaactaccgcgcccttggtgttgaaatgggatttcgttatgttgcatctggtccgatggttcggtcctcctacaaagcaggcgaattctacatcaaagccatgatcgaagatgaccgagcaaaatcaggtgctgttgcagaatcaagttcatagttgacacacctccagtcattgacatggctacgctgcaaataagatgttctaattggagaaacatgtttgtctttttacatcttggtaaaactgatattctttttgagagaataaattcttctgcctcttcacttcaaaaaattatttacatttcttcatactatctcctcctttgtactactatacgtggctataatcatccattgtaagttgtaacagtagcagggatagagtccgtcaatgtaccccaccgaatattattgaggccattattgtgcctcatgtgatgtgcttgtacagagttttg

SEQ ID NO: 67691 - protein, 410 aa, Triticum aestivum
  peptide (1)..(410): Ceres Seq. ID no. 12613391
  misc_feature (161)..(327): Pfam Name: Radical SAM superfamily Pfam Description: Radical SAM superfamily
  misc_feature (107)..(405): Homolog of NCBI NO: 26327671 NR Description: unnamed protein product [Mus musculus]
  misc_feature (34)..(410): Homolog of NCBI NO: 31211147 NR Description: ENSANGP00000016313 [Anopheles gambiae]
  misc_feature (107)..(405): Homolog of NCBI NO: 13277380 NR Description: lipoic acid synthetase [Mus musculus]
  misc_feature (99)..(402): Homolog of NCBI NO: 21553591 NR Description: lipoic acid synthase-like protein [Arabidopsis
  misc_feature (99)..(402): Homolog of NCBI NO: 18415808 NR Description: lipoic acid synthase - like protein
  misc_feature (67)..(401): Homolog of NCBI NO: 17737685 NR Description: Lipoic acid synthase CG5231-PA
  misc_feature (107)..(407): Homolog of NCBI NO: 33989742 NR Description: Unknown (protein for MGC:66080) [Danio rerio]
  misc_feature (48)..(400): Homolog of NCBI NO: 13873338 NR Description: lipoic acid synthase [Bruguiera gymnorrhiza]
  misc_feature (25)..(402): Homolog of NCBI NO: 15226412 NR Description: lipoic acid synthase (LIP1)
  misc_feature (25)..(402): Homolog of NCBI NO: 38347101 NR Description: OSJNBa0006M15.16 [Oryza sativa (japonica
KQTPPSSPPLPSPVRSTNRLQAATMHGRRHLAASLARALSQAPSRSISSTPSLLQTLDPTPQSPPLAAPAAGRLAEMRRRLQAETPSLGDFAYSVEVGTRKKPLPKPKWMKETIPGGAKYAAIKAKLRELKLHTVCEEARCPNLGECWSGGETGTATATIMILGDTCTRGCRFCNVKTSRTPPPPDPNEPANVAQAIASWGLEYIVITSVDRDDLPDQGSGHFAETVQRLKTLKPDMLIEALVPDFQGDRSCVEKVATSGLHVFAHNIETVEELQRSVRDHRANFKQSMDVLKMAKEYAPPGTLTKTSVMLGCGETPDQVISTMEKVRAAGVDVITFGQYMRPSKRHMPVSEYITPEAFENYRALGVEMGFRYVASGPMVRSSYKAGEFYIKAMIEDDRAKSGAVAESSS

SEQ ID NO: 67692 - protein, 386 aa, Triticum aestivum
  peptide (1)..(386): Ceres Seq. ID no. 12613392
  misc_feature (137)..(303): Pfam Name: Radical SAM superfamily Pfam Description: Radical SAM superfamily
  misc_feature (83)..(381): Homolog of NCBI NO: 26327671 NR Description: unnamed protein product [Mus musculus]
  misc_feature (10)..(386): Homolog of NCBI NO: 31211147 NR Description: ENSANGP00000016313 [Anopheles gambiae]
  misc_feature (83)..(381): Homolog of NCBI NO: 13277380 NR Description: lipoic acid synthetase [Mus musculus]
  misc_feature (75)..(378): Homolog of NCBI NO: 21553591 NR Description: lipoic acid synthase-like protein [Arabidopsis
  misc_feature (75)..(378): Homolog of NCBI NO: 18415808 NR Description: lipoic acid synthase - like protein
  misc_feature (43)..(377): Homolog of NCBI NO: 17737685 NR Description: Lipoic acid synthase CG5231-PA
  misc_feature (83)..(383): Homolog of NCBI NO: 33989742 NR Description: Unknown (protein for MGC:66080) [Danio rerio]
  misc_feature (24)..(376): Homolog of NCBI NO: 13873338 NR Description: lipoic acid synthase [Bruguiera gymnorrhiza]
  misc_feature (1)..(378): Homolog of NCBI NO: 15226412 NR Description: lipoic acid synthase (LIP1)
  misc_feature (1)..(378): Homolog of NCBI NO: 38347101 NR Description: OSJNBa0006M15.16 [Oryza sativa (japonica
MHGRRHLAASLARALSQAPSRSISSTPSLLQTLDPTPQSPPLAAPAAGRLAEMRRRLQAETPSLGDFAYSVEVGTRKKPLPKPKWMKETIPGGAKYAAIKAKLRELKLHTVCEEARCPNLGECWSGGETGTATATIMILGDTCTRGCRFCNVKTSRTPPPPDPNEPANVAQAIASWGLEYIVITSVDRDDLPDQGSGHFAETVQRLKTLKPDMLIEALVPDFQGDRSCVEKVATSGLHVFAHNIETVEELQRSVRDHRANFKQSMDVLKMAKEYAPPGTLTKTSVMLGCGETPDQVISTMEKVRAAGVDVITFGQYMRPSKRHMPVSEYITPEAFENYRALGVEMGFRYVASGPMVRSSYKAGEFYIKAMIEDDRAKSGAVAESSS

SEQ ID NO: 67693 - protein, 334 aa, Triticum aestivum
  peptide (1)..(334): Ceres Seq. ID no. 12613393
  misc_feature (85)..(251): Pfam Name: Radical SAM superfamily Pfam Description: Radical SAM superfamily
  misc_feature (31)..(329): Homolog of NCBI NO: 26327671 NR Description: unnamed protein product [Mus musculus]
  misc_feature (1)..(334): Homolog of NCBI NO: 31211147 NR Description: ENSANGP00000016313 [Anopheles gambiae]
  misc_feature (31)..(329): Homolog of NCBI NO: 13277380 NR Description: lipoic acid synthetase [Mus musculus]
  misc_feature (23)..(326): Homolog of NCBI NO: 21553591 NR Description: lipoic acid synthase-like protein [Arabidopsis
  misc_feature (23)..(326): Homolog of NCBI NO: 18415808 NR Description: lipoic acid synthase - like protein
  misc_feature (1)..(325): Homolog of NCBI NO: 17737685 NR Description: Lipoic acid synthase CG5231-PA
  misc_feature (31)..(331): Homolog of NCBI NO: 33989742 NR Description: Unknown (protein for MGC:66080) [Danio rerio]
  misc_feature (1)..(324): Homolog of NCBI NO: 13873338 NR Description: lipoic acid synthase [Bruguiera gymnorrhiza]
  misc_feature (1)..(326): Homolog of NCBI NO: 15226412 NR Description: lipoic acid synthase (LIP1)
  misc_feature (1)..(326): Homolog of NCBI NO: 38347101 NR Description: OSJNBa0006M15.16 [Oryza sativa (japonica
MRRRLQAETPSLGDFAYSVEVGTRKKPLPKPKWMKETIPGGAKYAAIKAKLRELKLHTVCEEARCPNLGECWSGGETGTATATIMILGDTCTRGCRFCNVKTSRTPPPPDPNEPANVAQAIASWGLEYIVITSVDRDDLPDQGSGHFAETVQRLKTLKPDMLIEALVPDFQGDRSCVEKVATSGLHVFAHNIETVEELQRSVRDHRANFKQSMDVLKMAKEYAPPGTLTKTSVMLGCGETPDQVISTMEKVRAAGVDVITFGQYMRPSKRHMPVSEYITPEAFENYRALGVEMGFRYVASGPMVRSSYKAGEFYIKAMIEDDRAKSGAVAESSS

SEQ ID NO: 67694 - DNA, 1048 bp, Triticum aestivum
  misc_feature (1)..(1048): Ceres Seq. ID no. 12587797
ggatgctggagccaccgctccaaaacacacagaaacacacacacagcttcttgctttctcaaacactgatcttgcagcttcagcgtcgtccaccgtcggaaagaaggcatggcgggcgcatcctcgtggtcgtcgtcctgctcatgcacgtcgtcgctcggctccttggatgacgacgacgtggtctgcgtggtgaaaccgggttcccccggggcggcagagggcagcgtcaagttcctgtgcagctacgggggtatgatccttccacgccaccccgacgccgccctccgttacgtcggcggcaacaaccgcgtcctctccgtcgaccgctccctccaattttacgagctgcaacggaagctgatggacatgtgcggatgcgaggcgatgagcctgcggtgccagctgccgacggaggacctggacgcgctcgtctccgtcacgaccaacgacgacctcggccacctgctggaggagtacgacgccgctagcagggaccggctccagccgctcaagataagggcgttcctgttcccaaggtccaaaacgccgcctctctcgccgtccaccccgtcgtccaggccaacaccggcgtacgtccgccaccagcaccacacggctcgcccccctccggctcgtgtgcattcgggccaccggcgcccacaccagctcctgctcctccacaacggcagtcggttgcaataacagcgggattagcagccgcgtgctggtgtattagcttggcagtcgtgagatcgtccatggggcgctgtgccgctgtcacagatttgtaagccctgctttgcatgtttcataacatatactccctccgttcccaaatatttgtctttctaggcatttcaaatgaaaacaacatatgaatgtatgtagacatattttagagtgtagattcacttattttgctccgtatgtagtcacttgttgaaatctctagaaagacaaatattttaaaacggagggagtacatactactgtagtaacagacttattagcttggcttattttaaataagattcagagtctgtcc

SEQ ID NO: 67695 - protein, 198 aa, Triticum aestivum
  peptide (1)..(198): Ceres Seq. ID no. 12587798
  misc_feature (55)..(127): Pfam Name: PB1 domain Pfam Description: PB1 domain
  misc_feature (20)..(145): Homolog of NCBI NO: 18412822 NR Description: putative protein
  misc_feature (20)..(145): Homolog of NCBI NO: 25407315 NR Description: hypothetical protein AT4g05150 [imported] -
  misc_feature (41)..(180): Homolog of NCBI NO: 15242462 NR Description: putative protein; protein id: At5g09620.1
  misc_feature (41)..(158): Homolog of NCBI NO: 15237703 NR Description: putative protein
  misc_feature (38)..(161): Homolog of NCBI NO: 15228362 NR Description: putative protein; protein id: At3g48240.1
  misc_feature (40)..(177): Homolog of NCBI NO: 15242653 NR Description: unknown protein; protein id: At5g63130.1
  misc_feature (40)..(160): Homolog of NCBI NO: 15231568 NR Description: unknown protein; protein id: At3g26510.1
  misc_feature (40)..(160): Homolog of NCBI NO: 9293928 NR Description: gb|AAF04880.1~gene_id:MFE16.2~similar to unknown
  misc_feature (40)..(176): Homolog of NCBI NO: 15223211 NR Description: unknown protein; protein id: At1g70640.1
  misc_feature (22)..(127): Homolog of NCBI NO: 20067163 NR Description: susceptibility antioxidant protein [Oryza sativa]
MAGASSWSSSCSCTSSLGSLDDDDVVCVVKPGSPGAAEGSVKFLCSYGGMILPRHPDAALRYVGGNNRVLSVDRSLQFYELQRKLMDMCGCEAMSLRCQLPTEDLDALVSVTTNDDLGHLLEEYDAASRDRLQPLKIRAFLFPRSKTPPLSPSTPSSRPTPAYVRHQHHTARPPPARVHSGHRRPHQLLLLHNGSRLQ

SEQ ID NO: 67696 - protein, 149 aa, Triticum aestivum
  peptide (1)..(149): Ceres Seq. ID no. 12587799
  misc_feature (6)..(78): Pfam Name: PB1 domain Pfam Description: PB1 domain
  misc_feature (1)..(96): Homolog of NCBI NO: 18412822 NR Description: putative protein
  misc_feature (1)..(96): Homolog of NCBI NO: 25407315 NR Description: hypothetical protein AT4g05150 [imported] -
  misc_feature (1)..(131): Homolog of NCBI NO: 15242462 NR Description: putative protein; protein id: At5g09620.1
  misc_feature (1)..(109): Homolog of NCBI NO: 15237703 NR Description: putative protein
  misc_feature (1)..(112): Homolog of NCBI NO: 15228362 NR Description: putative protein; protein id: At3g48240.1
  misc_feature (1)..(128): Homolog of NCBI NO: 15242653 NR Description: unknown protein; protein id: At5g63130.1
  misc_feature (1)..(111): Homolog of NCBI NO: 15231568 NR Description: unknown protein; protein id: At3g26510.1
  misc_feature (1)..(111): Homolog of NCBI NO: 9293928 NR Description: gb|AAF04880.1~gene_id:MFE16.2~similar to unknown
  misc_feature (1)..(127): Homolog of NCBI NO: 15223211 NR Description: unknown protein; protein id: At1g70640.1
  misc_feature (1)..(78): Homolog of NCBI NO: 20067163 NR Description: susceptibility antioxidant protein [Oryza sativa]
MILPRHPDAALRYVGGNNRVLSVDRSLQFYELQRKLMDMCGCEAMSLRCQLPTEDLDALVSVTTNDDLGHLLEEYDAASRDRLQPLKIRAFLFPRSKTPPLSPSTPSSRPTPAYVRHQHHTARPPPARVHSGHRRPHQLLLLHNGSRLQ

SEQ ID NO: 67697 - protein, 113 aa, Triticum aestivum
  peptide (1)..(113): Ceres Seq. ID no. 12587800
  misc_feature (1)..(60): Homolog of NCBI NO: 18412822 NR Description: putative protein
  misc_feature (1)..(60): Homolog of NCBI NO: 25407315 NR Description: hypothetical protein AT4g05150 [imported] -
  misc_feature (1)..(95): Homolog of NCBI NO: 15242462 NR Description: putative protein; protein id: At5g09620.1
  misc_feature (1)..(73): Homolog of NCBI NO: 15237703 NR Description: putative protein
  misc_feature (1)..(76): Homolog of NCBI NO: 15228362 NR Description: putative protein; protein id: At3g48240.1
  misc_feature (1)..(92): Homolog of NCBI NO: 15242653 NR Description: unknown protein; protein id: At5g63130.1
  misc_feature (1)..(75): Homolog of NCBI NO: 15231568 NR Description: unknown protein; protein id: At3g26510.1
  misc_feature (1)..(75): Homolog of NCBI NO: 9293928 NR Description: gb|AAF04880.1~gene_id:MFE16.2~similar to unknown
  misc_feature (1)..(91): Homolog of NCBI NO: 15223211 NR Description: unknown protein; protein id: At1g70640.1
  misc_feature (1)..(42): Homolog of NCBI NO: 20067163 NR Description: susceptibility antioxidant protein [Oryza sativa]
MDMCGCEAMSLRCQLPTEDLDALVSVTTNDDLGHLLEEYDAASRDRLQPLKIRAFLFPRSKTPPLSPSTPSSRPTPAYVRHQHHTARPPPARVHSGHRRPHQLLLLHNGSRLQ

SEQ ID NO: 67698 - DNA, 1674 bp, Triticum aestivum
  misc_feature (1)..(1674): Ceres Seq. ID no. 12779098
atttaagagcctcgctagtcctttcatcatcaaaccccacacacgcacacgcgcgcgcgcacacacacacaaaaaaaaagcagagagggaggagatggccggagacgggcgtcgcgtggtggtcttccccttcccgttccacggccacgccacccccctcctccgcctcgccagcgttctccacacccgcggcttcgcggtgaccatcttccacaccgagctccgggcgcccgacccggccgagtaccccgcggactaccgcttcgtgcccctgcgcgtggacgtgcccccggagctgatggcgtccgaggacatcgcggggatggtcacggccatgagcgagtactccgaggcgcccttcaaggaacgcctgaccgcggcgctcgccgaggaaggcgccggtgtccggtgcgtcatcgccgacgtcgcctggtacaaggccctgtcggtgtccagcgccctcggcgtgccggcgatgggcgtcatgacggccagcgccgccaactaccgggtctacatggcgtacccgatgttgattgagaagggctacctgcctgtacaagaggcgcgcagggaggatctggtccaggagctgccgccgtaccgtgtgaaagatctgctacggctcgaggcatccagcctccagggcttcgccgacctgctccggaacaccatcgaggcaccgcgccagtccgcaggcctcatattcaacaccttgagggccattgaggccgacgacctggacacgatccgccaggaggagtccctcccggtcttcgccctcgcccctctccacaagctggcgccgccgggcaacaccagcagcagcctgtacggcgagacgcaggcggaccgcgagtgcctcgattggctcgacacgcaggaaccaggcagtgtggtgtacgtgagcttcgggagcctggccgccatggacccgcacgagttcgtggagctggcgtgggggctcgccgccagcaagcggccgttcctctgggtcgtcaggcccacgctcatccgcggctacgagtccggccagctgcccgacgggctcgacgagcagatccgtgatcatggcaggctcgtcagctgggcaccgcaggtggaggtgctcgcccaccctgcggtaggcgccttcatcacgcacagcggctggaactccacggtggaagccgtgtcggagggcgtgccgatgatatgcctcccgttgcacggagaccagttcagcaacgccaggtacgtgtgcgatgtctggaaggtgggagtggagatcgaggcgtcgtcggcggctgggcagaacctggagagagggaagatcaaggctgccatcgacaagattgtgcacgacaaagggattagagagaggatggatgccttcaaattagctgcagatgaagcagttaactcccaaactgaggtgaaagctttggttgatctcataaactcgttttaattaattcagagccttccacttcatatacctcacttaattatgtaatcatcatccatctttggcgatcgacctactgtactgctactccaccctctgtaataagtattcgatttccataccccttttcttttaatgtctccaactgtgatgattgattccaaatgtgatgatttctccaaatgtgatggttgattcgaataaagaaaagcttattttccaagtgt

SEQ ID NO: 67699 - protein, 482 aa, Triticum aestivum
  peptide (1)..(482): Ceres Seq. ID no. 12779099
  misc_feature (38)..(479): Pfam Name: UDP-glucoronosyl and UDP-glucosyl transferase Pfam Description: UDP-glucoronosyl and UDP-glucosyl transferase
  misc_feature (37)..(450): Homolog of NCBI NO: 15228176 NR Description: glucuronosyl transferase - like protein; protein
  misc_feature (36)..(481): Homolog of NCBI NO: 15228174 NR Description: glucuronosyl transferase - like protein
  misc_feature (37)..(482): Homolog of NCBI NO: 34395172 NR Description: putative UDP-glucosyltransferase
  misc_feature (37)..(468): Homolog of NCBI NO: 34900678 NR Description: glucuronosyl transferase-like protein
  misc_feature (37)..(481): Homolog of NCBI NO: 33146633 NR Description: putative UDP-glucosyltransferase
  misc_feature (22)..(481): Homolog of NCBI NO: 33146634 NR Description: putative UDP-glucosyltransferase
  misc_feature (33)..(480): Homolog of NCBI NO: 34900662 NR Description: glucuronosyl transferase-like protein
  misc_feature (34)..(476): Homolog of NCBI NO: 34897378 NR Description: putative UDP-glucosyltransferase
  misc_feature (33)..(482): Homolog of NCBI NO: 18033228 NR Description: UDP-glucosyltransferase BX8 [Zea mays]
  misc_feature (33)..(482): Homolog of NCBI NO: 18033230 NR Description: UDP-glucosyltransferase BX9 [Zea mays]
FKSLASPFIIKPHTRTRARAHTHKKKAEREEMAGDGRRVVVFPFPFHGHATPLLRLASVLHTRGFAVTIFHTELRAPDPAEYPADYRFVPLRVDVPPELMASEDIAGMVTAMSEYSEAPFKERLTAALAEEGAGVRCVIADVAWYKALSVSSALGVPAMGVMTASAANYRVYMAYPMLIEKGYLPVQEARREDLVQELPPYRVKDLLRLEASSLQGFADLLRNTIEAPRQSAGLIFNTLRAIEADDLDTIRQEESLPVFALAPLHKLAPPGNTSSSLYGETQADRECLDWLDTQEPGSVVYVSFGSLAAMDPHEFVELAWGLAASKRPFLWVVRPTLIRGYESGQLPDGLDEQIRDHGRLVSWAPQVEVLAHPAVGAFITHSGWNSTVEAVSEGVPMICLPLHGDQFSNARYVCDVWKVGVEIEASSAAGQNLERGKIKAAIDKIVHDKGIRERMDAFKLAADEAVNSQTEVKALVDLINSF

SEQ ID NO: 67700 - protein, 451 aa, Triticum aestivum
  peptide (1)..(451): Ceres Seq. ID no. 12779100
  misc_feature (7)..(448): Pfam Name: UDP-glucoronosyl and UDP-glucosyl transferase Pfam Description: UDP-glucoronosyl and UDP-glucosyl transferase
  misc_feature (6)..(419): Homolog of NCBI NO: 15228176 NR Description: glucuronosyl transferase - like protein; protein
  misc_feature (5)..(450): Homolog of NCBI NO: 15228174 NR Description: glucuronosyl transferase - like protein
  misc_feature (6)..(451): Homolog of NCBI NO: 34395172 NR Description: putative UDP-glucosyltransferase
  misc_feature (6)..(437): Homolog of NCBI NO: 34900678 NR Description: glucuronosyl transferase-like protein
  misc_feature (6)..(450): Homolog of NCBI NO: 33146633 NR Description: putative UDP-glucosyltransferase
  misc_feature (1)..(450): Homolog of NCBI NO: 33146634 NR Description: putative UDP-glucosyltransferase
  misc_feature (2)..(449): Homolog of NCBI NO: 34900662 NR Description: glucuronosyl transferase-like protein
  misc_feature (3)..(445): Homolog of NCBI NO: 34897378 NR Description: putative UDP-glucosyltransferase
  misc_feature (2)..(451): Homolog of NCBI NO: 18033228 NR Description: UDP-glucosyltransferase BX8 [Zea mays]
  misc_feature (2)..(451): Homolog of NCBI NO: 18033230 NR Description: UDP-glucosyltransferase BX9 [Zea mays]
MAGDGRRVVVFPFPFHGHATPLLRLASVLHTRGFAVTIFHTELRAPDPAEYPADYRFVPLRVDVPPELMASEDIAGMVTAMSEYSEAPFKERLTAALAEEGAGVRCVIADVAWYKALSVSSALGVPAMGVMTASAANYRVYMAYPMLIEKGYLPVQEARREDLVQELPPYRVKDLLRLEASSLQGFADLLRNTIEAPRQSAGLIFNTLRAIEADDLDTIRQEESLPVFALAPLHKLAPPGNTSSSLYGETQADRECLDWLDTQEPGSVVYVSFGSLAAMDPHEFVELAWGLAASKRPFLWVVRPTLIRGYESGQLPDGLDEQIRDHGRLVSWAPQVEVLAHPAVGAFITHSGWNSTVEAVSEGVPMICLPLHGDQFSNARYVCDVWKVGVEIEASSAAGQNLERGKIKAAIDKIVHDKGIRERMDAFKLAADEAVNSQTEVKALVDLINSF

SEQ ID NO: 67701 - protein, 383 aa, Triticum aestivum
  peptide (1)..(383): Ceres Seq. ID no. 12779101
  misc_feature (1)..(380): Pfam Name: UDP-glucoronosyl and UDP-glucosyl transferase Pfam Description: UDP-glucoronosyl and UDP-glucosyl transferase
  misc_feature (1)..(351): Homolog of NCBI NO: 15228176 NR Description: glucuronosyl transferase - like protein; protein
  misc_feature (1)..(382): Homolog of NCBI NO: 15228174 NR Description: glucuronosyl transferase - like protein
  misc_feature (1)..(383): Homolog of NCBI NO: 34395172 NR Description: putative UDP-glucosyltransferase
  misc_feature (1)..(369): Homolog of NCBI NO: 34900678 NR Description: glucuronosyl transferase-like protein
  misc_feature (1)..(382): Homolog of NCBI NO: 33146633 NR Description: putative UDP-glucosyltransferase
  misc_feature (1)..(382): Homolog of NCBI NO: 33146634 NR Description: putative UDP-glucosyltransferase
  misc_feature (1)..(381): Homolog of NCBI NO: 34900662 NR Description: glucuronosyl transferase-like protein
  misc_feature (1)..(377): Homolog of NCBI NO: 34897378 NR Description: putative UDP-glucosyltransferase
  misc_feature (1)..(383): Homolog of NCBI NO: 18033228 NR Description: UDP-glucosyltransferase BX8 [Zea mays]
  misc_feature (1)..(383): Homolog of NCBI NO: 18033230 NR Description: UDP-glucosyltransferase BX9 [Zea mays]
MASEDIAGMVTAMSEYSEAPFKERLTAALAEEGAGVRCVIADVAWYKALSVSSALGVPAMGVMTASAANYRVYMAYPMLIEKGYLPVQEARREDLVQELPPYRVKDLLRLEASSLQGFADLLRNTIEAPRQSAGLIFNTLRAIEADDLDTIRQEESLPVFALAPLHKLAPPGNTSSSLYGETQADRECLDWLDTQEPGSVVYVSFGSLAAMDPHEFVELAWGLAASKRPFLWVVRPTLIRGYESGQLPDGLDEQIRDHGRLVSWAPQVEVLAHPAVGAFITHSGWNSTVEAVSEGVPMICLPLHGDQFSNARYVCDVWKVGVEIEASSAAGQNLERGKIKAAIDKIVHDKGIRERMDAFKLAADEAVNSQTEVKALVDLINSF

SEQ ID NO: 67702 - DNA, 1305 bp, Triticum aestivum
  misc_feature (1)..(1305): Ceres Seq. ID no. 13595877
attccaagctgcctaccgcacacactagccgcgagcagtaccatcactactggccaaaacgtgaccccctccagtcaacttcctcgtcgccaccacacgaccgcacctctcccatggcgtcctcctcgccgccgcacgtcgtggaggacgtgcccccgttcctgcagctcctcagcgacggcacggtgatccgcttcactgacgcctacccgctccccatcccgtcgccgccgcccggccagcccgtcgtcgactggaaggacgttctgtacgacgccagccacggcctcaagctccgcatctacaggccggcggcggcctcctcctccgggaacaagctcccggtgatcgtctacttccacggcggcgggtacagcatcggtagcttcgacatgcccaacttccatgcgtgctgcgtccgcctcgccggcgagctccccgctttggtgctctctgcagactaccgcctcgcccccgagcaccgcttccccgcgggtctcgacgacgcggcgaacgtcgtgtcctgggtgcgcgcccaggcagcggctgttggggacaacgccgacccatggctctcggagacggcgaacttcggccgggtgttcgtcgccggggactcggccggcgggggcgtcgtccaccacacggccgtccgcctcgcgtcgggccggctaggccccctcgaccccgttcgcgtcgccgggtgcgcgatgctctgcccgatgttcggcggggaggagaggacggcgtcggaggcggagttcccgccgggcccgttcctgtcgctgccggcggtcgaccaggcgtggcgcctggtgctgccgcctgggtccacgagggaccacccgctggccaacccgttcggcccggacagcccggcccttgacggcgtcgcgctgcctccgatgctcgttgtggccgccgcgcgcgacctgctgcgcgaccgcgccgcggactatgccgcgaggctcaaggccatggggaagccggtggagctcgtggagttcgaggggcagcaccacgggttcttcgcggtcgagccgtacggcgacgccggcagcgaggtggtccggctcgtcaaacggtttgtctacggcaacggcggcgcctccgactaaattggagatcgagcaaagctgttgagggctcctttgattcaaaggatatctttagaatttttgaaggattgaaatttttaggaattttttttatattggccttttgattcatagaattggatcctataggaatttatcctatgaaatcttttgtattacatttcataggaaatctaacatccacttc

SEQ ID NO: 67703 - protein, 371 aa, Triticum aestivum
  peptide (1)..(371): Ceres Seq. ID no. 13595878
  misc_feature (101)..(158): Pfam Name: Carboxylesterase Pfam Description: Carboxylesterase
  misc_feature (96)..(211): Homolog of NCBI NO: 5509944 NR Description: esterase HDE [petroleum-degrading bacterium HD-1]
  misc_feature (199)..(352): Homolog of NCBI NO: 5509944 NR Description: esterase HDE [petroleum-degrading bacterium HD-1]
  misc_feature (113)..(364): Homolog of NCBI NO: 15229371 NR Description: expressed protein [Arabidopsis thaliana]
  misc_feature (87)..(363): Homolog of NCBI NO: 15229905 NR Description: expressed protein [Arabidopsis thaliana]
  misc_feature (74)..(369): Homolog of NCBI NO: 34393714 NR Description: putative esterase [Oryza sativa (japonica
  misc_feature (44)..(363): Homolog of NCBI NO: 15240090 NR Description: expressed protein [Arabidopsis thaliana]
  misc_feature (36)..(363): Homolog of NCBI NO: 34899932 NR Description: putative cell death associated protein
  misc_feature (44)..(371): Homolog of NCBI NO: 34895938 NR Description: P0030H07.40 [Oryza sativa (japonica
  misc_feature (35)..(364): Homolog of NCBI NO: 34899930 NR Description: OJ1714_H10.49 [Oryza sativa (japonica
  misc_feature (38)..(368): Homolog of NCBI NO: 27819508 NR Description: putative esterase [Oryza sativa (japonica
SKLPTAHTSREQYHHYWPKRDPLQSTSSSPPHDRTSPMASSSPPHVVEDVPPFLQLLSDGTVIRFTDAYPLPIPSPPPGQPVVDWKDVLYDASHGLKLRIYRPAAASSSGNKLPVIVYFHGGGYSIGSFDMPNFHACCVRLAGELPALVLSADYRLAPEHRFPAGLDDAANVVSWVRAQAAAVGDNADPWLSETANFGRVFVAGDSAGGGVVHHTAVRLASGRLGPLDPVRVAGCAMLCPMFGGEERTASEAEFPPGPFLSLPAVDQAWRLVLPPGSTRDHPLANPFGPDSPALDGVALPPMLVVAAARDLLRDRAADYAARLKAMGKPVELVEFEGQHHGFFAVEPYGDAGSEVVRLVKRFVYGNGGASD

SEQ ID NO: 67704 - protein, 334 aa, Triticum aestivum
  peptide (1)..(334): Ceres Seq. ID no. 13595879
  misc_feature (64)..(121): Pfam Name: Carboxylesterase Pfam Description: Carboxylesterase
  misc_feature (59)..(174): Homolog of NCBI NO: 5509944 NR Description: esterase HDE [petroleum-degrading bacterium HD-1]
  misc_feature (162)..(315): Homolog of NCBI NO: 5509944 NR Description: esterase HDE [petroleum-degrading bacterium HD-1]
  misc_feature (76)..(327): Homolog of NCBI NO: 15229371 NR Description: expressed protein [Arabidopsis thaliana]
  misc_feature (50)..(326): Homolog of NCBI NO: 15229905 NR Description: expressed protein [Arabidopsis thaliana]
  misc_feature (37)..(332): Homolog of NCBI NO: 34393714 NR Description: putative esterase [Oryza sativa (japonica
  misc_feature (7)..(326): Homolog of NCBI NO: 15240090 NR Description: expressed protein [Arabidopsis thaliana]
  misc_feature (1)..(326): Homolog of NCBI NO: 34899932 NR Description: putative cell death associated protein
  misc_feature (7)..(334): Homolog of NCBI NO: 34895938 NR Description: P0030H07.40 [Oryza sativa (japonica
  misc_feature (1)..(327): Homolog of NCBI NO: 34899930 NR Description: OJ1714_H10.49 [Oryza sativa (japonica
  misc_feature (1)..(331): Homolog of NCBI NO: 27819508 NR Description: putative esterase [Oryza sativa (japonica
MASSSPPHVVEDVPPFLQLLSDGTVIRFTDAYPLPIPSPPPGQPVVDWKDVLYDASHGLKLRIYRPAAASSSGNKLPVIVYFHGGGYSIGSFDMPNFHACCVRLAGELPALVLSADYRLAPEHRFPAGLDDAANVVSWVRAQAAAVGDNADPWLSETANFGRVFVAGDSAGGGVVHHTAVRLASGRLGPLDPVRVAGCAMLCPMFGGEERTASEAEFPPGPFLSLPAVDQAWRLVLPPGSTRDHPLANPFGPDSPALDGVALPPMLVVAAARDLLRDRAADYAARLKAMGKPVELVEFEGQHHGFFAVEPYGDAGSEVVRLVKRFVYGNGGASD

SEQ ID NO: 67705 - protein, 241 aa, Triticum aestivum
  peptide (1)..(241): Ceres Seq. ID no. 13595880
  misc_feature (1)..(81): Homolog of NCBI NO: 5509944 NR Description: esterase HDE [petroleum-degrading bacterium HD-1]
  misc_feature (69)..(222): Homolog of NCBI NO: 5509944 NR Description: esterase HDE [petroleum-degrading bacterium HD-1]
  misc_feature (1)..(234): Homolog of NCBI NO: 15229371 NR Description: expressed protein [Arabidopsis thaliana]
  misc_feature (1)..(233): Homolog of NCBI NO: 15229905 NR Description: expressed protein [Arabidopsis thaliana]
  misc_feature (1)..(239): Homolog of NCBI NO: 34393714 NR Description: putative esterase [Oryza sativa (japonica
  misc_feature (1)..(233): Homolog of NCBI NO: 15240090 NR Description: expressed protein [Arabidopsis thaliana]
  misc_feature (1)..(233): Homolog of NCBI NO: 34899932 NR Description: putative cell death associated protein
  misc_feature (1)..(241): Homolog of NCBI NO: 34895938 NR Description: P0030H07.40 [Oryza sativa (japonica
  misc_feature (1)..(234): Homolog of NCBI NO: 34899930 NR Description: OJ1714_H10.49 [Oryza sativa (japonica
  misc_feature (1)..(238): Homolog of NCBI NO: 27819508 NR Description: putative esterase [Oryza sativa (japonica
MPNFHACCVRLAGELPALVLSADYRLAPEHRFPAGLDDAANVVSWVRAQAAAVGDNADPWLSETANFGRVFVAGDSAGGGVVHHTAVRLASGRLGPLDPVRVAGCAMLCPMFGGEERTASEAEFPPGPFLSLPAVDQAWRLVLPPGSTRDHPLANPFGPDSPALDGVALPPMLVVAAARDLLRDRAADYAARLKAMGKPVELVEFEGQHHGFFAVEPYGDAGSEVVRLVKRFVYGNGGASD

SEQ ID NO: 67706 - DNA, 1173 bp, Triticum aestivum
  misc_feature (1)..(1173): Ceres Seq. ID no. 12625120
ccaactcaacccaatccaacgtcccgtccgccgctgaaagcacccctcccagtcccagcagccgccttgctccccttgtttccactacgctttggatccatcgatcgatcgagccttctccagttagcctttcccgccacctaaaaaggcaccccacgtctccatccatccatgtgcggcggcgccatcatctacgactacatcccggcgcaccgccgccgggtgtccaccgccgacttctggcccgacgccgaccattccgacgcccacagcgccgcccccgacaaagcgccgcgcgcgaagcgggggcggacgaaccagtaccgcggcatccggcagcggccgtggggcaagtgggcggcggagatccgcgaccccgtgaagggcgtccgcgtctggctcggcacctaccccaccgccgaggccgccgcgcgcgcctacgaccgcgccgcgcgccgcatcaggggcgccaaggccaaggtcaacttccccaacgagatcctggtcggcgcgcccgcgcacgaggccccgtgcacgatggcggccgtgctcccttcccccaagaaagaggaggagcccgcggcgtgctcctgcgaggaggtgaaggcgctctccgaggagctgatggcgtacgagagctacatgagcttcctcggggtcccctacatggagggcggggccgcggccgcggccgcccctgccgccgtcggtgtcgccgccgaggatgcaccggccgagctatggagcttcgaggacagctactacccggggcctctggggctctgattgtgtcgtgctcgtagtctcctgccagtcgcagaaaacagagtcgattcgctctttcccttgtgttttgttgaattcattttttctctctttgttactgtggtgaatgcctcaatgtaatctcacaaattttccatgtaaattttatcaacggaaagcgctcttccccgacgcacgggcggtgctgctgcaacgctgcatccttctgttggacacgcggcgtggggaactacttcggatcgtctagagatgaacaggttggccaagtgagagtgtgagacgactactcccactggaactgctgtgtgcctctccaacctgtgggctgacgttaccagtggcagccctattggtttctttatatatgaaaatcggagaggaaaagcc

SEQ ID NO: 67707 - protein, 266 aa, Triticum aestivum
  peptide (1)..(266): Ceres Seq. ID no. 12625121
  misc_feature (48)..(211): Pfam Name: HlyD family secretion protein Pfam Description: HlyD family secretion protein
NSTQSNVPSAAESTPPSPSSRLAPLVSTTLWIHRSIEPSPVSLSRHLKRHPTSPSIHVRRRHHLRLHPGAPPPGVHRRLLARRRPFRRPQRRPRQSAAREAGADEPVPRHPAAAVGQVGGGDPRPREGRPRLARHLPHRRGRRARLRPRRAPHQGRQGQGQLPQRDPGRRARARGPVHDGGRAPFPQERGGARGVLLRGGEGALRGADGVRELHELPRGPLHGGRGRGRGRPCRRRCRRRGCTGRAMELRGQLLPGASGALIVSCS

SEQ ID NO: 67708 - protein, 204 aa, Triticum aestivum
  peptide (1)..(204): Ceres Seq. ID no. 12625122
  misc_feature (49)..(109): Pfam Name: AP2 domain Pfam Description: AP2 domain
  misc_feature (23)..(109): Homolog of NCBI NO: 22074046 NR Description: transcription factor JERF1 [Lycopersicon
  misc_feature (136)..(203): Homolog of NCBI NO: 30961941 NR Description: C-repeat/DRE-binding factor [Nicotiana tabacum]
  misc_feature (38)..(128): Homolog of NCBI NO: 30961941 NR Description: C-repeat/DRE-binding factor [Nicotiana tabacum]
  misc_feature (132)..(195): Homolog of NCBI NO: 7489226 NR Description: AP2 domain protein homolog - potato
  misc_feature (19)..(109): Homolog of NCBI NO: 7489226 NR Description: AP2 domain protein homolog - potato
  misc_feature (132)..(195): Homolog of NCBI NO: 40557189 NR Description: ethylene-binding protein [Lycopersicon esculentum]
  misc_feature (1)..(109): Homolog of NCBI NO: 40557189 NR Description: ethylene-binding protein [Lycopersicon esculentum]
  misc_feature (132)..(195): Homolog of NCBI NO: 28274830 NR Description: ethylene response factor 2 [Lycopersicon
  misc_feature (1)..(109): Homolog of NCBI NO: 28274830 NR Description: ethylene response factor 2 [Lycopersicon
  misc_feature (1)..(199): Homolog of NCBI NO: 34894554 NR Description: B1011A07.25 [Oryza sativa (japonica
MCGGAIIYDYIPAHRRRVSTADFWPDADHSDAHSAAPDKAPRAKRGRTNQYRGIRQRPWGKWAAEIRDPVKGVRVWLGTYPTAEAAARAYDRAARRIRGAKAKVNFPNEILVGAPAHEAPCTMAAVLPSPKKEEEPAACSCEEVKALSEELMAYESYMSFLGVPYMEGGAAAAAAPAAVGVAAEDAPAELWSFEDSYYPGPLGL

SEQ ID NO: 67709 - DNA, 1133 bp, Triticum aestivum
  misc_feature (1)..(1133): Ceres Seq. ID no. 13595881
aaaacccctcgaccacgaaaaccctaaaccctctccgccgccgccgccagccatggccctcttcgccgccgcccgccgcgcggcctcctcctcgctccccctcctccgcgcctccgcctccgcctcccgcggcgcggcctcccgtggcgcggccctgctccgccccctggccgccgccgcggcccggccgatgcccttctcctcggcgaccgcgctgaagccgagctccgacgacgagctcctccgcatcgtcaaggccgagatcaagttcgccgaggactgcgacgaccacgaccgggttgaggaggtcccagatagcttccctttcaaaatcagcgacaagaaggggcttaatgacatcactcttacaagaacttaccagggtgagaagatcgaggttctggtttttatgcccaacctagtcactggagacgagccagagcatgaccaggacgaggatgacaaggagaaagatgatgatcaggatgacggcgagaagcccccgaagtccagccttcccctcacagtcaccatcaccaagagtgaaggcccaagcctcgagttcacctgcacggcctatcctgacgagatcctcatcgataccttgtccgtgaagcagccctctgagaagttgggagaggactacattgcatacgagggtcctgacttcaatgacctggacgagaacctgcagagggcattccacaagtacctggagctgcgcgggatcacgcccatgacgacaaacttcctgcacgagtacatgatcaacaaggacagccgggagtacctgttttggctgaacaagctcaaggatttcgtcaagcagtaatgtagagattgcaagttatgatccctagcataaagacgagccaatgtgctttgcacatcctgttctgagaccttcgggcttcggaactccaaactgctccgtgtttagtacacgatgacgatgtgtatgcttagcatcgtgttttagattgctttttttggcagtgtggaaatgaccgggtgatgttagagttgaaaacctgggtagttcttcagatagaacacttcgttaagtagcgtgctatttttttctgaacaaataattatgctctgtgtgcgtgaaggtttacgcacagtgtttc

SEQ ID NO: 67710 - protein, 276 aa, Triticum aestivum
  peptide (1)..(276): Ceres Seq. ID no. 13595882
  misc_feature (84)..(274): Pfam Name: Mitochondrial glycoprotein Pfam Description: Mitochondrial glycoprotein
  misc_feature (18)..(276): Homolog of NCBI NO: 21592321 NR Description: unknown [Arabidopsis thaliana]
  misc_feature (18)..(276): Homolog of NCBI NO: 15241669 NR Description: expressed protein [Arabidopsis thaliana]
  misc_feature (18)..(276): Homolog of NCBI NO: 21593469 NR Description: unknown [Arabidopsis thaliana]
  misc_feature (21)..(276): Homolog of NCBI NO: 7487698 NR Description: hypothetical protein At2g39790 [imported] -
  misc_feature (18)..(276): Homolog of NCBI NO: 18405164 NR Description: expressed protein [Arabidopsis thaliana]
  misc_feature (17)..(276): Homolog of NCBI NO: 18410318 NR Description: expressed protein [Arabidopsis thaliana]
  misc_feature (16)..(276): Homolog of NCBI NO: 11357566 NR Description: hypothetical protein F1I16.10 - Arabidopsis
  misc_feature (54)..(275): Homolog of NCBI NO: 15239320 NR Description: expressed protein [Arabidopsis thaliana]
  misc_feature (18)..(274): Homolog of NCBI NO: 34895740 NR Description: P0019D06.28 [Oryza sativa (japonica
  misc_feature (18)..(275): Homolog of NCBI NO: 34895730 NR Description: P0019D06.23 [Oryza sativa (japonica
KPLDHENPKPSPPPPPAMALFAAARRAASSSLPLLRASASASRGAASRGAALLRPLAAAAARPMPFSSATALKPSSDDELLRIVKAEIKFAEDCDDHDRVEEVPDSFPFKISDKKGLNDITLTRTYQGEKIEVLVFMPNLVTGDEPEHDQDEDDKEKDDDQDDGEKPPKSSLPLTVTITKSEGPSLEFTCTAYPDEILIDTLSVKQPSEKLGEDYIAYEGPDFNDLDENLQRAFHKYLELRGITPMTTNFLHEYMINKDSREYLFWLNKLKDFVKQ

SEQ ID NO: 67711 - protein, 259 aa, Triticum aestivum
  peptide (1)..(259): Ceres Seq. ID no. 13595883
  misc_feature (67)..(257): Pfam Name: Mitochondrial glycoprotein Pfam Description: Mitochondrial glycoprotein
  misc_feature (1)..(259): Homolog of NCBI NO: 21592321 NR Description: unknown [Arabidopsis thaliana]
  misc_feature (1)..(259): Homolog of NCBI NO: 15241669 NR Description: expressed protein [Arabidopsis thaliana]
  misc_feature (1)..(259): Homolog of NCBI NO: 21593469 NR Description: unknown [Arabidopsis thaliana]
  misc_feature (4)..(259): Homolog of NCBI NO: 7487698 NR Description: hypothetical protein At2g39790 [imported] -
  misc_feature (1)..(259): Homolog of NCBI NO: 18405164 NR Description: expressed protein [Arabidopsis thaliana]
  misc_feature (1)..(259): Homolog of NCBI NO: 18410318 NR Description: expressed protein [Arabidopsis thaliana]
  misc_feature (1)..(259): Homolog of NCBI NO: 11357566 NR Description: hypothetical protein F1I16.10 - Arabidopsis
  misc_feature (37)..(258): Homolog of NCBI NO: 15239320 NR Description: expressed protein [Arabidopsis thaliana]
  misc_feature (1)..(257): Homolog of NCBI NO: 34895740 NR Description: P0019D06.28 [Oryza sativa (japonica
  misc_feature (1)..(258): Homolog of NCBI NO: 34895730 NR Description: P0019D06.23 [Oryza sativa (japonica
MALFAAARRAASSSLPLLRASASASRGAASRGAALLRPLAAAAARPMPFSSATALKPSSDDELLRIVKAEIKFAEDCDDHDRVEEVPDSFPFKISDKKGLNDITLTRTYQGEKIEVLVFMPNLVTGDEPEHDQDEDDKEKDDDQDDGEKPPKSSLPLTVTITKSEGPSLEFTCTAYPDEILIDTLSVKQPSEKLGEDYIAYEGPDFNDLDENLQRAFHKYLELRGITPMTTNFLHEYMINKDSREYLFWLNKLKDFVKQ

SEQ ID NO: 67712 - protein, 213 aa, Triticum aestivum
  peptide (1)..(213): Ceres Seq. ID no. 13595884
  misc_feature (21)..(211): Pfam Name: Mitochondrial glycoprotein Pfam Description: Mitochondrial glycoprotein
  misc_feature (1)..(213): Homolog of NCBI NO: 21592321 NR Description: unknown [Arabidopsis thaliana]
  misc_feature (1)..(213): Homolog of NCBI NO: 15241669 NR Description: expressed protein [Arabidopsis thaliana]
  misc_feature (1)..(213): Homolog of NCBI NO: 21593469 NR Description: unknown [Arabidopsis thaliana]
  misc_feature (1)..(213): Homolog of NCBI NO: 7487698 NR Description: hypothetical protein At2g39790 [imported] -
  misc_feature (1)..(213): Homolog of NCBI NO: 18405164 NR Description: expressed protein [Arabidopsis thaliana]
  misc_feature (1)..(213): Homolog of NCBI NO: 18410318 NR Description: expressed protein [Arabidopsis thaliana]
  misc_feature (1)..(213): Homolog of NCBI NO: 11357566 NR Description: hypothetical protein F1I16.10 - Arabidopsis
  misc_feature (1)..(212): Homolog of NCBI NO: 15239320 NR Description: expressed protein [Arabidopsis thaliana]
  misc_feature (1)..(211): Homolog of NCBI NO: 34895740 NR Description: P0019D06.28 [Oryza sativa (japonica
  misc_feature (1)..(212): Homolog of NCBI NO: 34895730 NR Description: P0019D06.23 [Oryza sativa (japonica
MPFSSATALKPSSDDELLRIVKAEIKFAEDCDDHDRVEEVPDSFPFKISDKKGLNDITLTRTYQGEKIEVLVFMPNLVTGDEPEHDQDEDDKEKDDDQDDGEKPPKSSLPLTVTITKSEGPSLEFTCTAYPDEILIDTLSVKQPSEKLGEDYIAYEGPDFNDLDENLQRAFHKYLELRGITPMTTNFLHEYMINKDSREYLFWLNKLKDFVKQ

SEQ ID NO: 67713 - DNA, 1064 bp, Triticum aestivum
  misc_feature (1)..(1064): Ceres Seq. ID no. 12613415
ataaacgccctcgccggcccctctctctctctcatccatcctcaccgccgcaatcctcaactccccaccttcacccagatccacagagcagcagagagatcgccggagtatcaggccgaggaagaagacagttcagccagcccgatctcaagtcaccatggtggtcgcgctcggccccggcaggttctacggcggcggcctcccgcgcccgcgcgtcttccccggagaccgcgtcgacccgccggcgcccgtcaccgacgcgctcctctgctgggcgcgcgacgcgcactggtccatgggcgggctcggcgccaagcgcctccgcctgcagggccgcatcgagggcaacctcgtcaagctccgccgcaccgcgcgccgcgacgctcgggtctccgccaagtccgccaagtccaaggtccgcgctgcggggcacgggcccgcccctgccaccctcgacgacgcgctcggctccgacgacgacgactccgaggacgaggcggaggtcgcggcccaggagaaggcgatgcggcgcgaggtggtggatgacgacgaggactccgagtccggtgagtccgagggcgagggggtgccgctcgtcaccatcgccgccgccgccaagaggaagcgcgtcaggaagctctccgacgagttcgaccgcatagccgccgcgcagctggagggcggcgcgaagaagaagccgctgaggaagaaggctgctgctcctgctccggccgctgaggcaccggcgaagaagtcgctgaagaggaaggcggtggcgccggcggctggggctgcggcgaggacctcaccgaagaggaaggctgctgaggcgccggcggcaaggaggacctcgccgaggtcgaagcactgatggataggtgctcgtttccatttgcaatccctgttcttggttcgtcagatcggtggctctagcgattgtggtatgatctcggagatgcagtatgctgtgtgttcgttgaaatgcttgaatggaatctagtttcatgtctctatgtatgaatcaaatccctcaaaatgtgtctgatcaaacctgagttatcctg

SEQ ID NO: 67714 - protein, 237 aa, Triticum aestivum
  peptide (1)..(237): Ceres Seq. ID no. 12613416
  misc_feature (106)..(227): Pfam Name: MARCKS family Pfam Description: MARCKS family
  misc_feature (3)..(140): Homolog of NCBI NO: 18417168 NR Description: expressed protein
  misc_feature (3)..(140): Homolog of NCBI NO: 7486199 NR Description: hypothetical protein F26K10.190 - Arabidopsis
  misc_feature (1)..(237): Homolog of NCBI NO: 34897956 NR Description: contains ESTs
MVVALGPGRFYGGGLPRPRVFPGDRVDPPAPVTDALLCWARDAHWSMGGLGAKRLRLQGRIEGNLVKLRRTARRDARVSAKSAKSKVRAAGHGPAPATLDDALGSDDDDSEDEAEVAAQEKAMRREVVDDDEDSESGESEGEGVPLVTIAAAAKRKRVRKLSDEFDRIAAAQLEGGAKKKPLRKKAAAPAPAAEAPAKKSLKRKAVAPAAGAAARTSPKRKAAEAPAARRTSPRSKH

SEQ ID NO: 67715 - protein, 219 aa, Triticum aestivum
  peptide (1)..(219): Ceres Seq. ID no. 12613417
  misc_feature (13)..(219): Pfam Name: Glycoprotein GG/GX Pfam Description: Glycoprotein GG/GX
  misc_feature (10)..(219): Homolog of NCBI NO: 13592175 NR Description: ppg3 [Leishmania major]
  misc_feature (6)..(219): Homolog of NCBI NO: 13592175 NR Description: ppg3 [Leishmania major]
  misc_feature (54)..(219): Homolog of NCBI NO: 38175466 NR Description: putative high-affinity potassium transporter
  misc_feature (10)..(219): Homolog of NCBI NO: 13592175 NR Description: ppg3 [Leishmania major]
  misc_feature (25)..(219): Homolog of NCBI NO: 11359723 NR Description: proteophosphoglycan, membrane-associated
  misc_feature (1)..(219): Homolog of NCBI NO: 28972153 NR Description: mKIAA0324 protein [Mus musculus]
  misc_feature (4)..(219): Homolog of NCBI NO: 11360318 NR Description: probable mucin DKFZp434C196.1 - human (fragment)
  misc_feature (33)..(218): Homolog of NCBI NO: 38345019 NR Description: OSJNBa0029H02.3 [Oryza sativa (japonica
  misc_feature (10)..(219): Homolog of NCBI NO: 5420387 NR Description: proteophosphoglycan [Leishmania major]
  misc_feature (10)..(219): Homolog of NCBI NO: 11359723 NR Description: proteophosphoglycan, membrane-associated
KRPRRPLSLSHPSSPPQSSTPHLHPDPQSSREIAGVSGRGRRQFSQPDLKSPWWSRSAPAGSTAAASRARASSPETASTRRRPSPTRSSAGRATRTGPWAGSAPSASACRAASRATSSSSAAPRAATLGSPPSPPSPRSALRGTGPPLPPSTTRSAPTTTTPRTRRRSRPRRRRCGARWWMTTRTPSPVSPRARGCRSSPSPPPPRGSASGSSPTSSTA

SEQ ID NO: 67716 - protein, 191 aa, Triticum aestivum
  peptide (1)..(191): Ceres Seq. ID no. 12613418
  misc_feature (60)..(181): Pfam Name: MARCKS family Pfam Description: MARCKS family
  misc_feature (1)..(94): Homolog of NCBI NO: 18417168 NR Description: expressed protein
  misc_feature (1)..(94): Homolog of NCBI NO: 7486199 NR Description: hypothetical protein F26K10.190 - Arabidopsis
  misc_feature (1)..(191): Homolog of NCBI NO: 34897956 NR Description: contains ESTs
MGGLGAKRLRLQGRIEGNLVKLRRTARRDARVSAKSAKSKVRAAGHGPAPATLDDALGSDDDDSEDEAEVAAQEKAMRREVVDDDEDSESGESEGEGVPLVTIAAAAKRKRVRKLSDEFDRIAAAQLEGGAKKKPLRKKAAAPAPAAEAPAKKSLKRKAVAPAAGAAARTSPKRKAAEAPAARRTSPRSKH

SEQ ID NO: 67717 - DNA, 678 bp, Triticum aestivum
  misc_feature (1)..(678): Ceres Seq. ID no. 13654484
tagaatcactcgttccctgtccctcttcctgtgtgcggcgccgccgccgcgcacaggccacatctcctcgccctcttcctgatgtcgagtcgaggcaccagatcttcaaagcttgcctcaggaagtctcctctggccaaggatattgatctgagtgctctggccaagtacacccaagggttcagcggtgctgatatcacggaaatttgccagcgtgcttgcaaatacgccatcagggagaacatcgagaaggacatcgagagggagaggaggaggaaggacaaccctgaagccatggaggaggatgaggtggatgaggtcgctgagatcagggctgctcacttcgaggagtcgatgaagtatgcacgcaggagtgtgagcgatgccgacatccgcaagtaccaggcccttgcccagactctgcagcagtctcgtggtttcggcagcgagttccggttccctgatcagccggccgcgggccccgcctcttctgctgccgccgacccttttgcatccgctgccgcagcagctgaagatgacgacttatatagctaaattctcgttgttgtgcccttcacttacccgtgttttccttcgtatactgttatgttttgctctggtatgcaagacacggtcaaactatgtacttaaaattattattgggatgcactgatattcg

SEQ ID NO: 67718 - protein, 183 aa, Triticum aestivum
  peptide (1)..(183): Ceres Seq. ID no. 13654485
  misc_feature (24)..(78): Pfam Name: ATPase family associated with various cellular Pfam Description: ATPase family associated with various cellular
  misc_feature (24)..(182): Homolog of NCBI NO: 11265337 NR Description: hypothetical protein DKFZp434K0126.1 - human
  misc_feature (24)..(183): Homolog of NCBI NO: 38455496 NR Description: cell division cycle protein 48 ['Chlorella'
  misc_feature (24)..(183): Homolog of NCBI NO: 30013699 NR Description: CDC48-like protein [Mirabilis jalapa]
  misc_feature (24)..(183): Homolog of NCBI NO: 1705678 NR Description: CELL DIVISION CYCLE PROTEIN 48 HOMOLOG (VALOSIN
  misc_feature (24)..(183): Homolog of NCBI NO: 15231775 NR Description: CDC48 - like protein [Arabidopsis thaliana]
  misc_feature (24)..(183): Homolog of NCBI NO: 15232776 NR Description: transitional endoplasmic reticulum ATPase
  misc_feature (24)..(183): Homolog of NCBI NO: 2492504 NR Description: Cell division cycle protein 48 homolog
  misc_feature (24)..(183): Homolog of NCBI NO: 18414193 NR Description: transitional endoplasmic reticulum ATPase
  misc_feature (24)..(183): Homolog of NCBI NO: 11265361 NR Description: transitional endoplasmic reticulum ATPase -
  misc_feature (24)..(183): Homolog of NCBI NO: 37534770 NR Description: putative endoplasmic reticulum membrane fusion
ESLVPCPSSCVRRRRRAQATSPRPLPDVESRHQIFKACLRKSPLAKDIDLSALAKYTQGFSGADITEICQRACKYAIRENIEKDIERERRRKDNPEAMEEDEVDEVAEIRAAHFEESMKYARRSVSDADIRKYQALAQTLQQSRGFGSEFRFPDQPAAGPASSAAADPFASAAAAAEDDDLYS

SEQ ID NO: 67719 - protein, 96 aa, Triticum aestivum
  peptide (1)..(96): Ceres Seq. ID no. 13654486
MPTSASTRPLPRLCSSLVVSAASSGSLISRPRAPPLLLPPTLLHPLPQQLKMTTYIAKFSLLCPSLTRVFLRILLCFALVCKTRSNYVLKIIIGMH

SEQ ID NO: 67720 - protein, 86 aa, Triticum aestivum
  peptide (1)..(86): Ceres Seq. ID no. 13654487
  misc_feature (1)..(85): Homolog of NCBI NO: 11265337 NR Description: hypothetical protein DKFZp434K0126.1 - human
  misc_feature (1)..(86): Homolog of NCBI NO: 38455496 NR Description: cell division cycle protein 48 ['Chlorella'
  misc_feature (1)..(86): Homolog of NCBI NO: 30013699 NR Description: CDC48-like protein [Mirabilis jalapa]
  misc_feature (1)..(86): Homolog of NCBI NO: 1705678 NR Description: CELL DIVISION CYCLE PROTEIN 48 HOMOLOG (VALOSIN
  misc_feature (1)..(86): Homolog of NCBI NO: 15231775 NR Description: CDC48 - like protein [Arabidopsis thaliana]
  misc_feature (1)..(86): Homolog of NCBI NO: 15232776 NR Description: transitional endoplasmic reticulum ATPase
  misc_feature (1)..(86): Homolog of NCBI NO: 2492504 NR Description: Cell division cycle protein 48 homolog
  misc_feature (1)..(86): Homolog of NCBI NO: 18414193 NR Description: transitional endoplasmic reticulum ATPase
  misc_feature (1)..(86): Homolog of NCBI NO: 11265361 NR Description: transitional endoplasmic reticulum ATPase -
  misc_feature (1)..(86): Homolog of NCBI NO: 37534770 NR Description: putative endoplasmic reticulum membrane fusion
MEEDEVDEVAEIRAAHFEESMKYARRSVSDADIRKYQALAQTLQQSRGFGSEFRFPDQPAAGPASSAAADPFASAAAAAEDDDLYS

SEQ ID NO: 67721 - DNA, 1050 bp, Triticum aestivum
  misc_feature (1)..(1050): Ceres Seq. ID no. 14301603
gaaaccattaacaatccccaccatacacacccgcgaggctcaatcatcgcaccactggatcggcaggcaccgcagcaatggcggcagcgaccggaggcggcggcagcagtgaggaggcgctgacgctgctggggttctggacgagcccgttcgcgctgcgggcgcggttcgcgctgaacctcaagggcatcccctacgagtacgtggaggaggacctgttcggcgagcggggcaagagcccgctcctcgtcgcctccaacccggcccacggcgggaaggtgcccgtgctcatccacggcggccgccccgtcgccgagtcgctggtcatcctggagtacatcgacgaggcgttcccggagcgcctcccgcgcctcctgcccccgcccgacgacccgcacggccgcgccgccgcccggttctgggcggcctacgtcgaccagaagctgctcccgacgtgggccccgctctacggcgggaggacggccgaggagcgggcgggcgcggcgagggaggtcgtcgccgtgctggaggcgttcgagggggagctcggggacaggggcttcttcggcggggacggcgtggggctggtggacgtggcgctcggcgggttcctcgggtggctgcgcgcgtcgcaggccatgtgcggcgtgcggaccatcgaccccgccaggacgccgcggctggcggcgtgggcggagcggttcggcgcgctggacggcgtgagggagatcgtgccggacgcggcgccgctggtggagtacaacctcatgaagcgggctcgcctaggcctgccgtatcttccgccgcatcagtcgcagtaaaaaaccgctagtaaattccaaggcgtgtagctggatccatcgcgcgcaaaggaactgaactgaatttgaatctgatcccttaagccggtggattctttagttattctactgcagtagagtaacaagtctgtgttcttgtttggaactctgattttctgcgatggaccgattcaagaaatgtagccacagaactgccttctccaatggaaagaaaaaaagtagtaccatc

SEQ ID NO: 67722 - protein, 247 aa, Triticum aestivum
  peptide (1)..(247): Ceres Seq. ID no. 14301604
  misc_feature (103)..(213): Pfam Name: Glutathione S-transferase, C-terminal domain Pfam Description: Glutathione S-transferase, C-terminal domain
  misc_feature (12)..(246): Homolog of NCBI NO: 30697685 NR Description: glutathione transferase, putative [Arabidopsis
  misc_feature (1)..(90): Homolog of NCBI NO: 15430719 NR Description: putative glutathione S-transferase OsGSTU11
  misc_feature (13)..(228): Homolog of NCBI NO: 8052535 NR Description: F3F9.13 [Arabidopsis thaliana]
  misc_feature (9)..(228): Homolog of NCBI NO: 37536360 NR Description: putative glutathione S-transferase
  misc_feature (12)..(236): Homolog of NCBI NO: 11177837 NR Description: putative glutathione S-transferase OsGSTU2
  misc_feature (10)..(236): Homolog of NCBI NO: 37536338 NR Description: putative glutathione S-transferase
  misc_feature (10)..(236): Homolog of NCBI NO: 37536340 NR Description: putative glutathione S-transferase
  misc_feature (15)..(236): Homolog of NCBI NO: 11385535 NR Description: glutathione S-transferase GST 42 [Zea mays]
  misc_feature (15)..(243): Homolog of NCBI NO: 11385495 NR Description: glutathione S-transferase GST 22 [Zea mays]
  misc_feature (6)..(239): Homolog of NCBI NO: 11385525 NR Description: glutathione S-transferase GST 37 [Zea mays]
MAAATGGGGSSEEALTLLGFWTSPFALRARFALNLKGIPYEYVEEDLFGERGKSPLLVASNPAHGGKVPVLIHGGRPVAESLVILEYIDEAFPERLPRLLPPPDDPHGRAAARFWAAYVDQKLLPTWAPLYGGRTAEERAGAAREVVAVLEAFEGELGDRGFFGGDGVGLVDVALGGFLGWLRASQAMCGVRTIDPARTPRLAAWAERFGALDGVREIVPDAAPLVEYNLMKRARLGLPYLPPHQSQ

SEQ ID NO: 67723 - DNA, 1184 bp, Triticum aestivum
  misc_feature (1)..(1184): Ceres Seq. ID no. 13591198
acctaaccaaagccgcaccacacgtcccgaggcaggcgaaggggcagagagggagcggccatggcggcggtggtcggcgtcctcgcgctgcagggctcctacaacgagcacatggccgcgctgaggaggatcggggccaagggggtggaggtgcggaaggcggagcagctgcttggcatcgactccctcatcatccccggcggcgagagcaccaccatggccaagctcgccaacttccacaacctctttcctgcacttcgagagtttgtcggcacaggaaaacccgtatggggaacctgtgctgggctcatcttccttgctaacaaggcagtagggcagaaaacaggaggccaggagcttgttggtggactagattgtactgtccaccgtaacttttttggtagccagcttcaaagcttcgaaacagaactttcagtgccaatgcttgcagagaaggaaggagggagtcatacatgccgtggcgtatttatacgagcacctgctatcctagaagtaggccaggatgttgaagtattagccgattgccctgttcctgctggcagacccagcattacaataacatctggcgagggtttggaggaccaagtgtactccaaagatcgggtgattgttgcagttcggcaagggaacatccttgccaccgcattccacccagagctaacatcagactctagatggcatcgcctcttcttggacatggacaaagaatctcaagcaaaggccttggctgcgctatcgctatctgcatcctcaaacgatgcagatgttgggtcgaagaataaggctcctgatctacccattttcgagtagagctaggaaacccgaaatttgattatccggttggtgacaggaaaggattctgggcatttgttatgcccagtccaaagaatatttttggcgtcaaagctgtgccaatcaaaataatggccattgtgctccaaacactatgatattgctatgacaaggaggctgaccagttggattgggtctgtgtgtcagtagtacttttttcgaaaaggggtgctttattacttaaaagatttaagcattacacctggcctctgcataactgagatgcacacaaccaacgtcactgtagtactacgcgtctcgtgaatgcctgaatggtgatgtatgtttgtcatggttttcatgtcagcttg

SEQ ID NO: 67724 - protein, 256 aa, Triticum aestivum
  peptide (1)..(256): Ceres Seq. ID no. 13591199
  misc_feature (7)..(223): Pfam Name: SNO glutamine amidotransferase family Pfam Description: SNO glutamine amidotransferase family
  misc_feature (169)..(229): Homolog of NCBI NO: 16077080 NR Description: similar to hypothetical proteins [Bacillus
  misc_feature (5)..(161): Homolog of NCBI NO: 16077080 NR Description: similar to hypothetical proteins [Bacillus
  misc_feature (178)..(230): Homolog of NCBI NO: 15612586 NR Description: amidotransferase [Bacillus halodurans]
  misc_feature (5)..(160): Homolog of NCBI NO: 15612586 NR Description: amidotransferase [Bacillus halodurans]
  misc_feature (169)..(232): Homolog of NCBI NO: 39654645 NR Description: Chain A, X-Ray Crystallographic Analysis Of A
  misc_feature (1)..(160): Homolog of NCBI NO: 39654645 NR Description: Chain A, X-Ray Crystallographic Analysis Of A
  misc_feature (190)..(222): Homolog of NCBI NO: 23017678 NR Description: hypothetical protein [Thermobifida fusca]
  misc_feature (1)..(159): Homolog of NCBI NO: 23017678 NR Description: hypothetical protein [Thermobifida fusca]
  misc_feature (5)..(256): Homolog of NCBI NO: 9757756 NR Description: amidotransferase hisH-like protein [Arabidopsis
  misc_feature (5)..(256): Homolog of NCBI NO: 18424366 NR Description: imidazoleglycerol-phosphate synthase subunit H -
MAAVVGVLALQGSYNEHMAALRRIGAKGVEVRKAEQLLGIDSLIIPGGESTTMAKLANFHNLFPALREFVGTGKPVWGTCAGLIFLANKAVGQKTGGQELVGGLDCTVHRNFFGSQLQSFETELSVPMLAEKEGGSHTCRGVFIRAPAILEVGQDVEVLADCPVPAGRPSITITSGEGLEDQVYSKDRVIVAVRQGNILATAFHPELTSDSRWHRLFLDMDKESQAKALAALSLSASSNDADVGSKNKAPDLPIFE

SEQ ID NO: 67725 - protein, 239 aa, Triticum aestivum
  peptide (1)..(239): Ceres Seq. ID no. 13591200
  misc_feature (1)..(206): Pfam Name: SNO glutamine amidotransferase family Pfam Description: SNO glutamine amidotransferase family
  misc_feature (152)..(212): Homolog of NCBI NO: 16077080 NR Description: similar to hypothetical proteins [Bacillus
  misc_feature (1)..(144): Homolog of NCBI NO: 16077080 NR Description: similar to hypothetical proteins [Bacillus
  misc_feature (161)..(213): Homolog of NCBI NO: 15612586 NR Description: amidotransferase [Bacillus halodurans]
  misc_feature (1)..(143): Homolog of NCBI NO: 15612586 NR Description: amidotransferase [Bacillus halodurans]
  misc_feature (152)..(215): Homolog of NCBI NO: 39654645 NR Description: Chain A, X-Ray Crystallographic Analysis Of A
  misc_feature (1)..(143): Homolog of NCBI NO: 39654645 NR Description: Chain A, X-Ray Crystallographic Analysis Of A
  misc_feature (173)..(205): Homolog of NCBI NO: 23017678 NR Description: hypothetical protein [Thermobifida fusca]
  misc_feature (1)..(142): Homolog of NCBI NO: 23017678 NR Description: hypothetical protein [Thermobifida fusca]
  misc_feature (1)..(239): Homolog of NCBI NO: 9757756 NR Description: amidotransferase hisH-like protein [Arabidopsis
  misc_feature (1)..(239): Homolog of NCBI NO: 18424366 NR Description: imidazoleglycerol-phosphate synthase subunit H -
MAALRRIGAKGVEVRKAEQLLGIDSLIIPGGESTTMAKLANFHNLFPALREFVGTGKPVWGTCAGLIFLANKAVGQKTGGQELVGGLDCTVHRNFFGSQLQSFETELSVPMLAEKEGGSHTCRGVFIRAPAILEVGQDVEVLADCPVPAGRPSITITSGEGLEDQVYSKDRVIVAVRQGNILATAFHPELTSDSRWHRLFLDMDKESQAKALAALSLSASSNDADVGSKNKAPDLPIFE

SEQ ID NO: 67726 - protein, 204 aa, Triticum aestivum
  peptide (1)..(204): Ceres Seq. ID no. 13591201
  misc_feature (1)..(171): Pfam Name: SNO glutamine amidotransferase family Pfam Description: SNO glutamine amidotransferase family
  misc_feature (117)..(177): Homolog of NCBI NO: 16077080 NR Description: similar to hypothetical proteins [Bacillus
  misc_feature (1)..(109): Homolog of NCBI NO: 16077080 NR Description: similar to hypothetical proteins [Bacillus
  misc_feature (126)..(178): Homolog of NCBI NO: 15612586 NR Description: amidotransferase [Bacillus halodurans]
  misc_feature (1)..(108): Homolog of NCBI NO: 15612586 NR Description: amidotransferase [Bacillus halodurans]
  misc_feature (117)..(180): Homolog of NCBI NO: 39654645 NR Description: Chain A, X-Ray Crystallographic Analysis Of A
  misc_feature (1)..(108): Homolog of NCBI NO: 39654645 NR Description: Chain A, X-Ray Crystallographic Analysis Of A
  misc_feature (138)..(170): Homolog of NCBI NO: 23017678 NR Description: hypothetical protein [Thermobifida fusca]
  misc_feature (1)..(107): Homolog of NCBI NO: 23017678 NR Description: hypothetical protein [Thermobifida fusca]
  misc_feature (1)..(204): Homolog of NCBI NO: 9757756 NR Description: amidotransferase hisH-like protein [Arabidopsis
  misc_feature (1)..(204): Homolog of NCBI NO: 18424366 NR Description: imidazoleglycerol-phosphate synthase subunit H -
MAKLANFHNLFPALREFVGTGKPVWGTCAGLIFLANKAVGQKTGGQELVGGLDCTVHRNFFGSQLQSFETELSVPMLAEKEGGSHTCRGVFIRAPAILEVGQDVEVLADCPVPAGRPSITITSGEGLEDQVYSKDRVIVAVRQGNILATAFHPELTSDSRWHRLFLDMDKESQAKALAALSLSASSNDADVGSKNKAPDLPIFE

SEQ ID NO: 67727 - DNA, 971 bp, Triticum aestivum
  misc_feature (1)..(971): Ceres Seq. ID no. 13654046
cccaacaaacctctttcccctccccgcatcccaagcctcccagctccatcgccacacgctcgaacccactcctctcacgctcaagcgcacaccgcaccaaccagagcagccatggctctcaccggcggcgccaccaccgcagcgtgcatcctcgtcctcctcgcgctcgccgacgccgcgggggcggctacccgggcgccagcgccggcgccggcgccggactgcatggaggcgttgattagcctcgcagactgcctcgactatgtgacgcccagcaccaagtcggctcggccttccaaggcttgctgcacggaggtgaagaccgccgtcggcacccccgccaccgtgaagtgcctctgcgctgccatggacgccaagacaactccgataccgatcaacatgacacgggtgctcgctctccccaccgcctgcggccaatccgcctccgtcttgaacaagtgccacgctgcacatgggccgggtggtgctcctgctgaagcaccgtcaccttcagcatccagtggcggcgcgaccgcttcaccaccgaaggcgaatgtggcggcgaggtctccgggcggctccgccaccgttctcttggcaactgtggtgacttcgctgctcgccttctattacctctgagggccaacatctcagcctctctcacgtgttatgttgcacagaccttgtgactctgcgttgcgcggtgttgtaatctgagtttactttgtttatcgggatgggttattatcatgtagtgtcgtggactgaatattgagtgcgtagtaaattgcaatgtaccgtggactgggtattttgaagtcgttgccagttatgacactttatttacttttgaatgcgcaaaaaaaaaaaaaaaaaaaaaaaaaaaaaaaaaaaaaaaaaaaaaaaaaaaaaaaaccaaaaaaaaaaaaaaaaaggtttttcgatcccgccaaccccgaggggggccccgg

SEQ ID NO: 67728 - protein, 212 aa, Triticum aestivum
  peptide (1)..(212): Ceres Seq. ID no. 13654047
  misc_feature (51)..(197): Homolog of NCBI NO: 21592774 NR Description: unknown [Arabidopsis thaliana]
  misc_feature (51)..(197): Homolog of NCBI NO: 18407534 NR Description: protease inhibitor/seed storage/lipid transfer
  misc_feature (38)..(211): Homolog of NCBI NO: 25553595 NR Description: OJ1656_E11.26 [Oryza sativa (japonica
  misc_feature (57)..(207): Homolog of NCBI NO: 7487610 NR Description: hypothetical protein T3F12.2 - Arabidopsis
  misc_feature (44)..(181): Homolog of NCBI NO: 10176956 NR Description: contains similarity to nonspecific lipid-transfer
  misc_feature (44)..(208): Homolog of NCBI NO: 21618136 NR Description: nonspecific lipid-transfer protein-like protein
  misc_feature (42)..(181): Homolog of NCBI NO: 34394120 NR Description: hypothetical protein [Oryza sativa (japonica
  misc_feature (44)..(208): Homolog of NCBI NO: 18424785 NR Description: protease inhibitor/seed storage/lipid transfer
  misc_feature (50)..(171): Homolog of NCBI NO: 34913126 NR Description: hypothetical protein~predicted by FGENESH etc.
  misc_feature (50)..(212): Homolog of NCBI NO: 33146785 NR Description: unknown protein [Oryza sativa (japonica
PNKPLSPPRIPSLPAPSPHARTHSSHAQAHTAPTRAAMALTGGATTAACILVLLALADAAGAATRAPAPAPAPDCMEALISLADCLDYVTPSTKSARPSKACCTEVKTAVGTPATVKCLCAAMDAKTTPIPINMTRVLALPTACGQSASVLNKCHAAHGPGGAPAEAPSPSASSGGATASPPKANVAARSPGGSATVLLATVVTSLLAFYYL

SEQ ID NO: 67729 - protein, 175 aa, Triticum aestivum; identical to SEQ ID NO: 56146
  peptide (1)..(175): Ceres Seq. ID no. 13654048
  misc_feature (14)..(160): Homolog of NCBI NO: 21592774 NR Description: unknown [Arabidopsis thaliana]
  misc_feature (14)..(160): Homolog of NCBI NO: 18407534 NR Description: protease inhibitor/seed storage/lipid transfer
  misc_feature (1)..(174): Homolog of NCBI NO: 25553595 NR Description: OJ1656_E11.26 [Oryza sativa (japonica
  misc_feature (20)..(170): Homolog of NCBI NO: 7487610 NR Description: hypothetical protein T3F12.2 - Arabidopsis
  misc_feature (7)..(144): Homolog of NCBI NO: 10176956 NR Description: contains similarity to nonspecific lipid-transfer
  misc_feature (7)..(171): Homolog of NCBI NO: 21618136 NR Description: nonspecific lipid-transfer protein-like protein
  misc_feature (5)..(144): Homolog of NCBI NO: 34394120 NR Description: hypothetical protein [Oryza sativa (japonica
  misc_feature (7)..(171): Homolog of NCBI NO: 18424785 NR Description: protease inhibitor/seed storage/lipid transfer
  misc_feature (13)..(134): Homolog of NCBI NO: 34913126 NR Description: hypothetical protein~predicted by FGENESH etc.
  misc_feature (13)..(175): Homolog of NCBI NO: 33146785 NR Description: unknown protein [Oryza sativa (japonica

SEQ ID NO: 67730 - protein, 137 aa, Triticum aestivum; identical to SEQ ID NO: 56147
  peptide (1)..(137): Ceres Seq. ID no. 13654049
  misc_feature (1)..(122): Homolog of NCBI NO: 21592774 NR Description: unknown [Arabidopsis thaliana]
  misc_feature (1)..(122): Homolog of NCBI NO: 18407534 NR Description: protease inhibitor/seed storage/lipid transfer
  misc_feature (1)..(136): Homolog of NCBI NO: 25553595 NR Description: OJ1656_E11.26 [Oryza sativa (japonica
  misc_feature (1)..(132): Homolog of NCBI NO: 7487610 NR Description: hypothetical protein T3F12.2 - Arabidopsis
  misc_feature (1)..(106): Homolog of NCBI NO: 10176956 NR Description: contains similarity to nonspecific lipid-transfer
  misc_feature (1)..(133): Homolog of NCBI NO: 21618136 NR Description: nonspecific lipid-transfer protein-like protein
  misc_feature (1)..(106): Homolog of NCBI NO: 34394120 NR Description: hypothetical protein [Oryza sativa (japonica
  misc_feature (1)..(133): Homolog of NCBI NO: 18424785 NR Description: protease inhibitor/seed storage/lipid transfer
  misc_feature (1)..(96): Homolog of NCBI NO: 34913126 NR Description: hypothetical protein~predicted by FGENESH etc.
  misc_feature (1)..(137): Homolog of NCBI NO: 33146785 NR Description: unknown protein [Oryza sativa (japonica

SEQ ID NO: 67731 - DNA, 2296 bp, Triticum aestivum
  misc_feature (1)..(2296): Ceres Seq. ID no. 14301924
ctcccttcgcctccgagaagctcggtctcacctcacgcaccaccaacgcggcggcgttctcccctccaccgtgccgaccgaccccgagcggcgccgcggctgacccagcgcgatgtggcgccatgcagcggcccggcggtcggcgcagatccggcggctcctttccacgtccgccccctcggcgggcgccgtgcgcggcccctgcatcgtgcacaagcgcggcaccgacatcctccacgacccctggtacaacaaggacacggcgttccccctcacggagcgggaccgcctcggcctccggggcctgctcccgccgcgggtcatgtcgttcgagcagcagtacgagcgcttcataaactcgtaccattcgctggagcacaacacgcagggggagcccgattccgtggtctcgctggccaagtggaggatccttaacaggctgcacgaccggaacgagacgttgtactacagggtgctaattgacaatatcaaggatttcgcgcccataatatacacccctactgtcggcttggtctgcgaaaactacagcgggctgttcaggcgtccccgcgggatgtacttcagtgcaaaggataaaggggagatgatgtcgatgatttacaactggccagcagagaaggttgacatgatagttgtgactgacgggagtcgcattctaggtttaggtgatcttggagttcaaggcataggtatacctattggtaaacttgatgtttatgttgcagctgctggtatcaacccacagaaggttctcccaataatgcttgatgtgggaacaaataatgaagaactccttgaagacaagctatatttaggattgaggcaacctaggttggaaggagaggaatacttagctgttgtagatgagttcatggaagctgttcatgcacgctggccgaaagcaattgtgcagtttgaagacttccaaatgaaatgggcatttgaaactcttcagaggtatcggagccgattttgcatgttcaatgatgacgtgcaggggacagcaggagttgctctagctggtctacttggagctgttagagcacaaggtcgaccgctcgcagattttactaagcagaagatagttgtggtgggagctggaagtgctgggataggtgtgcttaacatggctaaacatgcaatgttaaggatgccagggacccataaaattggagaactgggtgaaggacacaatcaattctgggttctggacaaagatggccttattaccaaaagtagaaaagatctggatccagctgttgctcgttttgctagaggttatggtcctgaagaggtcgaagatctccatgagggggctagtcttgttgaagtggtcaagaaagtgaagcctcatgtccttttaggactatctggagttggcgggatatttaacgaggaggttctcaaggctatgaaagaatctgactccccctgccctgcaatttttgcaatgtccaacccaactactaaagctgaatgtacgcctgaagatgtattcaagcatgttggagaaaatgcagtatttgccagtggaagccctttcagcaatgttactttaagcaatggtagaaaaggctatgctaatcaagcaaacaacatgtatctgtttcctgggattggtttaggagcccttctgtcaggtgctcggcatatttcggatggcatgctccatgctgcagctgagtgccttgcttcatacatcacagatgatgcgattcgaaaaggaatcctctttccttcaatttcaagtatcaggcacatcaccgcacgtgtcggcgctgcagtcgcccgtgctgccgttgatgaagatctggccgagggatgctctgacttggatcctcgggacctcaggagcatgtcagagtcggatacggtggattacgtggctcggaagatgtggtaccctgtttacagcccactcgtcaacgacaaatagtgttcgacgaagcacacccgaagagacgtatcaggcacatacatttgttctgatcagtgaatacttcgctatttcggtttagctgctctacttgggagtatttcagcagatactgctgccacgtctactggctatattgttgcctcatttgtttacgttgacaggttcatcaaacattgctcaattttgggacccgttgagctacagttatgtcccatgtggtaggacttgaataaatgtcagatgttggcagtctgtctcctgcatcgtcgttgttggcgtatgtctcttgcatcgccaggtaatacgagattgcaaaccgattttgtgttccaaaac

SEQ ID NO: 67732 - protein, 614 aa, Triticum aestivum
  peptide (1)..(614): Ceres Seq. ID no. 14301925
  misc_feature (301)..(531): Pfam Name: Malic enzyme, NAD binding domain Pfam Description: Malic enzyme, NAD binding domain
  misc_feature (37)..(575): Homolog of NCBI NO: 7431231 NR Description: malate dehydrogenase
  misc_feature (32)..(614): Homolog of NCBI NO: 585450 NR Description: NAD-DEPENDENT MALIC ENZYME 65 KDA ISOFORM,
  misc_feature (14)..(611): Homolog of NCBI NO: 15225438 NR Description: malate oxidoreductase (malic enzyme), putative
  misc_feature (3)..(614): Homolog of NCBI NO: 585451 NR Description: NAD-DEPENDENT MALIC ENZYME 62 KDA ISOFORM,
  misc_feature (30)..(614): Homolog of NCBI NO: 34393731 NR Description: putative malate dehydrogenase
  misc_feature (5)..(614): Homolog of NCBI NO: 7431221 NR Description: malate dehydrogenase (decarboxylating) (EC
  misc_feature (5)..(614): Homolog of NCBI NO: 30678679 NR Description: malate oxidoreductase -related [Arabidopsis
  misc_feature (5)..(614): Homolog of NCBI NO: 6382043 NR Description: F6N23.16 gene product [Arabidopsis thaliana]
  misc_feature (1)..(613): Homolog of NCBI NO: 585452 NR Description: NAD-DEPENDENT MALIC ENZYME 59 KDA ISOFORM,
  misc_feature (18)..(531): Homolog of NCBI NO: 37535816 NR Description: putative mitochondrial NAD+-dependent malic
MWRHAAARRSAQIRRLLSTSAPSAGAVRGPCIVHKRGTDILHDPWYNKDTAFPLTERDRLGLRGLLPPRVMSFEQQYERFINSYHSLEHNTQGEPDSVVSLAKWRILNRLHDRNETLYYRVLIDNIKDFAPIIYTPTVGLVCENYSGLFRRPRGMYFSAKDKGEMMSMIYNWPAEKVDMIVVTDGSRILGLGDLGVQGIGIPIGKLDVYVAAAGINPQKVLPIMLDVGTNNEELLEDKLYLGLRQPRLEGEEYLAVVDEFMEAVHARWPKAIVQFEDFQMKWAFETLQRYRSRFCMFNDDVQGTAGVALAGLLGAVRAQGRPLADFTKQKIVVVGAGSAGIGVLNMAKHAMLRMPGTHKIGELGEGHNQFWVLDKDGLITKSRKDLDPAVARFARGYGPEEVEDLHEGASLVEVVKKVKPHVLLGLSGVGGIFNEEVLKAMKESDSPCPAIFAMSNPTTKAECTPEDVFKHVGENAVFASGSPFSNVTLSNGRKGYANQANNMYLFPGIGLGALLSGARHISDGMLHAAAECLASYITDDAIRKGILFPSISSIRHITARVGAAVARAAVDEDLAEGCSDLDPRDLRSMSESDTVDYVARKMWYPVYSPLVNDK

SEQ ID NO: 67733 - protein, 544 aa, Triticum aestivum
  peptide (1)..(544): Ceres Seq. ID no. 14301926
  misc_feature (231)..(461): Pfam Name: Malic enzyme, NAD binding domain Pfam Description: Malic enzyme, NAD binding domain
  misc_feature (1)..(505): Homolog of NCBI NO: 7431231 NR Description: malate dehydrogenase
  misc_feature (1)..(544): Homolog of NCBI NO: 585450 NR Description: NAD-DEPENDENT MALIC ENZYME 65 KDA ISOFORM,
  misc_feature (1)..(541): Homolog of NCBI NO: 15225438 NR Description: malate oxidoreductase (malic enzyme), putative
  misc_feature (1)..(544): Homolog of NCBI NO: 585451 NR Description: NAD-DEPENDENT MALIC ENZYME 62 KDA ISOFORM,
  misc_feature (1)..(544): Homolog of NCBI NO: 34393731 NR Description: putative malate dehydrogenase
  misc_feature (1)..(544): Homolog of NCBI NO: 7431221 NR Description: malate dehydrogenase (decarboxylating) (EC
  misc_feature (1)..(544): Homolog of NCBI NO: 30678679 NR Description: malate oxidoreductase -related [Arabidopsis
  misc_feature (1)..(544): Homolog of NCBI NO: 6382043 NR Description: F6N23.16 gene product [Arabidopsis thaliana]
  misc_feature (1)..(543): Homolog of NCBI NO: 585452 NR Description: NAD-DEPENDENT MALIC ENZYME 59 KDA ISOFORM,
  misc_feature (1)..(461): Homolog of NCBI NO: 37535816 NR Description: putative mitochondrial NAD+-dependent malic
MSFEQQYERFINSYHSLEHNTQGEPDSVVSLAKWRILNRLHDRNETLYYRVLIDNIKDFAPIIYTPTVGLVCENYSGLFRRPRGMYFSAKDKGEMMSMIYNWPAEKVDMIVVTDGSRILGLGDLGVQGIGIPIGKLDVYVAAAGINPQKVLPIMLDVGTNNEELLEDKLYLGLRQPRLEGEEYLAVVDEFMEAVHARWPKAIVQFEDFQMKWAFETLQRYRSRFCMFNDDVQGTAGVALAGLLGAVRAQGRPLADFTKQKIVVVGAGSAGIGVLNMAKHAMLRMPGTHKIGELGEGHNQFWVLDKDGLITKSRKDLDPAVARFARGYGPEEVEDLHEGASLVEVVKKVKPHVLLGLSGVGGIFNEEVLKAMKESDSPCPAIFAMSNPTTKAECTPEDVFKHVGENAVFASGSPFSNVTLSNGRKGYANQANNMYLFPGIGLGALLSGARHISDGMLHAAAECLASYITDDAIRKGILFPSISSIRHITARVGAAVARAAVDEDLAEGCSDLDPRDLRSMSESDTVDYVARKMWYPVYSPLVNDK

SEQ ID NO: 67734 - protein, 460 aa, Triticum aestivum
  peptide (1)..(460): Ceres Seq. ID no. 14301927
  misc_feature (147)..(377): Pfam Name: Malic enzyme, NAD binding domain Pfam Description: Malic enzyme, NAD binding domain
  misc_feature (1)..(421): Homolog of NCBI NO: 7431231 NR Description: malate dehydrogenase
  misc_feature (1)..(460): Homolog of NCBI NO: 585450 NR Description: NAD-DEPENDENT MALIC ENZYME 65 KDA ISOFORM,
  misc_feature (1)..(457): Homolog of NCBI NO: 15225438 NR Description: malate oxidoreductase (malic enzyme), putative
  misc_feature (1)..(460): Homolog of NCBI NO: 585451 NR Description: NAD-DEPENDENT MALIC ENZYME 62 KDA ISOFORM,
  misc_feature (1)..(460): Homolog of NCBI NO: 34393731 NR Description: putative malate dehydrogenase
  misc_feature (1)..(460): Homolog of NCBI NO: 7431221 NR Description: malate dehydrogenase (decarboxylating) (EC
  misc_feature (1)..(460): Homolog of NCBI NO: 30678679 NR Description: malate oxidoreductase -related [Arabidopsis
  misc_feature (1)..(460): Homolog of NCBI NO: 6382043 NR Description: F6N23.16 gene product [Arabidopsis thaliana]
  misc_feature (1)..(459): Homolog of NCBI NO: 585452 NR Description: NAD-DEPENDENT MALIC ENZYME 59 KDA ISOFORM,
  misc_feature (1)..(377): Homolog of NCBI NO: 37535816 NR Description: putative mitochondrial NAD+-dependent malic
MYFSAKDKGEMMSMIYNWPAEKVDMIVVTDGSRILGLGDLGVQGIGIPIGKLDVYVAAAGINPQKVLPIMLDVGTNNEELLEDKLYLGLRQPRLEGEEYLAVVDEFMEAVHARWPKAIVQFEDFQMKWAFETLQRYRSRFCMFNDDVQGTAGVALAGLLGAVRAQGRPLADFTKQKIVVVGAGSAGIGVLNMAKHAMLRMPGTHKIGELGEGHNQFWVLDKDGLITKSRKDLDPAVARFARGYGPEEVEDLHEGASLVEVVKKVKPHVLLGLSGVGGIFNEEVLKAMKESDSPCPAIFAMSNPTTKAECTPEDVFKHVGENAVFASGSPFSNVTLSNGRKGYANQANNMYLFPGIGLGALLSGARHISDGMLHAAAECLASYITDDAIRKGILFPSISSIRHITARVGAAVARAAVDEDLAEGCSDLDPRDLRSMSESDTVDYVARKMWYPVYSPLVNDK

SEQ ID NO: 67735 - DNA, 1501 bp, Triticum aestivum
  misc_feature (1)..(1501): Ceres Seq. ID no. 13654054
agttacaactaacaagtgtggccatgtgcgtgctcctccccatctgggccattccccccgatctccccacttcactaaaccctacccacctcgccgccgcgtaaacccccacccatcccgccgcgcggcccatctccagcgcacaaccaacgccaacgcgaacgccgccgccgctaccgccatggcggccgcctcgagaagtcttctcgcacgcctccgccacctctccctcgccgggccccgcctccccccttgccgcctcttctccgcggagcctctcgtctcccatcccgacgacgacgatgccggcgccggcggcgagggcggaggccggatcatagaggcgcgtcctgctgtcatgggcccggattcccggcggaccggcgtgatcggcgtgaagtgcggcatgtcggcgatgtgggacaagtggggggccaaggttcccatcaccgtcctctgggtcgacgacaatgtcgtctgccaggtcaagaccgccgagaaggaggggttctacgcgctgcagctcggagcaggccaaaagaaggaaaagcatctaacaaagcctgaagtgggccactttagatcacaaggagtccctcttaagagaaaattaaaggagtttcctgttactgaggatgcacttcttcctgttggaacaaccatctcgggttcgtcattttgtacctgggcaatttgtggatgtcattggaatcacaaagggaaaaggttttgcgggtggcatgaaaagacatggttttagtgggatgcctgcatcacatggtgcttctttatcacatcgcagcatcggttctacaggtcaaagggatgctcctggcagggttttcaaaaacaggaaaatgcctgggcgcatgggtggtgttcaacgcacggtgaaaaatgtatgggtttaccaaattgaccctgccaggaacttactgtatctgaaaggccaggttcctggtcctcaaggcagctttcttttcgtcaaggactctatttacaagaaacccgacagagctttcctgccattccctacgtacttctcacaagaaggcgagttggaagacatggagccgctcattgctgatcttggtgacgtcgacccgttcatggcagcagattaagactaggacaaatttcgaagaatcccttttgctttcagtgcagtgttgacaatcccacgtgattgtctgttaaattttgcattggatatatgagtagctcctgggttacaagagttaccccgttactgacctgccagatcaatgttgttccatgtacattacctggcatatatgccagggccctgactcagttagggttttgagctgattgtttggtcgactgagtggatcttattttgtttaataagttgtgtaagctatgattcagatagatatataaaatcgaaaatctctattccgaggttactattctagtttcaaaaaaaaaaaaaaaaaagcttatcgataccgtcgacctcngaggggggggccccggt

SEQ ID NO: 67736 - protein, 252 aa, Triticum aestivum
  peptide (1)..(252): Ceres Seq. ID no. 15219611
  misc_feature (133)..(252): Pfam Name: Ribosomal protein L3 Pfam Description: Ribosomal protein L3
  misc_feature (126)..(226): Homolog of NCBI NO: 13470551 NR Description: 50S ribosomal protein L3 [Mesorhizobium loti]
  misc_feature (126)..(245): Homolog of NCBI NO: 40741279 NR Description: hypothetical protein AN4308.2 [Aspergillus
  misc_feature (126)..(245): Homolog of NCBI NO: 23502110 NR Description: ribosomal protein L3 [Brucella suis 1330]
  misc_feature (126)..(245): Homolog of NCBI NO: 15965109 NR Description: PROBABLE 50S RIBOSOMAL PROTEIN L3 [Sinorhizobium
  misc_feature (126)..(245): Homolog of NCBI NO: 15889242 NR Description: AGR_C_3555p [Agrobacterium tumefaciens]
  misc_feature (121)..(245): Homolog of NCBI NO: 17987040 NR Description: LSU ribosomal protein L3P [Brucella melitensis]
  misc_feature (126)..(245): Homolog of NCBI NO: 22956505 NR Description: hypothetical protein [Rhodobacter sphaeroides]
  misc_feature (74)..(251): Homolog of NCBI NO: 23108389 NR Description: hypothetical protein [Novosphingobium
  misc_feature (61)..(252): Homolog of NCBI NO: 18401521 NR Description: ribosomal protein L3p family [Arabidopsis
  misc_feature (61)..(252): Homolog of NCBI NO: 34902796 NR Description: unnamed protein product [Oryza sativa (japonica
VTTNKCGHVRAPPHLGHSPRSPHFTKPYPPRRRVNPHPSRRAAHLQRTTNANANAAAATAMAAASRSLLARLRHLSLAGPRLPPCRLFSAEPLVSHPDDDDAGAGGEGGGRIIEARPAVMGPDSRRTGVIGVKCGMSAMWDKWGAKVPITVLWVDDNVVCQVKTAEKEGFYALQLGAGQKKEKHLTKPEVGHFRSQGVPLKRKLKEFPVTEDALLPVGTTISGSSFCTWAICGCHWNHKGKRFCGWHEKTWF

SEQ ID NO: 67737 - protein, 192 aa, Triticum aestivum
  peptide (1)..(192): Ceres Seq. ID no. 15219612
  misc_feature (73)..(192): Pfam Name: Ribosomal protein L3 Pfam Description: Ribosomal protein L3
  misc_feature (66)..(166): Homolog of NCBI NO: 13470551 NR Description: 50S ribosomal protein L3 [Mesorhizobium loti]
  misc_feature (66)..(185): Homolog of NCBI NO: 40741279 NR Description: hypothetical protein AN4308.2 [Aspergillus
  misc_feature (66)..(185): Homolog of NCBI NO: 23502110 NR Description: ribosomal protein L3 [Brucella suis 1330]
  misc_feature (66)..(185): Homolog of NCBI NO: 15965109 NR Description: PROBABLE 50S RIBOSOMAL PROTEIN L3 [Sinorhizobium
  misc_feature (66)..(185): Homolog of NCBI NO: 15889242 NR Description: AGR_C_3555p [Agrobacterium tumefaciens]
  misc_feature (61)..(185): Homolog of NCBI NO: 17987040 NR Description: LSU ribosomal protein L3P [Brucella melitensis]
  misc_feature (66)..(185): Homolog of NCBI NO: 22956505 NR Description: hypothetical protein [Rhodobacter sphaeroides]
  misc_feature (14)..(191): Homolog of NCBI NO: 23108389 NR Description: hypothetical protein [Novosphingobium
  misc_feature (1)..(192): Homolog of NCBI NO: 18401521 NR Description: ribosomal protein L3p family [Arabidopsis
  misc_feature (1)..(192): Homolog of NCBI NO: 34902796 NR Description: unnamed protein product [Oryza sativa (japonica
MAAASRSLLARLRHLSLAGPRLPPCRLFSAEPLVSHPDDDDAGAGGEGGGRIIEARPAVMGPDSRRTGVIGVKCGMSAMWDKWGAKVPITVLWVDDNVVCQVKTAEKEGFYALQLGAGQKKEKHLTKPEVGHFRSQGVPLKRKLKEFPVTEDALLPVGTTISGSSFCTWAICGCHWNHKGKRFCGWHEKTWF

SEQ ID NO: 67738 - protein, 162 aa, Triticum aestivum
  peptide (1)..(162): Ceres Seq. ID no. 15219613
  misc_feature (12)..(118): Pfam Name: Ribosomal protein L3 Pfam Description: Ribosomal protein L3
  misc_feature (15)..(125): Homolog of NCBI NO: 40741279 NR Description: hypothetical protein AN4308.2 [Aspergillus
  misc_feature (14)..(131): Homolog of NCBI NO: 23502110 NR Description: ribosomal protein L3 [Brucella suis 1330]
  misc_feature (14)..(121): Homolog of NCBI NO: 15965109 NR Description: PROBABLE 50S RIBOSOMAL PROTEIN L3 [Sinorhizobium
  misc_feature (14)..(121): Homolog of NCBI NO: 15889242 NR Description: AGR_C_3555p [Agrobacterium tumefaciens]
  misc_feature (14)..(131): Homolog of NCBI NO: 17987040 NR Description: LSU ribosomal protein L3P [Brucella melitensis]
  misc_feature (14)..(131): Homolog of NCBI NO: 22956505 NR Description: hypothetical protein [Rhodobacter sphaeroides]
  misc_feature (30)..(162): Homolog of NCBI NO: 21450877 NR Description: putative ribosomal protein L3 [Arabidopsis
  misc_feature (14)..(144): Homolog of NCBI NO: 23108389 NR Description: hypothetical protein [Novosphingobium
  misc_feature (12)..(162): Homolog of NCBI NO: 18401521 NR Description: ribosomal protein L3p family [Arabidopsis
  misc_feature (12)..(162): Homolog of NCBI NO: 34902796 NR Description: unnamed protein product [Oryza sativa (japonica
MHFFLLEQPSRVRHFVPGQFVDVIGITKGKGFAGGMKRHGFSGMPASHGASLSHRSIGSTGQRDAPGRVFKNRKMPGRMGGVQRTVKNVWVYQIDPARNLLYLKGQVPGPQGSFLFVKDSIYKKPDRAFLPFPTYFSQEGELEDMEPLIADLGDVDPFMAAD

SEQ ID NO: 67739 - DNA, 1938 bp, Triticum aestivum
  misc_feature (1)..(1938): Ceres Seq. ID no. 14303309
atatattcccactctctccgtcggcatcctcttatttttagttatcatctatcacatccgccttcttcttcccctacacgccttacgtgcaccgcgtatataatggaagcaagttaacggagggagcaccaccgggcaacacaccacgtacggcgcttcaccgaggacaagcttggaagagggatcgatcgacaatggcgtctgctgcgctcccggcggcggcggcggcagcggtcgagcccaagaagaagagcaacttcaagtacgcctgcacctgcgccctctccgcttccatggccaccgtcgtcctcggctatgacgtcggggtgatgagcggggcgtcgctctacatcaaggaggacctgcggctgacggacgtgcaggtggagatcatgatgggcatcctcagcgtctacgcgctcctcggctcgttcgccggggccaggacgtccgactggatcggccgccgctacaccgtcatcatcgccgccgccatcttcttcgccggctccttggtcatgggcttcgccgtcaactacgtcatgttcatgttcggccgcttcgtctgcggcatgggcgtcggcttcgccatcatggtcgcgcccgtctacaccgccgaggtcgccccggcctccacccgcggcctcctcacctccttcaccgaggtcttcatcaacgtcggcatcctcctcggctacgtctccaacttcgccttcgcgcgcctcccgcaccacatcaactggcgcatcatgctcggcatcggcgccgtcccctcggccttgctcgcgctcatggtgctcggcatgccggagtcgccccggtggctcgtgatgaagggccgcctcgccgacgccagggtcgtgctcgagaagacctccgacacgccagaggaggccgtggagcgccttgaccaaatcaaggctgccgccggcatcccccgcgaccttgacggcgacgtggtcgccgtgcccaagagaaaaggcggtgacgagaagcaggtgtggaaggagctcatcttttcgcccaccccggtcatgcgccgcatactgctcgcggcgctcggcgtccatttcttccagcaggcgactggctccgactcggtcgtgctctacagcccacgcgtgttcaagagcgccggcatcaccggcgacaaccacctgctcggcgtcacatgcgccatgggggtcaccaagactctcttcatccttttggccaccttccaaatcgaccgtgtcggccggcggccgctgctgctcaccagcaccgccggcatgctcgtctgtctcatcggcctcggcacgggcctcaccgtcgtgggccagcacccggacgagaagatcacgtgggcagtcggcctgtgcatcgcctccaccttggcctacgtgtccttcttctccatgggcctcggccccatcaccagcgtctacgtctccgaggtcttcccgctgcgggtgcgcgcgctcggcttcgcgctcggcgtcgcctgcaaccgcgtcaccagcgccgccatctccatgaccttcctctccttgtccaaggccatcaccatcggcggcagcttcttcctctacgccggcctcgctgcgctcggctggctttacttctacgccttcgttcccgagacgcgcgggcagccgcttgaggacatagggaagcttttcggcatgaaggacgccgccgtcgaagacgacgacaccgccaccaaagacaagcaggtgaaagcagctgtggagatgaactagctaacgtacggccggagagtgggtttcctcctaacatgcatgcatgcatgcaagggatggatcaccatccattgggggttcttttgagtttcctgctacttctttcttgggtttttgatcaaattcgtcctgttttcgggatgtttcattgtgtcttttatttttccaccaaagtgtatcagaatgtttcgtcgcc

SEQ ID NO: 67740 - protein, 515 aa, Triticum aestivum
  peptide (1)..(515): Ceres Seq. ID no. 14303310
  misc_feature (28)..(489): Pfam Name: Sugar (and other) transporter Pfam Description: Sugar (and other) transporter
  misc_feature (17)..(514): Homolog of NCBI NO: 21742093 NR Description: OSJNBa0074L08.15 [Oryza sativa (japonica
  misc_feature (23)..(489): Homolog of NCBI NO: 37533402 NR Description: putative mannitol transporter protein
  misc_feature (10)..(489): Homolog of NCBI NO: 13129489 NR Description: Putative sugar transporter [Oryza sativa]
  misc_feature (12)..(508): Homolog of NCBI NO: 15226696 NR Description: mannitol transporter, putative [Arabidopsis
  misc_feature (12)..(508): Homolog of NCBI NO: 15226682 NR Description: mannitol transporter, putative [Arabidopsis
  misc_feature (16)..(490): Homolog of NCBI NO: 30025133 NR Description: putative sorbitol transporter [Prunus cerasus]
  misc_feature (43)..(504): Homolog of NCBI NO: 34905902 NR Description: similar to myo-inositol transporter 2
  misc_feature (11)..(510): Homolog of NCBI NO: 34393631 NR Description: putative sorbitol transporter
  misc_feature (1)..(511): Homolog of NCBI NO: 34393630 NR Description: putative sorbitol transporter
  misc_feature (1)..(511): Homolog of NCBI NO: 16118827 NR Description: putative sugar transporter [Oryza sativa]
MASAALPAAAAAAVEPKKKSNFKYACTCALSASMATVVLGYDVGVMSGASLYIKEDLRLTDVQVEIMMGILSVYALLGSFAGARTSDWIGRRYTVIIAAAIFFAGSLVMGFAVNYVMFMFGRFVCGMGVGFAIMVAPVYTAEVAPASTRGLLTSFTEVFINVGILLGYVSNFAFARLPHHINWRIMLGIGAVPSALLALMVLGMPESPRWLVMKGRLADARVVLEKTSDTPEEAVERLDQIKAAAGIPRDLDGDVVAVPKRKGGDEKQVWKELIFSPTPVMRRILLAALGVHFFQQATGSDSVVLYSPRVFKSAGITGDNHLLGVTCAMGVTKTLFILLATFQIDRVGRRPLLLTSTAGMLVCLIGLGTGLTVVGQHPDEKITWAVGLCIASTLAYVSFFSMGLGPITSVYVSEVFPLRVRALGFALGVACNRVTSAAISMTFLSLSKAITIGGSFFLYAGLAALGWLYFYAFVPETRGQPLEDIGKLFGMKDAAVEDDDTATKDKQVKAAVEMN

SEQ ID NO: 67741 - protein, 482 aa, Triticum aestivum
  peptide (1)..(482): Ceres Seq. ID no. 14303311
  misc_feature (1)..(456): Pfam Name: Sugar (and other) transporter Pfam Description: Sugar (and other) transporter
  misc_feature (1)..(481): Homolog of NCBI NO: 21742093 NR Description: OSJNBa0074L08.15 [Oryza sativa (japonica
  misc_feature (1)..(456): Homolog of NCBI NO: 37533402 NR Description: putative mannitol transporter protein
  misc_feature (1)..(456): Homolog of NCBI NO: 13129489 NR Description: Putative sugar transporter [Oryza sativa]
  misc_feature (1)..(475): Homolog of NCBI NO: 15226696 NR Description: mannitol transporter, putative [Arabidopsis
  misc_feature (1)..(475): Homolog of NCBI NO: 15226682 NR Description: mannitol transporter, putative [Arabidopsis
  misc_feature (1)..(457): Homolog of NCBI NO: 30025133 NR Description: putative sorbitol transporter [Prunus cerasus]
  misc_feature (10)..(471): Homolog of NCBI NO: 34905902 NR Description: similar to myo-inositol transporter 2
  misc_feature (1)..(477): Homolog of NCBI NO: 34393631 NR Description: putative sorbitol transporter
  misc_feature (1)..(478): Homolog of NCBI NO: 34393630 NR Description: putative sorbitol transporter
  misc_feature (1)..(478): Homolog of NCBI NO: 16118827 NR Description: putative sugar transporter [Oryza sativa]
MATVVLGYDVGVMSGASLYIKEDLRLTDVQVEIMMGILSVYALLGSFAGARTSDWIGRRYTVIIAAAIFFAGSLVMGFAVNYVMFMFGRFVCGMGVGFAIMVAPVYTAEVAPASTRGLLTSFTEVFINVGILLGYVSNFAFARLPHHINWRIMLGIGAVPSALLALMVLGMPESPRWLVMKGRLADARVVLEKTSDTPEEAVERLDQIKAAAGIPRDLDGDVVAVPKRKGGDEKQVWKELIFSPTPVMRRILLAALGVHFFQQATGSDSVVLYSPRVFKSAGITGDNHLLGVTCAMGVTKTLFILLATFQIDRVGRRPLLLTSTAGMLVCLIGLGTGLTVVGQHPDEKITWAVGLCIASTLAYVSFFSMGLGPITSVYVSEVFPLRVRALGFALGVACNRVTSAAISMTFLSLSKAITIGGSFFLYAGLAALGWLYFYAFVPETRGQPLEDIGKLFGMKDAAVEDDDTATKDKQVKAAVEMN

SEQ ID NO: 67742 - protein, 470 aa, Triticum aestivum
  peptide (1)..(470): Ceres Seq. ID no. 14303312
  misc_feature (1)..(444): Pfam Name: Sugar (and other) transporter Pfam Description: Sugar (and other) transporter
  misc_feature (1)..(469): Homolog of NCBI NO: 21742093 NR Description: OSJNBa0074L08.15 [Oryza sativa (japonica
  misc_feature (1)..(444): Homolog of NCBI NO: 37533402 NR Description: putative mannitol transporter protein
  misc_feature (1)..(444): Homolog of NCBI NO: 13129489 NR Description: Putative sugar transporter [Oryza sativa]
  misc_feature (1)..(463): Homolog of NCBI NO: 15226696 NR Description: mannitol transporter, putative [Arabidopsis
  misc_feature (1)..(463): Homolog of NCBI NO: 15226682 NR Description: mannitol transporter, putative [Arabidopsis
  misc_feature (1)..(445): Homolog of NCBI NO: 30025133 NR Description: putative sorbitol transporter [Prunus cerasus]
  misc_feature (1)..(459): Homolog of NCBI NO: 34905902 NR Description: similar to myo-inositol transporter 2
  misc_feature (1)..(465): Homolog of NCBI NO: 34393631 NR Description: putative sorbitol transporter
  misc_feature (1)..(466): Homolog of NCBI NO: 34393630 NR Description: putative sorbitol transporter
  misc_feature (1)..(466): Homolog of NCBI NO: 16118827 NR Description: putative sugar transporter [Oryza sativa]
MSGASLYIKEDLRLTDVQVEIMMGILSVYALLGSFAGARTSDWIGRRYTVIIAAAIFFAGSLVMGFAVNYVMFMFGRFVCGMGVGFAIMVAPVYTAEVAPASTRGLLTSFTEVFINVGILLGYVSNFAFARLPHHINWRIMLGIGAVPSALLALMVLGMPESPRWLVMKGRLADARVVLEKTSDTPEEAVERLDQIKAAAGIPRDLDGDVVAVPKRKGGDEKQVWKELIFSPTPVMRRILLAALGVHFFQQATGSDSVVLYSPRVFKSAGITGDNHLLGVTCAMGVTKTLFILLATFQIDRVGRRPLLLTSTAGMLVCLIGLGTGLTVVGQHPDEKITWAVGLCIASTLAYVSFFSMGLGPITSVYVSEVFPLRVRALGFALGVACNRVTSAAISMTFLSLSKAITIGGSFFLYAGLAALGWLYFYAFVPETRGQPLEDIGKLFGMKDAAVEDDDTATKDKQVKAAVEMN

SEQ ID NO: 67743 - DNA, 1774 bp, Triticum aestivum
  misc_feature (1)..(1774): Ceres Seq. ID no. 15178464
ccccaaaccaagcagagcctacttgtctccctccgcgaatctctccctcccacgctgatctcaatctgcccgtccctccacgggcccgcgccgcctccctccctccatccccgccgcatcgccggcggcctcagcttcgcacgctccgatggtgccgagattggtctcttgctagtgctggcggctcaacctgcagaccgcggcaccgccatggaggctccgctgacggtgcagattgtcgagttcaacaccaaggtgatgcaagaggagctgaagaagctggggctcaaggtcaaccaccatgaggccaacatcacgttcctcaagtctgagatctatgctatcgaagagtcgattgctgacctgacaattaaacgtggaaagaaggttgtagcttcaagtaatggtacatcagttcaagaagctgaacagcgtacaattgaaagcatatgtaatcaggacaagacagcagcttcgcttatatgccagctcaagaaacgtcattccacacaaatatcaacaatgccaatgatgaaagatatccttggtgttgtggctaccttaggaaaaacaaatgatgataatctaagcagcctactctcagagtacttgggaatagacaatatgcttggtctcgtttgcaagacttatgatggcataaagagtcttgaaacatatggcacagaaggcaacattgataagaaaagtggtattcatggactgggtggctcaattggaaagattctgcatgggaggtttaccgtgttttgtcttgaaaacataaggccattttctggagaagttgtgattgatgatccacaaagatatcttatgctgcgtaaaccaaggttgcctaacggggagtctcctcctggttttcttggtttcgcagtaaatatgatacttatggaccaggcatacttgagttgtctcacaccccatggccatggtcttagggagactttgttttacagtttgttttctcatttacaagtttataagactacagctgatctacggcgtgctattcccttcataaatgatggtgcggtttctctagatggtggtatattgaggcctaatggttcattctgccttggtgataggaaagatgttgaagtgaaatttactgtagctttaagctctggggattcaaacacacctggaagtatcactgaaatggaagagcaagtcaaactgaagaactgggagaaggaaaggtttgttgaggatataaaaagggaggaagatttgttaaagcaagttaaggactcattcagcaatcaaaagcaacagcttctggactatatcactcaatcgccagcgtcaaagagggtgcagggttcaccaaccattcgctcacctgcaactccgggaagtaatccatttgcagcaactcctgggcgtaacccgtttacatcaactcctggaagtcacccgtttgctacaactccgggaggcaacccatttgcagctactactcctggaggtcacccgattgcagcaactcctggaagtcacccgatcgcagcaactcctggaaatatttcgtttgcagtcaagcctccccacatgcgctgacagcgtgtaaatgtccgcatgcgatttccttttgctgggagtttgtcatgctctggttctatccatacgtaaccaactgcattttgcgaagttcttaacgctagattctagtgcacagtagggatgcgaaaagttagtacataaccaccgacttttgttcataagttggggcctgtctctggtcacttattcg

SEQ ID NO: 67744 - protein, 526 aa, Triticum aestivum
  peptide (1)..(526): Ceres Seq. ID no. 15178465
  misc_feature (138)..(216): Homolog of NCBI NO: 10177087 NR Description: contains similarity to En/Spm-like transposon
  misc_feature (252)..(406): Homolog of NCBI NO: 10177087 NR Description: contains similarity to En/Spm-like transposon
  misc_feature (138)..(432): Homolog of NCBI NO: 15237930 NR Description: hypothetical protein [Arabidopsis thaliana]
  misc_feature (82)..(446): Homolog of NCBI NO: 11285606 NR Description: hypothetical protein F2K15.110 - Arabidopsis
  misc_feature (364)..(467): Homolog of NCBI NO: 34904396 NR Description: unnamed protein product [Oryza sativa (japonica
  misc_feature (133)..(266): Homolog of NCBI NO: 34904396 NR Description: unnamed protein product [Oryza sativa (japonica
  misc_feature (82)..(450): Homolog of NCBI NO: 18408807 NR Description: expressed protein [Arabidopsis thaliana]
PQTKQSLLVSLRESLPPTLISICPSLHGPAPPPSLHPRRIAGGLSFARSDGAEIGLLLVLAAQPADRGTAMEAPLTVQIVEFNTKVMQEELKKLGLKVNHHEANITFLKSEIYAIEESIADLTIKRGKKVVASSNGTSVQEAEQRTIESICNQDKTAASLICQLKKRHSTQISTMPMMKDILGVVATLGKTNDDNLSSLLSEYLGIDNMLGLVCKTYDGIKSLETYGTEGNIDKKSGIHGLGGSIGKILHGRFTVFCLENIRPFSGEVVIDDPQRYLMLRKPRLPNGESPPGFLGFAVNMILMDQAYLSCLTPHGHGLRETLFYSLFSHLQVYKTTADLRRAIPFINDGAVSLDGGILRPNGSFCLGDRKDVEVKFTVALSSGDSNTPGSITEMEEQVKLKNWEKERFVEDIKREEDLLKQVKDSFSNQKQQLLDYITQSPASKRVQGSPTIRSPATPGSNPFAATPGRNPFTSTPGSHPFATTPGGNPFAATTPGGHPIAATPGSHPIAATPGNISFAVKPPHMR

SEQ ID NO: 67745 - protein, 456 aa, Triticum aestivum
  peptide (1)..(456): Ceres Seq. ID no. 15178466
  misc_feature (68)..(146): Homolog of NCBI NO: 10177087 NR Description: contains similarity to En/Spm-like transposon
  misc_feature (182)..(336): Homolog of NCBI NO: 10177087 NR Description: contains similarity to En/Spm-like transposon
  misc_feature (68)..(362): Homolog of NCBI NO: 15237930 NR Description: hypothetical protein [Arabidopsis thaliana]
  misc_feature (12)..(376): Homolog of NCBI NO: 11285606 NR Description: hypothetical protein F2K15.110 - Arabidopsis
  misc_feature (294)..(397): Homolog of NCBI NO: 34904396 NR Description: unnamed protein product [Oryza sativa (japonica
  misc_feature (63)..(196): Homolog of NCBI NO: 34904396 NR Description: unnamed protein product [Oryza sativa (japonica
  misc_feature (12)..(380): Homolog of NCBI NO: 18408807 NR Description: expressed protein [Arabidopsis thaliana]
MEAPLTVQIVEFNTKVMQEELKKLGLKVNHHEANITFLKSEIYAIEESIADLTIKRGKKVVASSNGTSVQEAEQRTIESICNQDKTAASLICQLKKRHSTQISTMPMMKDILGVVATLGKTNDDNLSSLLSEYLGIDNMLGLVCKTYDGIKSLETYGTEGNIDKKSGIHGLGGSIGKILHGRFTVFCLENIRPFSGEVVIDDPQRYLMLRKPRLPNGESPPGFLGFAVNMILMDQAYLSCLTPHGHGLRETLFYSLFSHLQVYKTTADLRRAIPFINDGAVSLDGGILRPNGSFCLGDRKDVEVKFTVALSSGDSNTPGSITEMEEQVKLKNWEKERFVEDIKREEDLLKQVKDSFSNQKQQLLDYITQSPASKRVQGSPTIRSPATPGSNPFAATPGRNPFTSTPGSHPFATTPGGNPFAATTPGGHPIAATPGSHPIAATPGNISFAVKPPHMR

SEQ ID NO: 67746 - protein, 440 aa, Triticum aestivum
  peptide (1)..(440): Ceres Seq. ID no. 15178467
  misc_feature (52)..(130): Homolog of NCBI NO: 10177087 NR Description: contains similarity to En/Spm-like transposon
  misc_feature (166)..(320): Homolog of NCBI NO: 10177087 NR Description: contains similarity to En/Spm-like transposon
  misc_feature (52)..(346): Homolog of NCBI NO: 15237930 NR Description: hypothetical protein [Arabidopsis thaliana]
  misc_feature (1)..(360): Homolog of NCBI NO: 11285606 NR Description: hypothetical protein F2K15.110 - Arabidopsis
  misc_feature (278)..(381): Homolog of NCBI NO: 34904396 NR Description: unnamed protein product [Oryza sativa (japonica
  misc_feature (47)..(180): Homolog of NCBI NO: 34904396 NR Description: unnamed protein product [Oryza sativa (japonica
  misc_feature (1)..(364): Homolog of NCBI NO: 18408807 NR Description: expressed protein [Arabidopsis thaliana]
MQEELKKLGLKVNHHEANITFLKSEIYAIEESIADLTIKRGKKVVASSNGTSVQEAEQRTIESICNQDKTAASLICQLKKRHSTQISTMPMMKDILGVVATLGKTNDDNLSSLLSEYLGIDNMLGLVCKTYDGIKSLETYGTEGNIDKKSGIHGLGGSIGKILHGRFTVFCLENIRPFSGEVVIDDPQRYLMLRKPRLPNGESPPGFLGFAVNMILMDQAYLSCLTPHGHGLRETLFYSLFSHLQVYKTTADLRRAIPFINDGAVSLDGGILRPNGSFCLGDRKDVEVKFTVALSSGDSNTPGSITEMEEQVKLKNWEKERFVEDIKREEDLLKQVKDSFSNQKQQLLDYITQSPASKRVQGSPTIRSPATPGSNPFAATPGRNPFTSTPGSHPFATTPGGNPFAATTPGGHPIAATPGSHPIAATPGNISFAVKPPHMR

SEQ ID NO: 67747 - DNA, 1414 bp, Triticum aestivum
  misc_feature (1)..(1414): Ceres Seq. ID no. 14301932
aaaaaaatttcgattcgcacactgtgcagccaaaagccgagagagagctcgagctcagctccccactccccccatccccccgaggccccaaccctaagcccctcgccgggccccaatgtcgaggccggcggccgcggccgcagcggcgctgctggttatcctcgcggcggcgggcggcgcggcggcgaagaccacgatcgagccctgctccagcgccgactcgtgcgcggcgctgctcggctactcgctctacgccgacatgaaggtctccgaggtggcggcgctcttcggcgcggacccggcggcgctgctggcggccaacgcgctcgacttcgcctcccccggcgccgccaaccggatcctccccgcggggctcctcctccgcgtccccacccgctgcgcctgcgccgacggcgtccgcaagtccgtctccgtccgctacaccgcgcgccccgccgatacgctcgccaccgtcgccgacgtcgtcttcgcgggcctcgcctccgccgaccagatccgcagcgccaacgggctcgccgaggccgacccggacgcgctgctcgacgccggccagattctcgtcgtccccttcccctgcgtctgcctcaactccaccgacaacaacctccccgccgtctacctctcctatctcgtgcgggtcggggacaccgtgcaatccatcgccgccacccacgccaccactgtcacggatctcagcaatgtgaatgccatggggagccccgtcgtggcacccggcgacatccttgcagttccattatcagcatgtgcgtctacatttcctaactttgcttcggactatggattgcttgtggcaaacgggacctatgcactaactgctggtaactgtgtagaatgcagctgtgggccaggggatctcaatctgtactgcactccagcttcattaggaacgtcatgttcaagtatgcagtgctccaatagcagtctaatgcttggtaatgtgactacccagcccaccagcggtggctgcggtgtctcgtcttgcaactatgctggcttcgttaacggaagcattaccacatcgctgtcctcgggtcttcaacctacatgccctggaccgcatcaagttcctccactcatggagccgtccaccgcggcaatccacgactcgtaccttgctccatcaccttcgccaggacctggggaggcaggtggtgctgttcccggctcgtctgaccctggagcgtcctcccattctcttgctggaagcctctcgccctcggtgcataaactgcatcaaatgatcctcattctttctctagtcttctacctgcatatgtgaattcttctgtaggaatattattggatgtatttgtatcggacggggccctcatttgggcccggtggaacctcgacggcaaggttttctggctcc

SEQ ID NO: 67748 - protein, 401 aa, Triticum aestivum
  peptide (1)..(401): Ceres Seq. ID no. 14301933
  misc_feature (178)..(220): Pfam Name: LysM domain Pfam Description: LysM domain
  misc_feature (326)..(382): Homolog of NCBI NO: 1076211 NR Description: hypothetical protein VSP-3 - Chlamydomonas
  misc_feature (293)..(378): Homolog of NCBI NO: 32420163 NR Description: predicted protein [Neurospora crassa]
  misc_feature (31)..(326): Homolog of NCBI NO: 21593990 NR Description: unknown [Arabidopsis thaliana]
  misc_feature (31)..(326): Homolog of NCBI NO: 18398317 NR Description: delta-8 sphingolipid desaturase [Arabidopsis
  misc_feature (1)..(325): Homolog of NCBI NO: 22758281 NR Description: Unknown protein [Oryza sativa (japonica
  misc_feature (31)..(339): Homolog of NCBI NO: 28207683 NR Description: Erwinia induced protein 1 [Solanum tuberosum]
  misc_feature (1)..(378): Homolog of NCBI NO: 25406518 NR Description: unknown protein T5M16.22 [imported] - Arabidopsis
  misc_feature (3)..(315): Homolog of NCBI NO: 30687570 NR Description: expressed protein [Arabidopsis thaliana]
  misc_feature (1)..(378): Homolog of NCBI NO: 30699276 NR Description: expressed protein [Arabidopsis thaliana]
  misc_feature (3)..(380): Homolog of NCBI NO: 18395044 NR Description: expressed protein [Arabidopsis thaliana]
MSRPAAAAAAALLVILAAAGGAAAKTTIEPCSSADSCAALLGYSLYADMKVSEVAALFGADPAALLAANALDFASPGAANRILPAGLLLRVPTRCACADGVRKSVSVRYTARPADTLATVADVVFAGLASADQIRSANGLAEADPDALLDAGQILVVPFPCVCLNSTDNNLPAVYLSYLVRVGDTVQSIAATHATTVTDLSNVNAMGSPVVAPGDILAVPLSACASTFPNFASDYGLLVANGTYALTAGNCVECSCGPGDLNLYCTPASLGTSCSSMQCSNSSLMLGNVTTQPTSGGCGVSSCNYAGFVNGSITTSLSSGLQPTCPGPHQVPPLMEPSTAAIHDSYLAPSPSPGPGEAGGAVPGSSDPGASSHSLAGSLSPSVHKLHQMILILSLVFYLHM

SEQ ID NO: 67749 - protein, 353 aa, Triticum aestivum
  peptide (1)..(353): Ceres Seq. ID no. 14301934
  misc_feature (130)..(172): Pfam Name: LysM domain Pfam Description: LysM domain
  misc_feature (278)..(334): Homolog of NCBI NO: 1076211 NR Description: hypothetical protein VSP-3 - Chlamydomonas
  misc_feature (245)..(330): Homolog of NCBI NO: 32420163 NR Description: predicted protein [Neurospora crassa]
  misc_feature (1)..(278): Homolog of NCBI NO: 21593990 NR Description: unknown [Arabidopsis thaliana]
  misc_feature (1)..(278): Homolog of NCBI NO: 18398317 NR Description: delta-8 sphingolipid desaturase [Arabidopsis
  misc_feature (1)..(277): Homolog of NCBI NO: 22758281 NR Description: Unknown protein [Oryza sativa (japonica
  misc_feature (1)..(291): Homolog of NCBI NO: 28207683 NR Description: Erwinia induced protein 1 [Solanum tuberosum]
  misc_feature (1)..(330): Homolog of NCBI NO: 25406518 NR Description: unknown protein T5M16.22 [imported] - Arabidopsis
  misc_feature (1)..(267): Homolog of NCBI NO: 30687570 NR Description: expressed protein [Arabidopsis thaliana]
  misc_feature (1)..(330): Homolog of NCBI NO: 30699276 NR Description: expressed protein [Arabidopsis thaliana]
  misc_feature (1)..(332): Homolog of NCBI NO: 18395044 NR Description: expressed protein [Arabidopsis thaliana]
MKVSEVAALFGADPAALLAANALDFASPGAANRILPAGLLLRVPTRCACADGVRKSVSVRYTARPADTLATVADVVFAGLASADQIRSANGLAEADPDALLDAGQILVVPFPCVCLNSTDNNLPAVYLSYLVRVGDTVQSIAATHATTVTDLSNVNAMGSPVVAPGDILAVPLSACASTFPNFASDYGLLVANGTYALTAGNCVECSCGPGDLNLYCTPASLGTSCSSMQCSNSSLMLGNVTTQPTSGGCGVSSCNYAGFVNGSITTSLSSGLQPTCPGPHQVPPLMEPSTAAIHDSYLAPSPSPGPGEAGGAVPGSSDPGASSHSLAGSLSPSVHKLHQMILILSLVFYLHM

SEQ ID NO: 67750 - protein, 267 aa, Triticum aestivum
  peptide (1)..(267): Ceres Seq. ID no. 14301935
  misc_feature (100)..(195): Pfam Name: Sperm histone P2 Pfam Description: Sperm histone P2
KKISIRTLCSQKPRESSSSAPHSPHPPEAPTLSPSPGPNVEAGGRGRSGAAGYPRGGGRRGGEDHDRALLQRRLVRGAARLLALRRHEGLRGGGALRRGPGGAAGGQRARLRLPRRRQPDPPRGAPPPRPHPLRLRRRRPQVRLRPLHRAPRRYARHRRRRRLRGPRLRRPDPQRQRARRGRPGRAARRRPDSRRPLPLRLPQLHRQQPPRRLPLLSRAGRGHRAIHRRHPRHHCHGSQQCECHGEPRRGTRRHPCSSIISMCVYIS

SEQ ID NO: 67751 - DNA, 1132 bp, Triticum aestivum
  misc_feature (1)..(1132): Ceres Seq. ID no. 13595919
atcatcacccaacagcactcaaccagagcagagcattcgccactgtagctagcactcgcggcgtgcgggcagggacacggcgagcatgggttcgaggtacgaggtggaggtgacggtgggctcggcgcgggacctcaagaacgtcaactggcgcaacggcgacctgcagccctacgccgtgctctgggtcgacgacggccccaagtgctcctcccgcgtcgacctggacaacggcgagagcccggtctgggacgagaagctcaccgtcccgctcccgccgtccaccgcccgcctcgaggacgccgtcctccgcatcgacgtcgtccacgccaacgccggcgggggcaccaagccgctcgtggggtccgcgcgcctccctctgcgcgacgtcctcgacgacgccggcctcggcggccgcgcgtcccgcacgctccgcctcaagcgcccctccggccggccccagggccgcctcgacgtccgcgtcgccgtccgcgaggccgccgcccgctactacgaccccgcctacccgccgccctacggccagagccagccccagtcccgcgacccctacgcggccccggcgccgtacggctcgggcgggtacgggtatggccagcagcagccgtacgccgcgccgccgtccggctacccggccgcctacggcgccgccgcgccaccgcagcccgccgggtaccctgccgcctacggaggcggcgcgcagccggcgtacggcgccgctcctgcccccgcgtacgggtcggtgagtgaccctgctgcgaagaagaaggggatggggatgggggcggggctggcggtgggcgcggcggcgggggtgctgggcgggctggcgctggcggaaggggcgagctacctggaggacaagatcgaggacgacgtggcggagaaggtggaggacgacctggccggcggcggctacgacgacgacgactactagagaaaacgaaaacgatgggcacctcctgagagattgttgtacacgctggtgctgactagccagcatcttctttgcttttattctggccggatttgttgaataaatacgcgaaacaaattagcaaaaaaaaaaaaaaaaaagcttatcgataccgtcgactgtttaaacacaataaag

SEQ ID NO: 67752 - protein, 289 aa, Triticum aestivum
  peptide (1)..(289): Ceres Seq. ID no. 13595920
  misc_feature (7)..(95): Pfam Name: C2 domain Pfam Description: C2 domain
  misc_feature (6)..(250): Homolog of NCBI NO: 18390752 NR Description: shock protein SRC2 family [Arabidopsis thaliana]
  misc_feature (6)..(176): Homolog of NCBI NO: 30689212 NR Description: C2 domain-containing protein [Arabidopsis
  misc_feature (6)..(176): Homolog of NCBI NO: 10176862 NR Description: emb|CAB80929.1~gene_id:MRO11.1~similar to unknown
  misc_feature (6)..(287): Homolog of NCBI NO: 34908388 NR Description: P0529E05.20 [Oryza sativa (japonica
MGSRYEVEVTVGSARDLKNVNWRNGDLQPYAVLWVDDGPKCSSRVDLDNGESPVWDEKLTVPLPPSTARLEDAVLRIDVVHANAGGGTKPLVGSARLPLRDVLDDAGLGGRASRTLRLKRPSGRPQGRLDVRVAVREAAARYYDPAYPPPYGQSQPQSRDPYAAPAPYGSGGYGYGQQQPYAAPPSGYPAAYGAAAPPQPAGYPAAYGGGAQPAYGAAPAPAYGSVSDPAAKKKGMGMGAGLAVGAAAGVLGGLALAEGASYLEDKIEDDVAEKVEDDLAGGGYDDDDY

SEQ ID NO: 67753 - DNA, 1453 bp, Triticum aestivum
  misc_feature (1)..(1453): Ceres Seq. ID no. 14302764
attcgactcgacgccctcggttcacacacactgatcagctcagctacagcctacagagtacagacccaacccaactccgggagacaacagagcagagcacggcgagaatgctgctgaacccggcctcggaggcgctggtgctcgacagcatcaggcagcacctcatggaggacacggcggcgccggcgccggaggcgaggaggcagcggccggcctactgccgcagcgccagcttcgggagcctggtggccgaccagtggagcgagtcgctcccgttccgcgccgacgactccgacgacatggtcgtctacggcgcgctccgcgacgccttctcctgcggctggctccccgacggctccttcgccgccgtcaagccggagcccctcctgccttccccggactcctgctacgtcggcttcctcgagccggagacgcctccggccacgtccccgggagagagcgaggaggaggccgccgcggcgttcatgggcgaggcggccgcggccgcggcgagggggaagcactaccgcggggtgaggcagcggccgtggggcaagttcgcggcggagatccgggacccggccaagaacggcgcgcgcgtgtggctcggcacctacgacaccgccgaggacgccgccgtggcctacgaccgcgccgcgtaccgcatgcgcggctcccgcgccctcctcaacttcccgctccgcatcggctccgagatcgccgccgcgcacgccgcggccgcggccgccggggacaagcggccttcccccgagccggcgacctcagactcgtcgtcgtcctcctcctcctccgggtccccgaaaagaaggaagaggggcgaggccgcggccgcgtccatggccatggcgctggtgccgccgccctcgcagctgagccggccggcccaggcgtggtaccccgcggcgccggtggagcaggtggccatggcgccgcgcgcgcagcagctggtcagctaggccccgctcgccagcccccgggcgcacgatcggtcgtaaaagcacacaatgcgcaagtgcaatggattcgccagcaagtgcatggacgcgacagcaacaggagcccgcctttcactggtgcacggtgcaaggtggtgatggcaatggagagcgatggcgagcgagcgagcgagcaatcaggcaaagcaaccttggcgacggctccatttggatatttggatgggtcgagccgtcgacaacggaagataagctcggagcaactgggtgctgcaatttggcctggaatgatagttcctcctctctccactgctcggtgcaactcgcccaagtggatcaaagcgaaactgtgccagtatcggatcgtcgtggttccttctgagtcgtagggttatattttgtcactgtcagagtgcgtgtggtaaaaattacaaactcgtgaatcgtgatcgagcataatggaacttgtgaaactttac

SEQ ID NO: 67754 - protein, 324 aa, Triticum aestivum
  peptide (1)..(324): Ceres Seq. ID no. 14302765
  misc_feature (172)..(237): Pfam Name: AP2 domain Pfam Description: AP2 domain
  misc_feature (69)..(290): Homolog of NCBI NO: 25350257 NR Description: EREBP-2 protein [imported] - Arabidopsis thaliana
  misc_feature (58)..(126): Homolog of NCBI NO: 7489123 NR Description: ethylene-responsive transcription factor ERF1 -
  misc_feature (152)..(288): Homolog of NCBI NO: 7489123 NR Description: ethylene-responsive transcription factor ERF1 -
  misc_feature (36)..(290): Homolog of NCBI NO: 25350258 NR Description: ethylene responsive element binding factor 1
  misc_feature (36)..(290): Homolog of NCBI NO: 21264420 NR Description: Ethylene responsive element binding factor 1
  misc_feature (77)..(282): Homolog of NCBI NO: 7489113 NR Description: DNA binding protein EREBP-2 - common tobacco
  misc_feature (70)..(282): Homolog of NCBI NO: 8809571 NR Description: ethylene-responsive element binding factor
  misc_feature (36)..(323): Homolog of NCBI NO: 7528276 NR Description: AP2-related transcription factor
  misc_feature (36)..(313): Homolog of NCBI NO: 14140141 NR Description: putative AP2-related transcription factor [Oryza
  misc_feature (33)..(323): Homolog of NCBI NO: 38346167 NR Description: OSJNBa0079A21.14 [Oryza sativa (japonica
STRRPRFTHTDQLSYSLQSTDPTQLRETTEQSTARMLLNPASEALVLDSIRQHLMEDTAAPAPEARRQRPAYCRSASFGSLVADQWSESLPFRADDSDDMVVYGALRDAFSCGWLPDGSFAAVKPEPLLPSPDSCYVGFLEPETPPATSPGESEEEAAAAFMGEAAAAAARGKHYRGVRQRPWGKFAAEIRDPAKNGARVWLGTYDTAEDAAVAYDRAAYRMRGSRALLNFPLRIGSEIAAAHAAAAAAGDKRPSPEPATSDSSSSSSSSGSPKRRKRGEAAAASMAMALVPPPSQLSRPAQAWYPAAPVEQVAMAPRAQQLVS

SEQ ID NO: 67755 - protein, 289 aa, Triticum aestivum
  peptide (1)..(289): Ceres Seq. ID no. 14302766
  misc_feature (137)..(202): Pfam Name: AP2 domain Pfam Description: AP2 domain
  misc_feature (34)..(255): Homolog of NCBI NO: 25350257 NR Description: EREBP-2 protein [imported] - Arabidopsis thaliana
  misc_feature (23)..(91): Homolog of NCBI NO: 7489123 NR Description: ethylene-responsive transcription factor ERF1 -
  misc_feature (117)..(253): Homolog of NCBI NO: 7489123 NR Description: ethylene-responsive transcription factor ERF1 -
  misc_feature (1)..(255): Homolog of NCBI NO: 25350258 NR Description: ethylene responsive element binding factor 1
  misc_feature (1)..(255): Homolog of NCBI NO: 21264420 NR Description: Ethylene responsive element binding factor 1
  misc_feature (42)..(247): Homolog of NCBI NO: 7489113 NR Description: DNA binding protein EREBP-2 - common tobacco
  misc_feature (35)..(247): Homolog of NCBI NO: 8809571 NR Description: ethylene-responsive element binding factor
  misc_feature (1)..(288): Homolog of NCBI NO: 7528276 NR Description: AP2-related transcription factor
  misc_feature (1)..(278): Homolog of NCBI NO: 14140141 NR Description: putative AP2-related transcription factor [Oryza
  misc_feature (1)..(288): Homolog of NCBI NO: 38346167 NR Description: OSJNBa0079A21.14 [Oryza sativa (japonica
MLLNPASEALVLDSIRQHLMEDTAAPAPEARRQRPAYCRSASFGSLVADQWSESLPFRADDSDDMVVYGALRDAFSCGWLPDGSFAAVKPEPLLPSPDSCYVGFLEPETPPATSPGESEEEAAAAFMGEAAAAAARGKHYRGVRQRPWGKFAAEIRDPAKNGARVWLGTYDTAEDAAVAYDRAAYRMRGSRALLNFPLRIGSEIAAAHAAAAAAGDKRPSPEPATSDSSSSSSSSGSPKRRKRGEAAAASMAMALVPPPSQLSRPAQAWYPAAPVEQVAMAPRAQQLVS

SEQ ID NO: 67756 - protein, 270 aa, Triticum aestivum
  peptide (1)..(270): Ceres Seq. ID no. 14302767
  misc_feature (118)..(183): Pfam Name: AP2 domain Pfam Description: AP2 domain
  misc_feature (15)..(236): Homolog of NCBI NO: 25350257 NR Description: EREBP-2 protein [imported] - Arabidopsis thaliana
  misc_feature (4)..(72): Homolog of NCBI NO: 7489123 NR Description: ethylene-responsive transcription factor ERF1 -
  misc_feature (98)..(234): Homolog of NCBI NO: 7489123 NR Description: ethylene-responsive transcription factor ERF1 -
  misc_feature (1)..(236): Homolog of NCBI NO: 25350258 NR Description: ethylene responsive element binding factor 1
  misc_feature (1)..(236): Homolog of NCBI NO: 21264420 NR Description: Ethylene responsive element binding factor 1
  misc_feature (23)..(228): Homolog of NCBI NO: 7489113 NR Description: DNA binding protein EREBP-2 - common tobacco
  misc_feature (16)..(228): Homolog of NCBI NO: 8809571 NR Description: ethylene-responsive element binding factor
  misc_feature (1)..(269): Homolog of NCBI NO: 7528276 NR Description: AP2-related transcription factor
  misc_feature (1)..(259): Homolog of NCBI NO: 14140141 NR Description: putative AP2-related transcription factor [Oryza
  misc_feature (1)..(269): Homolog of NCBI NO: 38346167 NR Description: OSJNBa0079A21.14 [Oryza sativa (japonica
MEDTAAPAPEARRQRPAYCRSASFGSLVADQWSESLPFRADDSDDMVVYGALRDAFSCGWLPDGSFAAVKPEPLLPSPDSCYVGFLEPETPPATSPGESEEEAAAAFMGEAAAAAARGKHYRGVRQRPWGKFAAEIRDPAKNGARVWLGTYDTAEDAAVAYDRAAYRMRGSRALLNFPLRIGSEIAAAHAAAAAAGDKRPSPEPATSDSSSSSSSSGSPKRRKRGEAAAASMAMALVPPPSQLSRPAQAWYPAAPVEQVAMAPRAQQLVS

SEQ ID NO: 67757 - DNA, 1401 bp, Triticum aestivum
  misc_feature (1)..(1401): Ceres Seq. ID no. 13585143
aaagctgagagcagttcgtcaataaataagttctccagaaaccccgaaaccccgcgaccaccgcctcgccgcttacacgaccgagtgcgccgacggacgacacctccactaccgcctgtcgcccctcgccgcgcgcgaccgacgcccaccgcgttacgatggtgaccgacgcggccgcgctggcggtcgtgaaggccgcgcgccccgtcttccgcggcgcccacgacggcgtggcgttcgccgcaaacgccgccttcctcgccgccggatactccttatgcgccgtcggccctgccgcgctcgccgaccccctccccgcagttgacgaggaggtgggaattgatgggtggaacactatggacaattgctatgcctttctgtactccaaggaggaggagggcaagaagaagcgcattttagtgaaatgtctagtgattgatgacttccttgctattgatgcgctggatcttgaggcacaacacaaggaaccctgcaatgttcagataaatgtgaaggatttcttctctgaagaacagcccaagaattataaggatatgtacaagaattttgcgggcttcatcaatacccttaactcaagcttgttagttgaattggatggtaagaatgctgctgctgctgccgcccagaagcctgatcttgagggcagttcatcaataaacagttctgaaaatgttctgccggatacaaggactactgaacctgctggcctgatatatcctccagtagctccgtttggtcatgatgacaccttccctgctcctggtgctggcttctaccctcacagtggtgggccgggtggtagtatgcacgttggcccaaatgatccacgcttctttccttcaaatccttttcctgctccttttggtggccctgggagtgttccacctggtgtccgttacgatccaatcggcccgcccgatgttccaggatttgaaccatctcgctttgtgaggcgttcgaggcatccaggtggaagcactcacccagacctcgagttcttccagcaaggcccagacttctgagactcggcttcatgccacctgcaccctgcgctgaatgactctgctttgtttgtgctgcgctcatgaactttttttcagtagaccctgcttgggaagttggaaacatgaatgtaaacttttgtatttaccttccagacaatgctttgtgacggttgactgtacaattgtatatagacctgtcttcgtatccctctgtgcttcttacctaaactattggtgcgactaccaacatctgcaatgtctgcctcgtagttatccagtagccccaaaatttgctcgcagtttctccgtatgcagtatcaccgcaaaatgttcctctgtatctacgggcgctccaagcgaaatcttgttttaatat

SEQ ID NO: 67758 - protein, 294 aa, Triticum aestivum
  peptide (1)..(294): Ceres Seq. ID no. 13585144
  misc_feature (1)..(153): Homolog of NCBI NO: 15221211 NR Description: hypothetical protein [Arabidopsis thaliana]
  misc_feature (231)..(294): Homolog of NCBI NO: 7489377 NR Description: hypothetical protein - barley (fragment)
  misc_feature (1)..(294): Homolog of NCBI NO: 15232382 NR Description: proteasome inhibitor, putative [Arabidopsis
  misc_feature (1)..(292): Homolog of NCBI NO: 34898580 NR Description: P0534A03.16 [Oryza sativa (japonica
MVTDAAALAVVKAARPVFRGAHDGVAFAANAAFLAAGYSLCAVGPAALADPLPAVDEEVGIDGWNTMDNCYAFLYSKEEEGKKKRILVKCLVIDDFLAIDALDLEAQHKEPCNVQINVKDFFSEEQPKNYKDMYKNFAGFINTLNSSLLVELDGKNAAAAAAQKPDLEGSSSINSSENVLPDTRTTEPAGLIYPPVAPFGHDDTFPAPGAGFYPHSGGPGGSMHVGPNDPRFFPSNPFPAPFGGPGSVPPGVRYDPIGPPDVPGFEPSRFVRRSRHPGGSTHPDLEFFQQGPDF

SEQ ID NO: 67759 - protein, 228 aa, Triticum aestivum
  peptide (1)..(228): Ceres Seq. ID no. 13585145
  misc_feature (1)..(87): Homolog of NCBI NO: 15221211 NR Description: hypothetical protein [Arabidopsis thaliana]
  misc_feature (165)..(228): Homolog of NCBI NO: 7489377 NR Description: hypothetical protein - barley (fragment)
  misc_feature (1)..(228): Homolog of NCBI NO: 15232382 NR Description: proteasome inhibitor, putative [Arabidopsis
  misc_feature (1)..(226): Homolog of NCBI NO: 34898580 NR Description: P0534A03.16 [Oryza sativa (japonica
MDNCYAFLYSKEEEGKKKRILVKCLVIDDFLAIDALDLEAQHKEPCNVQINVKDFFSEEQPKNYKDMYKNFAGFINTLNSSLLVELDGKNAAAAAAQKPDLEGSSSINSSENVLPDTRTTEPAGLIYPPVAPFGHDDTFPAPGAGFYPHSGGPGGSMHVGPNDPRFFPSNPFPAPFGGPGSVPPGVRYDPIGPPDVPGFEPSRFVRRSRHPGGSTHPDLEFFQQGPDF

SEQ ID NO: 67760 - protein, 162 aa, Triticum aestivum
  peptide (1)..(162): Ceres Seq. ID no. 13585146
  misc_feature (1)..(21): Homolog of NCBI NO: 15221211 NR Description: hypothetical protein [Arabidopsis thaliana]
  misc_feature (99)..(162): Homolog of NCBI NO: 7489377 NR Description: hypothetical protein - barley (fragment)
  misc_feature (1)..(162): Homolog of NCBI NO: 15232382 NR Description: proteasome inhibitor, putative [Arabidopsis
  misc_feature (1)..(160): Homolog of NCBI NO: 34898580 NR Description: P0534A03.16 [Oryza sativa (japonica
MYKNFAGFINTLNSSLLVELDGKNAAAAAAQKPDLEGSSSINSSENVLPDTRTTEPAGLIYPPVAPFGHDDTFPAPGAGFYPHSGGPGGSMHVGPNDPRFFPSNPFPAPFGGPGSVPPGVRYDPIGPPDVPGFEPSRFVRRSRHPGGSTHPDLEFFQQGPDF

SEQ ID NO: 67761 - DNA, 1474 bp, Triticum aestivum
  misc_feature (1)..(1474): Ceres Seq. ID no. 13654431
gttagaaaatttccagccctgcccctccccggcgccggcgaccaccgccgcagccgccacctcctccaggagcgccggcgtcgcccgtccgcacccggcggcggcggcggaggcagcgatggcgaggcaagaggccgtgggggccgccacgggggtggacttccacctgccggacgagatcctggccgtgatccccactgacccgtacgagcagctggacgtcgcccgcaagatcacctccatggccatcgcgtcccgcgtctcccgcctcgaggccgacgtcgcgcgcctccgcagggacctcgccgaccgcgaccgcggcgaggccgacctccgcgcccgcctcgccgactccgacgcccgcctcctcgccgcgctcgacgagaacgcgaagctggtgaaggagagggacacgctcgccctgacggccaagaagctgtcgaggaacttggcaaagttagaggcatttaagaagcagttgatgaaatcgctgagtgaagataatttattgcaattgtcagaaacaggtgaagatcgtgatgtagatgcagaaaataatgggaccgctcgaattccttcctggaaagatgaagtttcaagcagtcacacctcttcaaatacttccagcagatccacaatcaccgaatcagcccaaggataccagttctcaatcacaccatatgtagccccccaaataactcctggttcaacaccaattatttcatcctctagtggttccccactagcatattcaactggtccatccactccgaagttctattctggtccaacatcgcctacaagatcacgttctgaagaccaatcggcattttcatcatggaatggatcaagtcatcagtattcagcccctgtctctcctcaacgccgctcatttgcagggcgacctcgtatagatggaaaggaattcttccgacaagcacggacacgactatcttatgagcaatttggagcattcttggcaaatattaaggaatttaatgcacagaaacaatcgcgagaggacaccttgtcgaaagcagaggagatttttggaacagagcacaaagacttgtacatttctttccagaatatgcttaaccgcaaccaatcgtgaacctgtcataggctgccgtatttcttcttttgaacaagctggtttagttcatcggtatgtctcttcggtttaaacgacggtaccattctgctggggtaataattcctatgccaggccatctgtttccaagagagcgtgtatcgttggagttctcgttgatcacaagatcatctccttagaaatctgtgcataggccattgtagttttggtgtggccatcctcaataacatgatgtaaatgggtatggtcatgcatgcattcaacaaggaaaagtttcttttctttttgcgaacaagtggaagttgagactgtcagatatattggtctgtgtaattgacttgtgaattgaagctcgttttc

SEQ ID NO: 67762 - protein, 370 aa, Triticum aestivum
  peptide (1)..(370): Ceres Seq. ID no. 15219652
  misc_feature (300)..(368): Homolog of NCBI NO: 23613663 NR Description: hypothetical protein, conserved [Plasmodium
  misc_feature (61)..(168): Homolog of NCBI NO: 23613663 NR Description: hypothetical protein, conserved [Plasmodium
  misc_feature (30)..(295): Homolog of NCBI NO: 34909876 NR Description: B1143G03.2 [Oryza sativa (japonica
  misc_feature (50)..(300): Homolog of NCBI NO: 25404089 NR Description: hypothetical protein T6H22.12 [imported] -
  misc_feature (41)..(340): Homolog of NCBI NO: 7485048 NR Description: hypothetical protein - Arabidopsis thaliana
  misc_feature (45)..(368): Homolog of NCBI NO: 18414476 NR Description: expressed protein [Arabidopsis thaliana]
  misc_feature (94)..(370): Homolog of NCBI NO: 38344261 NR Description: OSJNBa0008M17.14 [Oryza sativa (japonica
  misc_feature (52)..(368): Homolog of NCBI NO: 30684901 NR Description: expressed protein [Arabidopsis thaliana]
  misc_feature (50)..(365): Homolog of NCBI NO: 15222835 NR Description: expressed protein [Arabidopsis thaliana]
  misc_feature (40)..(271): Homolog of NCBI NO: 38344261 NR Description: OSJNBa0008M17.14 [Oryza sativa (japonica
LENFQPCPSPAPATTAAAATSSRSAGVARPHPAAAAEAAMARQEAVGAATGVDFHLPDEILAVIPTDPYEQLDVARKITSMAIASRVSRLEADVARLRRDLADRDRGEADLRARLADSDARLLAALDENAKLVKERDTLALTAKKLSRNLAKLEAFKKQLMKSLSEDNLLQLSETGEDRDVDAENNGTARIPSWKDEVSSSHTSSNTSSRSTITESAQGYQFSITPYVAPQITPGSTPIISSSSGSPLAYSTGPSTPKFYSGPTSPTRSRSEDQSAFSSWNGSSHQYSAPVSPQRRSFAGRPRIDGKEFFRQARTRLSYEQFGAFLANIKEFNAQKQSREDTLSKAEEIFGTEHKDLYISFQNMLNRNQS

SEQ ID NO: 67763 - protein, 331 aa, Triticum aestivum
  peptide (1)..(331): Ceres Seq. ID no. 15219653
  misc_feature (261)..(329): Homolog of NCBI NO: 23613663 NR Description: hypothetical protein, conserved [Plasmodium
  misc_feature (22)..(129): Homolog of NCBI NO: 23613663 NR Description: hypothetical protein, conserved [Plasmodium
  misc_feature (1)..(256): Homolog of NCBI NO: 34909876 NR Description: B1143G03.2 [Oryza sativa (japonica
  misc_feature (11)..(261): Homolog of NCBI NO: 25404089 NR Description: hypothetical protein T6H22.12 [imported] -
  misc_feature (2)..(301): Homolog of NCBI NO: 7485048 NR Description: hypothetical protein - Arabidopsis thaliana
  misc_feature (6)..(329): Homolog of NCBI NO: 18414476 NR Description: expressed protein [Arabidopsis thaliana]
  misc_feature (55)..(331): Homolog of NCBI NO: 38344261 NR Description: OSJNBa0008M17.14 [Oryza sativa (japonica
  misc_feature (13)..(329): Homolog of NCBI NO: 30684901 NR Description: expressed protein [Arabidopsis thaliana]
  misc_feature (11)..(326): Homolog of NCBI NO: 15222835 NR Description: expressed protein [Arabidopsis thaliana]
  misc_feature (1)..(232): Homolog of NCBI NO: 38344261 NR Description: OSJNBa0008M17.14 [Oryza sativa (japonica
MARQEAVGAATGVDFHLPDEILAVIPTDPYEQLDVARKITSMAIASRVSRLEADVARLRRDLADRDRGEADLRARLADSDARLLAALDENAKLVKERDTLALTAKKLSRNLAKLEAFKKQLMKSLSEDNLLQLSETGEDRDVDAENNGTARIPSWKDEVSSSHTSSNTSSRSTITESAQGYQFSITPYVAPQITPGSTPIISSSSGSPLAYSTGPSTPKFYSGPTSPTRSRSEDQSAFSSWNGSSHQYSAPVSPQRRSFAGRPRIDGKEFFRQARTRLSYEQFGAFLANIKEFNAQKQSREDTLSKAEEIFGTEHKDLYISFQNMLNRNQS

SEQ ID NO: 67764 - protein, 290 aa, Triticum aestivum
  peptide (1)..(290): Ceres Seq. ID no. 15219654
  misc_feature (220)..(288): Homolog of NCBI NO: 23613663 NR Description: hypothetical protein, conserved [Plasmodium
  misc_feature (1)..(88): Homolog of NCBI NO: 23613663 NR Description: hypothetical protein, conserved [Plasmodium
  misc_feature (1)..(215): Homolog of NCBI NO: 34909876 NR Description: B1143G03.2 [Oryza sativa (japonica
  misc_feature (1)..(220): Homolog of NCBI NO: 25404089 NR Description: hypothetical protein T6H22.12 [imported] -
  misc_feature (1)..(260): Homolog of NCBI NO: 7485048 NR Description: hypothetical protein - Arabidopsis thaliana
  misc_feature (1)..(288): Homolog of NCBI NO: 18414476 NR Description: expressed protein [Arabidopsis thaliana]
  misc_feature (14)..(290): Homolog of NCBI NO: 38344261 NR Description: OSJNBa0008M17.14 [Oryza sativa (japonica
  misc_feature (1)..(288): Homolog of NCBI NO: 30684901 NR Description: expressed protein [Arabidopsis thaliana]
  misc_feature (1)..(285): Homolog of NCBI NO: 15222835 NR Description: expressed protein [Arabidopsis thaliana]
  misc_feature (1)..(191): Homolog of NCBI NO: 38344261 NR Description: OSJNBa0008M17.14 [Oryza sativa (japonica
MAIASRVSRLEADVARLRRDLADRDRGEADLRARLADSDARLLAALDENAKLVKERDTLALTAKKLSRNLAKLEAFKKQLMKSLSEDNLLQLSETGEDRDVDAENNGTARIPSWKDEVSSSHTSSNTSSRSTITESAQGYQFSITPYVAPQITPGSTPIISSSSGSPLAYSTGPSTPKFYSGPTSPTRSRSEDQSAFSSWNGSSHQYSAPVSPQRRSFAGRPRIDGKEFFRQARTRLSYEQFGAFLANIKEFNAQKQSREDTLSKAEEIFGTEHKDLYISFQNMLNRNQS

SEQ ID NO: 67765 - DNA, 2068 bp, Triticum aestivum
  misc_feature (1)..(2068): Ceres Seq. ID no. 14303297
accaaaccagcacacgtcaacggaacagcttagcaaaatccccaccaaggtgtagaatattccccaaaaccccacgtcccctccctctgccgccgctcccactccaccagtgtgccacccggatcgatcgatcgattgacagcgatggacacccacatcggctccgtcgacgggccgtcgccggcggcggtgaacggcgcggtcggctgcccggcgtccgcgccggggtgcccgatcatgtcctcccaccccgtggtcttcgccgtgcccggggacttcaacctcacgctgctcgaccacctcgtcgacgagcccgggctgcgcctcgtcggctgctgcaacgagctcaacgctggctacgcggccgacggctacgcgcgggcccgcggcgtcggcgcctgcgcggtcaccttcaccgtcggcggcctcagcgtgctcaacgccatcgccggcgcctacagcgagaacctgcccgtcatctgcatcgccggcgggcccaactccaacgactacggcaccaaccgcatcctccaccacaccatcggcatcccggacttctcgcaggagctgcgctgcttccagaccgtcacctgccaccaggcggtggtgaccaacctggacgacgcgcacgagcagatcgacacggccatcgccacggcgctcagggagagcaagccggtgtacctcagcatcagctgcaacctccccgggctacctcaccccaccttcacccgtgacccagtccctttcttcctcgcccccaagatgagcaacaagatggggctcgaggctgcagtggaggcaaccgtcgagttcctgaacaaggcggtgaagccagtgcttgtcgccggccccaaactgcgcgtggccaaggcggggaaggccttcgtcgaccttgtggacgccagtggctatgcctatgctataatgccatcggccaagggctttgtgccagagacgcacccccacttcctcggcacctactggggcgccgtcagcacggccttctgcgccgagatcgtcgagtcggccgacgcctacctcttcgcaggccccatcttcaacgactacagctctgttggctactcgttcctgctcaagaaggacaaggccatcatcgtgcagcctgagcgtgtcatcgtcgggaacggcccggcattcggctgcgtcatgatgaaggagtacctgtctgcattggccaagcgggttcagaagaacaccaccgcctacgagaactacaagaggatcttcgtgcctgagggccatccgctgaagggcgaggcgaacgagccgctgcgtgtcaatgtgctcttcaagcacatccaggacatgctgacgggtgatagtgcagtgctcgctgagaccggtgactcctggttcaactgccagaagctcaagctgcccgagggctgcgggtatgaattccaaatgcagtatggctcgattggatggtcagtgggtgcattgctcgggtacgcgcaaggggcgagtgacaagcgtgtcatagcctgcattggtgatgggagcttccaggtgacagcacaggatgtgtcaactatgctgcggtgcgaacagaacagcataatcttcctgatcaacaatggcgggtacacgatcgaggtggagatccacgacgggccttacaatgtcatcaagaactggaactacaccgcccttgtggaggccatccacaacggggagggcaaatgctggactgccaaggtgaagtgcgaggaggagctgacggcggcgatagagacggcgctgggggagaagaaggactctctgtgcttcatcgaggtgatcgcgcacaaggacgacaccagcaaagagcttctggaatggggctccagggtctctgctgccaactccaggccacccaacccccagtagaccaagcacgcctgcatcactagtagtcgcatccagcagcacgttgccatcaaataatgttgaacagtttatctttgctcttctgttatgttcttagttttgtgcctactagttacttgtgagctgtggccatcgcctgtgttctatcctgccaatgctaagaagatcatgagat

SEQ ID NO: 67766 - protein, 582 aa, Triticum aestivum
  peptide (1)..(582): Ceres Seq. ID no. 14303298
  misc_feature (217)..(366): Pfam Name: Thiamine pyrophosphate enzyme, central domain Pfam Description: Thiamine pyrophosphate enzyme, central domain
  misc_feature (38)..(582): Homolog of NCBI NO: 10121330 NR Description: pyruvate decarboxylase [Fragaria x ananassa]
  misc_feature (38)..(582): Homolog of NCBI NO: 10732644 NR Description: pyruvate decarboxylase 1 [Vitis vinifera]
  misc_feature (38)..(582): Homolog of NCBI NO: 29373077 NR Description: pyruvate decarboxylase 1 [Lotus corniculatus]
  misc_feature (38)..(582): Homolog of NCBI NO: 24745919 NR Description: pyruvate decarboxylase [Solanum tuberosum]
  misc_feature (1)..(43): Homolog of NCBI NO: 1706328 NR Description: Pyruvate decarboxylase isozyme 2 (PDC)
  misc_feature (11)..(582): Homolog of NCBI NO: 1706328 NR Description: Pyruvate decarboxylase isozyme 2 (PDC)
  misc_feature (1)..(36): Homolog of NCBI NO: 19851524 NR Description: pyruvate decarboxylase [Zea mays]
  misc_feature (38)..(582): Homolog of NCBI NO: 19851524 NR Description: pyruvate decarboxylase [Zea mays]
  misc_feature (1)..(36): Homolog of NCBI NO: 19851522 NR Description: pyruvate decarboxylase [Zea mays]
  misc_feature (38)..(582): Homolog of NCBI NO: 19851522 NR Description: pyruvate decarboxylase [Zea mays]
MDTHIGSVDGPSPAAVNGAVGCPASAPGCPIMSSHPVVFAVPGDFNLTLLDHLVDEPGLRLVGCCNELNAGYAADGYARARGVGACAVTFTVGGLSVLNAIAGAYSENLPVICIAGGPNSNDYGTNRILHHTIGIPDFSQELRCFQTVTCHQAVVTNLDDAHEQIDTAIATALRESKPVYLSISCNLPGLPHPTFTRDPVPFFLAPKMSNKMGLEAAVEATVEFLNKAVKPVLVAGPKLRVAKAGKAFVDLVDASGYAYAIMPSAKGFVPETHPHFLGTYWGAVSTAFCAEIVESADAYLFAGPIFNDYSSVGYSFLLKKDKAIIVQPERVIVGNGPAFGCVMMKEYLSALAKRVQKNTTAYENYKRIFVPEGHPLKGEANEPLRVNVLFKHIQDMLTGDSAVLAETGDSWFNCQKLKLPEGCGYEFQMQYGSIGWSVGALLGYAQGASDKRVIACIGDGSFQVTAQDVSTMLRCEQNSIIFLINNGGYTIEVEIHDGPYNVIKNWNYTALVEAIHNGEGKCWTAKVKCEEELTAAIETALGEKKDSLCFIEVIAHKDDTSKELLEWGSRVSAANSRPPNPQ

SEQ ID NO: 67767 - protein, 551 aa, Triticum aestivum
  peptide (1)..(551): Ceres Seq. ID no. 14303299
  misc_feature (186)..(335): Pfam Name: Thiamine pyrophosphate enzyme, central domain Pfam Description: Thiamine pyrophosphate enzyme, central domain
  misc_feature (7)..(551): Homolog of NCBI NO: 118390 NR Description: Pyruvate decarboxylase isozyme 1 (PDC)
  misc_feature (7)..(551): Homolog of NCBI NO: 3970823 NR Description: pyruvate decarboxylase [Zea mays]
  misc_feature (7)..(551): Homolog of NCBI NO: 10121330 NR Description: pyruvate decarboxylase [Fragaria x ananassa]
  misc_feature (7)..(551): Homolog of NCBI NO: 10732644 NR Description: pyruvate decarboxylase 1 [Vitis vinifera]
  misc_feature (7)..(551): Homolog of NCBI NO: 29373077 NR Description: pyruvate decarboxylase 1 [Lotus corniculatus]
  misc_feature (7)..(551): Homolog of NCBI NO: 24745919 NR Description: pyruvate decarboxylase [Solanum tuberosum]
  misc_feature (1)..(12): Homolog of NCBI NO: 1706328 NR Description: Pyruvate decarboxylase isozyme 2 (PDC)
  misc_feature (1)..(551): Homolog of NCBI NO: 1706328 NR Description: Pyruvate decarboxylase isozyme 2 (PDC)
  misc_feature (7)..(551): Homolog of NCBI NO: 19851524 NR Description: pyruvate decarboxylase [Zea mays]
  misc_feature (7)..(551): Homolog of NCBI NO: 19851522 NR Description: pyruvate decarboxylase [Zea mays]
MSSHPVVFAVPGDFNLTLLDHLVDEPGLRLVGCCNELNAGYAADGYARARGVGACAVTFTVGGLSVLNAIAGAYSENLPVICIAGGPNSNDYGTNRILHHTIGIPDFSQELRCFQTVTCHQAVVTNLDDAHEQIDTAIATALRESKPVYLSISCNLPGLPHPTFTRDPVPFFLAPKMSNKMGLEAAVEATVEFLNKAVKPVLVAGPKLRVAKAGKAFVDLVDASGYAYAIMPSAKGFVPETHPHFLGTYWGAVSTAFCAEIVESADAYLFAGPIFNDYSSVGYSFLLKKDKAIIVQPERVIVGNGPAFGCVMMKEYLSALAKRVQKNTTAYENYKRIFVPEGHPLKGEANEPLRVNVLFKHIQDMLTGDSAVLAETGDSWFNCQKLKLPEGCGYEFQMQYGSIGWSVGALLGYAQGASDKRVIACIGDGSFQVTAQDVSTMLRCEQNSIIFLINNGGYTIEVEIHDGPYNVIKNWNYTALVEAIHNGEGKCWTAKVKCEEELTAAIETALGEKKDSLCFIEVIAHKDDTSKELLEWGSRVSAANSRPPNPQ

SEQ ID NO: 67768 - protein, 375 aa, Triticum aestivum
  peptide (1)..(375): Ceres Seq. ID no. 14303300
  misc_feature (10)..(159): Pfam Name: Thiamine pyrophosphate enzyme, central domain Pfam Description: Thiamine pyrophosphate enzyme, central domain
  misc_feature (1)..(375): Homolog of NCBI NO: 17225598 NR Description: pyruvate decarboxylase [Fragaria x ananassa]
  misc_feature (1)..(375): Homolog of NCBI NO: 118390 NR Description: Pyruvate decarboxylase isozyme 1 (PDC)
  misc_feature (1)..(375): Homolog of NCBI NO: 3970823 NR Description: pyruvate decarboxylase [Zea mays]
  misc_feature (1)..(375): Homolog of NCBI NO: 10121330 NR Description: pyruvate decarboxylase [Fragaria x ananassa]
  misc_feature (1)..(375): Homolog of NCBI NO: 10732644 NR Description: pyruvate decarboxylase 1 [Vitis vinifera]
  misc_feature (1)..(375): Homolog of NCBI NO: 29373077 NR Description: pyruvate decarboxylase 1 [Lotus corniculatus]
  misc_feature (1)..(375): Homolog of NCBI NO: 24745919 NR Description: pyruvate decarboxylase [Solanum tuberosum]
  misc_feature (1)..(375): Homolog of NCBI NO: 1706328 NR Description: Pyruvate decarboxylase isozyme 2 (PDC)
  misc_feature (1)..(375): Homolog of NCBI NO: 19851524 NR Description: pyruvate decarboxylase [Zea mays]
  misc_feature (1)..(375): Homolog of NCBI NO: 19851522 NR Description: pyruvate decarboxylase [Zea mays]
MSNKMGLEAAVEATVEFLNKAVKPVLVAGPKLRVAKAGKAFVDLVDASGYAYAIMPSAKGFVPETHPHFLGTYWGAVSTAFCAEIVESADAYLFAGPIFNDYSSVGYSFLLKKDKAIIVQPERVIVGNGPAFGCVMMKEYLSALAKRVQKNTTAYENYKRIFVPEGHPLKGEANEPLRVNVLFKHIQDMLTGDSAVLAETGDSWFNCQKLKLPEGCGYEFQMQYGSIGWSVGALLGYAQGASDKRVIACIGDGSFQVTAQDVSTMLRCEQNSIIFLINNGGYTIEVEIHDGPYNVIKNWNYTALVEAIHNGEGKCWTAKVKCEEELTAAIETALGEKKDSLCFIEVIAHKDDTSKELLEWGSRVSAANSRPPNPQ

SEQ ID NO: 67769 - DNA, 1232 bp, Triticum aestivum
  misc_feature (1)..(1232): Ceres Seq. ID no. 15226126
gaaagaatccaccttattgcccagtgcatcgttttttgactagtcctcgtcgtggttaacaccgcaccaaccaagctgaggagttgaagttcgagacattctcgactgccggctgccgccccctcttctacggctccacttccaagtgccaaagcggccacgccacaaccacaacaatggcgcttccagcgacctcgtggctgctcatctccctcctcctcgccgtgacgccagcccctagcacctgtgaggagagcgtgcgcatcgcgggcgcaggcggcttgctgcagtgctacccggcgccggcgctcaccaacgccactaacggcacggcgtttcgcgccaccctgctcccgctcctcggctctctcccctccgccgccgcgcccacgggcttcgcctccctacggtccgtcactcgcggggagcgcgcgttggcgcgggggctctgcttcggcaactccacggtgccgtccgagtgcgcccggtgcctgtccgccgcggctgggaacctcacagctggctgcggcgccaccagccggcgccccggcatctggagcgaccggtgcttcgtcggctacgccgacaccaacgcatcctcgtcaaacgaagacggcttccgcgcgcgcgtcctcctcccgggcgacgacgccgtccctcgctctgtggccagcaccaaatccttctactacgcccacctgcacgatgtactcgtcgccatggagaaggacgtggcgcggcgcgcggccgcgaacatctccgggccgcggatgctggccacagcggaggagaccaactccgacagcgcggtgagcagaacagtgcacgttctggcgcagtgcgggagggaccgcacggcggcggcctgcgtccggtgcctacagaactcggtgcaggccgtgcactgggacctcaacgctgcccgcgtcgacggtggcgtggcggccgcggtggtgggcttcaactgctacatgcggtttgaggtctccactgcagtgggtggcgacactatcactggcgttatgctactggtggcattcgtgctatgtatatttacaggaggcgcatgtgggtgtttgtgtcctgtaccctgatgaagttgagaaagaaggataaaattcgttgcaacgatatcagagatcaggaacgcaataaaaccttatgttccaattaagtttcttattgcatactctgtatatcttaatgggaaacgcttcctctcagtagtctgc

SEQ ID NO: 67770 - protein, 305 aa, Triticum aestivum
  peptide (1)..(305): Ceres Seq. ID no. 15226127
  misc_feature (86)..(142): Pfam Name: Domain of unknown function DUF26 Pfam Description: Domain of unknown function DUF26
  misc_feature (50)..(167): Homolog of NCBI NO: 34909980 NR Description: P0490D09.14 [Oryza sativa (japonica
  misc_feature (37)..(295): Homolog of NCBI NO: 34910014 NR Description: P0413G02.8 [Oryza sativa (japonica
  misc_feature (1)..(276): Homolog of NCBI NO: 34910012 NR Description: P0413G02.7 [Oryza sativa (japonica
  misc_feature (38)..(271): Homolog of NCBI NO: 27476077 NR Description: Hypothetical protein [Oryza sativa (japonica
MALPATSWLLISLLLAVTPAPSTCEESVRIAGAGGLLQCYPAPALTNATNGTAFRATLLPLLGSLPSAAAPTGFASLRSVTRGERALARGLCFGNSTVPSECARCLSAAAGNLTAGCGATSRRPGIWSDRCFVGYADTNASSSNEDGFRARVLLPGDDAVPRSVASTKSFYYAHLHDVLVAMEKDVARRAAANISGPRMLATAEETNSDSAVSRTVHVLAQCGRDRTAAACVRCLQNSVQAVHWDLNAARVDGGVAAAVVGFNCYMRFEVSTAVGGDTITGVMLLVAFVLCIFTGGACGCLCPVP

SEQ ID NO: 67771 - DNA, 1101 bp, Triticum aestivum
  misc_feature (1)..(1101): Ceres Seq. ID no. 15173621
gccaagagcacttgccaatcacttgcaccccaaaagaagtttttgccgagagcacttgccaatcacttgcacctcaaaaggctttcttgctgccacagctgaatccatggcgaaatgcgggctgctgctcctgttcattgcgttcctcttgccggcggcacgtgcgacatcgtgccaccccgatgacctccgtgcgctacggggcttcgccggaaacctcagcggtggggctgtcctcctccgtgctgcctggtccggtgcctcctgctgcgtctgggaaggcgtgaactgcgatggcactagcggccgtgtcacggcgctgcggctccctgggcacggccttgtggggctcatcccaggagcatccttggcaggccttgcacggctagaggagctcaaccttgccaacaacaaactggtcggcaccatcccatcatggattggcgagcttgatcacctttgctacttggatctgtcggataattcattggttggcgaggtacccaagagtttgatacggctcaagggtcttgtcatcgctggtcattcactaggtatggtttttactaacatgccattgtatgtgaagcgtaatagaagaacacttgatgaacaaccaaatacaatatctgggagcaacaacactgtcagatctgggagcaccaacgttgtttctgggaatgacaacactgtcatatccgggaataacaacaatgtggctgggagcaacaacactgtcataaccgggaacgacaataccgtaactggtagcaaccatgttgtatctggggacaaacatatcgtgactgacaataacaatgccgtatccgggaacgacaataatgtatccgggagcttccataccgtatccgggagccacaatactgtatctgggaccaacaacactgtatctgggagcaaccatgtcgtatctgggagcaacaaggtcgtaggagatgaatgatttgtaagtgaattgtttgcatcttccttgacggagctcatgtggttgtccaatttcagtgtagcccacaatcacttgggtggggtcaatagtgttatgtaacttcatggatatatatagcatcttatttctacttt

SEQ ID NO: 67772 - protein, 320 aa, Triticum aestivum
  peptide (1)..(320): Ceres Seq. ID no. 15173622
  misc_feature (190)..(315): Pfam Name: Histidine kinase-, DNA gyrase B-, and HSP90-like ATPase Pfam Description: Histidine kinase-, DNA gyrase B-, and
  misc_feature (33)..(171): Homolog of NCBI NO: 34895882 NR Description: putative protein kinase Xa21
  misc_feature (41)..(320): Homolog of NCBI NO: 34911420 NR Description: putative leucine rich repeat containing protein
  misc_feature (38)..(178): Homolog of NCBI NO: 15233013 NR Description: leucine-rich repeat transmembrane protein kinase,
  misc_feature (41)..(320): Homolog of NCBI NO: 15228969 NR Description: disease resistance protein family [Arabidopsis
  misc_feature (41)..(320): Homolog of NCBI NO: 15238872 NR Description: leucine-rich repeat transmembrane protein kinase,
  misc_feature (72)..(252): Homolog of NCBI NO: 34899380 NR Description: contains ESTs
  misc_feature (41)..(163): Homolog of NCBI NO: 34899380 NR Description: contains ESTs
  misc_feature (203)..(319): Homolog of NCBI NO: 7573548 NR Description: ice recrystallisation inhibition protein [Lolium
PRALANHLHPKRSFCREHLPITCTSKGFLAATAESMAKCGLLLLFIAFLLPAARATSCHPDDLRALRGFAGNLSGGAVLLRAAWSGASCCVWEGVNCDGTSGRVTALRLPGHGLVGLIPGASLAGLARLEELNLANNKLVGTIPSWIGELDHLCYLDLSDNSLVGEVPKSLIRLKGLVIAGHSLGMVFTNMPLYVKRNRRTLDEQPNTISGSNNTVRSGSTNVVSGNDNTVISGNNNNVAGSNNTVITGNDNTVTGSNHVVSGDKHIVTDNNNAVSGNDNNVSGSFHTVSGSHNTVSGTNNTVSGSNHVVSGSNKVVGDE

SEQ ID NO: 67773 - protein, 285 aa, Triticum aestivum
  peptide (1)..(285): Ceres Seq. ID no. 15173623
  misc_feature (155)..(280): Pfam Name: Histidine kinase-, DNA gyrase B-, and HSP90-like ATPase Pfam Description: Histidine kinase-, DNA gyrase B-, and
  misc_feature (1)..(136): Homolog of NCBI NO: 34895882 NR Description: putative protein kinase Xa21
  misc_feature (6)..(285): Homolog of NCBI NO: 34911420 NR Description: putative leucine rich repeat containing protein
  misc_feature (3)..(143): Homolog of NCBI NO: 15233013 NR Description: leucine-rich repeat transmembrane protein kinase,
  misc_feature (6)..(285): Homolog of NCBI NO: 15228969 NR Description: disease resistance protein family [Arabidopsis
  misc_feature (6)..(285): Homolog of NCBI NO: 15238872 NR Description: leucine-rich repeat transmembrane protein kinase,
  misc_feature (37)..(217): Homolog of NCBI NO: 34899380 NR Description: contains ESTs
  misc_feature (6)..(128): Homolog of NCBI NO: 34899380 NR Description: contains ESTs
  misc_feature (168)..(284): Homolog of NCBI NO: 7573548 NR Description: ice recrystallisation inhibition protein [Lolium
MAKCGLLLLFIAFLLPAARATSCHPDDLRALRGFAGNLSGGAVLLRAAWSGASCCVWEGVNCDGTSGRVTALRLPGHGLVGLIPGASLAGLARLEELNLANNKLVGTIPSWIGELDHLCYLDLSDNSLVGEVPKSLIRLKGLVIAGHSLGMVFTNMPLYVKRNRRTLDEQPNTISGSNNTVRSGSTNVVSGNDNTVISGNNNNVAGSNNTVITGNDNTVTGSNHVVSGDKHIVTDNNNAVSGNDNNVSGSFHTVSGSHNTVSGTNNTVSGSNHVVSGSNKVVGDE

SEQ ID NO: 67774 - DNA, 1440 bp, Triticum aestivum
  misc_feature (1)..(1440): Ceres Seq. ID no. 13662367
atcagaaatccaaagccaaaaaccactctctaaacccgacacaaaaactcaagcccgaacccaagaaagcttccttcccgagacgagatcaagatggctcccgagctggccggcaagatgaccgccaaggccgccgtggcggcggccaagcccgcgacgaaggcgtacgtgacgttcctggcgggggcgggggactactggatgggcgtggtggggcttgccaagggcctgcgcaaggttgggtcggcctacccgctggtggtggccgtgctgcccgacgtgcccgagctccaccgcaagatcctcgtctcccagggctgcatcgtccgcgagatcgctcccgtgtacccgcccgagaaccacacccagtttgccatggcctactacgtcatcaactactccaagctccgcatctgggagtttgtggagtacgagaggatggtgtacctcgacgccgacatccaggtgttcgacaacatcgacgagttgtttgatctgcccaaggggcatttctacgccgtgatggactgcttctgcgagaagacgtggagccacaccccgcagtaccagatcggctactgccagcagtgtcccgacaaggtgacgtggccggccgccgagatgggcccgccgccggcgctctacttcaacgccggcatgttcgtgcacgagcccagcatggccaccgccaaggcgctccttgacaccctccgcgtgacgccgacgaccccattcgcggagcaggatttcctcaacatgttcttcagggagcagtacaagccgatcccgctggtctacaaccttgttctggcgatgctctggaggcacccggagaacgtgcagctggagaaggtcaaggtggtgcactactgcgctgcgggatcgaagccatggaggttcacgggcaaagaggagaacatggacagggaggacatcaagatcctcgccaggaactggtgggacatctacaacgacgagagcctcgatttcaagggcctgcccgccctggccgccgacgccgacgagctcgaggcggcggccaagaagccgctccgcgcggcgcttgcggaagccggcaccgtcaagtacgtcaccgcgccctcggctgcgtgatccccggttgcctagctccggcccgtgccactgtggtcatcaaagcaggaagccgggcacctataagcatttgcattttggtattttgcgtctgttcggttccaagttagcagtatcatttcaagtttaagataggatcgaaagagtccacgtatgtgaatatcctcgaccctttgtgaagtagagtgctgagtcgtcctgtatgaaagaattatgtgtgaatcaataggaagctttaaaaattatggcatatatttttcacgtcaaaaaaaaaaaaaaaaaaaaaaaaggagggggggggagggaaaaaaaaaaaaaaaagagctt

SEQ ID NO: 67775 - protein, 339 aa, Triticum aestivum
  peptide (1)..(339): Ceres Seq. ID no. 13662368
  misc_feature (1)..(339): Homolog of NCBI NO: 5608497 NR Description: galactinol synthase, isoform GolS-1 [Ajuga
  misc_feature (12)..(339): Homolog of NCBI NO: 18874402 NR Description: galactinol synthase [Cucumis melo]
  misc_feature (1)..(339): Homolog of NCBI NO: 15219093 NR Description: galactinol synthase, putative [Arabidopsis
  misc_feature (1)..(339): Homolog of NCBI NO: 5541885 NR Description: putative galactinol synthase [Pisum sativum]
  misc_feature (1)..(339): Homolog of NCBI NO: 20340247 NR Description: galactinol synthase-like protein [Thellungiella
  misc_feature (1)..(339): Homolog of NCBI NO: 15223567 NR Description: galactinol synthase, putative [Arabidopsis
  misc_feature (1)..(339): Homolog of NCBI NO: 15226522 NR Description: galactinol synthase, putative [Arabidopsis
  misc_feature (2)..(339): Homolog of NCBI NO: 4588376 NR Description: galactinol synthase [Brassica napus]
  misc_feature (1)..(339): Homolog of NCBI NO: 34898096 NR Description: WSI76 protein induced by water stress
  misc_feature (1)..(339): Homolog of NCBI NO: 32330230 NR Description: galactinol synthase 3 [Zea mays]
MAPELAGKMTAKAAVAAAKPATKAYVTFLAGAGDYWMGVVGLAKGLRKVGSAYPLVVAVLPDVPELHRKILVSQGCIVREIAPVYPPENHTQFAMAYYVINYSKLRIWEFVEYERMVYLDADIQVFDNIDELFDLPKGHFYAVMDCFCEKTWSHTPQYQIGYCQQCPDKVTWPAAEMGPPPALYFNAGMFVHEPSMATAKALLDTLRVTPTTPFAEQDFLNMFFREQYKPIPLVYNLVLAMLWRHPENVQLEKVKVVHYCAAGSKPWRFTGKEENMDREDIKILARNWWDIYNDESLDFKGLPALAADADELEAAAKKPLRAALAEAGTVKYVTAPSAA

SEQ ID NO: 67776 - protein, 331 aa, Triticum aestivum
  peptide (1)..(331): Ceres Seq. ID no. 13662369
  misc_feature (1)..(331): Homolog of NCBI NO: 5608497 NR Description: galactinol synthase, isoform GolS-1 [Ajuga
  misc_feature (4)..(331): Homolog of NCBI NO: 18874402 NR Description: galactinol synthase [Cucumis melo]
  misc_feature (1)..(331): Homolog of NCBI NO: 15219093 NR Description: galactinol synthase, putative [Arabidopsis
  misc_feature (1)..(331): Homolog of NCBI NO: 5541885 NR Description: putative galactinol synthase [Pisum sativum]
  misc_feature (1)..(331): Homolog of NCBI NO: 20340247 NR Description: galactinol synthase-like protein [Thellungiella
  misc_feature (1)..(331): Homolog of NCBI NO: 15223567 NR Description: galactinol synthase, putative [Arabidopsis
  misc_feature (1)..(331): Homolog of NCBI NO: 15226522 NR Description: galactinol synthase, putative [Arabidopsis
  misc_feature (1)..(331): Homolog of NCBI NO: 4588376 NR Description: galactinol synthase [Brassica napus]
  misc_feature (1)..(331): Homolog of NCBI NO: 34898096 NR Description: WSI76 protein induced by water stress
  misc_feature (1)..(331): Homolog of NCBI NO: 32330230 NR Description: galactinol synthase 3 [Zea mays]
MTAKAAVAAAKPATKAYVTFLAGAGDYWMGVVGLAKGLRKVGSAYPLVVAVLPDVPELHRKILVSQGCIVREIAPVYPPENHTQFAMAYYVINYSKLRIWEFVEYERMVYLDADIQVFDNIDELFDLPKGHFYAVMDCFCEKTWSHTPQYQIGYCQQCPDKVTWPAAEMGPPPALYFNAGMFVHEPSMATAKALLDTLRVTPTTPFAEQDFLNMFFREQYKPIPLVYNLVLAMLWRHPENVQLEKVKVVHYCAAGSKPWRFTGKEENMDREDIKILARNWWDIYNDESLDFKGLPALAADADELEAAAKKPLRAALAEAGTVKYVTAPSAA

SEQ ID NO: 67777 - protein, 303 aa, Triticum aestivum
  peptide (1)..(303): Ceres Seq. ID no. 13662370
  misc_feature (1)..(303): Homolog of NCBI NO: 5608497 NR Description: galactinol synthase, isoform GolS-1 [Ajuga
  misc_feature (1)..(303): Homolog of NCBI NO: 18874402 NR Description: galactinol synthase [Cucumis melo]
  misc_feature (1)..(303): Homolog of NCBI NO: 15219093 NR Description: galactinol synthase, putative [Arabidopsis
  misc_feature (1)..(303): Homolog of NCBI NO: 5541885 NR Description: putative galactinol synthase [Pisum sativum]
  misc_feature (1)..(303): Homolog of NCBI NO: 20340247 NR Description: galactinol synthase-like protein [Thellungiella
  misc_feature (1)..(303): Homolog of NCBI NO: 15223567 NR Description: galactinol synthase, putative [Arabidopsis
  misc_feature (1)..(303): Homolog of NCBI NO: 15226522 NR Description: galactinol synthase, putative [Arabidopsis
  misc_feature (1)..(303): Homolog of NCBI NO: 4588376 NR Description: galactinol synthase [Brassica napus]
  misc_feature (1)..(303): Homolog of NCBI NO: 34898096 NR Description: WSI76 protein induced by water stress
  misc_feature (1)..(303): Homolog of NCBI NO: 32330230 NR Description: galactinol synthase 3 [Zea mays]
MGVVGLAKGLRKVGSAYPLVVAVLPDVPELHRKILVSQGCIVREIAPVYPPENHTQFAMAYYVINYSKLRIWEFVEYERMVYLDADIQVFDNIDELFDLPKGHFYAVMDCFCEKTWSHTPQYQIGYCQQCPDKVTWPAAEMGPPPALYFNAGMFVHEPSMATAKALLDTLRVTPTTPFAEQDFLNMFFREQYKPIPLVYNLVLAMLWRHPENVQLEKVKVVHYCAAGSKPWRFTGKEENMDREDIKILARNWWDIYNDESLDFKGLPALAADADELEAAAKKPLRAALAEAGTVKYVTAPSAA

SEQ ID NO: 67778 - DNA, 1446 bp, Triticum aestivum
  misc_feature (1)..(1446): Ceres Seq. ID no. 13595926
acagacacccaacggcatcatcatcatcaccgccaccgccacttcttctagatagctcctggtaccgccgtgccgtcattagccgcgggagcagagcctggacgagtcccagatcggtcggcaccgggaggcattcaggtaggcgggcaggcaggagtgggagctagattaagcgcagtgcgccggcatgggcgccgggattaggatcttggcggcggcgctcctggcgctcgcggccgtcggcggcgcgacggcgcagctccggcagggctactactccgccagctgccccaacgtggaggccatcgtgcaggccgcggtcgccctcaaggtccagcagacgcccgtcgccgtcggtgccaccgtccgcctcttcttccacgactgcttcgtccagggatgcgacgcgtcggtcatcatcgtgtcgtcggggaacaacacggcggagaaggaccacgtgagcaacctctccctcgccggcgacggcttcgacaccgtcatcaaggccaaggcggccgtggacacgcagtgccccagccccaacctggtgtcctgcgcggacatcctcaccatggccacccgggacgtcatcagcctggccggcggcccggcgtaccccgtggagctggggaggctggacgggctggtgtcgacggcgagcaacgtggacgggaacctgccgccgccgtccttcaacctcgaccagctgacggccatgttcgccgccaacaacctgtcccaggsccgacatgattgcgctctccgcggcgcacacagtggggttcgcgcactgcgggacgttcacgggccggatccagacggcggcggtggacccgacgatggaccccgggtacgcgtcgcagctgctggcggcgtgcccggccggggtggaccccaacgtggcgctggagatcgacccggtgacgccgcacgccttcgacaaccagtacttcatcaacctgcagaaggggatgggcctgctcacctccgaccaggtcctctacgccgacgtccggtcgcgccccaccgtcgacgcctgggcggccaacagctccgacttccaggccgccttcgtcgccgccatgaccaacctcggccgcgtcggggtcaagacggacccggcgctcggcaacatccgccgcgactgcgccgtgctcaacagctgattggttggttattgcattcgctgaagctggagaccaagatgcagtacaacctcgatcgatgcttggggatgtcatcaactgttcatagttagctgggccgctcgatggggtggcgctgagattataatacaagtagctttcaggacacaagtctagttctaatccatcagaaggttaatggttgaggagtctgttgagttgagcatcatcgattacctagagtcgaatgtattcaatgtgtgcgtaatattggagcgagatttattcgaacattttctcc

SEQ ID NO: 67779 - protein, 356 aa, Triticum aestivum
  peptide (1)..(356): Ceres Seq. ID no. 15221701
  misc_feature (41)..(197): Pfam Name: Peroxidase Pfam Description: Peroxidase
  misc_feature (7)..(197): Homolog of NCBI NO: 15235600 NR Description: peroxidase, putative [Arabidopsis thaliana]
  misc_feature (21)..(197): Homolog of NCBI NO: 1546708 NR Description: peroxidase ATP9a [Arabidopsis thaliana]
  misc_feature (8)..(197): Homolog of NCBI NO: 15235597 NR Description: peroxidase, putative [Arabidopsis thaliana]
  misc_feature (1)..(197): Homolog of NCBI NO: 13992528 NR Description: peroxidase2 [Medicago sativa]
  misc_feature (1)..(197): Homolog of NCBI NO: 2117624 NR Description: peroxidase (EC 1.11.1.7) 2 precursor - alfalfa
  misc_feature (22)..(197): Homolog of NCBI NO: 15229646 NR Description: peroxidase, putative [Arabidopsis thaliana]
  misc_feature (5)..(197): Homolog of NCBI NO: 14485511 NR Description: putative peroxidase [Solanum tuberosum]
  misc_feature (6)..(197): Homolog of NCBI NO: 28629828 NR Description: peroxidase 1 [Artemisia annua]
  misc_feature (6)..(197): Homolog of NCBI NO: 34915320 NR Description: putative peroxidase [Oryza sativa (japonica
  misc_feature (1)..(197): Homolog of NCBI NO: 17027274 NR Description: putative peroxidase [Oryza sativa (japonica
  misc_feature (186)..(186): Xaa is any aa, unknown or other
MGAGIRILAAALLALAAVGGATAQLRQGYYSASCPNVEAIVQAAVALKVQQTPVAVGATVRLFFHDCFVQGCDASVIIVSSGNNTAEKDHVSNLSLAGDGFDTVIKAKAAVDTQCPSPNLVSCADILTMATRDVISLAGGPAYPVELGRLDGLVSTASNVDGNLPPPSFNLDQLTAMFAANNLSQXRHDCALRGAHSGVRALRDVHGPDPDGGGGPDDGPRVRVAAAGGVPGRGGPQRGAGDRPGDAARLRQPVLHQPAEGDGPAHLRPGPLRRRPVAPHRRRLGGQQLRLPGRLRRRHDQPRPRRGQDGPGARQHPPRLRRAQQLIGWLLHSLKLETKMQYNLDRCLGMSSTVHS

SEQ ID NO: 67780 - protein, 228 aa, Triticum aestivum
  peptide (1)..(228): Ceres Seq. ID no. 15221702
  misc_feature (1)..(69): Pfam Name: Peroxidase Pfam Description: Peroxidase
  misc_feature (1)..(69): Homolog of NCBI NO: 15235600 NR Description: peroxidase, putative [Arabidopsis thaliana]
  misc_feature (1)..(69): Homolog of NCBI NO: 1546708 NR Description: peroxidase ATP9a [Arabidopsis thaliana]
  misc_feature (1)..(69): Homolog of NCBI NO: 15235597 NR Description: peroxidase, putative [Arabidopsis thaliana]
  misc_feature (1)..(69): Homolog of NCBI NO: 13992528 NR Description: peroxidase2 [Medicago sativa]
  misc_feature (1)..(69): Homolog of NCBI NO: 2117624 NR Description: peroxidase (EC 1.11.1.7) 2 precursor - alfalfa
  misc_feature (1)..(69): Homolog of NCBI NO: 15229646 NR Description: peroxidase, putative [Arabidopsis thaliana]
  misc_feature (1)..(69): Homolog of NCBI NO: 14485511 NR Description: putative peroxidase [Solanum tuberosum]
  misc_feature (1)..(69): Homolog of NCBI NO: 28629828 NR Description: peroxidase 1 [Artemisia annua]
  misc_feature (1)..(69): Homolog of NCBI NO: 34915320 NR Description: putative peroxidase [Oryza sativa (japonica
  misc_feature (1)..(69): Homolog of NCBI NO: 17027274 NR Description: putative peroxidase [Oryza sativa (japonica
  misc_feature (58)..(58): Xaa is any aa, unknown or other
MATRDVISLAGGPAYPVELGRLDGLVSTASNVDGNLPPPSFNLDQLTAMFAANNLSQXRHDCALRGAHSGVRALRDVHGPDPDGGGGPDDGPRVRVAAAGGVPGRGGPQRGAGDRPGDAARLRQPVLHQPAEGDGPAHLRPGPLRRRPVAPHRRRLGGQQLRLPGRLRRRHDQPRPRRGQDGPGARQHPPRLRRAQQLIGWLLHSLKLETKMQYNLDRCLGMSSTVHS

SEQ ID NO: 67781 - protein, 180 aa, Triticum aestivum
  peptide (1)..(180): Ceres Seq. ID no. 15221703
  misc_feature (1)..(21): Homolog of NCBI NO: 15235600 NR Description: peroxidase, putative [Arabidopsis thaliana]
  misc_feature (1)..(21): Homolog of NCBI NO: 1546708 NR Description: peroxidase ATP9a [Arabidopsis thaliana]
  misc_feature (1)..(21): Homolog of NCBI NO: 15235597 NR Description: peroxidase, putative [Arabidopsis thaliana]
  misc_feature (1)..(21): Homolog of NCBI NO: 13992528 NR Description: peroxidase2 [Medicago sativa]
  misc_feature (1)..(21): Homolog of NCBI NO: 2117624 NR Description: peroxidase (EC 1.11.1.7) 2 precursor - alfalfa
  misc_feature (1)..(21): Homolog of NCBI NO: 15229646 NR Description: peroxidase, putative [Arabidopsis thaliana]
  misc_feature (1)..(21): Homolog of NCBI NO: 14485511 NR Description: putative peroxidase [Solanum tuberosum]
  misc_feature (1)..(21): Homolog of NCBI NO: 28629828 NR Description: peroxidase 1 [Artemisia annua]
  misc_feature (1)..(21): Homolog of NCBI NO: 34915320 NR Description: putative peroxidase [Oryza sativa (japonica
  misc_feature (1)..(21): Homolog of NCBI NO: 17027274 NR Description: putative peroxidase [Oryza sativa (japonica
  misc_feature (10)..(10): Xaa is any aa, unknown or other
MFAANNLSQXRHDCALRGAHSGVRALRDVHGPDPDGGGGPDDGPRVRVAAAGGVPGRGGPQRGAGDRPGDAARLRQPVLHQPAEGDGPAHLRPGPLRRRPVAPHRRRLGGQQLRLPGRLRRRHDQPRPRRGQDGPGARQHPPRLRRAQQLIGWLLHSLKLETKMQYNLDRCLGMSSTVHS

SEQ ID NO: 67782 - DNA, 1515 bp, Triticum aestivum
  misc_feature (1)..(1515): Ceres Seq. ID no. 12465151
accgatcattttggcgggagagcagcagttggccgcctccactctccactttcccgcgcagagtaaatcagcaatggacggcggctccggctcctccttccaggccgtagcggcggctgccgccatggagatggaggagtacctcaactggaagaagaacgcgccggtgctctacgacctcgtcatgtcccacccgctcgagtggccctcgctcaccgtccagtggctcccctcggggtcgccggcctccgcccgctcccaccgcctcgtcctcggcacccacgcctccgacgactccgccaaccacctcatgctcgtcgacgccgtgctcccgctcccgccgcgcctggccgccgcggccgccgccgaggaccgcgccgtcccggccccgtccgtgtccatcggccgctcggcgccgcatcagggcgaggtcaaccgcgcccggtgcatgccgcagcggccgtacaccgtggccaccaagacctgcgtcgatgaggtgcacgtgtaccacctcggggaggacggtgagaagggcggcgcggatgtcgtgctcaggggccatggcgcggaggggtatgggctggcgtggagcgccacgaaggaggggttcctgctgagcggctcgtatgataagaagatttgcctgtgggatctcaaggccgggaatggagccccggttctggacgcgcagcaggtgtttgaggctcatgaggatgttgttgaagatgttgcttggcaccttaaggatgaaaacctatttggatctgttggcgatgactgcaagttcatgatgtgggacctgcgtacgaacaaaccagaacaatctatagttgcgcaccaaaaggaagttaactctctgtccttcaatccatttaatgaatggatcttggctacagcatctggtgatggaactattaagctgtttgaccagcgaaaactatctagaagcttgcatgctttcgacaaccatgagggcgaggttttccaggttgagtggaatccaaacatggagactgtattagcatcccatgctgcagacaaaagggtgatgatatgggacgttaacaggatcggcgaggagcaggcggacgaggacgcgggcgacgggccaccggagctgcttttcgtccacggcgggcacacggccaagatctcggagctgtcgtggaaccccagcgagaagtgggtggtggccagcgtggcggaggacaacgtgctgcagatctgggagatggccgagagcatatacagcgacgacaacagcaacaacgccaacagcgcctcgtgcctgtccacataagaagacgccgccaaccaacttcttccctgatgtgtggacgatggccgatggggacatggctcgttcgtagtctttgggtggacgcgtcgcgtgcggtttacttgtagtgcctcgtgcggtttcgtcgcttaattagcagctgctgctatcgtttggcgcctagatcctgtagacatggatggatggagaagtgactctggaatatttgtgcgtcc

SEQ ID NO: 67783 - protein, 432 aa, Triticum aestivum
  peptide (1)..(432): Ceres Seq. ID no. 12465152
  misc_feature (228)..(266): Pfam Name: WD domain, G-beta repeat Pfam Description: WD domain, G-beta repeat
  misc_feature (77)..(420): Homolog of NCBI NO: 17017388 NR Description: MSI type nucleosome/chromatin assembly factor C
  misc_feature (66)..(420): Homolog of NCBI NO: 15237140 NR Description: WD-40 repeat protein MSI1 (sp|O22467)
  misc_feature (45)..(418): Homolog of NCBI NO: 17508127 NR Description: Synthetic multivulva protein LIN-53,
  misc_feature (45)..(418): Homolog of NCBI NO: 39595121 NR Description: Hypothetical protein CBG03710 [Caenorhabditis
  misc_feature (45)..(419): Homolog of NCBI NO: 15227294 NR Description: putative WD-40 repeat protein, MSI2
  misc_feature (45)..(419): Homolog of NCBI NO: 21593624 NR Description: putative WD-40 repeat protein, MSI2 [Arabidopsis
  misc_feature (45)..(422): Homolog of NCBI NO: 2394233 NR Description: WD-40 repeat protein [Arabidopsis thaliana]
  misc_feature (45)..(422): Homolog of NCBI NO: 27754479 NR Description: putative WD-40 repeat protein (MSI3) [Arabidopsis
  misc_feature (45)..(422): Homolog of NCBI NO: 15236251 NR Description: WD-40 repeat protein (MSI3)
  misc_feature (44)..(425): Homolog of NCBI NO: 20977604 NR Description: nucleosome/chromatin assembly factor 104 [Zea
PIILAGEQQLAASTLHFPAQSKSAMDGGSGSSFQAVAAAAAMEMEEYLNWKKNAPVLYDLVMSHPLEWPSLTVQWLPSGSPASARSHRLVLGTHASDDSANHLMLVDAVLPLPPRLAAAAAAEDRAVPAPSVSIGRSAPHQGEVNRARCMPQRPYTVATKTCVDEVHVYHLGEDGEKGGADVVLRGHGAEGYGLAWSATKEGFLLSGSYDKKICLWDLKAGNGAPVLDAQQVFEAHEDVVEDVAWHLKDENLFGSVGDDCKFMMWDLRTNKPEQSIVAHQKEVNSLSFNPFNEWILATASGDGTIKLFDQRKLSRSLHAFDNHEGEVFQVEWNPNMETVLASHAADKRVMIWDVNRIGEEQADEDAGDGPPELLFVHGGHTAKISELSWNPSEKWVVASVAEDNVLQIWEMAESIYSDDNSNNANSASCLST

SEQ ID NO: 67784 - protein, 408 aa, Triticum aestivum
  peptide (1)..(408): Ceres Seq. ID no. 12465153
  misc_feature (204)..(242): Pfam Name: WD domain, G-beta repeat Pfam Description: WD domain, G-beta repeat
  misc_feature (53)..(396): Homolog of NCBI NO: 17017388 NR Description: MSI type nucleosome/chromatin assembly factor C
  misc_feature (42)..(396): Homolog of NCBI NO: 15237140 NR Description: WD-40 repeat protein MSI1 (sp|O22467)
  misc_feature (21)..(394): Homolog of NCBI NO: 17508127 NR Description: Synthetic multivulva protein LIN-53,
  misc_feature (21)..(394): Homolog of NCBI NO: 39595121 NR Description: Hypothetical protein CBG03710 [Caenorhabditis
  misc_feature (21)..(395): Homolog of NCBI NO: 15227294 NR Description: putative WD-40 repeat protein, MSI2
  misc_feature (21)..(395): Homolog of NCBI NO: 21593624 NR Description: putative WD-40 repeat protein, MSI2 [Arabidopsis
  misc_feature (21)..(398): Homolog of NCBI NO: 2394233 NR Description: WD-40 repeat protein [Arabidopsis thaliana]
  misc_feature (21)..(398): Homolog of NCBI NO: 27754479 NR Description: putative WD-40 repeat protein (MSI3) [Arabidopsis
  misc_feature (21)..(398): Homolog of NCBI NO: 15236251 NR Description: WD-40 repeat protein (MSI3)
  misc_feature (20)..(401): Homolog of NCBI NO: 20977604 NR Description: nucleosome/chromatin assembly factor 104 [Zea
MDGGSGSSFQAVAAAAAMEMEEYLNWKKNAPVLYDLVMSHPLEWPSLTVQWLPSGSPASARSHRLVLGTHASDDSANHLMLVDAVLPLPPRLAAAAAAEDRAVPAPSVSIGRSAPHQGEVNRARCMPQRPYTVATKTCVDEVHVYHLGEDGEKGGADVVLRGHGAEGYGLAWSATKEGFLLSGSYDKKICLWDLKAGNGAPVLDAQQVFEAHEDVVEDVAWHLKDENLFGSVGDDCKFMMWDLRTNKPEQSIVAHQKEVNSLSFNPFNEWILATASGDGTIKLFDQRKLSRSLHAFDNHEGEVFQVEWNPNMETVLASHAADKRVMIWDVNRIGEEQADEDAGDGPPELLFVHGGHTAKISELSWNPSEKWVVASVAEDNVLQIWEMAESIYSDDNSNNANSASCLST

SEQ ID NO: 67785 - protein, 391 aa, Triticum aestivum
  peptide (1)..(391): Ceres Seq. ID no. 12465154
  misc_feature (187)..(225): Pfam Name: WD domain, G-beta repeat Pfam Description: WD domain, G-beta repeat
  misc_feature (36)..(379): Homolog of NCBI NO: 17017388 NR Description: MSI type nucleosome/chromatin assembly factor C
  misc_feature (25)..(379): Homolog of NCBI NO: 15237140 NR Description: WD-40 repeat protein MSI1 (sp|O22467)
  misc_feature (4)..(377): Homolog of NCBI NO: 17508127 NR Description: Synthetic multivulva protein LIN-53,
  misc_feature (4)..(377): Homolog of NCBI NO: 39595121 NR Description: Hypothetical protein CBG03710 [Caenorhabditis
  misc_feature (4)..(378): Homolog of NCBI NO: 15227294 NR Description: putative WD-40 repeat protein, MSI2
  misc_feature (4)..(378): Homolog of NCBI NO: 21593624 NR Description: putative WD-40 repeat protein, MSI2 [Arabidopsis
  misc_feature (4)..(381): Homolog of NCBI NO: 2394233 NR Description: WD-40 repeat protein [Arabidopsis thaliana]
  misc_feature (4)..(381): Homolog of NCBI NO: 27754479 NR Description: putative WD-40 repeat protein (MSI3) [Arabidopsis
  misc_feature (4)..(381): Homolog of NCBI NO: 15236251 NR Description: WD-40 repeat protein (MSI3)
  misc_feature (3)..(384): Homolog of NCBI NO: 20977604 NR Description: nucleosome/chromatin assembly factor 104 [Zea
MEMEEYLNWKKNAPVLYDLVMSHPLEWPSLTVQWLPSGSPASARSHRLVLGTHASDDSANHLMLVDAVLPLPPRLAAAAAAEDRAVPAPSVSIGRSAPHQGEVNRARCMPQRPYTVATKTCVDEVHVYHLGEDGEKGGADVVLRGHGAEGYGLAWSATKEGFLLSGSYDKKICLWDLKAGNGAPVLDAQQVFEAHEDVVEDVAWHLKDENLFGSVGDDCKFMMWDLRTNKPEQSIVAHQKEVNSLSFNPFNEWILATASGDGTIKLFDQRKLSRSLHAFDNHEGEVFQVEWNPNMETVLASHAADKRVMIWDVNRIGEEQADEDAGDGPPELLFVHGGHTAKISELSWNPSEKWVVASVAEDNVLQIWEMAESIYSDDNSNNANSASCLST

SEQ ID NO: 67786 - DNA, 1824 bp, Triticum aestivum
  misc_feature (1)..(1824): Ceres Seq. ID no. 14301912
ctcccaaacccgacactccaacccctaccgagaggtgcacgaggaggccgcccaccaccaccaccaccaccacccaccatggccatggcgacggcgctccgcaagctctccgcccgcggccagcccctctcccgcctcacgccgctctactccatggcgtctctgccggcgacggaggagagatccgcagtcacctggcccaagcagttgaacgcgccgctggaggaggtcgaccccgagattgccgacatcatcgagctcgagaaggcccgccaatggaaggggctggagctcatcccgtcggagaacttcacctccctctcggtgatgcaggcggtgggatccgtcatgaccaacaagtacagcgaggggtaccccggcgcgagatactacggtggaaacgaatacattgatatggccgagacgctgtgccagaaacgtgctttggaggctttcaatttggacccagagaagtggggagtgaatgtgcaacctctatcgggttcacctgccaacttccatgtatacactgctctgctgaagccacatgatagaattatggctctggatcttcctcacggtggacatctttcccatggttaccagactgacacaaagaaaatctcagcagtttcaatattctttgagacaatgccttacagactggatgaaagcactggcttgattgattatggccagttggagaaaagtgccgttctttttaggccaaagttgattgttgctggtgctagtgcatatgcccgcctttatgattataaccgcatgcggaagatctgtgacaagcagaaggcagttcttctcgcagacatggcacatatcagtgggctagttgctgctggtgtcattccgtctccttttgagtatgcagatgtggtgactaccactacccacaagtctctccgtggtccacgtggagccatgatctttttccggaagggggtgaaagaaataaacaaacaagggaaggaggttaagtatgattttgaggacaaaatcaatgctgctgtcttcccaggtctgcaaggtggaccccataaccatactattactggcctggccgttgcgcttaagcaggcaactactcaggagtacagagcttatcaagagcaagttatgagtaactctgctagatttgctgagagcttgacttcaaaaggttacgacattgtctctggtgggactgataaccatttagttttggtgaacctcaagaaaaagggaatagatggttcacgtgtggagaaggttttagaaaatgtgcatattgcagcaaacaagaacacggttcctggtgatgtttcagctatggtacccggaggcatcaggatgggaacccccgcacttacatcaagaggatttgttgaggaggacttcgccaaggttgctgacttcttcgattcggcagtgaacttggccttgaaggttaaagctgcagcagcaggtaccaaactgaaggactttgttgccacattgcaatccgacagcaacatccaagctgaaattgcaaagcttcgccacgatgtggaggaatatgcgaaacaattcccaacaattggattcgagaaggagaccatgaagtacaagaactaagaactgctatgtttcaacagcaaggaagcaaacaagaagcacagtttgaggacaagtcatgtaaacaatagatccacgatgaagcgccaccttatgtaaaagtaatccaatcattttacagaatatgggaactttgtcgatagtttcttattgcaggcacatactgtaagatgcttcgctgatatgctatatgaaccgccatccttcttggac

SEQ ID NO: 67787 - protein, 536 aa, Triticum aestivum
  peptide (1)..(536): Ceres Seq. ID no. 14301913
  misc_feature (74)..(472): Pfam Name: Serine hydroxymethyltransferase Pfam Description: Serine hydroxymethyltransferase
  misc_feature (29)..(535): Homolog of NCBI NO: 30690400 NR Description: glycine hydroxymethyltransferase - like protein
  misc_feature (29)..(535): Homolog of NCBI NO: 14334888 NR Description: putative glycine hydroxymethyltransferase
  misc_feature (29)..(535): Homolog of NCBI NO: 30690394 NR Description: glycine hydroxymethyltransferase - like protein
  misc_feature (27)..(534): Homolog of NCBI NO: 462187 NR Description: SERINE HYDROXYMETHYLTRANSFERASE, MITOCHONDRIAL
  misc_feature (27)..(536): Homolog of NCBI NO: 1346156 NR Description: Serine hydroxymethyltransferase 2, mitochondrial
  misc_feature (27)..(536): Homolog of NCBI NO: 1707998 NR Description: SERINE HYDROXYMETHYLTRANSFERASE, MITOCHONDRIAL
  misc_feature (27)..(536): Homolog of NCBI NO: 1346155 NR Description: Serine hydroxymethyltransferase 1, mitochondrial
  misc_feature (27)..(536): Homolog of NCBI NO: 15809972 NR Description: AT4g37930/F20D10_50 [Arabidopsis thaliana]
  misc_feature (27)..(536): Homolog of NCBI NO: 15235745 NR Description: glycine hydroxymethyltransferase like protein
  misc_feature (18)..(536): Homolog of NCBI NO: 31126793 NR Description: putative glycine hydroxymethyltransferase
LPNPTLQPLPRGARGGRPPPPPPPPTMAMATALRKLSARGQPLSRLTPLYSMASLPATEERSAVTWPKQLNAPLEEVDPEIADIIELEKARQWKGLELIPSENFTSLSVMQAVGSVMTNKYSEGYPGARYYGGNEYIDMAETLCQKRALEAFNLDPEKWGVNVQPLSGSPANFHVYTALLKPHDRIMALDLPHGGHLSHGYQTDTKKISAVSIFFETMPYRLDESTGLIDYGQLEKSAVLFRPKLIVAGASAYARLYDYNRMRKICDKQKAVLLADMAHISGLVAAGVIPSPFEYADVVTTTTHKSLRGPRGAMIFFRKGVKEINKQGKEVKYDFEDKINAAVFPGLQGGPHNHTITGLAVALKQATTQEYRAYQEQVMSNSARFAESLTSKGYDIVSGGTDNHLVLVNLKKKGIDGSRVEKVLENVHIAANKNTVPGDVSAMVPGGIRMGTPALTSRGFVEEDFAKVADFFDSAVNLALKVKAAAAGTKLKDFVATLQSDSNIQAEIAKLRHDVEEYAKQFPTIGFEKETMKYKN

SEQ ID NO: 67788 - protein, 510 aa, Triticum aestivum
  peptide (1)..(510): Ceres Seq. ID no. 14301914
  misc_feature (48)..(446): Pfam Name: Serine hydroxymethyltransferase Pfam Description: Serine hydroxymethyltransferase
  misc_feature (3)..(509): Homolog of NCBI NO: 30690400 NR Description: glycine hydroxymethyltransferase - like protein
  misc_feature (3)..(509): Homolog of NCBI NO: 14334888 NR Description: putative glycine hydroxymethyltransferase
  misc_feature (3)..(509): Homolog of NCBI NO: 30690394 NR Description: glycine hydroxymethyltransferase - like protein
  misc_feature (1)..(508): Homolog of NCBI NO: 462187 NR Description: SERINE HYDROXYMETHYLTRANSFERASE, MITOCHONDRIAL
  misc_feature (1)..(510): Homolog of NCBI NO: 1346156 NR Description: Serine hydroxymethyltransferase 2, mitochondrial
  misc_feature (1)..(510): Homolog of NCBI NO: 1707998 NR Description: SERINE HYDROXYMETHYLTRANSFERASE, MITOCHONDRIAL
  misc_feature (1)..(510): Homolog of NCBI NO: 1346155 NR Description: Serine hydroxymethyltransferase 1, mitochondrial
  misc_feature (1)..(510): Homolog of NCBI NO: 15809972 NR Description: AT4g37930/F20D10_50 [Arabidopsis thaliana]
  misc_feature (1)..(510): Homolog of NCBI NO: 15235745 NR Description: glycine hydroxymethyltransferase like protein
  misc_feature (1)..(510): Homolog of NCBI NO: 31126793 NR Description: putative glycine hydroxymethyltransferase
MAMATALRKLSARGQPLSRLTPLYSMASLPATEERSAVTWPKQLNAPLEEVDPEIADIIELEKARQWKGLELIPSENFTSLSVMQAVGSVMTNKYSEGYPGARYYGGNEYIDMAETLCQKRALEAFNLDPEKWGVNVQPLSGSPANFHVYTALLKPHDRIMALDLPHGGHLSHGYQTDTKKISAVSIFFETMPYRLDESTGLIDYGQLEKSAVLFRPKLIVAGASAYARLYDYNRMRKICDKQKAVLLADMAHISGLVAAGVIPSPFEYADVVTTTTHKSLRGPRGAMIFFRKGVKEINKQGKEVKYDFEDKINAAVFPGLQGGPHNHTITGLAVALKQATTQEYRAYQEQVMSNSARFAESLTSKGYDIVSGGTDNHLVLVNLKKKGIDGSRVEKVLENVHIAANKNTVPGDVSAMVPGGIRMGTPALTSRGFVEEDFAKVADFFDSAVNLALKVKAAAAGTKLKDFVATLQSDSNIQAEIAKLRHDVEEYAKQFPTIGFEKETMKYKN

SEQ ID NO: 67789 - protein, 508 aa, Triticum aestivum
  peptide (1)..(508): Ceres Seq. ID no. 14301915
  misc_feature (46)..(444): Pfam Name: Serine hydroxymethyltransferase Pfam Description: Serine hydroxymethyltransferase
  misc_feature (1)..(507): Homolog of NCBI NO: 30690400 NR Description: glycine hydroxymethyltransferase - like protein
  misc_feature (1)..(507): Homolog of NCBI NO: 14334888 NR Description: putative glycine hydroxymethyltransferase
  misc_feature (1)..(507): Homolog of NCBI NO: 30690394 NR Description: glycine hydroxymethyltransferase - like protein
  misc_feature (1)..(506): Homolog of NCBI NO: 462187 NR Description: SERINE HYDROXYMETHYLTRANSFERASE, MITOCHONDRIAL
  misc_feature (1)..(508): Homolog of NCBI NO: 1346156 NR Description: Serine hydroxymethyltransferase 2, mitochondrial
  misc_feature (1)..(508): Homolog of NCBI NO: 1707998 NR Description: SERINE HYDROXYMETHYLTRANSFERASE, MITOCHONDRIAL
  misc_feature (1)..(508): Homolog of NCBI NO: 1346155 NR Description: Serine hydroxymethyltransferase 1, mitochondrial
  misc_feature (1)..(508): Homolog of NCBI NO: 15809972 NR Description: AT4g37930/F20D10_50 [Arabidopsis thaliana]
  misc_feature (1)..(508): Homolog of NCBI NO: 15235745 NR Description: glycine hydroxymethyltransferase like protein
  misc_feature (1)..(508): Homolog of NCBI NO: 31126793 NR Description: putative glycine hydroxymethyltransferase
MATALRKLSARGQPLSRLTPLYSMASLPATEERSAVTWPKQLNAPLEEVDPEIADIIELEKARQWKGLELIPSENFTSLSVMQAVGSVMTNKYSEGYPGARYYGGNEYIDMAETLCQKRALEAFNLDPEKWGVNVQPLSGSPANFHVYTALLKPHDRIMALDLPHGGHLSHGYQTDTKKISAVSIFFETMPYRLDESTGLIDYGQLEKSAVLFRPKLIVAGASAYARLYDYNRMRKICDKQKAVLLADMAHISGLVAAGVIPSPFEYADVVTTTTHKSLRGPRGAMIFFRKGVKEINKQGKEVKYDFEDKINAAVFPGLQGGPHNHTITGLAVALKQATTQEYRAYQEQVMSNSARFAESLTSKGYDIVSGGTDNHLVLVNLKKKGIDGSRVEKVLENVHIAANKNTVPGDVSAMVPGGIRMGTPALTSRGFVEEDFAKVADFFDSAVNLALKVKAAAAGTKLKDFVATLQSDSNIQAEIAKLRHDVEEYAKQFPTIGFEKETMKYKN

SEQ ID NO: 67790 - DNA, 1792 bp, Triticum aestivum
  misc_feature (1)..(1792): Ceres Seq. ID no. 14308053
aaagaatttcagacagctaaacaaactcggccgcccagcttcctcctcctcctcctccccctccttcccctcgacctgctggtgaccgccgtctgccttctccgacgaatctccccgcgagttcggcctagctccacagggagtctcgaatctcccctttgccgctgagtcgaggaagaagatcggctcgggttcgcttgctcgttcgctcgaggacgagattcagcggcgggactgattgattgattgggcgtgagcgagagcggatgaaggggaagggcggggcgctcgacaggaggtcgtctgcgaggtggaggctgctgctgctctgcgccttcagctttgggctcggcatgctcttcaccaaccgcttctggacagcaccaagtaccaataaccacatcatgtcccaacacaggagacaagaccaggagttgcaacttgtgtcagaggattgcaatacaaagaggaagcatggggagcacaaggatataatgggagaggtaaccaggacccatgaagccatacaattgttggataagtcaatctcaacgctgcagatggagcttgcagcaaagcgaagcacgttggaactggtccgttctggtgtgccagtaacttcagaaactagtcaaccaaggaaaaaagcattcgttgtcgttggagttaacaccgctttcagtagccgcaagcgtcgtgattcagtcagggagacatggatgcctcaaggtgagaagctgctgcagcttgaagaacagaagggaatagttatccgcttcactataggccatagtgctacatccaatagtatattggacaaagcaatagatgcagaagatgaacagcatcacgactttcttagactggaccatgtcgaggggtatcatgaactctccgcaaagacaaaaatcttcttctccacgtccgtgggcatttgggatgctgactttttcgtcaaggtcgatgatgatgtgcatgtgaacttaggaatgcttgccactacccttgcgaggcataaagcgaaaccaagaacttatattggctgcatgaagtcaggcccagttctggctgacaagaatctgaagtaccatgaacctgaggcctggaaatttggggaggatggaaacaagtattttcgccatgctactggacagatatatgctatctcaaaagatcttgcgacctatatctcaataaatcaacctatcttacacaagtatgcgaacgaagatgtatcacttgggtcatggtttatcgggttagaggttaatcatattgatgaaaggaacatgtgctgcggaactccaccagactgtgagtggaaagggcaagctggcaatatctgcgtggcatcctttgattggagctgcagcggcatatgcaagtccgtcgagagactcaaggatgtacatgctcgatgcggcgaaggcgattcttctgtttggagtgatctaatctagctaataccctccctggcgtaaatatgtagcatcctcagtaaaccctgacgatcgtgcctcagtggctacaactgaaatgaccgaaattgcacaacaggtccgcagatggactatatttctggtagttcggtctgaggcaacacatgtagtgtagatgatacttgttcagtcgttgagagatctcagtagatgggaattgctttgtgccatcacctgtgacgtcagtagtgttagaagagagaccaaagcgagcgagttacacagctgctgtgtaccacagattaggggaaaacatctactgcaaattttgatcaattcttttgatgtcggtt

SEQ ID NO: 67791 - protein, 397 aa, Triticum aestivum
  peptide (1)..(397): Ceres Seq. ID no. 14308054
  misc_feature (142)..(340): Pfam Name: Galactosyltransferase Pfam Description: Galactosyltransferase
  misc_feature (21)..(394): Homolog of NCBI NO: 34907342 NR Description: putative elicitor response protein
  misc_feature (13)..(392): Homolog of NCBI NO: 18416895 NR Description: galactosyltransferase family [Arabidopsis
  misc_feature (13)..(393): Homolog of NCBI NO: 15223337 NR Description: galactosyltransferase family [Arabidopsis
  misc_feature (8)..(393): Homolog of NCBI NO: 18395060 NR Description: galactosyltransferase family [Arabidopsis
  misc_feature (2)..(393): Homolog of NCBI NO: 15225684 NR Description: galactosyltransferase family [Arabidopsis
  misc_feature (6)..(394): Homolog of NCBI NO: 15220440 NR Description: galactosyltransferase family [Arabidopsis
  misc_feature (13)..(397): Homolog of NCBI NO: 34365705 NR Description: At1g77810 [Arabidopsis thaliana]
  misc_feature (13)..(397): Homolog of NCBI NO: 12323294 NR Description: putative (Avr9) elicitor response protein;
  misc_feature (13)..(397): Homolog of NCBI NO: 30699558 NR Description: Avr9 elicitor response protein -related
  misc_feature (13)..(396): Homolog of NCBI NO: 4138265 NR Description: Avr9 elicitor response protein [Nicotiana tabacum]
MKGKGGALDRRSSARWRLLLLCAFSFGLGMLFTNRFWTAPSTNNHIMSQHRRQDQELQLVSEDCNTKRKHGEHKDIMGEVTRTHEAIQLLDKSISTLQMELAAKRSTLELVRSGVPVTSETSQPRKKAFVVVGVNTAFSSRKRRDSVRETWMPQGEKLLQLEEQKGIVIRFTIGHSATSNSILDKAIDAEDEQHHDFLRLDHVEGYHELSAKTKIFFSTSVGIWDADFFVKVDDDVHVNLGMLATTLARHKAKPRTYIGCMKSGPVLADKNLKYHEPEAWKFGEDGNKYFRHATGQIYAISKDLATYISINQPILHKYANEDVSLGSWFIGLEVNHIDERNMCCGTPPDCEWKGQAGNICVASFDWSCSGICKSVERLKDVHARCGEGDSSVWSDLI

SEQ ID NO: 67792 - protein, 368 aa, Triticum aestivum
  peptide (1)..(368): Ceres Seq. ID no. 14308055
  misc_feature (113)..(311): Pfam Name: Galactosyltransferase Pfam Description: Galactosyltransferase
  misc_feature (1)..(365): Homolog of NCBI NO: 34907342 NR Description: putative elicitor response protein
  misc_feature (1)..(363): Homolog of NCBI NO: 18416895 NR Description: galactosyltransferase family [Arabidopsis
  misc_feature (1)..(364): Homolog of NCBI NO: 15223337 NR Description: galactosyltransferase family [Arabidopsis
  misc_feature (1)..(364): Homolog of NCBI NO: 18395060 NR Description: galactosyltransferase family [Arabidopsis
  misc_feature (1)..(364): Homolog of NCBI NO: 15225684 NR Description: galactosyltransferase family [Arabidopsis
  misc_feature (1)..(365): Homolog of NCBI NO: 15220440 NR Description: galactosyltransferase family [Arabidopsis
  misc_feature (1)..(368): Homolog of NCBI NO: 34365705 NR Description: At1g77810 [Arabidopsis thaliana]
  misc_feature (1)..(368): Homolog of NCBI NO: 12323294 NR Description: putative (Avr9) elicitor response protein;
  misc_feature (1)..(368): Homolog of NCBI NO: 30699558 NR Description: Avr9 elicitor response protein -related
  misc_feature (1)..(367): Homolog of NCBI NO: 4138265 NR Description: Avr9 elicitor response protein [Nicotiana tabacum]
MLFTNRFWTAPSTNNHIMSQHRRQDQELQLVSEDCNTKRKHGEHKDIMGEVTRTHEAIQLLDKSISTLQMELAAKRSTLELVRSGVPVTSETSQPRKKAFVVVGVNTAFSSRKRRDSVRETWMPQGEKLLQLEEQKGIVIRFTIGHSATSNSILDKAIDAEDEQHHDFLRLDHVEGYHELSAKTKIFFSTSVGIWDADFFVKVDDDVHVNLGMLATTLARHKAKPRTYIGCMKSGPVLADKNLKYHEPEAWKFGEDGNKYFRHATGQIYAISKDLATYISINQPILHKYANEDVSLGSWFIGLEVNHIDERNMCCGTPPDCEWKGQAGNICVASFDWSCSGICKSVERLKDVHARCGEGDSSVWSDLI

SEQ ID NO: 67793 - protein, 351 aa, Triticum aestivum
  peptide (1)..(351): Ceres Seq. ID no. 14308056
  misc_feature (96)..(294): Pfam Name: Galactosyltransferase Pfam Description: Galactosyltransferase
  misc_feature (1)..(348): Homolog of NCBI NO: 34907342 NR Description: putative elicitor response protein
  misc_feature (1)..(346): Homolog of NCBI NO: 18416895 NR Description: galactosyltransferase family [Arabidopsis
  misc_feature (1)..(347): Homolog of NCBI NO: 15223337 NR Description: galactosyltransferase family [Arabidopsis
  misc_feature (1)..(347): Homolog of NCBI NO: 18395060 NR Description: galactosyltransferase family [Arabidopsis
  misc_feature (1)..(347): Homolog of NCBI NO: 15225684 NR Description: galactosyltransferase family [Arabidopsis
  misc_feature (1)..(348): Homolog of NCBI NO: 15220440 NR Description: galactosyltransferase family [Arabidopsis
  misc_feature (1)..(351): Homolog of NCBI NO: 34365705 NR Description: At1g77810 [Arabidopsis thaliana]
  misc_feature (1)..(351): Homolog of NCBI NO: 12323294 NR Description: putative (Avr9) elicitor response protein;
  misc_feature (1)..(351): Homolog of NCBI NO: 30699558 NR Description: Avr9 elicitor response protein -related
  misc_feature (1)..(350): Homolog of NCBI NO: 4138265 NR Description: Avr9 elicitor response protein [Nicotiana tabacum]
MSQHRRQDQELQLVSEDCNTKRKHGEHKDIMGEVTRTHEAIQLLDKSISTLQMELAAKRSTLELVRSGVPVTSETSQPRKKAFVVVGVNTAFSSRKRRDSVRETWMPQGEKLLQLEEQKGIVIRFTIGHSATSNSILDKAIDAEDEQHHDFLRLDHVEGYHELSAKTKIFFSTSVGIWDADFFVKVDDDVHVNLGMLATTLARHKAKPRTYIGCMKSGPVLADKNLKYHEPEAWKFGEDGNKYFRHATGQIYAISKDLATYISINQPILHKYANEDVSLGSWFIGLEVNHIDERNMCCGTPPDCEWKGQAGNICVASFDWSCSGICKSVERLKDVHARCGEGDSSVWSDLI

SEQ ID NO: 67794 - DNA, 1533 bp, Triticum aestivum
  misc_feature (1)..(1533): Ceres Seq. ID no. 14302824
ctctttcggtcttggaatccttcctccctcccttccctccgtgtcgcccgcgctccgcctaccggatcgcaattccgcatcgccccgccgcagccccagccccagccccggccaggcccccatggcgaggcgatccgccccgctcctccgccgcctggtctcctccgcgccgcccctcccgggccacggcggcggcgcgcgccgcacggtcacctacatgccccgcccgggcgatggcaccccgcgccccgtcacgctcatcccgggcgacggcatcggacccctcgtcaccggcgccgtggagcaggtcatggaggccatgcacgcgcccgtctacttcgagtcctacgacgtccacggcgacatgcccgccgtgccgcccgccgtcatcgaatccatccgccgcaacaaggtctgcctcaagggcggcctcgccacccccgtcggcgggggcgtctcctccctcaacatgcagctccgcaaggagctcgacctcttcgcctccctcgtcaactgcgccaacgtccccggcctgcccaccaggcaccagaacgtcgacatcgtcgtcatcagggagaacaccgagggcgagtactcgggcctcgagcacgaggtcgtcccgggggtcgtcgagagcctcaaggtgatcacgaagttttgctccgagaggattgccaaatatgccttcgagtatgcttaccttaactaccggaagaaagtcacagcagtgcataaagcaaacatcatgaaacttgctgatggtttgttcttggagtcttgccgtgagattgctgctaaatatccaagtattgagtataatgaaatcattgttgacaactgctgcatgcaacttgtttcaaggcctgagcaatttgatgttatggttacgcctaacctttacggcaatttggttgccaacacagctgcaggtcttgttggaggaacaggtgtcatgccaggaggtaatgtaggtcaggatcatgccatcttcgagcaaggtgcttctgcaggaaatgtgggaaatgacaatcttgtagagcagcagaaagcaaaccctgtcgccctgctcctgtcgtctgctatgatgttgaggcatttgcagttcccgtcgttcgctgaccgtctggaaactgcggtgaagcgggtcattgcagatggcaagtacaggacaaaggatctgggcggcaccagcaccacccaggaagttactgatgcagtgatcgctaatctggattaggtacctgatgcacgcctgaagaatcgattcttttggaggactggtttaaaggtcccaactcctgagtgctattttttccgtacagcattagatcggcaattatgtttgagaaataattgaggaacccacgaggattattcttcccactatactttgtagcaaggcaaaacaccttgtgttgcagaggggatagctggctaccttaaatttaaacggcatgtattgaaagtttattctcagttcttattcgtggttatcactcccatggaaccggaaatctggtcctctttttcagt

SEQ ID NO: 67795 - protein, 411 aa, Triticum aestivum
  peptide (1)..(411): Ceres Seq. ID no. 14302825
  misc_feature (84)..(406): Pfam Name: Isocitrate/isopropylmalate dehydrogenase Pfam Description: Isocitrate/isopropylmalate dehydrogenase
  misc_feature (84)..(411): Homolog of NCBI NO: 32408949 NR Description: hypothetical protein [Neurospora crassa]
  misc_feature (68)..(411): Homolog of NCBI NO: 28974504 NR Description: NAD-dependent isocitrate dehydrogenase gamma
  misc_feature (41)..(411): Homolog of NCBI NO: 15227370 NR Description: isocitrate dehydrogenase [NAD+] subunit 2
  misc_feature (41)..(411): Homolog of NCBI NO: 28974498 NR Description: NAD-dependent isocitrate dehydrogenase beta
  misc_feature (41)..(411): Homolog of NCBI NO: 28974502 NR Description: NAD-dependent isocitrate dehydrogenase beta
  misc_feature (41)..(411): Homolog of NCBI NO: 15237075 NR Description: isocitrate dehydrogenase [NAD+], putative
  misc_feature (41)..(411): Homolog of NCBI NO: 1766046 NR Description: NAD+ dependent isocitrate dehydrogenase subunit 1
  misc_feature (41)..(411): Homolog of NCBI NO: 21537157 NR Description: NAD+ dependent isocitrate dehydrogenase subunit 1
  misc_feature (41)..(411): Homolog of NCBI NO: 15236932 NR Description: isocitrate dehydrogenase [NAD+] subunit 1
  misc_feature (41)..(411): Homolog of NCBI NO: 3790188 NR Description: NAD-dependent isocitrate dehydrogenase [Nicotiana
SFGLGILPPSLPSVSPALRLPDRNSASPRRSPSPSPGQAPMARRSAPLLRRLVSSAPPLPGHGGGARRTVTYMPRPGDGTPRPVTLIPGDGIGPLVTGAVEQVMEAMHAPVYFESYDVHGDMPAVPPAVIESIRRNKVCLKGGLATPVGGGVSSLNMQLRKELDLFASLVNCANVPGLPTRHQNVDIVVIRENTEGEYSGLEHEVVPGVVESLKVITKFCSERIAKYAFEYAYLNYRKKVTAVHKANIMKLADGLFLESCREIAAKYPSIEYNEIIVDNCCMQLVSRPEQFDVMVTPNLYGNLVANTAAGLVGGTGVMPGGNVGQDHAIFEQGASAGNVGNDNLVEQQKANPVALLLSSAMMLRHLQFPSFADRLETAVKRVIADGKYRTKDLGGTSTTQEVTDAVIANLD

SEQ ID NO: 67796 - protein, 371 aa, Triticum aestivum
  peptide (1)..(371): Ceres Seq. ID no. 14302826
  misc_feature (44)..(366): Pfam Name: Isocitrate/isopropylmalate dehydrogenase Pfam Description: Isocitrate/isopropylmalate dehydrogenase
  misc_feature (44)..(371): Homolog of NCBI NO: 32408949 NR Description: hypothetical protein [Neurospora crassa]
  misc_feature (28)..(371): Homolog of NCBI NO: 28974504 NR Description: NAD-dependent isocitrate dehydrogenase gamma
  misc_feature (1)..(371): Homolog of NCBI NO: 15227370 NR Description: isocitrate dehydrogenase [NAD+] subunit 2
  misc_feature (1)..(371): Homolog of NCBI NO: 28974498 NR Description: NAD-dependent isocitrate dehydrogenase beta
  misc_feature (1)..(371): Homolog of NCBI NO: 28974502 NR Description: NAD-dependent isocitrate dehydrogenase beta
  misc_feature (1)..(371): Homolog of NCBI NO: 15237075 NR Description: isocitrate dehydrogenase [NAD+], putative
  misc_feature (1)..(371): Homolog of NCBI NO: 1766046 NR Description: NAD+ dependent isocitrate dehydrogenase subunit 1
  misc_feature (1)..(371): Homolog of NCBI NO: 21537157 NR Description: NAD+ dependent isocitrate dehydrogenase subunit 1
  misc_feature (1)..(371): Homolog of NCBI NO: 15236932 NR Description: isocitrate dehydrogenase [NAD+] subunit 1
  misc_feature (1)..(371): Homolog of NCBI NO: 3790188 NR Description: NAD-dependent isocitrate dehydrogenase [Nicotiana
MARRSAPLLRRLVSSAPPLPGHGGGARRTVTYMPRPGDGTPRPVTLIPGDGIGPLVTGAVEQVMEAMHAPVYFESYDVHGDMPAVPPAVIESIRRNKVCLKGGLATPVGGGVSSLNMQLRKELDLFASLVNCANVPGLPTRHQNVDIVVIRENTEGEYSGLEHEVVPGVVESLKVITKFCSERIAKYAFEYAYLNYRKKVTAVHKANIMKLADGLFLESCREIAAKYPSIEYNEIIVDNCCMQLVSRPEQFDVMVTPNLYGNLVANTAAGLVGGTGVMPGGNVGQDHAIFEQGASAGNVGNDNLVEQQKANPVALLLSSAMMLRHLQFPSFADRLETAVKRVIADGKYRTKDLGGTSTTQEVTDAVIANLD

SEQ ID NO: 67797 - protein, 339 aa, Triticum aestivum
  peptide (1)..(339): Ceres Seq. ID no. 14302827
  misc_feature (12)..(334): Pfam Name: Isocitrate/isopropylmalate dehydrogenase Pfam Description: Isocitrate/isopropylmalate dehydrogenase
  misc_feature (12)..(339): Homolog of NCBI NO: 32408949 NR Description: hypothetical protein [Neurospora crassa]
  misc_feature (1)..(339): Homolog of NCBI NO: 28974504 NR Description: NAD-dependent isocitrate dehydrogenase gamma
  misc_feature (1)..(339): Homolog of NCBI NO: 15227370 NR Description: isocitrate dehydrogenase [NAD+] subunit 2
  misc_feature (1)..(339): Homolog of NCBI NO: 28974498 NR Description: NAD-dependent isocitrate dehydrogenase beta
  misc_feature (1)..(339): Homolog of NCBI NO: 28974502 NR Description: NAD-dependent isocitrate dehydrogenase beta
  misc_feature (1)..(339): Homolog of NCBI NO: 15237075 NR Description: isocitrate dehydrogenase [NAD+], putative
  misc_feature (1)..(339): Homolog of NCBI NO: 1766046 NR Description: NAD+ dependent isocitrate dehydrogenase subunit 1
  misc_feature (1)..(339): Homolog of NCBI NO: 21537157 NR Description: NAD+ dependent isocitrate dehydrogenase subunit 1
  misc_feature (1)..(339): Homolog of NCBI NO: 15236932 NR Description: isocitrate dehydrogenase [NAD+] subunit 1
  misc_feature (1)..(339): Homolog of NCBI NO: 3790188 NR Description: NAD-dependent isocitrate dehydrogenase [Nicotiana
MPRPGDGTPRPVTLIPGDGIGPLVTGAVEQVMEAMHAPVYFESYDVHGDMPAVPPAVIESIRRNKVCLKGGLATPVGGGVSSLNMQLRKELDLFASLVNCANVPGLPTRHQNVDIVVIRENTEGEYSGLEHEVVPGVVESLKVITKFCSERIAKYAFEYAYLNYRKKVTAVHKANIMKLADGLFLESCREIAAKYPSIEYNEIIVDNCCMQLVSRPEQFDVMVTPNLYGNLVANTAAGLVGGTGVMPGGNVGQDHAIFEQGASAGNVGNDNLVEQQKANPVALLLSSAMMLRHLQFPSFADRLETAVKRVIADGKYRTKDLGGTSTTQEVTDAVIANLD

SEQ ID NO: 67798 - DNA, 865 bp, Triticum aestivum
  misc_feature (1)..(865): Ceres Seq. ID no. 12584376
atccatccattcattctcctaccgaactctcagcctctcacacaactacaacgccgcaaaagagcatcaatcaaaatccagcagatcatcaagaggagcagcaaatccatctccatgggagcagggatgaagcgcgcgagggaggaggagccaaccgtctcgctggcgctgtccctcagcacagactcctcggcgtcgaccacgacgtcggacgactcgggcaccggtgcggctacgccggcggcgcccgggaagaggacaaggcggaggagagtagtggcgacgtcaggggaaggggacttcgtctgcaagacttgcggccgggccttcgagacgttccaggcgctgggcggccaccggaccagccacctccgcggccgccacgggctggagctcggcgtcggcgttgccagggccatcaaggagcggcaaaggcgcgaggacaggcagcagcacgactgccacatctgcgggctgggcttcgagacgggccaggcgctcggcggccacatgcgtcggcaccgcgaggagatggcgctcgaccggtgggtcgcgctgtcggatcaggaggcggggcaccaggccgccgccgaccggctgcctgtcttgctcgagctgttcgtctagttggctaggtggatatctctgtttcttactacagtataatccaggacttgtacatgtcttttgaatcaggtaggttacgatagaatatgttattgctggttagcatttccgctcgtgggattttgctcggaatcggttcgttttcttaaccgatcgactggggatttagatacactttgtgcttacattagacaaaaaattgttttgttctatatgcaattgacagattcttgcactt

SEQ ID NO: 67799 - protein, 210 aa, Triticum aestivum
  peptide (1)..(210): Ceres Seq. ID no. 12584377
PSIHSPTELSASHTTTTPQKSINQNPADHQEEQQIHLHGSRDEAREGGGANRLAGAVPQHRLLGVDHDVGRLGHRCGYAGGAREEDKAEESSGDVRGRGLRLQDLRPGLRDVPGAGRPPDQPPPRPPRAGARRRRCQGHQGAAKARGQAAARLPHLRAGLRDGPGARRPHASAPRGDGARPVGRAVGSGGGAPGRRRPAACLARAVRLVG

SEQ ID NO: 67800 - protein, 208 aa, Triticum aestivum
  peptide (1)..(208): Ceres Seq. ID no. 12584378
  misc_feature (152)..(174): Pfam Name: Zinc finger, C2H2 type Pfam Description: Zinc finger, C2H2 type
  misc_feature (101)..(191): Homolog of NCBI NO: 1786134 NR Description: PEThy;ZPT2-5 [Petunia x hybrida]
  misc_feature (100)..(175): Homolog of NCBI NO: 2346974 NR Description: ZPT2-12 [Petunia x hybrida]
  misc_feature (100)..(177): Homolog of NCBI NO: 2346976 NR Description: ZPT2-13 [Petunia x hybrida]
  misc_feature (92)..(177): Homolog of NCBI NO: 30420734 NR Description: zinc finger transcription factor ZFP19
  misc_feature (99)..(175): Homolog of NCBI NO: 32172482 NR Description: C2H2 type zinc finger transcription factor ZFP17
  misc_feature (92)..(177): Homolog of NCBI NO: 34908110 NR Description: P0031D11.12 [Oryza sativa (japonica
  misc_feature (94)..(201): Homolog of NCBI NO: 34908122 NR Description: P0031D11.19 [Oryza sativa (japonica
  misc_feature (94)..(201): Homolog of NCBI NO: 18652814 NR Description: C2H2 zinc finger protein [Oryza sativa]
  misc_feature (76)..(208): Homolog of NCBI NO: 29124117 NR Description: putative Cys2/His2 zinc-finger protein
  misc_feature (43)..(207): Homolog of NCBI NO: 29124140 NR Description: putative Cys2/His2 zinc-finger protein
IHPFILLPNSQPLTQLQRRKRASIKIQQIIKRSSKSISMGAGMKRAREEEPTVSLALSLSTDSSASTTTSDDSGTGAATPAAPGKRTRRRRVVATSGEGDFVCKTCGRAFETFQALGGHRTSHLRGRHGLELGVGVARAIKERQRREDRQQHDCHICGLGFETGQALGGHMRRHREEMALDRWVALSDQEAGHQAAADRLPVLLELFV

SEQ ID NO: 67801 - protein, 170 aa, Triticum aestivum
  peptide (1)..(170): Ceres Seq. ID no. 12584379
  misc_feature (114)..(136): Pfam Name: Zinc finger, C2H2 type Pfam Description: Zinc finger, C2H2 type
  misc_feature (63)..(153): Homolog of NCBI NO: 1786134 NR Description: PEThy;ZPT2-5 [Petunia x hybrida]
  misc_feature (62)..(137): Homolog of NCBI NO: 2346974 NR Description: ZPT2-12 [Petunia x hybrida]
  misc_feature (62)..(139): Homolog of NCBI NO: 2346976 NR Description: ZPT2-13 [Petunia x hybrida]
  misc_feature (54)..(139): Homolog of NCBI NO: 30420734 NR Description: zinc finger transcription factor ZFP19
  misc_feature (61)..(137): Homolog of NCBI NO: 32172482 NR Description: C2H2 type zinc finger transcription factor ZFP17
  misc_feature (54)..(139): Homolog of NCBI NO: 34908110 NR Description: P0031D11.12 [Oryza sativa (japonica
  misc_feature (56)..(163): Homolog of NCBI NO: 34908122 NR Description: P0031D11.19 [Oryza sativa (japonica
  misc_feature (56)..(163): Homolog of NCBI NO: 18652814 NR Description: C2H2 zinc finger protein [Oryza sativa]
  misc_feature (38)..(170): Homolog of NCBI NO: 29124117 NR Description: putative Cys2/His2 zinc-finger protein
  misc_feature (5)..(169): Homolog of NCBI NO: 29124140 NR Description: putative Cys2/His2 zinc-finger protein
MGAGMKRAREEEPTVSLALSLSTDSSASTTTSDDSGTGAATPAAPGKRTRRRRVVATSGEGDFVCKTCGRAFETFQALGGHRTSHLRGRHGLELGVGVARAIKERQRREDRQQHDCHICGLGFETGQALGGHMRRHREEMALDRWVALSDQEAGHQAAADRLPVLLELFV

SEQ ID NO: 67802 - DNA, 1005 bp, Triticum aestivum
  misc_feature (1)..(1005): Ceres Seq. ID no. 12624943
ctccctccccgcagccaaatcgagatctctctcccccgtccctctcccacccccaccccacccccgccggccggccgtccgcggcgacgagcccaccagaggaaacatggcgtcggcgctctcctccctccgctacggcgacagcctgtcggtggtggccatctcgggcgccacggcggtgctctgcgaggccatctcctggctcctcatctaccgcaccgccacctacaactccctccgcgcctccatcgagcgccactcccgcaagctcgactccatgaagtccatctcctcgggcgccggcggcgccgcgccctcctcccagccggcctcctcgcgggccaagaagatggaccgcgtcgagtccagcctcaaggacgcctcgcgggagctctccctcgccaagctcaagtccggtgccgtcgtcgccgccgtgctcttcgtcgtcttcggcctcctcaactcgctcttcgagggccgcgccgtcgccaagctgcccttcgcgcccgtcccgctcgtgcagcgcatgagccaccgcggcctgcccgggaacgaccccaccgactgcgccatggtcttcctctacttcctctgctccatgagcatacggacaaacctccagaagctgctcggcttcacgccgccccgcgcggccgcgggggccggcggtggcctcttcgccatgcccgatcccaaagccaattgagcttgatgatcccctcttctatacatacatgtgatgcacctggtctgaagcaaagcatctgagttggtctcccggaaagagttgctgccctgaaaggaagataaataacctacctagtcgctcagaggagaaacactgcaagacactgtaacgacacaattcattttttccacccatgataagcaggcgtgaaccgtgcgtaggctggctgtatcgatcatgaacattctcgagttcacccgaagcaatctgttgccgggtttgtcgtagggttgtactttatcatcagtcgttctagt

SEQ ID NO: 67803 - protein, 255 aa, Triticum aestivum
  peptide (1)..(255): Ceres Seq. ID no. 12624944
LPPRSQIEISLPRPSPTPTPPPPAGRPRRRAHQRKHGVGALLPPLRRQPVGGGHLGRHGGALRGHLLAPHLPHRHLQLPPRLHRAPLPQARLHEVHLLGRRRRRALLPAGLLAGQEDGPRRVQPQGRLAGALPRQAQVRCRRRRRALRRLRPPQLALRGPRRRQAALRARPARAAHEPPRPARERPHRLRHGLPLLPLLHEHTDKPPEAARLHAAPRGRGGRRWPLRHARSQSQLSLMIPSSIHTCDAPGLKQSI

SEQ ID NO: 67804 - protein, 234 aa, Triticum aestivum
  peptide (1)..(234): Ceres Seq. ID no. 12624945
  misc_feature (46)..(234): Homolog of NCBI NO: 17533405 NR Description: Putative protein, with a coiled coil domain, of
  misc_feature (45)..(231): Homolog of NCBI NO: 3170241 NR Description: TU37B2 [Anopheles gambiae]
  misc_feature (45)..(231): Homolog of NCBI NO: 24585112 NR Description: CG10470-PA [Drosophila melanogaster]
  misc_feature (51)..(231): Homolog of NCBI NO: 33328806 NR Description: meg-2-like protein [Rattus norvegicus]
  misc_feature (42)..(231): Homolog of NCBI NO: 23956188 NR Description: RIKEN cDNA 1190006A08 [Mus musculus]
  misc_feature (42)..(231): Homolog of NCBI NO: 3283893 NR Description: unknown [Homo sapiens]
  misc_feature (41)..(234): Homolog of NCBI NO: 21553820 NR Description: unknown [Arabidopsis thaliana]
  misc_feature (41)..(234): Homolog of NCBI NO: 18399454 NR Description: expressed protein
  misc_feature (36)..(234): Homolog of NCBI NO: 21554161 NR Description: unknown [Arabidopsis thaliana]
  misc_feature (36)..(234): Homolog of NCBI NO: 15240119 NR Description: putative protein
SLPAAKSRSLSPVPLPPPPHPRRPAVRGDEPTRGNMASALSSLRYGDSLSVVAISGATAVLCEAISWLLIYRTATYNSLRASIERHSRKLDSMKSISSGAGGAAPSSQPASSRAKKMDRVESSLKDASRELSLAKLKSGAVVAAVLFVVFGLLNSLFEGRAVAKLPFAPVPLVQRMSHRGLPGNDPTDCAMVFLYFLCSMSIRTNLQKLLGFTPPRAAAGAGGGLFAMPDPKAN

SEQ ID NO: 67805 - protein, 199 aa, Triticum aestivum
  peptide (1)..(199): Ceres Seq. ID no. 12624946
  misc_feature (11)..(199): Homolog of NCBI NO: 17533405 NR Description: Putative protein, with a coiled coil domain, of
  misc_feature (10)..(196): Homolog of NCBI NO: 3170241 NR Description: TU37B2 [Anopheles gambiae]
  misc_feature (10)..(196): Homolog of NCBI NO: 24585112 NR Description: CG10470-PA [Drosophila melanogaster]
  misc_feature (16)..(196): Homolog of NCBI NO: 33328806 NR Description: meg-2-like protein [Rattus norvegicus]
  misc_feature (7)..(196): Homolog of NCBI NO: 23956188 NR Description: RIKEN cDNA 1190006A08 [Mus musculus]
  misc_feature (7)..(196): Homolog of NCBI NO: 3283893 NR Description: unknown [Homo sapiens]
  misc_feature (6)..(199): Homolog of NCBI NO: 21553820 NR Description: unknown [Arabidopsis thaliana]
  misc_feature (6)..(199): Homolog of NCBI NO: 18399454 NR Description: expressed protein
  misc_feature (1)..(199): Homolog of NCBI NO: 21554161 NR Description: unknown [Arabidopsis thaliana]
  misc_feature (1)..(199): Homolog of NCBI NO: 15240119 NR Description: putative protein
MASALSSLRYGDSLSVVAISGATAVLCEAISWLLIYRTATYNSLRASIERHSRKLDSMKSISSGAGGAAPSSQPASSRAKKMDRVESSLKDASRELSLAKLKSGAVVAAVLFVVFGLLNSLFEGRAVAKLPFAPVPLVQRMSHRGLPGNDPTDCAMVFLYFLCSMSIRTNLQKLLGFTPPRAAAGAGGGLFAMPDPKAN

SEQ ID NO: 67806 - DNA, 1172 bp, Triticum aestivum
  misc_feature (1)..(1172): Ceres Seq. ID no. 13582807
aaacacctagaacatcctattccaaaacttccacccttcaccgccgccagcgccacagcctccaagccctcgatctcccccatcggagctccctgcccacaaccccccacccccacccaaccatggcggaccgcggcggcgagcgtggtggcgaccgcggaggcgagcgcggcgggttcggccgcggcttcgggcgcggcgggcgcggggaccgtggcgggcgccgcggcggtcgtcgtggcccccgccaggaggaggagaagtgggtgcccgtcaccaagctcggccgcctcgtcaaggagggccgcttcaccaagatggaggagctctacctccactcgctccccatcaaggagcaccagatcgtggagcagctctgcccggggctcaaggacgaggtgatgaagatcacccccgtgcagaagcagacccgcgccggccagcggacccgcttcaaggcgttcgtcgtcgtcggcgacagcaacggccacgtcgggctcggcgtcaagtgcgccaaggaggtggccacggccatccgcggcgccatcatcctcgccaagctctccatcgtgcccgtcaggaggggctactgggggaacaagatcggcctgccccacaccgtgccctgcaaggtcaccggcaagtgcggctctgtcaccgtgcgcatggtgcccgccccgaggggttccgggatcgtcgccgcgcgcgtccccaagaaggtgctccagttcgctggtattgatgatgtcttcacttcctcgcgtggatccaccaagacccttggcaacttcgtcaaggcaaccttcgactgcctgatgaagacctatggattcctcacccctgacttctggagggagacgaccttcaccaaggcgccataccaggagttcaccgacattttggtgaagccgaccaaggccctgatgcttgatgcaccagccgagaagatcgaagcttaggatgtcggtgtaaagggtttttacaagctgagagctgtctaatgcactttgctttatttagttattaatactttgaatcgtgctgtttcaggatgtctctttttgccgtcaagtgttggtttgtggaactatgctactctcttttatcgtcaatggaagctacataattatggcaatcgatcttttttatctatagatgcttggcttctacct

SEQ ID NO: 67807 - protein, 318 aa, Triticum aestivum
  peptide (1)..(318): Ceres Seq. ID no. 15222751
  misc_feature (211)..(284): Pfam Name: Ribosomal protein S5, C-terminal domain Pfam Description: Ribosomal protein S5, C-terminal domain
  misc_feature (43)..(307): Homolog of NCBI NO: 25294520 NR Description: hypothetical protein RF12
  misc_feature (41)..(307): Homolog of NCBI NO: 21539457 NR Description: ribosomal protein S2, putative [Arabidopsis
  misc_feature (47)..(315): Homolog of NCBI NO: 15230312 NR Description: 40S ribosomal protein S2 (RPS2D) [Arabidopsis
  misc_feature (41)..(307): Homolog of NCBI NO: 21618011 NR Description: ribosomal protein S2, putative [Arabidopsis
  misc_feature (41)..(307): Homolog of NCBI NO: 15217951 NR Description: 40S ribosomal protein S2 (RPS2A) [Arabidopsis
  misc_feature (41)..(307): Homolog of NCBI NO: 18406325 NR Description: 40S ribosomal protein, putative [Arabidopsis
  misc_feature (41)..(317): Homolog of NCBI NO: 21553851 NR Description: 40S ribosomal protein S2 [Arabidopsis thaliana]
  misc_feature (41)..(317): Homolog of NCBI NO: 15227443 NR Description: 40S ribosomal protein S2 (RPS2C) [Arabidopsis
  misc_feature (41)..(318): Homolog of NCBI NO: 34393314 NR Description: putative 40S ribosomal protein S2
  misc_feature (47)..(318): Homolog of NCBI NO: 30103021 NR Description: putative 40S ribosomal protein S2
TPRTSYSKTSTLHRRQRHSLQALDLPHRSSLPTTPHPHPTMADRGGERGGDRGGERGGFGRGFGRGGRGDRGGRRGGRRGPRQEEEKWVPVTKLGRLVKEGRFTKMEELYLHSLPIKEHQIVEQLCPGLKDEVMKITPVQKQTRAGQRTRFKAFVVVGDSNGHVGLGVKCAKEVATAIRGAIILAKLSIVPVRRGYWGNKIGLPHTVPCKVTGKCGSVTVRMVPAPRGSGIVAARVPKKVLQFAGIDDVFTSSRGSTKTLGNFVKATFDCLMKTYGFLTPDFWRETTFTKAPYQEFTDILVKPTKALMLDAPAEKIEA

SEQ ID NO: 67808 - protein, 278 aa, Triticum aestivum
  peptide (1)..(278): Ceres Seq. ID no. 15222752
  misc_feature (171)..(244): Pfam Name: Ribosomal protein S5, C-terminal domain Pfam Description: Ribosomal protein S5, C-terminal domain
  misc_feature (3)..(267): Homolog of NCBI NO: 25294520 NR Description: hypothetical protein RF12
  misc_feature (1)..(267): Homolog of NCBI NO: 21539457 NR Description: ribosomal protein S2, putative [Arabidopsis
  misc_feature (7)..(275): Homolog of NCBI NO: 15230312 NR Description: 40S ribosomal protein S2 (RPS2D) [Arabidopsis
  misc_feature (1)..(267): Homolog of NCBI NO: 21618011 NR Description: ribosomal protein S2, putative [Arabidopsis
  misc_feature (1)..(267): Homolog of NCBI NO: 15217951 NR Description: 40S ribosomal protein S2 (RPS2A) [Arabidopsis
  misc_feature (1)..(267): Homolog of NCBI NO: 18406325 NR Description: 40S ribosomal protein, putative [Arabidopsis
  misc_feature (1)..(277): Homolog of NCBI NO: 21553851 NR Description: 40S ribosomal protein S2 [Arabidopsis thaliana]
  misc_feature (1)..(277): Homolog of NCBI NO: 15227443 NR Description: 40S ribosomal protein S2 (RPS2C) [Arabidopsis
  misc_feature (1)..(278): Homolog of NCBI NO: 34393314 NR Description: putative 40S ribosomal protein S2
  misc_feature (7)..(278): Homolog of NCBI NO: 30103021 NR Description: putative 40S ribosomal protein S2
MADRGGERGGDRGGERGGFGRGFGRGGRGDRGGRRGGRRGPRQEEEKWVPVTKLGRLVKEGRFTKMEELYLHSLPIKEHQIVEQLCPGLKDEVMKITPVQKQTRAGQRTRFKAFVVVGDSNGHVGLGVKCAKEVATAIRGAIILAKLSIVPVRRGYWGNKIGLPHTVPCKVTGKCGSVTVRMVPAPRGSGIVAARVPKKVLQFAGIDDVFTSSRGSTKTLGNFVKATFDCLMKTYGFLTPDFWRETTFTKAPYQEFTDILVKPTKALMLDAPAEKIEA

SEQ ID NO: 67809 - protein, 213 aa, Triticum aestivum
  peptide (1)..(213): Ceres Seq. ID no. 15222753
  misc_feature (106)..(179): Pfam Name: Ribosomal protein S5, C-terminal domain Pfam Description: Ribosomal protein S5, C-terminal domain
  misc_feature (1)..(202): Homolog of NCBI NO: 25294520 NR Description: hypothetical protein RF12
  misc_feature (1)..(202): Homolog of NCBI NO: 21539457 NR Description: ribosomal protein S2, putative [Arabidopsis
  misc_feature (1)..(210): Homolog of NCBI NO: 15230312 NR Description: 40S ribosomal protein S2 (RPS2D) [Arabidopsis
  misc_feature (1)..(202): Homolog of NCBI NO: 21618011 NR Description: ribosomal protein S2, putative [Arabidopsis
  misc_feature (1)..(202): Homolog of NCBI NO: 15217951 NR Description: 40S ribosomal protein S2 (RPS2A) [Arabidopsis
  misc_feature (1)..(202): Homolog of NCBI NO: 18406325 NR Description: 40S ribosomal protein, putative [Arabidopsis
  misc_feature (1)..(212): Homolog of NCBI NO: 21553851 NR Description: 40S ribosomal protein S2 [Arabidopsis thaliana]
  misc_feature (1)..(212): Homolog of NCBI NO: 15227443 NR Description: 40S ribosomal protein S2 (RPS2C) [Arabidopsis
  misc_feature (1)..(213): Homolog of NCBI NO: 34393314 NR Description: putative 40S ribosomal protein S2
  misc_feature (1)..(213): Homolog of NCBI NO: 30103021 NR Description: putative 40S ribosomal protein S2
MEELYLHSLPIKEHQIVEQLCPGLKDEVMKITPVQKQTRAGQRTRFKAFVVVGDSNGHVGLGVKCAKEVATAIRGAIILAKLSIVPVRRGYWGNKIGLPHTVPCKVTGKCGSVTVRMVPAPRGSGIVAARVPKKVLQFAGIDDVFTSSRGSTKTLGNFVKATFDCLMKTYGFLTPDFWRETTFTKAPYQEFTDILVKPTKALMLDAPAEKIEA

SEQ ID NO: 67810 - DNA, 1540 bp, Triticum aestivum
  misc_feature (1)..(1540): Ceres Seq. ID no. 13595932
gaaattttccattcccccacccgcccttcacttcccttcacccgtcgctctcagccccgcagcgctagctagggttgggatcgatttggggcctagggttaggtcagtttctccatggcggcggcggcggcggcggaggggtccggggcagagggccgcggcgaggccgccgccggcggcaggcggcagcagcagcaggggctggcggagcgccggatgctccggtcccagtaccacgccatgaagaccctcatcaacgaggagagggatgacatggcgaaggaggactccgacaagttcgcctccatcatcacgcaggtggagagcttgcacgagcaagtgcagagacccagggagcaagtagcggatgcagaggctctgctagatattacaaccacgctggtaaaatccgtgaggtcccagtcaagtgaaggaatcacaccttctgatttcgtaacagcattgctgaagaaatttgggcagcaagcaacccttgattccgagcctgtctcgttgcgctgggctgatgttgggctttctgcttcacatgtcttcagggctgcgcctggatgctgcaccatgcttggacccatggatacagaagtaaagcagcggaagctttcagttgttagtagaaaaagaagtgccaggccaactgaaaatacttgtcctgaagagcttgctgattcttctgagggagcaaagacagacactgaccggaatgtgactgttgtatttgatatcctgaggaaaaataagcgtgcgaggctggagacccttgttttgaacagacaatcatttgcccaaacggttgagaatgtttttgcattgtctttcctagttaaagatggcagggtggcaataaacattgatgacaatgggcaccatatagtctatccacgaaatgcacctgctgctagtgccatagcgtcaggagaagtgtcctacagccattttgttttcagatatgattacagagattggaagcttatgaaagaagtcgttcctgaagggcaagaactgatgccgcacaggaccgcgcacagcctctcttctgaagagcgagaacagctggagccgtgtgcgcaacgaacaccgataaggaaactttgccggaaccggggtttggttcttcaggagcagatggttgttgcagagacacccgaggaggacagaagctccaaacgcaagcgtctattcatagatcaggagtgatcatgcctgcttgaaatgccttgtgccgcggtctacgctgtgtctgtatgtaggaggtatttgcctgattaacgtacccattgtagaacaaggtgtgccatagcaccgcttgtgctagttcttaccttgagacgagattcctccgggagaggaaagagggcaatagaaatgtaagctcaatagaaatgctactgtagttctttagatcagtcggcttaaataatgttcttggaatcggacttgtataatgtcgctcagagtaatatgcttgtgctgatagagaaaaagaaaaggtttgcttctagctgagccaaagttcctattc

SEQ ID NO: 67811 - protein, 366 aa, Triticum aestivum
  peptide (1)..(366): Ceres Seq. ID no. 13595933
  misc_feature (201)..(314): Homolog of NCBI NO: 38344630 NR Description: OSJNBb0003A12.16 [Oryza sativa (japonica
  misc_feature (12)..(74): Homolog of NCBI NO: 5441894 NR Description: EST AU030111(E50640) corresponds to a region of
  misc_feature (258)..(366): Homolog of NCBI NO: 5441894 NR Description: EST AU030111(E50640) corresponds to a region of
  misc_feature (1)..(360): Homolog of NCBI NO: 28411875 NR Description: OSJNBa0016N23.27 [Oryza sativa (japonica
  misc_feature (23)..(307): Homolog of NCBI NO: 15232359 NR Description: hypothetical protein [Arabidopsis thaliana]
  misc_feature (23)..(349): Homolog of NCBI NO: 9294403 NR Description: gene_id:MOE17.7~unknown protein [Arabidopsis
  misc_feature (24)..(360): Homolog of NCBI NO: 15223745 NR Description: expressed protein [Arabidopsis thaliana]
MAAAAAAEGSGAEGRGEAAAGGRRQQQQGLAERRMLRSQYHAMKTLINEERDDMAKEDSDKFASIITQVESLHEQVQRPREQVADAEALLDITTTLVKSVRSQSSEGITPSDFVTALLKKFGQQATLDSEPVSLRWADVGLSASHVFRAAPGCCTMLGPMDTEVKQRKLSVVSRKRSARPTENTCPEELADSSEGAKTDTDRNVTVVFDILRKNKRARLETLVLNRQSFAQTVENVFALSFLVKDGRVAINIDDNGHHIVYPRNAPAASAIASGEVSYSHFVFRYDYRDWKLMKEVVPEGQELMPHRTAHSLSSEEREQLEPCAQRTPIRKLCRNRGLVLQEQMVVAETPEEDRSSKRKRLFIDQE

SEQ ID NO: 67812 - protein, 332 aa, Triticum aestivum
  peptide (1)..(332): Ceres Seq. ID no. 13595934
  misc_feature (167)..(280): Homolog of NCBI NO: 38344630 NR Description: OSJNBb0003A12.16 [Oryza sativa (japonica
  misc_feature (1)..(40): Homolog of NCBI NO: 5441894 NR Description: EST AU030111(E50640) corresponds to a region of
  misc_feature (224)..(332): Homolog of NCBI NO: 5441894 NR Description: EST AU030111(E50640) corresponds to a region of
  misc_feature (1)..(326): Homolog of NCBI NO: 28411875 NR Description: OSJNBa0016N23.27 [Oryza sativa (japonica
  misc_feature (1)..(273): Homolog of NCBI NO: 15232359 NR Description: hypothetical protein [Arabidopsis thaliana]
  misc_feature (1)..(315): Homolog of NCBI NO: 9294403 NR Description: gene_id:MOE17.7~unknown protein [Arabidopsis
  misc_feature (1)..(326): Homolog of NCBI NO: 15223745 NR Description: expressed protein [Arabidopsis thaliana]
MLRSQYHAMKTLINEERDDMAKEDSDKFASIITQVESLHEQVQRPREQVADAEALLDITTTLVKSVRSQSSEGITPSDFVTALLKKFGQQATLDSEPVSLRWADVGLSASHVFRAAPGCCTMLGPMDTEVKQRKLSVVSRKRSARPTENTCPEELADSSEGAKTDTDRNVTVVFDILRKNKRARLETLVLNRQSFAQTVENVFALSFLVKDGRVAINIDDNGHHIVYPRNAPAASAIASGEVSYSHFVFRYDYRDWKLMKEVVPEGQELMPHRTAHSLSSEEREQLEPCAQRTPIRKLCRNRGLVLQEQMVVAETPEEDRSSKRKRLFIDQE

SEQ ID NO: 67813 - protein, 324 aa, Triticum aestivum
  peptide (1)..(324): Ceres Seq. ID no. 13595935
  misc_feature (159)..(272): Homolog of NCBI NO: 38344630 NR Description: OSJNBb0003A12.16 [Oryza sativa (japonica
  misc_feature (1)..(32): Homolog of NCBI NO: 5441894 NR Description: EST AU030111(E50640) corresponds to a region of
  misc_feature (216)..(324): Homolog of NCBI NO: 5441894 NR Description: EST AU030111(E50640) corresponds to a region of
  misc_feature (1)..(318): Homolog of NCBI NO: 28411875 NR Description: OSJNBa0016N23.27 [Oryza sativa (japonica
  misc_feature (1)..(265): Homolog of NCBI NO: 15232359 NR Description: hypothetical protein [Arabidopsis thaliana]
  misc_feature (1)..(307): Homolog of NCBI NO: 9294403 NR Description: gene_id:MOE17.7~unknown protein [Arabidopsis
  misc_feature (1)..(318): Homolog of NCBI NO: 15223745 NR Description: expressed protein [Arabidopsis thaliana]
MKTLINEERDDMAKEDSDKFASIITQVESLHEQVQRPREQVADAEALLDITTTLVKSVRSQSSEGITPSDFVTALLKKFGQQATLDSEPVSLRWADVGLSASHVFRAAPGCCTMLGPMDTEVKQRKLSVVSRKRSARPTENTCPEELADSSEGAKTDTDRNVTVVFDILRKNKRARLETLVLNRQSFAQTVENVFALSFLVKDGRVAINIDDNGHHIVYPRNAPAASAIASGEVSYSHFVFRYDYRDWKLMKEVVPEGQELMPHRTAHSLSSEEREQLEPCAQRTPIRKLCRNRGLVLQEQMVVAETPEEDRSSKRKRLFIDQE

SEQ ID NO: 67814 - DNA, 1016 bp, Triticum aestivum
  misc_feature (1)..(1016): Ceres Seq. ID no. 13654441
atactgaatcacacggaaccttgaggcacacccacgggagaaaatggcagacacaggagacgagctgaagctgctgggcatgtgggcgagcccgtacgtggtcagggtgcagctcgcactccgcctcaagggcgtgagctacgagtacgtcgaggaggacctcgccaacaagagcgagctcttcctccgctccaacccggttcacaagacggtcccgatcctcatccacaacggcaagcccgtctgcgagtcccaggtcatcctccagtacatcgacgaggccttcgccggcgtcggcccgcccctcctccccgccgacccctacgagcgcgccgtcgcgcgcttctgggccgcctacgtcgaggacaagctgctggcgccgtgggggaaggtgttcagggtgaccaccgacgaggagagggccgagtggacgcggcagacggcggcggccctgggtcctctggaggatggcctcagggagtgctccaaggggaaggggttcttcggcggcgactgcgtcgggtacgtcgacgtcctgctcggcagcatggtgccgtgggtgcgcgccaccgagaggctctccggcgacaagttagtcgacgccggcaaggccccgctgctggcggcatggatggaccgcattagcgagctcgacgccgccaaggcggtcttccaggacgtcgacagggtggttgagtacgccgggggaatacagacccggctttccgccgcggctgcaagcacccaataaagcggcatggcgacatggtgcgtggctgatgcaaggagaaaatagccaagtgtgcaattagctgaaattattaaactggccacgtttctgtttcctttttcccgaataatggcgtcgtttctcaggaacacataacatacaagcatgtgatattaccagtttaaaaacttgtgtggtcatcgtgacagctcctcctctgtttttaagggatatttacatttttgtccttggctttgtcacattagtggggtttgtcttttgtttt

SEQ ID NO: 67815 - protein, 235 aa, Triticum aestivum
  peptide (1)..(235): Ceres Seq. ID no. 13654442
  misc_feature (89)..(204): Pfam Name: Glutathione S-transferase, C-terminal domain Pfam Description: Glutathione S-transferase, C-terminal domain
  misc_feature (1)..(233): Homolog of NCBI NO: 33304610 NR Description: tau class GST protein 4 [Oryza sativa (indica
  misc_feature (1)..(233): Homolog of NCBI NO: 33304612 NR Description: tau class GST protein 3 [Oryza sativa (indica
  misc_feature (1)..(233): Homolog of NCBI NO: 37536310 NR Description: putative glutathione S-transferase
  misc_feature (5)..(231): Homolog of NCBI NO: 11385521 NR Description: glutathione S-transferase GST 35 [Zea mays]
  misc_feature (1)..(233): Homolog of NCBI NO: 37536308 NR Description: putative glutathione S-transferase
  misc_feature (5)..(233): Homolog of NCBI NO: 22038178 NR Description: glutathione-S-transferase 2 [Aegilops tauschii]
  misc_feature (5)..(233): Homolog of NCBI NO: 21730248 NR Description: Chain A, The Structure Of A Tau Class Glutathione
  misc_feature (7)..(233): Homolog of NCBI NO: 37536332 NR Description: putative glutathione S-transferase
  misc_feature (6)..(233): Homolog of NCBI NO: 37536334 NR Description: putative glutathione S-transferase
  misc_feature (1)..(235): Homolog of NCBI NO: 37536330 NR Description: putative glutathione S-transferase
MADTGDELKLLGMWASPYVVRVQLALRLKGVSYEYVEEDLANKSELFLRSNPVHKTVPILIHNGKPVCESQVILQYIDEAFAGVGPPLLPADPYERAVARFWAAYVEDKLLAPWGKVFRVTTDEERAEWTRQTAAALGPLEDGLRECSKGKGFFGGDCVGYVDVLLGSMVPWVRATERLSGDKLVDAGKAPLLAAWMDRISELDAAKAVFQDVDRVVEYAGGIQTRLSAAAASTQ

SEQ ID NO: 67816 - protein, 223 aa, Triticum aestivum
  peptide (1)..(223): Ceres Seq. ID no. 13654443
  misc_feature (77)..(192): Pfam Name: Glutathione S-transferase, C-terminal domain Pfam Description: Glutathione S-transferase, C-terminal domain
  misc_feature (1)..(221): Homolog of NCBI NO: 33304610 NR Description: tau class GST protein 4 [Oryza sativa (indica
  misc_feature (1)..(221): Homolog of NCBI NO: 33304612 NR Description: tau class GST protein 3 [Oryza sativa (indica
  misc_feature (1)..(221): Homolog of NCBI NO: 37536310 NR Description: putative glutathione S-transferase
  misc_feature (1)..(219): Homolog of NCBI NO: 11385521 NR Description: glutathione S-transferase GST 35 [Zea mays]
  misc_feature (1)..(221): Homolog of NCBI NO: 37536308 NR Description: putative glutathione S-transferase
  misc_feature (1)..(221): Homolog of NCBI NO: 22038178 NR Description: glutathione-S-transferase 2 [Aegilops tauschii]
  misc_feature (1)..(221): Homolog of NCBI NO: 21730248 NR Description: Chain A, The Structure Of A Tau Class Glutathione
  misc_feature (1)..(221): Homolog of NCBI NO: 37536332 NR Description: putative glutathione S-transferase
  misc_feature (1)..(221): Homolog of NCBI NO: 37536334 NR Description: putative glutathione S-transferase
  misc_feature (1)..(223): Homolog of NCBI NO: 37536330 NR Description: putative glutathione S-transferase
MWASPYVVRVQLALRLKGVSYEYVEEDLANKSELFLRSNPVHKTVPILIHNGKPVCESQVILQYIDEAFAGVGPPLLPADPYERAVARFWAAYVEDKLLAPWGKVFRVTTDEERAEWTRQTAAALGPLEDGLRECSKGKGFFGGDCVGYVDVLLGSMVPWVRATERLSGDKLVDAGKAPLLAAWMDRISELDAAKAVFQDVDRVVEYAGGIQTRLSAAAASTQ

SEQ ID NO: 67817 - DNA, 1968 bp, Triticum aestivum
  misc_feature (1)..(1968): Ceres Seq. ID no. 13596261
aaagggaccggcgctcgcggcgaccaggaaggcaaggaacgcgtccggttcttggataagcggaggcgcggcaccgcaccgcacgcggcattcgtcaatataagaaggccgccgggggtgggaggcggagggacaactccgtctacacaagcgcgcgcgcacccaccaaagtcttctgccgatttcttcgtctccgctctcctcgtgttcgggttgttggccgagcgacagttgggattctgtagaggaggttgaaagtacttgaaacaaatggggattggggatgcatcacctagtgaaaaccagtctgcacacaaggaacagagggatgagaccacgccacttctcccggtcaaggcggaagaggaagatgggatccatgagttcaatggagcgtctttctcgggtgcagttttcaatctgtcgacaaccatcgtgggggctggaattatggccctgccagcaagtatcaagatgctaggcattatccctggtattttgatgatcatccttgtggcattgctcactgaggcatcaattgacatgatggtcaggtgcagccaccaggccaagattacatcctatggctggctcatgggtgactcttttggtcaatgggggaggattgcactgcaagcatctgtggtcataaacaacgttggcgtcatgattgtatacatgattatcatcggtgatgtgctatcgggaacatctacaactggtgttcatcaccggggtatctttgaggggtggtttgggcctcatttctggaattctcgtccagttgttctccttgccacaactatttttgtgtttgctccattggtgagctttaagcgattggattcattgagatacacatctgctctgtcagttgctcttgctgtggtttttgttgtcatcactgctggaattgctattctcagactgatagaagggaccgcggagattcccaaactcttccctgagatacatgaactcaattccatctgggaactctttacagctgtgccggttcttgtcactgcctatatttgccactacaatgttcacagcatcgataacgaactggaagatagaagtcagactaagccaattgtgcgaacttcattggctctctgttcaagtgtttatgttgcaacaagcttctttgcatatttactcttcggcgagggtaccctctccgatgtgctcgctaattttgactctgaccttcatattccattcagctctgtcttcaatgatatagtcagagtgagctatgtagtccatgtcatgctggtcttccctatagtcttctttgcccttaggctcaacctggatggactcctcttccccacctcaaggcacatttctcatgacaaccgaaggtttatcattatcaccgtctcactcctcgctgtgatttatcttgctgccaacttcataccaagcatctgggatgcgttccagttcaccggtgctacagctgctgtcctgattggtttcatctttcctgccatgatcatactgagggattcttatgggattgcaaccaagcgcgacaaggttttagctgtaaccatgattgtgcttgctgtgctctccaattcagtggccctgtacagcgatgcgatgagcatcttctacaggaaggtggaggcctagtctgctccatgcctccatactccaagggaataagtccaatgcacatgcacaattcggagtgattattgagctttagttagtatattgcgcagtcaagcaatgtgatttcatggtggccactaatttttgttttggacacttgagaggattttgtttgctgcatttgtctagttccttgaacatgtaatccggctcagcatctagatgagcaatttgtgatctggtcgcaggtgtttgtatttattggcaagaacaagatttttatttacttttgggggtcatgtacatgttcatattcggtcatcttgaaattgatgtttg

SEQ ID NO: 67818 - protein, 458 aa, Triticum aestivum
  peptide (1)..(458): Ceres Seq. ID no. 13596262
  misc_feature (24)..(78): Homolog of NCBI NO: 25408697 NR Description: hypothetical protein At2g40420 [imported] -
  misc_feature (93)..(444): Homolog of NCBI NO: 25408697 NR Description: hypothetical protein At2g40420 [imported] -
  misc_feature (41)..(451): Homolog of NCBI NO: 18412864 NR Description: amino acid transporter family [Arabidopsis
  misc_feature (42)..(415): Homolog of NCBI NO: 34907894 NR Description: P0439E11.11 [Oryza sativa (japonica
  misc_feature (24)..(444): Homolog of NCBI NO: 30688270 NR Description: amino acid transporter family [Arabidopsis
  misc_feature (23)..(451): Homolog of NCBI NO: 15228851 NR Description: amino acid transporter family [Arabidopsis
  misc_feature (20)..(452): Homolog of NCBI NO: 15241555 NR Description: amino acid transporter family [Arabidopsis
  misc_feature (20)..(452): Homolog of NCBI NO: 9758059 NR Description: amino acid transporter-like protein [Arabidopsis
  misc_feature (3)..(452): Homolog of NCBI NO: 18406463 NR Description: amino acid transporter family [Arabidopsis
  misc_feature (24)..(455): Homolog of NCBI NO: 34898706 NR Description: hypothetical protein [Oryza sativa (japonica
MGIGDASPSENQSAHKEQRDETTPLLPVKAEEEDGIHEFNGASFSGAVFNLSTTIVGAGIMALPASIKMLGIIPGILMIILVALLTEASIDMMVRCSHQAKITSYGWLMGDSFGQWGRIALQASVVINNVGVMIVYMIIIGDVLSGTSTTGVHHRGIFEGWFGPHFWNSRPVVLLATTIFVFAPLVSFKRLDSLRYTSALSVALAVVFVVITAGIAILRLIEGTAEIPKLFPEIHELNSIWELFTAVPVLVTAYICHYNVHSIDNELEDRSQTKPIVRTSLALCSSVYVATSFFAYLLFGEGTLSDVLANFDSDLHIPFSSVFNDIVRVSYVVHVMLVFPIVFFALRLNLDGLLFPTSRHISHDNRRFIIITVSLLAVIYLAANFIPSIWDAFQFTGATAAVLIGFIFPAMIILRDSYGIATKRDKVLAVTMIVLAVLSNSVALYSDAMSIFYRKVEA

SEQ ID NO: 67819 - protein, 398 aa, Triticum aestivum
  peptide (1)..(398): Ceres Seq. ID no. 13596263
  misc_feature (1)..(18): Homolog of NCBI NO: 25408697 NR Description: hypothetical protein At2g40420 [imported] -
  misc_feature (33)..(384): Homolog of NCBI NO: 25408697 NR Description: hypothetical protein At2g40420 [imported] -
  misc_feature (1)..(391): Homolog of NCBI NO: 18412864 NR Description: amino acid transporter family [Arabidopsis
  misc_feature (1)..(355): Homolog of NCBI NO: 34907894 NR Description: P0439E11.11 [Oryza sativa (japonica
  misc_feature (1)..(384): Homolog of NCBI NO: 30688270 NR Description: amino acid transporter family [Arabidopsis
  misc_feature (1)..(391): Homolog of NCBI NO: 15228851 NR Description: amino acid transporter family [Arabidopsis
  misc_feature (1)..(392): Homolog of NCBI NO: 15241555 NR Description: amino acid transporter family [Arabidopsis
  misc_feature (1)..(392): Homolog of NCBI NO: 9758059 NR Description: amino acid transporter-like protein [Arabidopsis
  misc_feature (1)..(392): Homolog of NCBI NO: 18406463 NR Description: amino acid transporter family [Arabidopsis
  misc_feature (1)..(395): Homolog of NCBI NO: 34898706 NR Description: hypothetical protein [Oryza sativa (japonica
MALPASIKMLGIIPGILMIILVALLTEASIDMMVRCSHQAKITSYGWLMGDSFGQWGRIALQASVVINNVGVMIVYMIIIGDVLSGTSTTGVHHRGIFEGWFGPHFWNSRPVVLLATTIFVFAPLVSFKRLDSLRYTSALSVALAVVFVVITAGIAILRLIEGTAEIPKLFPEIHELNSIWELFTAVPVLVTAYICHYNVHSIDNELEDRSQTKPIVRTSLALCSSVYVATSFFAYLLFGEGTLSDVLANFDSDLHIPFSSVFNDIVRVSYVVHVMLVFPIVFFALRLNLDGLLFPTSRHISHDNRRFIIITVSLLAVIYLAANFIPSIWDAFQFTGATAAVLIGFIFPAMIILRDSYGIATKRDKVLAVTMIVLAVLSNSVALYSDAMSIFYRKVEA

SEQ ID NO: 67820 - protein, 390 aa, Triticum aestivum
  peptide (1)..(390): Ceres Seq. ID no. 13596264
  misc_feature (1)..(262): Homolog of NCBI NO: 24461850 NR Description: CTV.3 [Poncirus trifoliata]
  misc_feature (25)..(376): Homolog of NCBI NO: 25408697 NR Description: hypothetical protein At2g40420 [imported] -
  misc_feature (1)..(383): Homolog of NCBI NO: 18412864 NR Description: amino acid transporter family [Arabidopsis
  misc_feature (1)..(347): Homolog of NCBI NO: 34907894 NR Description: P0439E11.11 [Oryza sativa (japonica
  misc_feature (1)..(376): Homolog of NCBI NO: 30688270 NR Description: amino acid transporter family [Arabidopsis
  misc_feature (1)..(383): Homolog of NCBI NO: 15228851 NR Description: amino acid transporter family [Arabidopsis
  misc_feature (1)..(384): Homolog of NCBI NO: 15241555 NR Description: amino acid transporter family [Arabidopsis
  misc_feature (1)..(384): Homolog of NCBI NO: 9758059 NR Description: amino acid transporter-like protein [Arabidopsis
  misc_feature (1)..(384): Homolog of NCBI NO: 18406463 NR Description: amino acid transporter family [Arabidopsis
  misc_feature (1)..(387): Homolog of NCBI NO: 34898706 NR Description: hypothetical protein [Oryza sativa (japonica
MLGIIPGILMIILVALLTEASIDMMVRCSHQAKITSYGWLMGDSFGQWGRIALQASVVINNVGVMIVYMIIIGDVLSGTSTTGVHHRGIFEGWFGPHFWNSRPVVLLATTIFVFAPLVSFKRLDSLRYTSALSVALAVVFVVITAGIAILRLIEGTAEIPKLFPEIHELNSIWELFTAVPVLVTAYICHYNVHSIDNELEDRSQTKPIVRTSLALCSSVYVATSFFAYLLFGEGTLSDVLANFDSDLHIPFSSVFNDIVRVSYVVHVMLVFPIVFFALRLNLDGLLFPTSRHISHDNRRFIIITVSLLAVIYLAANFIPSIWDAFQFTGATAAVLIGFIFPAMIILRDSYGIATKRDKVLAVTMIVLAVLSNSVALYSDAMSIFYRKVEA

SEQ ID NO: 67821 - DNA, 2016 bp, Triticum aestivum
  misc_feature (1)..(2016): Ceres Seq. ID no. 13582783
ggtaatccatttgaaatgactagaaagacaaatatttcggaacggaggaagtacatgacactcttatactcgcaagagttcaattctattctactcgagaagacactcactccctgtgagaaattctaaaaggaaatgcttttacactgcatgaaagctcgaaaactggctacatcagagccttgaaattgcaggccaggcatcagatcacgaaaggcattacactgttggtggcggtcctccctccaaccaactccaaaggtttgcaatacatatagcatgtaagcagcagcttcctatatatttgatgagttctctttccgcagcttggctggcctctccttgtgcgattctgcatatctcctcttcttgttggctcttcttcttttgcgctcagcttgtgtaagctccacgtcttctttaatatcccctttcccttcaaaaacttcttcgggagcgagcattgcggcatctgaaacagctacaggtgcaacctcttccattgctagagcaggtatattaacttgtatggacatatcctcaatgaccggctttggggcaaagtggaaatgagagagcgcatccaacttcaagcatatcctcttaaataaatcatttgcctcattcttcagttcatctgaaatagcaagtgtggcaggtgcaatgccagttttttccttaaactcatcctcatactgttcagcaagaccctttttgctcttgttttcatccatctccttttgctgctttggaactttatacggcaaggttgaaggcttttcaacatcatcaaaatgaccctccgcaattcttttctttatcatctcttcgagagaagctgtgacttcctccgtgattactggggcaggtcttacattatgctcaaaatcaagatccacttccagggcactatttttgggcctcctggaagcatcaacctctccctgcatgatccatttactgggttcaagactagctttctccattaggtctatttggttacgcatcttcaagagccccttttcatgagttgaaagaccttgttcatcctctaatgctggaccatcatttacatcatccttctcaatgtcatccacttccatttcatgcaattcatccttgaagtggactttctttgtgaaaccatttctcttcttgacttgttgcttactgctttcctcaaaaaaatcctcataccttatatctccgccagatttccccacaccctcttcatcatcagactcaaaatcttccaaatccaaatcgtcatcttcatcatcacccccatcatcttcatccacatcctcctcatcactatcgtcctccatcaagttcacacttgccttcttcttctctcctcccttggaacccccaccgtactcctgctcctccccctcctccataaacttttccaggtccttcatcttcaggaacctgtcctccaccccgttccctttcttcgcccctagctcctccgtttcttcatcctccccctcctccgattccaactcgtcatccgtgtcctccaggccaccctcatcctcctcctccgattcgtcaccctctccatcctcctcctcgtctgacgggccctccacggcttcagcgggcttggacggcggaggagtagccaacggctgcgcaggcggttggtgctcgaggcggcggagctggcggtggaggtgggggaggagggggcgggagagcagctcgctctgggaccaaatctgctcggcgtcgaagttggggccggcgaggaggttggggaggggcggcggctgcacgggggagacaacggcgagcgacgagtggaagtgcttcagagccgcccgggcggcggcggcgaggtccgcggacggggagaggtagacggacgggtcggcgcgccgcagctgctgcagcgccacctcgcccttctccgcggcaagcggctcgtccaaatccatggccattgccgtggtggccgggagcgaattggttgactggagtatgtggaggcgacgctgggaaagagag

SEQ ID NO: 67822 - protein, 260 aa, Triticum aestivum
  peptide (1)..(260): Ceres Seq. ID no. 13582784
  misc_feature (37)..(174): Pfam Name: Lipoprotein amino terminal region Pfam Description: Lipoprotein amino terminal region
  misc_feature (1)..(171): Homolog of NCBI NO: 34809533 NR Description: Epa5p [Candida glabrata]
  misc_feature (1)..(173): Homolog of NCBI NO: 32699068 NR Description: hypothetical protein FLJ35107 [Homo sapiens]
  misc_feature (1)..(173): Homolog of NCBI NO: 32699068 NR Description: hypothetical protein FLJ35107 [Homo sapiens]
  misc_feature (23)..(260): Homolog of NCBI NO: 28828184 NR Description: similar to Leishmania major. Ppg3 [Dictyostelium
  misc_feature (1)..(174): Homolog of NCBI NO: 32699068 NR Description: hypothetical protein FLJ35107 [Homo sapiens]
  misc_feature (1)..(172): Homolog of NCBI NO: 32699068 NR Description: hypothetical protein FLJ35107 [Homo sapiens]
  misc_feature (1)..(174): Homolog of NCBI NO: 34809533 NR Description: Epa5p [Candida glabrata]
  misc_feature (1)..(185): Homolog of NCBI NO: 13592175 NR Description: ppg3 [Leishmania major]
  misc_feature (1)..(260): Homolog of NCBI NO: 28828184 NR Description: similar to Leishmania major. Ppg3 [Dictyostelium
  misc_feature (1)..(260): Homolog of NCBI NO: 28828184 NR Description: similar to Leishmania major. Ppg3 [Dictyostelium
MSSTSISCNSSLKWTFFVKPFLFLTCCLLLSSKKSSYLISPPDFPTPSSSSDSKSSKSKSSSSSSPPSSSSTSSSSLSSSIKFTLAFFFSPPLEPPPYSCSSPSSINFSRSFIFRNLSSTPFPFFAPSSSVSSSSPSSDSNSSSVSSRPPSSSSSDSSPSPSSSSSDGPSTASAGLDGGGVANGCAGGWCSRRRSWRWRWGRRGRESSSLWDQICSASKLGPARRLGRGGGCTGETTASDEWKCFRAARAAAARSADGER

SEQ ID NO: 67823 - DNA, 768 bp, Triticum aestivum
  misc_feature (1)..(768): Ceres Seq. ID no. 15178530
agcgcgtccccattccgatccgttggcttcctgttcatacattctcccctcccggcgccgcctccagcctagggtttcctcccgccgtccgccgccatggctcgccgcagcggaggaggaaggtcttcccgccctgctccacgtgctgctccagtgagaaacccaccagcgccagcccgtcaagctcctccacctgctactacccagaatagcggtggtggtatcatgagtggaattgggtccaccattgctcagggcatggctttcggtactggcagtgccatggcgcacagggctgttgatgctgtgatgggtccccgcaccattcagcatgagactgttgtcggtgaggctgctgcatctatgactccaatggacaatgctgctgatgacaagtgtggcaacccttccaaggccttccaagattgcatcaaccactacggaagcgacatcagcaagtgccagttctacctcgacatgctgaacgagtgccgccgtggaggagcaggagctggtgcaactctttaagctactatctttgcttgattgcggcttaattggtcggaacctgttttcagtcatgatgatgatgatatatatctcctaaataattcattggcaatattatgaacctatgccacagcttatgtctattacctaccctagtttgtggtctctgttgtcctgggagtatttccttgtattgatgttggaattaccttcatggcagtgggtttataaatatggagtttaaaaaaaaaaaaaaaa

SEQ ID NO: 67824 - protein, 143 aa, Triticum aestivum; identical to SEQ ID NO: 63821
  peptide (1)..(143): Ceres Seq. ID no. 15178531
  misc_feature (38)..(134): Homolog of NCBI NO: 23509031 NR Description: hypothetical protein, conserved [Plasmodium
  misc_feature (1)..(141): Homolog of NCBI NO: 15242455 NR Description: expressed protein [Arabidopsis thaliana]
  misc_feature (1)..(141): Homolog of NCBI NO: 15237688 NR Description: expressed protein [Arabidopsis thaliana]
  misc_feature (1)..(139): Homolog of NCBI NO: 13174237 NR Description: unknown protein [Oryza sativa]

SEQ ID NO: 67825 - protein, 100 aa, Triticum aestivum; identical to SEQ ID NO: 63822
  peptide (1)..(100): Ceres Seq. ID no. 15178532
  misc_feature (1)..(91): Homolog of NCBI NO: 23509031 NR Description: hypothetical protein, conserved [Plasmodium
  misc_feature (1)..(98): Homolog of NCBI NO: 15242455 NR Description: expressed protein [Arabidopsis thaliana]
  misc_feature (1)..(98): Homolog of NCBI NO: 15237688 NR Description: expressed protein [Arabidopsis thaliana]
  misc_feature (1)..(96): Homolog of NCBI NO: 13174237 NR Description: unknown protein [Oryza sativa]

SEQ ID NO: 67826 - protein, 89 aa, Triticum aestivum; identical to SEQ ID NO: 63823
  peptide (1)..(89): Ceres Seq. ID no. 15178533
  misc_feature (1)..(80): Homolog of NCBI NO: 23509031 NR Description: hypothetical protein, conserved [Plasmodium
  misc_feature (1)..(87): Homolog of NCBI NO: 15242455 NR Description: expressed protein [Arabidopsis thaliana]
  misc_feature (1)..(87): Homolog of NCBI NO: 15237688 NR Description: expressed protein [Arabidopsis thaliana]
  misc_feature (1)..(85): Homolog of NCBI NO: 13174237 NR Description: unknown protein [Oryza sativa]

SEQ ID NO: 67827 - DNA, 885 bp, Triticum aestivum
  misc_feature (1)..(885): Ceres Seq. ID no. 12614051
cacgcacgcacccgagccccacaattcccatcccccactccactccccaccgaaaaaccatggcgcggcggagcggcatgctcctcctactcgccgcggccgccctgcttgccctcggcgcgggcgccgccgtgccgccgtcgtgcgagcgcatcgagtgcccggcgtacgacgtggtggacagcgccaacgggttcgagatccggcggtacaaggacgccatgtgggtgtccaccgcgcccatcgaggacatctcgctcgtcgacgccacccgctccggcttcctccagcttttcaagtacatccaggggaagaacgcctacaacgagacgatcgagatgacggcgccggtgctgacgcgggtggcgcccagcgacgggcccttctgcgtctcctccttcgtggtcagcttctacgtgccggcgaagaaccaggcggacccgccgccggccgagggcctgcacgtgcagaggtgggccggggcgaggtacgcggccgtgcgccggttcggcggcttcgtggccgacgccgacgtcggcaagcaggccgcgctgctcgacgccagcctgcaggggaccaggtgggccgccgccgtgtccgacggccgcaaggccgacccggcgtccgagtacaccgtggcgcagtacaactcgccgttcgagttcagcggcagggtcaacgagatctggatgctcttcgacaccatggccgcgtctgacatgtaactggctagatcaatcagtgaactcgtatatgagtgtcttgtcttttaagcttctatataaccggacgaataatggtggtgccttataaactgcttaagcgaaatagtgaactgttttgcgctgtatggacttgcgagcaataaagtgcctcttttggtgc

SEQ ID NO: 67828 - protein, 240 aa, Triticum aestivum
  peptide (1)..(240): Ceres Seq. ID no. 12614052
  misc_feature (50)..(233): Pfam Name: SOUL heme-binding protein Pfam Description: SOUL heme-binding protein
  misc_feature (41)..(231): Homolog of NCBI NO: 27731687 NR Description: similar to heme binding protein 2; putative
  misc_feature (65)..(231): Homolog of NCBI NO: 15778345 NR Description: C6ORF34B [Homo sapiens]
  misc_feature (41)..(231): Homolog of NCBI NO: 7657603 NR Description: heme binding protein 2
  misc_feature (51)..(233): Homolog of NCBI NO: 28278449 NR Description: Similar to heme binding protein 2 [Danio rerio]
  misc_feature (45)..(233): Homolog of NCBI NO: 15218357 NR Description: hypothetical protein; protein id: At1g78460.1
  misc_feature (30)..(233): Homolog of NCBI NO: 34904402 NR Description: unnamed protein product [Oryza sativa (japonica
  misc_feature (43)..(233): Homolog of NCBI NO: 21593898 NR Description: SOUL-like protein [Arabidopsis thaliana]
  misc_feature (43)..(233): Homolog of NCBI NO: 18411970 NR Description: expressed protein
  misc_feature (45)..(233): Homolog of NCBI NO: 15220033 NR Description: SOUL-like protein
  misc_feature (20)..(240): Homolog of NCBI NO: 34903864 NR Description: unnamed protein product [Oryza sativa (japonica
RTHPSPTIPIPHSTPHRKTMARRSGMLLLLAAAALLALGAGAAVPPSCERIECPAYDVVDSANGFEIRRYKDAMWVSTAPIEDISLVDATRSGFLQLFKYIQGKNAYNETIEMTAPVLTRVAPSDGPFCVSSFVVSFYVPAKNQADPPPAEGLHVQRWAGARYAAVRRFGGFVADADVGKQAALLDASLQGTRWAAAVSDGRKADPASEYTVAQYNSPFEFSGRVNEIWMLFDTMAASDM

SEQ ID NO: 67829 - protein, 238 aa, Triticum aestivum
  peptide (1)..(238): Ceres Seq. ID no. 12614053
THAPEPHNSHPPLHSPPKNHGAAERHAPPTRRGRPACPRRGRRRAAVVRAHRVPGVRRGGQRQRVRDPAVQGRHVGVHRAHRGHLARRRHPLRLPPAFQVHPGEERLQRDDRDDGAGADAGGAQRRALLRLLLRGQLLRAGEEPGGPAAGRGPARAEVGRGEVRGRAPVRRLRGRRRRRQAGRAARRQPAGDQVGRRRVRRPQGRPGVRVHRGAVQLAVRVQRQGQRDLDALRHHGRV

SEQ ID NO: 67830 - protein, 221 aa, Triticum aestivum
  peptide (1)..(221): Ceres Seq. ID no. 12614054
  misc_feature (31)..(214): Pfam Name: SOUL heme-binding protein Pfam Description: SOUL heme-binding protein
  misc_feature (22)..(212): Homolog of NCBI NO: 27731687 NR Description: similar to heme binding protein 2; putative
  misc_feature (46)..(212): Homolog of NCBI NO: 15778345 NR Description: C6ORF34B [Homo sapiens]
  misc_feature (22)..(212): Homolog of NCBI NO: 7657603 NR Description: heme binding protein 2
  misc_feature (32)..(214): Homolog of NCBI NO: 28278449 NR Description: Similar to heme binding protein 2 [Danio rerio]
  misc_feature (26)..(214): Homolog of NCBI NO: 15218357 NR Description: hypothetical protein; protein id: At1g78460.1
  misc_feature (11)..(214): Homolog of NCBI NO: 34904402 NR Description: unnamed protein product [Oryza sativa (japonica
  misc_feature (24)..(214): Homolog of NCBI NO: 21593898 NR Description: SOUL-like protein [Arabidopsis thaliana]
  misc_feature (24)..(214): Homolog of NCBI NO: 18411970 NR Description: expressed protein
  misc_feature (26)..(214): Homolog of NCBI NO: 15220033 NR Description: SOUL-like protein
  misc_feature (1)..(221): Homolog of NCBI NO: 34903864 NR Description: unnamed protein product [Oryza sativa (japonica
MARRSGMLLLLAAAALLALGAGAAVPPSCERIECPAYDVVDSANGFEIRRYKDAMWVSTAPIEDISLVDATRSGFLQLFKYIQGKNAYNETIEMTAPVLTRVAPSDGPFCVSSFVVSFYVPAKNQADPPPAEGLHVQRWAGARYAAVRRFGGFVADADVGKQAALLDASLQGTRWAAAVSDGRKADPASEYTVAQYNSPFEFSGRVNEIWMLFDTMAASDM

SEQ ID NO: 67831 - DNA, 867 bp, Triticum aestivum
  misc_feature (1)..(867): Ceres Seq. ID no. 13596128
aacaatctacatttgacttccagcagaggaagcgagccaagatgggcacaccggcggccgtcagggtgatcggcgccttcgacagcccgtttagccaccgcgccgaggtcgccctgtgcctcaagggcgttccctacgagctcatcctggaggagctccacaacaagagcgagctgctgcttacgagcaaccccgtccacaagaaggtgcccgtgctcctccacggcgaccgcaccatctgcgagtcgctcatcatcgtcgagtacgttgacgagaccttcgacgggccggcgcttctcccaacggacccctacgaccgtgccactgcccgcttgtggtcccgcttcatcgatgacaagtgctcgaagccgttctggctggcgatgtggactgatggggaagcgcagaaggggttcacgaaggagatcaaggagaacttcgcgctcctggaggcgcagctcgagggtaagaggttcttcggcggcggcaccattggcctcgtcgacatagccgcctgcgggttcgcgcactggctcaccgtctgcgaggaggtttctggcgtgacactggtcacggccgaggagttccctcgcctgtgccgctgggccaaagagtatgcctccgacgagaaggtcagagcgtgcctgccggacagggcgcagatgctcgcccatttcacggccaacaaggagatgttcatggccatggcaaagtcaatgctgccaaaataatgtgatgtatgttgatgtggaagtggatgcgtgcatgaaagatatcgtagcccagagcgcatggtcgtcatgtgatggaataaagaaaaagcatttactagtattaatcagtcatctgatttatttattatttctc

SEQ ID NO: 67832 - protein, 242 aa, Triticum aestivum
  peptide (1)..(242): Ceres Seq. ID no. 13596129
  misc_feature (99)..(209): Pfam Name: Glutathione S-transferase, C-terminal domain Pfam Description: Glutathione S-transferase, C-terminal domain
  misc_feature (20)..(237): Homolog of NCBI NO: 19386817 NR Description: putative glutathione S-transferase GST 24
  misc_feature (20)..(240): Homolog of NCBI NO: 19386818 NR Description: putative glutathione S-transferase GST 24
  misc_feature (20)..(240): Homolog of NCBI NO: 34896730 NR Description: putative glutathione transferase
  misc_feature (20)..(240): Homolog of NCBI NO: 19386819 NR Description: putative glutathione S-transferase GST 24
  misc_feature (20)..(242): Homolog of NCBI NO: 19386820 NR Description: putative glutathione S-transferase GST 24
  misc_feature (19)..(238): Homolog of NCBI NO: 11385507 NR Description: glutathione S-transferase GST 28 [Zea mays]
  misc_feature (20)..(238): Homolog of NCBI NO: 13699857 NR Description: glutathione S-transferase GST 24 [Zea mays]
  misc_feature (20)..(240): Homolog of NCBI NO: 4468798 NR Description: GST7 protein [Zea mays]
  misc_feature (17)..(242): Homolog of NCBI NO: 19386822 NR Description: putative glutathione S-transferase GST 24
  misc_feature (14)..(241): Homolog of NCBI NO: 11385509 NR Description: glutathione S-transferase GST 29 [Zea mays]
QSTFDFQQRKRAKMGTPAAVRVIGAFDSPFSHRAEVALCLKGVPYELILEELHNKSELLLTSNPVHKKVPVLLHGDRTICESLIIVEYVDETFDGPALLPTDPYDRATARLWSRFIDDKCSKPFWLAMWTDGEAQKGFTKEIKENFALLEAQLEGKRFFGGGTIGLVDIAACGFAHWLTVCEEVSGVTLVTAEEFPRLCRWAKEYASDEKVRACLPDRAQMLAHFTANKEMFMAMAKSMLPK

SEQ ID NO: 67833 - protein, 229 aa, Triticum aestivum
  peptide (1)..(229): Ceres Seq. ID no. 13596130
  misc_feature (86)..(196): Pfam Name: Glutathione S-transferase, C-terminal domain Pfam Description: Glutathione S-transferase, C-terminal domain
  misc_feature (7)..(224): Homolog of NCBI NO: 19386817 NR Description: putative glutathione S-transferase GST 24
  misc_feature (7)..(227): Homolog of NCBI NO: 19386818 NR Description: putative glutathione S-transferase GST 24
  misc_feature (7)..(227): Homolog of NCBI NO: 34896730 NR Description: putative glutathione transferase
  misc_feature (7)..(227): Homolog of NCBI NO: 19386819 NR Description: putative glutathione S-transferase GST 24
  misc_feature (7)..(229): Homolog of NCBI NO: 19386820 NR Description: putative glutathione S-transferase GST 24
  misc_feature (6)..(225): Homolog of NCBI NO: 11385507 NR Description: glutathione S-transferase GST 28 [Zea mays]
  misc_feature (7)..(225): Homolog of NCBI NO: 13699857 NR Description: glutathione S-transferase GST 24 [Zea mays]
  misc_feature (7)..(227): Homolog of NCBI NO: 4468798 NR Description: GST7 protein [Zea mays]
  misc_feature (4)..(229): Homolog of NCBI NO: 19386822 NR Description: putative glutathione S-transferase GST 24
  misc_feature (1)..(228): Homolog of NCBI NO: 11385509 NR Description: glutathione S-transferase GST 29 [Zea mays]
MGTPAAVRVIGAFDSPFSHRAEVALCLKGVPYELILEELHNKSELLLTSNPVHKKVPVLLHGDRTICESLIIVEYVDETFDGPALLPTDPYDRATARLWSRFIDDKCSKPFWLAMWTDGEAQKGFTKEIKENFALLEAQLEGKRFFGGGTIGLVDIAACGFAHWLTVCEEVSGVTLVTAEEFPRLCRWAKEYASDEKVRACLPDRAQMLAHFTANKEMFMAMAKSMLPK

SEQ ID NO: 67834 - DNA, 1083 bp, Triticum aestivum
  misc_feature (1)..(1083): Ceres Seq. ID no. 13595993
acctagaacatcctaatcgaaaaaacaaaaacaaacgcgagcgagacccttgcctcaagacctcctccgccccacctccctcctcctactcggcccgtcgtccacgccgagggagccgtcgggcatggcggcgacggcagatccgcgggcgaagccgccggccgcgccctcgacgcaccacctcgagccgtgggcgcgcccgcagcagccgccgcctctaccccaccgcgttgagtcgccctcggggggtgcgtcgggcgcccgcgatcgccgccgctcgtcgtctcactcccaccgcggggccgacgccggagacgacggcgggatcgaggggctccgcgtgaagctcatgggccacctgcgcgacgcggccgaccggcttcgcgtgccccagaaaagtcctcccctgcccccgccgcccccaccgaccaagccgaaggagcccgagccagaccgcatggcgcggcctccaccccccacggagccgccacaggagaacgtcgcggacaagccgtggaagctgcgggaacgcacgcggcggcggccggccgcgctgtcgtcgtcatggccggcggcgccgactccgccgtcgcgacggcgcaagcgggcccctttctcggtggccctggagccggaggagatcgaggaggacatctacgcgctgacgggcggccggccgcggcggcggccgaggaagcggccgcgcgccgtacagcggcagctcgattcgctcttccccgggctctggctggccgaggtcaccgccgacgactacaaggtgcccgacgacgagtagccgctccctcccgccggcgactacaaggttccgacgacgaagctcatggcatcacctccgcgcgtcgtaggacaggtagcccgaatttatagtaacttggagtagctaggcgtagacgcgtggtcgcgtggagcgagccggtcatgtactcgtgttcaccagttattattaagtttattacaacaaaaaaaaaactccagctaccgactttccttgtcataaaaaaaaaaaaaaaaaagcttatcgatacacgtcgactgtttaaacacaatmragggggggcccgg

SEQ ID NO: 67835 - protein, 223 aa, Triticum aestivum
  peptide (1)..(223): Ceres Seq. ID no. 15221724
  misc_feature (50)..(221): Homolog of NCBI NO: 25518652 NR Description: hypothetical protein F4F7.22 - Arabidopsis
  misc_feature (157)..(221): Homolog of NCBI NO: 18411597 NR Description: expressed protein [Arabidopsis thaliana]
  misc_feature (157)..(221): Homolog of NCBI NO: 13430778 NR Description: unknown protein [Arabidopsis thaliana]
  misc_feature (157)..(221): Homolog of NCBI NO: 11358418 NR Description: hypothetical protein T8B10.70 - Arabidopsis
  misc_feature (41)..(221): Homolog of NCBI NO: 18409003 NR Description: expressed protein [Arabidopsis thaliana]
  misc_feature (121)..(201): Homolog of NCBI NO: 34895592 NR Description: unnamed protein product [Oryza sativa (japonica
  misc_feature (50)..(221): Homolog of NCBI NO: 18395654 NR Description: expressed protein [Arabidopsis thaliana]
  misc_feature (158)..(221): Homolog of NCBI NO: 15229616 NR Description: expressed protein [Arabidopsis thaliana]
  misc_feature (99)..(221): Homolog of NCBI NO: 34911314 NR Description: P0519D04.26 [Oryza sativa (japonica
  misc_feature (43)..(222): Homolog of NCBI NO: 34911320 NR Description: P0519D04.29 [Oryza sativa (japonica
MAATADPRAKPPAAPSTHHLEPWARPQQPPPLPHRVESPSGGASGARDRRRSSSHSHRGADAGDDGGIEGLRVKLMGHLRDAADRLRVPQKSPPLPPPPPPTKPKEPEPDRMARPPPPTEPPQENVADKPWKLRERTRRRPAALSSSWPAAPTPPSRRRKRAPFSVALEPEEIEEDIYALTGGRPRRRPRKRPRAVQRQLDSLFPGLWLAEVTADDYKVPDDE

SEQ ID NO: 67836 - protein, 148 aa, Triticum aestivum
  peptide (1)..(148): Ceres Seq. ID no. 15221725
  misc_feature (1)..(146): Homolog of NCBI NO: 25518652 NR Description: hypothetical protein F4F7.22 - Arabidopsis
  misc_feature (82)..(146): Homolog of NCBI NO: 18411597 NR Description: expressed protein [Arabidopsis thaliana]
  misc_feature (82)..(146): Homolog of NCBI NO: 13430778 NR Description: unknown protein [Arabidopsis thaliana]
  misc_feature (82)..(146): Homolog of NCBI NO: 11358418 NR Description: hypothetical protein T8B10.70 - Arabidopsis
  misc_feature (1)..(146): Homolog of NCBI NO: 18409003 NR Description: expressed protein [Arabidopsis thaliana]
  misc_feature (46)..(126): Homolog of NCBI NO: 34895592 NR Description: unnamed protein product [Oryza sativa (japonica
  misc_feature (1)..(146): Homolog of NCBI NO: 18395654 NR Description: expressed protein [Arabidopsis thaliana]
  misc_feature (83)..(146): Homolog of NCBI NO: 15229616 NR Description: expressed protein [Arabidopsis thaliana]
  misc_feature (24)..(146): Homolog of NCBI NO: 34911314 NR Description: P0519D04.26 [Oryza sativa (japonica
  misc_feature (1)..(147): Homolog of NCBI NO: 34911320 NR Description: P0519D04.29 [Oryza sativa (japonica
MGHLRDAADRLRVPQKSPPLPPPPPPTKPKEPEPDRMARPPPPTEPPQENVADKPWKLRERTRRRPAALSSSWPAAPTPPSRRRKRAPFSVALEPEEIEEDIYALTGGRPRRRPRKRPRAVQRQLDSLFPGLWLAEVTADDYKVPDDE

SEQ ID NO: 67837 - protein, 113 aa, Triticum aestivum
  peptide (1)..(113): Ceres Seq. ID no. 15221726
  misc_feature (3)..(113): Homolog of NCBI NO: 19923466 NR Description: splicing coactivator subunit SRm300
  misc_feature (3)..(113): Homolog of NCBI NO: 6649242 NR Description: splicing coactivator subunit SRm300 [Homo sapiens]
  misc_feature (33)..(113): Homolog of NCBI NO: 7949115 NR Description: Ser/Arg-related nuclear matrix protein
  misc_feature (3)..(113): Homolog of NCBI NO: 5821143 NR Description: RNA binding protein [Homo sapiens]
  misc_feature (3)..(113): Homolog of NCBI NO: 5821145 NR Description: RNA binding protein [Homo sapiens]
  misc_feature (19)..(113): Homolog of NCBI NO: 19923466 NR Description: splicing coactivator subunit SRm300
  misc_feature (19)..(113): Homolog of NCBI NO: 6649242 NR Description: splicing coactivator subunit SRm300 [Homo sapiens]
  misc_feature (19)..(113): Homolog of NCBI NO: 7512967 NR Description: hypothetical protein KIAA0324 - human (fragment)
  misc_feature (19)..(113): Homolog of NCBI NO: 6634015 NR Description: KIAA0324 protein [Homo sapiens]
  misc_feature (19)..(113): Homolog of NCBI NO: 5821151 NR Description: RNA binding protein [Homo sapiens]
LEHPNRKNKNKRERDPCLKTSSAPPPSSYSARRPRRGSRRAWRRRQIRGRSRRPRPRRTTSSRGRARSSRRLYPTALSRPRGVRRAPAIAAARRLTPTAGPTPETTAGSRGSA

SEQ ID NO: 67838 - DNA, 1644 bp, Triticum aestivum
  misc_feature (1)..(1644): Ceres Seq. ID no. 13596131
gcaaaaggaccaaactcacgcgacgacgaagaaagaagcggagaccggagatcgagatcgccggtgggagagatggagccgagacgagcgatccaccgcagatccggcgcgctcctcctcctcctcgccgctgtattcgcggcggccgccggcgcctccgcctccgccatcggcgacaggtgcgccgcctgcaaagccgtcgcggctgagctagagattggaatatcaagtgagaaaccaagaaaccacttggacttgcgtaacaggttaaattcgaaaggtcagcgcgaggggaaggtcatcgattacagagtcagtgagcttcggattgtagagcttctggatgacctatgtgataagatgcaagactatacgctgcagaagttggaatcaggcgaaaaagaatgggtgaaagtaccaagctggagcagttttcaaactgataagaaagctgcagcacgagcacactccaaaaatctatccagttactgtggaaggttactggaggaaactgaggacgagcttgctgagtggataaaaacaagctcggcagaatccgcggacgtgagccaggccctttgccaggatattagcaaacactgccagttaacaagtgctacagccccggtcgacgatgaactataacagcacgtgttagctccccgtatttactcgacaaagaaaagcagatgaatgcctgagaagcgtcaaagaagaagctccagtaggatatgaggctgtgatgtcttagcgtctgcatttttacacactcgcattgttgtcttaaagagggacttgcagattttcacatatgattactgatgtattgagaacattcaaactttgaggaatttctgcatgctgaattacagttagcagcatggtatgattcgctgaactaatctgaattcaacaatgcgagtgaggtatcatggacctcgaactgttaagccactagctgctttctacagtgatgtttcaggcatcagtgcatcagtagagtcaaccaatggggaggccatgccacacccgttagatgaaattgagccaaaaaaggatgttgaaccggagaattgtccattctggtgggcgcgttcgcccgaaaatatactgcagcaggatacatatctagcactggcagcttcttttgtaatcctgcggttgctgtatcttctattcccaaggatagtttctgcagcaaaatgggcatggaggaggcatactctgtttgcgaacttgatgggcgtgcatgaatatttcttcacctacctcgagcaagcaagacagaaattgagtaggttatacccttcgaagcgagggaatttacaggagggggcaaggaatgccactgcctgggcctccaaatcattagcatctgtgtcaatcggagaaccaagcactatcggaaggacgaactccacgaatgaactgaggtgaagtgtaaacttttttgtccgcagggatattatgtacagtagagtgatgaggatatgagcaccaagaatctgttgtaaccagctttgttagctattgtaacatcatcattagaataagcacctcccccagtattgttgccattataaccttgtcttgaatagctgttgcccaaacatattcttggaggaaaaaggtttgacgtgttcc

SEQ ID NO: 67839 - protein, 214 aa, Triticum aestivum
  peptide (1)..(214): Ceres Seq. ID no. 13596132
  misc_feature (36)..(201): Homolog of NCBI NO: 9903607 NR Description: transmembrane protein 4
  misc_feature (36)..(201): Homolog of NCBI NO: 7657176 NR Description: transmembrane protein 4 [Homo sapiens]
  misc_feature (40)..(213): Homolog of NCBI NO: 20129845 NR Description: CG12918-PA [Drosophila melanogaster]
  misc_feature (109)..(144): Homolog of NCBI NO: 25373216 NR Description: unknown protein [imported] - Arabidopsis thaliana
  misc_feature (150)..(213): Homolog of NCBI NO: 25373216 NR Description: unknown protein [imported] - Arabidopsis thaliana
  misc_feature (37)..(100): Homolog of NCBI NO: 25373216 NR Description: unknown protein [imported] - Arabidopsis thaliana
  misc_feature (37)..(213): Homolog of NCBI NO: 18400653 NR Description: expressed protein [Arabidopsis thaliana]
  misc_feature (37)..(213): Homolog of NCBI NO: 21593763 NR Description: unknown [Arabidopsis thaliana]
AKGPNSRDDEERSGDRRSRSPVGEMEPRRAIHRRSGALLLLLAAVFAAAAGASASAIGDRCAACKAVAAELEIGISSEKPRNHLDLRNRLNSKGQREGKVIDYRVSELRIVELLDDLCDKMQDYTLQKLESGEKEWVKVPSWSSFQTDKKAAARAHSKNLSSYCGRLLEETEDELAEWIKTSSAESADVSQALCQDISKHCQLTSATAPVDDEL

SEQ ID NO: 67840 - protein, 190 aa, Triticum aestivum
  peptide (1)..(190): Ceres Seq. ID no. 13596133
  misc_feature (12)..(177): Homolog of NCBI NO: 9903607 NR Description: transmembrane protein 4
  misc_feature (12)..(177): Homolog of NCBI NO: 7657176 NR Description: transmembrane protein 4 [Homo sapiens]
  misc_feature (16)..(189): Homolog of NCBI NO: 20129845 NR Description: CG12918-PA [Drosophila melanogaster]
  misc_feature (85)..(120): Homolog of NCBI NO: 25373216 NR Description: unknown protein [imported] - Arabidopsis thaliana
  misc_feature (126)..(189): Homolog of NCBI NO: 25373216 NR Description: unknown protein [imported] - Arabidopsis thaliana
  misc_feature (13)..(76): Homolog of NCBI NO: 25373216 NR Description: unknown protein [imported] - Arabidopsis thaliana
  misc_feature (13)..(189): Homolog of NCBI NO: 18400653 NR Description: expressed protein [Arabidopsis thaliana]
  misc_feature (13)..(189): Homolog of NCBI NO: 21593763 NR Description: unknown [Arabidopsis thaliana]
MEPRRAIHRRSGALLLLLAAVFAAAAGASASAIGDRCAACKAVAAELEIGISSEKPRNHLDLRNRLNSKGQREGKVIDYRVSELRIVELLDDLCDKMQDYTLQKLESGEKEWVKVPSWSSFQTDKKAAARAHSKNLSSYCGRLLEETEDELAEWIKTSSAESADVSQALCQDISKHCQLTSATAPVDDEL

SEQ ID NO: 67841 - protein, 173 aa, Triticum aestivum
  peptide (1)..(173): Ceres Seq. ID no. 13596134
  misc_feature (1)..(162): Homolog of NCBI NO: 21536613 NR Description: contains similarity to protein disulfide
  misc_feature (1)..(162): Homolog of NCBI NO: 18418521 NR Description: expressed protein [Arabidopsis thaliana]
  misc_feature (1)..(162): Homolog of NCBI NO: 9758894 NR Description: contains similarity to protein disulfide
  misc_feature (1)..(22): Homolog of NCBI NO: 15236643 NR Description: protein disulfide isomerase -related [Arabidopsis
  misc_feature (41)..(171): Homolog of NCBI NO: 15236643 NR Description: protein disulfide isomerase -related [Arabidopsis
  misc_feature (1)..(171): Homolog of NCBI NO: 18399435 NR Description: expressed protein [Arabidopsis thaliana]
  misc_feature (1)..(173): Homolog of NCBI NO: 29367467 NR Description: disulfide isomerase-like protein
MRVRYHGPRTVKPLAAFYSDVSGISASVESTNGEAMPHPLDEIEPKKDVEPENCPFWWARSPENILQQDTYLALAASFVILRLLYLLFPRIVSAAKWAWRRHTLFANLMGVHEYFFTYLEQARQKLSRLYPSKRGNLQEGARNATAWASKSLASVSIGEPSTIGRTNSTNELR

SEQ ID NO: 67842 - DNA, 828 bp, Triticum aestivum
  misc_feature (1)..(828): Ceres Seq. ID no. 13596179
acacacgaaagcaacagccagcgatcgagacagcaagagaagctcactcagctcagctaccaccagtcccggtcacagcaatcggcatggccagcaagtcggcgtccctgctgatcctcgcggcgctggtggccgcggcgtgcctcacggagctgggctcggcggcgcgcggcgtgccggcggagaagcccgcggaggacgatgtgaagcggccggacacgttccaggaggggacggtgctgatcccggggatcgggcggtacgagctgggcacccactacatccccgacatcggcgggctggaccacagcatcccggccgccgccagtggacagttcatccccggcgccgacgacacctgggtgcccaaccccggctttgagattcccaaccccttccgcccccgctccgactctccctgatgggccgagccggccggccgccagcacgtccacgccaacgcccaccgtccgcccacacgttgcacccgtccatctacttggtagagctagcctgctacaaatcattttccgctagctttttggttgctacaataaaatagctgctgctacatggccatgcatgcatgtgtctgcgactgcgttcgcgccgtcgacgtctcgtgtttgattgaagtgtacgtgtagtcgtgtatgggatatggacggatgcgtaggaagcatccatcgcatgtctcgcttggtttgttgttgccagtgtaatgtgtttcagttcagtaagttttttgaatgataaaaaaaaaaaaaaaaaagcttatcgataccgtcgatccttcgakgkggggcccgktaaacmcaataaagtggg

SEQ ID NO: 67843 - protein, 139 aa, Triticum aestivum
  peptide (1)..(139): Ceres Seq. ID no. 15221789
  misc_feature (29)..(127): Homolog of NCBI NO: 34899778 NR Description: OJ1773_H01.12 [Oryza sativa (japonica
  misc_feature (29)..(139): Homolog of NCBI NO: 33146757 NR Description: unknown protein [Oryza sativa (japonica
TRKQQPAIETAREAHSAQLPPVPVTAIGMASKSASLLILAALVAAACLTELGSAARGVPAEKPAEDDVKRPDTFQEGTVLIPGIGRYELGTHYIPDIGGLDHSIPAAASGQFIPGADDTWVPNPGFEIPNPFRPRSDSP

SEQ ID NO: 67844 - protein, 126 aa, Triticum aestivum
  peptide (1)..(126): Ceres Seq. ID no. 15221790
HTKATASDRDSKRSSLSSATTSPGHSNRHGQQVGVPADPRGAGGRGVPHGAGLGGARRAGGEARGGRCEAAGHVPGGDGADPGDRAVRAGHPLHPRHRRAGPQHPGRRQWTVHPRRRRHLGAQPRL

SEQ ID NO: 67845 - protein, 111 aa, Triticum aestivum
  peptide (1)..(111): Ceres Seq. ID no. 15221791
  misc_feature (1)..(99): Homolog of NCBI NO: 34899778 NR Description: OJ1773_H01.12 [Oryza sativa (japonica
  misc_feature (1)..(111): Homolog of NCBI NO: 33146757 NR Description: unknown protein [Oryza sativa (japonica
MASKSASLLILAALVAAACLTELGSAARGVPAEKPAEDDVKRPDTFQEGTVLIPGIGRYELGTHYIPDIGGLDHSIPAAASGQFIPGADDTWVPNPGFEIPNPFRPRSDSP

SEQ ID NO: 67846 - DNA, 749 bp, Triticum aestivum
  misc_feature (1)..(749): Ceres Seq. ID no. 13582851
atctgccgatctcccccgttccccacctcccccttcccgtcgggccgtagccaccgcaccgcccccgatggcctcctccgctgccggcgccggcaagtcactgatccagacattccgcaagttcttcaagaagccgtgggagatcaccggcccgtgctcctcgcccgagtaccgcagcgcggtcccgggtgcgctcgagtaccgtcaaaccctgcccggccacccttcgcgaggactccctcagggccgtcatccccacctccgactcggagaccgtgttcgacatcaagtactacccgcgcgactgcggccgcaaccgcccgcccgtccgccgcaccctcctccgcaagcccgatctcgagcgctacatggccgccaagcagttcgaccccgccaaggacttccccgtcccctacgtcaattctgctgtcgagtacagcgaagtcggcggcggctacaccaagtgatccaggtcttgtggtcaagctgcagcagaagctgcactcacttcatttccgcttttccttgaaagtcccttcctcttttgtttcggagaaaaatttctggttgtaaaagatgatggtggcaataatatggctcttggggagtaaaccggatgcacctaccttgtaagttgtgttccaaaagtcagccagcctaatgctgatttgtggtttaattaaatttatgaaaaactcaaatcttctgctggaatccgtacatgatctactttcactgcgttttgacag

SEQ ID NO: 67847 - protein, 190 aa, Triticum aestivum
  peptide (1)..(190): Ceres Seq. ID no. 13582852
  misc_feature (47)..(158): Pfam Name: Caudal like protein activation region Pfam Description: Caudal like protein activation region
  misc_feature (67)..(157): Homolog of NCBI NO: 20138131 NR Description: Vegetative cell wall protein gp1 precursor
  misc_feature (58)..(149): Homolog of NCBI NO: 30696750 NR Description: hypothetical protein [Arabidopsis thaliana]
  misc_feature (58)..(157): Homolog of NCBI NO: 20138131 NR Description: Vegetative cell wall protein gp1 precursor
  misc_feature (58)..(138): Homolog of NCBI NO: 6523547 NR Description: hydroxyproline-rich glycoprotein DZ-HRGP
  misc_feature (53)..(156): Homolog of NCBI NO: 22531670 NR Description: D4 dopamine receptor [Equus hemionus]
  misc_feature (67)..(155): Homolog of NCBI NO: 20138131 NR Description: Vegetative cell wall protein gp1 precursor
  misc_feature (50)..(156): Homolog of NCBI NO: 22531678 NR Description: D4 dopamine receptor [Equus zebra]
  misc_feature (50)..(156): Homolog of NCBI NO: 22531676 NR Description: D4 dopamine receptor [Equus grevyi]
  misc_feature (67)..(155): Homolog of NCBI NO: 20138131 NR Description: Vegetative cell wall protein gp1 precursor
  misc_feature (60)..(167): Homolog of NCBI NO: 30140331 NR Description: putative arabinagalactan protein [Lotus japonicus]
ICRSPPFPTSPFPSGRSHRTAPDGLLRCRRRQVTDPDIPQVLQEAVGDHRPVLLARVPQRGPGCARVPSNPARPPFARTPSGPSSPPPTRRPCSTSSTTRATAAATARPSAAPSSASPISSATWPPSSSTPPRTSPSPTSILLSSTAKSAAATPSDPGLVVKLQQKLHSLHFRFSLKVPSSFVSEKNFWL

SEQ ID NO: 67848 - protein, 175 aa, Triticum aestivum
  peptide (1)..(175): Ceres Seq. ID no. 13582853
  misc_feature (23)..(72): Homolog of NCBI NO: 21592443 NR Description: unknown [Arabidopsis thaliana]
  misc_feature (23)..(72): Homolog of NCBI NO: 15241510 NR Description: expressed protein [Arabidopsis thaliana]
  misc_feature (11)..(72): Homolog of NCBI NO: 34909786 NR Description: P0512C01.35 [Oryza sativa (japonica
SADLPRSPPPPSRRAVATAPPPMASSAAGAGKSLIQTFRKFFKKPWEITGPCSSPEYRSAVPGALEYRQTLPGHPSRGLPQGRHPHLRLGDRVRHQVLPARLRPQPPARPPHPPPQARSRALHGRQAVRPRQGLPRPLRQFCCRVQRSRRRLHQVIQVLWSSCSRSCTHFISAFP

SEQ ID NO: 67849 - protein, 153 aa, Triticum aestivum
  peptide (1)..(153): Ceres Seq. ID no. 13582854
  misc_feature (1)..(50): Homolog of NCBI NO: 21592443 NR Description: unknown [Arabidopsis thaliana]
  misc_feature (1)..(50): Homolog of NCBI NO: 15241510 NR Description: expressed protein [Arabidopsis thaliana]
  misc_feature (1)..(50): Homolog of NCBI NO: 34909786 NR Description: P0512C01.35 [Oryza sativa (japonica
MASSAAGAGKSLIQTFRKFFKKPWEITGPCSSPEYRSAVPGALEYRQTLPGHPSRGLPQGRHPHLRLGDRVRHQVLPARLRPQPPARPPHPPPQARSRALHGRQAVRPRQGLPRPLRQFCCRVQRSRRRLHQVIQVLWSSCSRSCTHFISAFP

SEQ ID NO: 67850 - DNA, 996 bp, Triticum aestivum
  misc_feature (1)..(996): Ceres Seq. ID no. 13654321
gtcagcaagcaacattaactcacttgttgagctccacactccagctccagcgcagccgcagagtgcagagtgagtgagtgggcatgggcgaggaggccaattgcgacgccgtgatggaggacggcaacggcaacgacaacggcaaggccaaggagaacggccacgccacagccgttgtggccatgccggacgtcaaggccaaggccgaggacgccgtggtggcgccgggtgacccccgcctgcagggcatctccgacgccatccgcgtcgtcccgcacttccccaagcaaggcatcatgttcaacgacatcacgacgctcctgctgcggcccggggtgttcaaggacgccctggacatgtttgtggagcgctaccgcggcatgggcatcgccgccgtcgccgggattgaggcgagaggatttatatttggccccgcgattgcactagccatcggtgccaagttcattccgttgcgcaagcctaagaaactcccaggtgaggtgatttctgagacctatgttctcgaatacggaactgattgtctggagatgcatgttggtgctatcgaaccccgtgagcgtgttttgatagttgatgatctggttgcaactggtgggacactttgtgctgctataaatcttctggaacgtgctggagctgatgtcgttgagtgtgcttgtctcattgggctccctaaatttaaggatttttacaagctcaacgggaagcctgtctatgtactggtggagtctctggaatatgaaaaataagaaaccggtgaccaggtgagggacgcatcatggcttcatcctgctgcggtagtattagggagtgggggaggttagggagcggtacgtgaatggatgggtgtagtctttgtaggctgagtggtttcttcaactgtactgaagagcttcttccttgtgctcgggagaaatgatcgttagctgagacgcgagtcctgtagttccattattatcattggttattattatt

SEQ ID NO: 67851 - protein, 228 aa, Triticum aestivum
  peptide (1)..(228): Ceres Seq. ID no. 15219640
  misc_feature (29)..(223): Homolog of NCBI NO: 32492063 NR Description: adenine phosphoribosyltransferase [Brassica napus]
  misc_feature (50)..(222): Homolog of NCBI NO: 15234553 NR Description: adenine phosphoribosyltransferase -related
  misc_feature (50)..(222): Homolog of NCBI NO: 21536749 NR Description: adenine phosphoribosyltransferase (EC
  misc_feature (50)..(222): Homolog of NCBI NO: 15235709 NR Description: adenine phosphoribosyltransferase (EC 2.4.2.7) -
  misc_feature (49)..(222): Homolog of NCBI NO: 15238973 NR Description: adenine phosphoribosyltransferase - like protein
  misc_feature (49)..(228): Homolog of NCBI NO: 1402894 NR Description: adenine phosphoribosyltransferase [Arabidopsis
  misc_feature (49)..(228): Homolog of NCBI NO: 15220047 NR Description: adenine phosphoribosyltransferase [Arabidopsis
  misc_feature (50)..(223): Homolog of NCBI NO: 33354190 NR Description: putative adenine phosphoribosyl transferase
  misc_feature (19)..(223): Homolog of NCBI NO: 29826070 NR Description: adenine phosphoribosyltransferase form 2
  misc_feature (1)..(223): Homolog of NCBI NO: 40019121 NR Description: adenine phosphoribosyltransferase [Zea mays]
MGEEANCDAVMEDGNGNDNGKAKENGHATAVVAMPDVKAKAEDAVVAPGDPRLQGISDAIRVVPHFPKQGIMFNDITTLLLRPGVFKDALDMFVERYRGMGIAAVAGIEARGFIFGPAIALAIGAKFIPLRKPKKLPGEVISETYVLEYGTDCLEMHVGAIEPRERVLIVDDLVATGGTLCAAINLLERAGADVVECACLIGLPKFKDFYKLNGKPVYVLVESLEYEK

SEQ ID NO: 67852 - protein, 218 aa, Triticum aestivum
  peptide (1)..(218): Ceres Seq. ID no. 15219641
  misc_feature (19)..(213): Homolog of NCBI NO: 32492063 NR Description: adenine phosphoribosyltransferase [Brassica napus]
  misc_feature (40)..(212): Homolog of NCBI NO: 15234553 NR Description: adenine phosphoribosyltransferase -related
  misc_feature (40)..(212): Homolog of NCBI NO: 21536749 NR Description: adenine phosphoribosyltransferase (EC
  misc_feature (40)..(212): Homolog of NCBI NO: 15235709 NR Description: adenine phosphoribosyltransferase (EC 2.4.2.7) -
  misc_feature (39)..(212): Homolog of NCBI NO: 15238973 NR Description: adenine phosphoribosyltransferase - like protein
  misc_feature (39)..(218): Homolog of NCBI NO: 1402894 NR Description: adenine phosphoribosyltransferase [Arabidopsis
  misc_feature (39)..(218): Homolog of NCBI NO: 15220047 NR Description: adenine phosphoribosyltransferase [Arabidopsis
  misc_feature (40)..(213): Homolog of NCBI NO: 33354190 NR Description: putative adenine phosphoribosyl transferase
  misc_feature (9)..(213): Homolog of NCBI NO: 29826070 NR Description: adenine phosphoribosyltransferase form 2
  misc_feature (1)..(213): Homolog of NCBI NO: 40019121 NR Description: adenine phosphoribosyltransferase [Zea mays]
MEDGNGNDNGKAKENGHATAVVAMPDVKAKAEDAVVAPGDPRLQGISDAIRVVPHFPKQGIMFNDITTLLLRPGVFKDALDMFVERYRGMGIAAVAGIEARGFIFGPAIALAIGAKFIPLRKPKKLPGEVISETYVLEYGTDCLEMHVGAIEPRERVLIVDDLVATGGTLCAAINLLERAGADVVECACLIGLPKFKDFYKLNGKPVYVLVESLEYEK

SEQ ID NO: 67853 - protein, 195 aa, Triticum aestivum
  peptide (1)..(195): Ceres Seq. ID no. 15219642
  misc_feature (1)..(190): Homolog of NCBI NO: 32492063 NR Description: adenine phosphoribosyltransferase [Brassica napus]
  misc_feature (17)..(189): Homolog of NCBI NO: 15234553 NR Description: adenine phosphoribosyltransferase -related
  misc_feature (17)..(189): Homolog of NCBI NO: 21536749 NR Description: adenine phosphoribosyltransferase (EC
  misc_feature (17)..(189): Homolog of NCBI NO: 15235709 NR Description: adenine phosphoribosyltransferase (EC 2.4.2.7) -
  misc_feature (16)..(189): Homolog of NCBI NO: 15238973 NR Description: adenine phosphoribosyltransferase - like protein
  misc_feature (16)..(195): Homolog of NCBI NO: 1402894 NR Description: adenine phosphoribosyltransferase [Arabidopsis
  misc_feature (16)..(195): Homolog of NCBI NO: 15220047 NR Description: adenine phosphoribosyltransferase [Arabidopsis
  misc_feature (17)..(190): Homolog of NCBI NO: 33354190 NR Description: putative adenine phosphoribosyl transferase
  misc_feature (1)..(190): Homolog of NCBI NO: 29826070 NR Description: adenine phosphoribosyltransferase form 2
  misc_feature (1)..(190): Homolog of NCBI NO: 40019121 NR Description: adenine phosphoribosyltransferase [Zea mays]
MPDVKAKAEDAVVAPGDPRLQGISDAIRVVPHFPKQGIMFNDITTLLLRPGVFKDALDMFVERYRGMGIAAVAGIEARGFIFGPAIALAIGAKFIPLRKPKKLPGEVISETYVLEYGTDCLEMHVGAIEPRERVLIVDDLVATGGTLCAAINLLERAGADVVECACLIGLPKFKDFYKLNGKPVYVLVESLEYEK

SEQ ID NO: 67854 - DNA, 821 bp, Triticum aestivum
  misc_feature (1)..(821): Ceres Seq. ID no. 12584129
accggagaaggcgccttcctcttctccccaaaccttctcttctccgcgttccatccgtcctcatcatggctgtagagggggccgggaagggggtgtcatcgatgtgctgttcaagcggcgagttgcagcggaggggcgcgggcaagaggatgctatcgagggttcttgcggatagtgttgatcgttctgggttgttggagtgggccaaatacctgacgacgggtaagatagaggtgctgtacaagcagtggatgctcggctgcgaccataaggctgtaccattctccacaacaaaaagtcaaagtgggcatgtttcttctgtctttaaacttgtgcactatgagctggtgttgcaatgcttgaagaagttgcctggcgttgttgtgcaagatataccttatagaacaagccgtgctgttcaaaatgctggcacaaactgcgcttctgataaagaagttgacgagcttctcataaagctgcccggtcgattacgagatgcacttctataccattccaacttgaaggtgtgaaatttgagcttcagaggcaagggcgctgccttattacatatgagatggggcttggcaagactctccaagtgagcatattgtattttgtgtataactatcgtgcggatagtttatatgcagaaaattgtttgttccacggtgttacaacttgtaaaatacagtaaattggcttatggatattgagcgcactgatattgagcttgcatcaatacattttgggcagtaacagattagaattttatgtctattttactgaacagttaattatatagcatttgctttttagacctt

SEQ ID NO: 67855 - protein, 175 aa, Triticum aestivum
  peptide (1)..(175): Ceres Seq. ID no. 12584130
  misc_feature (91)..(168): Homolog of NCBI NO: 15240867 NR Description: putative protein; protein id: At5g07810.1
  misc_feature (91)..(168): Homolog of NCBI NO: 11357391 NR Description: hypothetical protein F13G24.10 - Arabidopsis
  misc_feature (113)..(175): Homolog of NCBI NO: 34393589 NR Description: putative DNA helicase [Oryza sativa (japonica
  misc_feature (87)..(175): Homolog of NCBI NO: 34393588 NR Description: DNA-dependent ATPase A-like protein
RRRRLPLLPKPSLLRVPSVLIMAVEGAGKGVSSMCCSSGELQRRGAGKRMLSRVLADSVDRSGLLEWAKYLTTGKIEVLYKQWMLGCDHKAVPFSTTKSQSGHVSSVFKLVHYELVLQCLKKLPGVVVQDIPYRTSRAVQNAGTNCASDKEVDELLIKLPGRLRDALLYHSNLKV

SEQ ID NO: 67856 - protein, 154 aa, Triticum aestivum
  peptide (1)..(154): Ceres Seq. ID no. 12584131
  misc_feature (70)..(147): Homolog of NCBI NO: 15240867 NR Description: putative protein; protein id: At5g07810.1
  misc_feature (70)..(147): Homolog of NCBI NO: 11357391 NR Description: hypothetical protein F13G24.10 - Arabidopsis
  misc_feature (92)..(154): Homolog of NCBI NO: 34393589 NR Description: putative DNA helicase [Oryza sativa (japonica
  misc_feature (66)..(154): Homolog of NCBI NO: 34393588 NR Description: DNA-dependent ATPase A-like protein
MAVEGAGKGVSSMCCSSGELQRRGAGKRMLSRVLADSVDRSGLLEWAKYLTTGKIEVLYKQWMLGCDHKAVPFSTTKSQSGHVSSVFKLVHYELVLQCLKKLPGVVVQDIPYRTSRAVQNAGTNCASDKEVDELLIKLPGRLRDALLYHSNLKV

SEQ ID NO: 67857 - protein, 142 aa, Triticum aestivum
  peptide (1)..(142): Ceres Seq. ID no. 12584132
  misc_feature (58)..(135): Homolog of NCBI NO: 15240867 NR Description: putative protein; protein id: At5g07810.1
  misc_feature (58)..(135): Homolog of NCBI NO: 11357391 NR Description: hypothetical protein F13G24.10 - Arabidopsis
  misc_feature (80)..(142): Homolog of NCBI NO: 34393589 NR Description: putative DNA helicase [Oryza sativa (japonica
  misc_feature (54)..(142): Homolog of NCBI NO: 34393588 NR Description: DNA-dependent ATPase A-like protein
MCCSSGELQRRGAGKRMLSRVLADSVDRSGLLEWAKYLTTGKIEVLYKQWMLGCDHKAVPFSTTKSQSGHVSSVFKLVHYELVLQCLKKLPGVVVQDIPYRTSRAVQNAGTNCASDKEVDELLIKLPGRLRDALLYHSNLKV

SEQ ID NO: 67858 - DNA, 1180 bp, Triticum aestivum
  misc_feature (1)..(1180): Ceres Seq. ID no. 13654322
aatccccgaccagactcgtcgctccctgacccttcccctccaacgccgaagccctaacacgcagctccggcggctgagctcgcagtccgccccctcgcaccttcgtccccagcgcgcgcgcacccccacggccaaccacgcggcgaggcgcatcctccttcgacccccgacgaagcaggcggggagcctgacgcggccccgcgcggccttggccagatgacgaggaccagcggcgcgaacggcggcgggcagcaggggtcggggaagctcccgcgtaagcgcttctaccgggcgcgcgcgcacagcaacccgctcagcgactcgcacttcccgatcccgatagcgcccgacgacgtcgacctctcgcagcactacccgcgctacttcccggccgacaagggcgagcacggtgatggggacggggacgcggaggcgccccggatccgcttcgctgacgtcgggtgcgggtttggtgggctgctcgtcgggctctcgccgctcttccccgacaagctaatgatcggcatggagctgagggacaaggtgactgagtatgtcaaagagagggttctggctttgagagcatcaaatccaggacagtatgacaacatatccgttgtgcgcaccaattcaatgaaatacattcctaactactttggaaaggctcagctctccaaaatgttcttcctgttccctgatcctcacttcaaggagaagaaccaccggaggagggtgattagcatgcatttgctcgatgaatacgcttacgtgatggaagtgggaggaatcatatacactattactgatgtagaggagcttggtatatggatgcgcacatgtctggagaaacacccactcttccaagctgttccagaggaagagataaaagtcgatccagttgtgaagctactgtctagtgccaccgaagaaggccagaaggtcgcgaggaatggagggcagactttccaggccatcttcaggcgcatctccttgcaagaggaataagcaattttggaacttactaagctcttagcacagtgtactttcctggacttcgctagatggatttgtgccatttctatacatttttgtagcatgatttcactatgcagtagtcttacgtagcgctgctatctcaaatgtttggctctactttacaaaaaaattctggaagattgct

SEQ ID NO: 67859 - protein, 262 aa, Triticum aestivum
  peptide (1)..(262): Ceres Seq. ID no. 13654323
  misc_feature (40)..(257): Pfam Name: Putative methyltransferase Pfam Description: Putative methyltransferase
  misc_feature (18)..(257): Homolog of NCBI NO: 20128915 NR Description: CG4045-PA [Drosophila melanogaster]
  misc_feature (12)..(257): Homolog of NCBI NO: 6320000 NR Description: Transfer RNA methyltransferase; Trm8p
  misc_feature (18)..(257): Homolog of NCBI NO: 39597269 NR Description: Hypothetical protein CBG02883 [Caenorhabditis
  misc_feature (18)..(257): Homolog of NCBI NO: 17536689 NR Description: Putative methyltransferase [Caenorhabditis
  misc_feature (19)..(257): Homolog of NCBI NO: 10880981 NR Description: methyltransferase-like protein 1 isoform a
  misc_feature (19)..(257): Homolog of NCBI NO: 1418767 NR Description: D1075-like [Homo sapiens]
  misc_feature (19)..(257): Homolog of NCBI NO: 6754682 NR Description: methyltransferase-like 1
  misc_feature (19)..(257): Homolog of NCBI NO: 4160294 NR Description: methyltransferase-like protein 1 [Mus musculus]
  misc_feature (19)..(257): Homolog of NCBI NO: 15215058 NR Description: methyltransferase-like 1 [Mus musculus]
  misc_feature (18)..(258): Homolog of NCBI NO: 15238631 NR Description: methyltransferase-related protein [Arabidopsis
MTRTSGANGGGQQGSGKLPRKRFYRARAHSNPLSDSHFPIPIAPDDVDLSQHYPRYFPADKGEHGDGDGDAEAPRIRFADVGCGFGGLLVGLSPLFPDKLMIGMELRDKVTEYVKERVLALRASNPGQYDNISVVRTNSMKYIPNYFGKAQLSKMFFLFPDPHFKEKNHRRRVISMHLLDEYAYVMEVGGIIYTITDVEELGIWMRTCLEKHPLFQAVPEEEIKVDPVVKLLSSATEEGQKVARNGGQTFQAIFRRISLQEE

SEQ ID NO: 67860 - protein, 162 aa, Triticum aestivum
  peptide (1)..(162): Ceres Seq. ID no. 13654324
  misc_feature (1)..(157): Pfam Name: Putative methyltransferase Pfam Description: Putative methyltransferase
  misc_feature (1)..(157): Homolog of NCBI NO: 20128915 NR Description: CG4045-PA [Drosophila melanogaster]
  misc_feature (1)..(157): Homolog of NCBI NO: 6320000 NR Description: Transfer RNA methyltransferase; Trm8p
  misc_feature (1)..(157): Homolog of NCBI NO: 39597269 NR Description: Hypothetical protein CBG02883 [Caenorhabditis
  misc_feature (1)..(157): Homolog of NCBI NO: 17536689 NR Description: Putative methyltransferase [Caenorhabditis
  misc_feature (1)..(157): Homolog of NCBI NO: 10880981 NR Description: methyltransferase-like protein 1 isoform a
  misc_feature (1)..(157): Homolog of NCBI NO: 1418767 NR Description: D1075-like [Homo sapiens]
  misc_feature (1)..(157): Homolog of NCBI NO: 6754682 NR Description: methyltransferase-like 1
  misc_feature (1)..(157): Homolog of NCBI NO: 4160294 NR Description: methyltransferase-like protein 1 [Mus musculus]
  misc_feature (1)..(157): Homolog of NCBI NO: 15215058 NR Description: methyltransferase-like 1 [Mus musculus]
  misc_feature (1)..(158): Homolog of NCBI NO: 15238631 NR Description: methyltransferase-related protein [Arabidopsis
MIGMELRDKVTEYVKERVLALRASNPGQYDNISVVRTNSMKYIPNYFGKAQLSKMFFLFPDPHFKEKNHRRRVISMHLLDEYAYVMEVGGIIYTITDVEELGIWMRTCLEKHPLFQAVPEEEIKVDPVVKLLSSATEEGQKVARNGGQTFQAIFRRISLQEE

SEQ ID NO: 67861 - protein, 159 aa, Triticum aestivum
  peptide (1)..(159): Ceres Seq. ID no. 13654325
  misc_feature (1)..(154): Pfam Name: Putative methyltransferase Pfam Description: Putative methyltransferase
  misc_feature (1)..(154): Homolog of NCBI NO: 20128915 NR Description: CG4045-PA [Drosophila melanogaster]
  misc_feature (1)..(154): Homolog of NCBI NO: 6320000 NR Description: Transfer RNA methyltransferase; Trm8p
  misc_feature (1)..(154): Homolog of NCBI NO: 39597269 NR Description: Hypothetical protein CBG02883 [Caenorhabditis
  misc_feature (1)..(154): Homolog of NCBI NO: 17536689 NR Description: Putative methyltransferase [Caenorhabditis
  misc_feature (1)..(154): Homolog of NCBI NO: 10880981 NR Description: methyltransferase-like protein 1 isoform a
  misc_feature (1)..(154): Homolog of NCBI NO: 1418767 NR Description: D1075-like [Homo sapiens]
  misc_feature (1)..(154): Homolog of NCBI NO: 6754682 NR Description: methyltransferase-like 1
  misc_feature (1)..(154): Homolog of NCBI NO: 4160294 NR Description: methyltransferase-like protein 1 [Mus musculus]
  misc_feature (1)..(154): Homolog of NCBI NO: 15215058 NR Description: methyltransferase-like 1 [Mus musculus]
  misc_feature (1)..(155): Homolog of NCBI NO: 15238631 NR Description: methyltransferase-related protein [Arabidopsis
MELRDKVTEYVKERVLALRASNPGQYDNISVVRTNSMKYIPNYFGKAQLSKMFFLFPDPHFKEKNHRRRVISMHLLDEYAYVMEVGGIIYTITDVEELGIWMRTCLEKHPLFQAVPEEEIKVDPVVKLLSSATEEGQKVARNGGQTFQAIFRRISLQEE

SEQ ID NO: 67862 - DNA, 1115 bp, Triticum aestivum
  misc_feature (1)..(1115): Ceres Seq. ID no. 12592883
ctactgaataaacgccagaggcggcggcaccacgaaagcgaagccccctccccgtctacagtctctccacgcggggcacagatcaccactcgccgccgcacctccacgccggcggatatggagcgcgccggcgccgcgccgggggtccctgcggcaggggagggcgcggcggcggcggccgcagcgccgaccccggtggcaggggcaggggtggtgaaggggaggtcctgcaagggctgcctcttctactcgtcggtgctcaggtccaaagggcgcggccccgtctgcgtcggcgtcacccgcggcatcccccaagttcctgatcgtatggttggagaaattgagctgggagctatccaagaaggtcgcaacctttccaacttcaaatatgcatgtgctggatattccatatacctagatgacaaggatacctctacagtgaagggagagaagcatgcagagctccctatctgtgttggagttgagctattgacagacagagctccaactaaacaagctccagctcacgtaactaaacaagctccaggtcacatgaaaaaagaagctactcaagcacatggacacaaacctgcgctgacacaagccgatttcataaccaaatttcagaggaatgctggacttgtggccagtggtgtggtcaggaacatgaataaaattgggacttacgtcaaagacacggtggatgacatcctgtacccataccgcaagcgtcccaagtaaaacctagctcttgttctccttcaatcctggagtagaatagagaaaaatgtgggagcatgtaatctattacttccggagacactggcgcaggagtagcctcgcttggtttctgaggctgtggctgggatttcactgcctgtcagttcatgcctaacgctagcaggctgttgtatgcctgcctgttttggattcttgccatgttcctttggtagagcctctccgctccccagcttgcaatgcgatcttcattctgctggttcctccagcaatgtataggatgcaatgtaacaaagctataaaggagctcatcttttgcctatttgaggctatcctttggagaataataaattaataataggccgtcatttggctcc

SEQ ID NO: 67863 - protein, 246 aa, Triticum aestivum
  peptide (1)..(246): Ceres Seq. ID no. 12592884
  misc_feature (73)..(246): Homolog of NCBI NO: 15230397 NR Description: putative protein; protein id: At3g51100.1
LLNKRQRRRHHESEAPSPSTVSPRGAQITTRRRTSTPADMERAGAAPGVPAAGEGAAAAAAAPTPVAGAGVVKGRSCKGCLFYSSVLRSKGRGPVCVGVTRGIPQVPDRMVGEIELGAIQEGRNLSNFKYACAGYSIYLDDKDTSTVKGEKHAELPICVGVELLTDRAPTKQAPAHVTKQAPGHMKKEATQAHGHKPALTQADFITKFQRNAGLVASGVVRNMNKIGTYVKDTVDDILYPYRKRPK

SEQ ID NO: 67864 - protein, 207 aa, Triticum aestivum
  peptide (1)..(207): Ceres Seq. ID no. 12592885
  misc_feature (34)..(207): Homolog of NCBI NO: 15230397 NR Description: putative protein; protein id: At3g51100.1
MERAGAAPGVPAAGEGAAAAAAAPTPVAGAGVVKGRSCKGCLFYSSVLRSKGRGPVCVGVTRGIPQVPDRMVGEIELGAIQEGRNLSNFKYACAGYSIYLDDKDTSTVKGEKHAELPICVGVELLTDRAPTKQAPAHVTKQAPGHMKKEATQAHGHKPALTQADFITKFQRNAGLVASGVVRNMNKIGTYVKDTVDDILYPYRKRPK

SEQ ID NO: 67865 - protein, 137 aa, Triticum aestivum
  peptide (1)..(137): Ceres Seq. ID no. 12592886
  misc_feature (1)..(137): Homolog of NCBI NO: 15230397 NR Description: putative protein; protein id: At3g51100.1
MVGEIELGAIQEGRNLSNFKYACAGYSIYLDDKDTSTVKGEKHAELPICVGVELLTDRAPTKQAPAHVTKQAPGHMKKEATQAHGHKPALTQADFITKFQRNAGLVASGVVRNMNKIGTYVKDTVDDILYPYRKRPK

SEQ ID NO: 67866 - DNA, 786 bp, Triticum aestivum
  misc_feature (1)..(786): Ceres Seq. ID no. 12584296
aggccgtctgctccgaagctcctcctcccccgcatctctcctttcgcccccacctctctccggcgcacggctccgacgcgatggccgccccactccggcgggtcttcccctccctcggccgggccctgctctcgcctacgccggcgcggatgctctccgcggaggcctccgatgccctcgtggagatcaagcccggggagatcggcatggtctccgggatccccgaggagcacctccgccgcaaggttctaatctattcaccagctaggactgcatctcagcaaggttctggcaaagtcgggaggtggaaaatcaatttcgtgtcaacccaaaagtgggagaacccattgatgggatggacatcgactggtgatccgtatgctaatgttggtgaagctggacttacgtttgacagtgccgaatcagcgaaggcatttgctgaaaagcacggatgggaatatgtggttaggaagcgccatacacctcttctgaagcccaaaacgtatgcagagaacttcaagtggaagggccccccgaagacggaggaagcagcctaagctgtggatttgtatgttgtctggagattttcataagatgttgttttcccctgccgctcgtgctgatttcactttgttcaatacctgtcgtgcaatatgagctagaacatgtctccattaaacgtgtaataagcacgcattgcaactgaactcgtcgctcatctcatcaaaatgcttgttattagccttgcctgtaaaattccccttcacacagaatttcttggctact

SEQ ID NO: 67867 - protein, 184 aa, Triticum aestivum
  peptide (1)..(184): Ceres Seq. ID no. 12584297
  misc_feature (80)..(164): Pfam Name: ETC complex I subunit conserved region Pfam Description: ETC complex I subunit conserved region
  misc_feature (66)..(174): Homolog of NCBI NO: 31199457 NR Description: ENSANGP00000021474 [Anopheles gambiae]
  misc_feature (66)..(174): Homolog of NCBI NO: 19110803 NR Description: NADH dehydrogenase [Gallus gallus]
  misc_feature (66)..(174): Homolog of NCBI NO: 14919381 NR Description: Similar to NADH dehydrogenase (ubiquinone) Fe-S
  misc_feature (66)..(174): Homolog of NCBI NO: 13528960 NR Description: NADH dehydrogenase (ubiquinone) Fe-S protein 4
  misc_feature (66)..(174): Homolog of NCBI NO: 4505369 NR Description: NADH dehydrogenase (ubiquinone) Fe-S protein 4,
  misc_feature (43)..(174): Homolog of NCBI NO: 28461229 NR Description: NADH dehydrogenase (ubiquinone) Fe-S protein 4,
  misc_feature (23)..(174): Homolog of NCBI NO: 6754814 NR Description: NADH dehydrogenase (ubiquinone) Fe-S protein 4
  misc_feature (43)..(181): Homolog of NCBI NO: 21555571 NR Description: unknown [Arabidopsis thaliana]
  misc_feature (43)..(181): Homolog of NCBI NO: 15240784 NR Description: putative protein
  misc_feature (27)..(164): Homolog of NCBI NO: 34901114 NR Description: NADH-ubiquinone oxidoreductase 18 kDa subunit, precursor-like protein~contains ESTs
AVCSEAPPPPHLSFRPHLSPAHGSDAMAAPLRRVFPSLGRALLSPTPARMLSAEASDALVEIKPGEIGMVSGIPEEHLRRKVLIYSPARTASQQGSGKVGRWKINFVSTQKWENPLMGWTSTGDPYANVGEAGLTFDSAESAKAFAEKHGWEYVVRKRHTPLLKPKTYAENFKWKGPPKTEEAA

SEQ ID NO: 67868 - protein, 158 aa, Triticum aestivum
  peptide (1)..(158): Ceres Seq. ID no. 12584298
  misc_feature (54)..(138): Pfam Name: ETC complex I subunit conserved region Pfam Description: ETC complex I subunit conserved region
  misc_feature (40)..(148): Homolog of NCBI NO: 31199457 NR Description: ENSANGP00000021474 [Anopheles gambiae]
  misc_feature (40)..(148): Homolog of NCBI NO: 19110803 NR Description: NADH dehydrogenase [Gallus gallus]
  misc_feature (40)..(148): Homolog of NCBI NO: 13528960 NR Description: NADH dehydrogenase (ubiquinone) Fe-S protein 4
  misc_feature (40)..(148): Homolog of NCBI NO: 14919381 NR Description: Similar to NADH dehydrogenase (ubiquinone) Fe-S
  misc_feature (40)..(148): Homolog of NCBI NO: 4505369 NR Description: NADH dehydrogenase (ubiquinone) Fe-S protein 4,
  misc_feature (17)..(148): Homolog of NCBI NO: 28461229 NR Description: NADH dehydrogenase (ubiquinone) Fe-S protein 4,
  misc_feature (1)..(148): Homolog of NCBI NO: 6754814 NR Description: NADH dehydrogenase (ubiquinone) Fe-S protein 4
  misc_feature (17)..(155): Homolog of NCBI NO: 21555571 NR Description: unknown [Arabidopsis thaliana]
  misc_feature (17)..(155): Homolog of NCBI NO: 15240784 NR Description: putative protein
  misc_feature (1)..(138): Homolog of NCBI NO: 34901114 NR Description: NADH-ubiquinone oxidoreductase 18 kDa subunit, precursor-like protein~contains ESTs
MAAPLRRVFPSLGRALLSPTPARMLSAEASDALVEIKPGEIGMVSGIPEEHLRRKVLIYSPARTASQQGSGKVGRWKINFVSTQKWENPLMGWTSTGDPYANVGEAGLTFDSAESAKAFAEKHGWEYVVRKRHTPLLKPKTYAENFKWKGPPKTEEAA

SEQ ID NO: 67869 - protein, 135 aa, Triticum aestivum
  peptide (1)..(135): Ceres Seq. ID no. 12584299
  misc_feature (31)..(115): Pfam Name: ETC complex I subunit conserved region Pfam Description: ETC complex I subunit conserved region
  misc_feature (17)..(125): Homolog of NCBI NO: 31199457 NR Description: ENSANGP00000021474 [Anopheles gambiae]
  misc_feature (17)..(125): Homolog of NCBI NO: 19110803 NR Description: NADH dehydrogenase [Gallus gallus]
  misc_feature (17)..(125): Homolog of NCBI NO: 13528960 NR Description: NADH dehydrogenase (ubiquinone) Fe-S protein 4
  misc_feature (17)..(125): Homolog of NCBI NO: 14919381 NR Description: Similar to NADH dehydrogenase (ubiquinone) Fe-S
  misc_feature (17)..(125): Homolog of NCBI NO: 4505369 NR Description: NADH dehydrogenase (ubiquinone) Fe-S protein 4,
  misc_feature (1)..(125): Homolog of NCBI NO: 28461229 NR Description: NADH dehydrogenase (ubiquinone) Fe-S protein 4,
  misc_feature (1)..(125): Homolog of NCBI NO: 6754814 NR Description: NADH dehydrogenase (ubiquinone) Fe-S protein 4
  misc_feature (1)..(132): Homolog of NCBI NO: 21555571 NR Description: unknown [Arabidopsis thaliana]
  misc_feature (1)..(132): Homolog of NCBI NO: 15240784 NR Description: putative protein
  misc_feature (1)..(115): Homolog of NCBI NO: 34901114 NR Description: NADH-ubiquinone oxidoreductase 18 kDa subunit, precursor-like protein~contains ESTs
MLSAEASDALVEIKPGEIGMVSGIPEEHLRRKVLIYSPARTASQQGSGKVGRWKINFVSTQKWENPLMGWTSTGDPYANVGEAGLTFDSAESAKAFAEKHGWEYVVRKRHTPLLKPKTYAENFKWKGPPKTEEAA

SEQ ID NO: 67870 - DNA, 957 bp, Triticum aestivum
  misc_feature (1)..(957): Ceres Seq. ID no. 13591072
acttgaatgcccttgcgacgtctcctatcatggctatctataaacgccggccggccacaccatgccttctcctcctcctcctcctcctcctcgtcaacagctagccagcaagaagcagagcagctcagaaccgagcacagaccgaagcggagccaaacgaaagaagggatctaacctagccagccggcgatcgaccgagagatggcgcggtggtgtcagctggcggcggtgctgctcgccgtgtcgatggcggcgtcgacgacggtggcgcaggacgcgctgcagaccaagtgccaggaggacctgcagaagctgtcagactgcatggactacgcgacggggcacgaggacacgccgtcggccaagtgctgcgaggacacggcggacacgcagaagtcgcggcccgagtgcctctgctccatcatccagcaggtgcacagcggcagccacggcgtgcagcagctcggcctccgcttcgaccgcctcctggcccagcccgccgcctgcaagctccccaacgccaacgtttccctctgcatcaacctgctgcacctgaccccgagctcgccagactacgctctcttcgcaaatgcttccaagattactccgtccactgccgcgccagcgagagacaccgccgacggcttcaaggttccgacggggctcggttatggcgtcgtggcggcggccgtcgtctctgctgtcttctcatccatcttctgatttttggacaagcacacgctcttttatcctctccctttcttctatccttcatgtttgtttacataactctgcaagttcccacacaacgacacgatgctttagatgatctatatctactcacgtggtaagaggattcgttcggatgacttactcttgttttaccccagacaagtagatggaaagttgagacttgtgtttcttcatgtggaagtgatggtttgtagtaatatcctg

SEQ ID NO: 67871 - protein, 173 aa, Triticum aestivum
  peptide (1)..(173): Ceres Seq. ID no. 13591073
  misc_feature (31)..(112): Pfam Name: Protease inhibitor/seed storage/LTP family Pfam Description: Protease inhibitor/seed storage/LTP family
  misc_feature (9)..(153): Homolog of NCBI NO: 28269454 NR Description: putative protease inhibitor
  misc_feature (6)..(173): Homolog of NCBI NO: 24417478 NR Description: unknown [Arabidopsis thaliana]
  misc_feature (6)..(173): Homolog of NCBI NO: 18403453 NR Description: protease inhibitor/seed storage/lipid transfer
  misc_feature (7)..(112): Homolog of NCBI NO: 25406727 NR Description: protein F10O3.7 [imported] - Arabidopsis thaliana
  misc_feature (8)..(155): Homolog of NCBI NO: 15224862 NR Description: lipid transfer protein family [Arabidopsis
  misc_feature (7)..(166): Homolog of NCBI NO: 15224863 NR Description: lipid transfer protein - related [Arabidopsis
  misc_feature (1)..(173): Homolog of NCBI NO: 25553595 NR Description: OJ1656_E11.26 [Oryza sativa (japonica
  misc_feature (4)..(168): Homolog of NCBI NO: 25553602 NR Description: OJ1656_E11.34 [Oryza sativa (japonica
  misc_feature (7)..(173): Homolog of NCBI NO: 15217777 NR Description: lipid transfer protein - related [Arabidopsis
  misc_feature (7)..(173): Homolog of NCBI NO: 21553541 NR Description: lipid transfer protein, putative [Arabidopsis
MARWCQLAAVLLAVSMAASTTVAQDALQTKCQEDLQKLSDCMDYATGHEDTPSAKCCEDTADTQKSRPECLCSIIQQVHSGSHGVQQLGLRFDRLLAQPAACKLPNANVSLCINLLHLTPSSPDYALFANASKITPSTAAPARDTADGFKVPTGLGYGVVAAAVVSAVFSSIF

SEQ ID NO: 67872 - protein, 164 aa, Triticum aestivum
  peptide (1)..(164): Ceres Seq. ID no. 13591074
  misc_feature (47)..(113): Pfam Name: TT viral orf 1 Pfam Description: TT viral orf 1
MPSPPPPPPPRQQLASKKQSSSEPSTDRSGAKRKKGSNLASRRSTERWRGGVSWRRCCSPCRWRRRRRWRRTRCRPSARRTCRSCQTAWTTRRGTRTRRRPSAARTRRTRRSRGPSASAPSSSRCTAAATACSSSASASTASWPSPPPASSPTPTFPSASTCCT

SEQ ID NO: 67873 - protein, 158 aa, Triticum aestivum
  peptide (1)..(158): Ceres Seq. ID no. 13591075
  misc_feature (16)..(97): Pfam Name: Protease inhibitor/seed storage/LTP family Pfam Description: Protease inhibitor/seed storage/LTP family
  misc_feature (1)..(138): Homolog of NCBI NO: 28269454 NR Description: putative protease inhibitor
  misc_feature (1)..(158): Homolog of NCBI NO: 24417478 NR Description: unknown [Arabidopsis thaliana]
  misc_feature (1)..(158): Homolog of NCBI NO: 18403453 NR Description: protease inhibitor/seed storage/lipid transfer
  misc_feature (1)..(97): Homolog of NCBI NO: 25406727 NR Description: protein F10O3.7 [imported] - Arabidopsis thaliana
  misc_feature (1)..(140): Homolog of NCBI NO: 15224862 NR Description: lipid transfer protein family [Arabidopsis
  misc_feature (1)..(151): Homolog of NCBI NO: 15224863 NR Description: lipid transfer protein - related [Arabidopsis
  misc_feature (1)..(158): Homolog of NCBI NO: 25553595 NR Description: OJ1656_E11.26 [Oryza sativa (japonica
  misc_feature (1)..(153): Homolog of NCBI NO: 25553602 NR Description: OJ1656_E11.34 [Oryza sativa (japonica
  misc_feature (1)..(158): Homolog of NCBI NO: 15217777 NR Description: lipid transfer protein - related [Arabidopsis
  misc_feature (1)..(158): Homolog of NCBI NO: 21553541 NR Description: lipid transfer protein, putative [Arabidopsis
MAASTTVAQDALQTKCQEDLQKLSDCMDYATGHEDTPSAKCCEDTADTQKSRPECLCSIIQQVHSGSHGVQQLGLRFDRLLAQPAACKLPNANVSLCINLLHLTPSSPDYALFANASKITPSTAAPARDTADGFKVPTGLGYGVVAAAVVSAVFSSIF

SEQ ID NO: 67874 - DNA, 1286 bp, Triticum aestivum
  misc_feature (1)..(1286): Ceres Seq. ID no. 13654238
agaacatcctaatcgaaaaaaccgctccccgccgccggttcagtcccctccgccggcggcgagatgtccttcttcttccgcgcggcgtcgcggccgcgttcgtcgcagcaagacctcgtgcgctccatcaaggactccctcctcgcgctcgacaccaagaccggcgccaaggcccttgaagatgttgagaaaaacatattcaccttgagacagacactttctggtgatggagaagttgaaccaaaccaggatcatgtgttacagatagcccttgaaatttgcaaggagggtgtcctttctctttttgttcagaacctgccttcgctgggttgggagggtagaaaggatcttgcccactgctggtgcattttgttgaggcagaaggttgatgaaagtcactgctgcgtgcagtatatcgaaaatcatgttgatcttctagatttccttgttgtatgctacaagaacttggaagtcgcattgaactgtggaaacatgttgcgagaatgcataaaatatccctcacttgcaaaatatatattggagtcaaatagcttcgagttgtttttccagtatgttgaattgccaaactttgatattgcttctgatgctctgaatacgttcaaggatttgctcactagacatgaagatgcagtctccgagtttctcatttcccattatgaacagttctttgaactctacaaaaggcttttaacttcagataattatgtgacaagaagacaatcagtgaagtttctttcagagtttctgttggaggccccaaatgctcagataatgaagcggtacattttggaagttcgttacttgaacattatgatgggtctactaaaggattcaagcaaaaatatcaggatatgttcctttcacatatttaaggtatttgttgccaatccaaacaagcctcgtgatatcattcaagttttggtagacaaccacaaagaattattgaagttactccatgctcttcctgcaagcaagggtgaagatgaacaacttgacgaggagcgagacttaattatcaaggaaatcgagaagctcgtgctcttgtcagtatagaccctcaagaaattcaaaattaccctttgaaaaaaaaaacagtggtcgagaaaggcaatccatttcttcctgtgtaatgtgataccctgtatagaattgtctagtgttgttatcatatttacagaaacagctcgtcattccacaagagcatgaagcattgctgcatgcatatatggttcaaacaaatctgccgcaccagattcgatatatat

SEQ ID NO: 67875 - protein, 336 aa, Triticum aestivum
  peptide (1)..(336): Ceres Seq. ID no. 15219632
  misc_feature (33)..(332): Pfam Name: Mo25 protein family Pfam Description: Mo25 protein family
  misc_feature (10)..(331): Homolog of NCBI NO: 17647657 NR Description: Mo25 CG4083-PA [Drosophila melanogaster]
  misc_feature (10)..(331): Homolog of NCBI NO: 1794137 NR Description: DMO25 [Drosophila melanogaster]
  misc_feature (10)..(331): Homolog of NCBI NO: 18044843 NR Description: MO25 protein [Mus musculus]
  misc_feature (10)..(331): Homolog of NCBI NO: 31982582 NR Description: MO25 protein; calcium binding protein, 39 kDa
  misc_feature (10)..(331): Homolog of NCBI NO: 31204803 NR Description: ENSANGP00000021363 [Anopheles gambiae]
  misc_feature (10)..(331): Homolog of NCBI NO: 34877516 NR Description: similar to MO25 protein [Rattus norvegicus]
  misc_feature (10)..(331): Homolog of NCBI NO: 7706481 NR Description: MO25 protein [Homo sapiens]
  misc_feature (1)..(331): Homolog of NCBI NO: 18419772 NR Description: expressed protein [Arabidopsis thaliana]
  misc_feature (1)..(336): Homolog of NCBI NO: 34898912 NR Description: hypothetical protein, similar to Arabidopsis
  misc_feature (1)..(336): Homolog of NCBI NO: 33146499 NR Description: unknown protein [Oryza sativa (japonica
MSFFFRAASRPRSSQQDLVRSIKDSLLALDTKTGAKALEDVEKNIFTLRQTLSGDGEVEPNQDHVLQIALEICKEGVLSLFVQNLPSLGWEGRKDLAHCWCILLRQKVDESHCCVQYIENHVDLLDFLVVCYKNLEVALNCGNMLRECIKYPSLAKYILESNSFELFFQYVELPNFDIASDALNTFKDLLTRHEDAVSEFLISHYEQFFELYKRLLTSDNYVTRRQSVKFLSEFLLEAPNAQIMKRYILEVRYLNIMMGLLKDSSKNIRICSFHIFKVFVANPNKPRDIIQVLVDNHKELLKLLHALPASKGEDEQLDEERDLIIKEIEKLVLLSV

SEQ ID NO: 67876 - protein, 193 aa, Triticum aestivum
  peptide (1)..(193): Ceres Seq. ID no. 15219633
  misc_feature (1)..(189): Pfam Name: Mo25 protein family Pfam Description: Mo25 protein family
  misc_feature (1)..(188): Homolog of NCBI NO: 17647657 NR Description: Mo25 CG4083-PA [Drosophila melanogaster]
  misc_feature (1)..(188): Homolog of NCBI NO: 1794137 NR Description: DMO25 [Drosophila melanogaster]
  misc_feature (1)..(188): Homolog of NCBI NO: 18044843 NR Description: MO25 protein [Mus musculus]
  misc_feature (1)..(188): Homolog of NCBI NO: 31982582 NR Description: MO25 protein; calcium binding protein, 39 kDa
  misc_feature (1)..(188): Homolog of NCBI NO: 31204803 NR Description: ENSANGP00000021363 [Anopheles gambiae]
  misc_feature (1)..(188): Homolog of NCBI NO: 34877516 NR Description: similar to MO25 protein [Rattus norvegicus]
  misc_feature (1)..(188): Homolog of NCBI NO: 7706481 NR Description: MO25 protein [Homo sapiens]
  misc_feature (1)..(188): Homolog of NCBI NO: 18419772 NR Description: expressed protein [Arabidopsis thaliana]
  misc_feature (1)..(193): Homolog of NCBI NO: 34898912 NR Description: hypothetical protein, similar to Arabidopsis
  misc_feature (1)..(193): Homolog of NCBI NO: 33146499 NR Description: unknown protein [Oryza sativa (japonica
MLRECIKYPSLAKYILESNSFELFFQYVELPNFDIASDALNTFKDLLTRHEDAVSEFLISHYEQFFELYKRLLTSDNYVTRRQSVKFLSEFLLEAPNAQIMKRYILEVRYLNIMMGLLKDSSKNIRICSFHIFKVFVANPNKPRDIIQVLVDNHKELLKLLHALPASKGEDEQLDEERDLIIKEIEKLVLLSV

SEQ ID NO: 67877 - DNA, 1321 bp, Triticum aestivum
  misc_feature (1)..(1321): Ceres Seq. ID no. 13596362
cacactccatgcactagtactctgcaggcactgagctcatcaaggtagcttagctaggatcaatggcgtcgagcaggacagcagcgatgctggtcctcgtggccgcggtgctgtgccctgcagccttgtccaagccgtcggcggcgttcatctctatgcccaccgaccacgtcggtggccgtattcctcccgtctcccccgccgatggactcgccttcgacttccatgccgactcctgcccgcagttgcaggacgtggtgcgctccgccgtggagaccgcgctccagagggagatcgccctcgccgccggcctccttcgcatcttcttccacgactgcttccctcagggctgtgacgcgtcggtccttctgacgggagacggcagcgagctccagttgccgccgaatctgacgctccaaccgcgggcgctgcagctcattgagtccatccgtgcccaggtgcacgccgcctgcggacccgtcgtctcctgcgccgacatcacggccctcgccacccgcgatgccgttgccttctccgggggtcagggctacgacgtgccgctcggcaggctcgacagcctcgcgccggcgccgagctcggccgtcttcgatctcccccaggccagctccaacgcctccacgctcatcgacgtcttcgagacccgcaacctcgacaatgtcgacctcgtcacgctctcaggtggccacaccatcgggaagggccactgcagctccttctccaaccgcttctccgaggactccgacttcgtccgaagcctcgcctccaactgctccagcgacttcaaccggctgcaggacctcgacgtcaccaccccggacgtgttcgacatcaagtacttcaccaacctgcaacagggaaagggggtgttcacctccgaccagaagctcaccgcggactggcgcaccgaatgggttgtcaacggctttgccgggaaccactggtggttcttcggccagtttgctgcttccatgaccaagctcgggaatctccaggggccccaaggaaacgtcggcgagatccgtcgcaacagctgcttcgtgcgcaatggacagagcatcctcaccaccaccagcgacgaggggctcgccgcctctgcttgagatcaccgatgttagcgagattaatgtcttaataagagctcgctagctaatgtagcccatgttattctagatttactcttgtttaaaatcatattatggcactttgttctgggactcctaaaaggcgcgcttcgcctcggtgtgctataattcttttatagggccaaaaaaaaaaaaaaaaaagcttatcgataccgtcg

SEQ ID NO: 67878 - protein, 352 aa, Triticum aestivum
  peptide (1)..(352): Ceres Seq. ID no. 13596363
  misc_feature (66)..(298): Pfam Name: Peroxidase Pfam Description: Peroxidase
  misc_feature (26)..(338): Homolog of NCBI NO: 1084393 NR Description: peroxidase (EC 1.11.1.7) precursor - parsley
  misc_feature (49)..(338): Homolog of NCBI NO: 7433070 NR Description: probable peroxidase (EC 1.11.1.7), cationic -
  misc_feature (1)..(335): Homolog of NCBI NO: 7433075 NR Description: probable peroxidase (EC 1.11.1.-) 1 precursor,
  misc_feature (49)..(352): Homolog of NCBI NO: 38345506 NR Description: OSJNBa0039K24.4 [Oryza sativa (japonica
  misc_feature (42)..(352): Homolog of NCBI NO: 38345507 NR Description: OSJNBa0039K24.8 [Oryza sativa (japonica
  misc_feature (42)..(352): Homolog of NCBI NO: 5777627 NR Description: CAA303715.1 protein [Oryza sativa]
  misc_feature (43)..(351): Homolog of NCBI NO: 38345508 NR Description: OSJNBa0039K24.10 [Oryza sativa (japonica
  misc_feature (45)..(352): Homolog of NCBI NO: 5777624 NR Description: CAA303712.1 protein [Oryza sativa]
  misc_feature (43)..(352): Homolog of NCBI NO: 38345511 NR Description: OSJNBa0039K24.14 [Oryza sativa (japonica
  misc_feature (1)..(352): Homolog of NCBI NO: 5777628 NR Description: CAA303716.1 protein [Oryza sativa]
MASSRTAAMLVLVAAVLCPAALSKPSAAFISMPTDHVGGRIPPVSPADGLAFDFHADSCPQLQDVVRSAVETALQREIALAAGLLRIFFHDCFPQGCDASVLLTGDGSELQLPPNLTLQPRALQLIESIRAQVHAACGPVVSCADITALATRDAVAFSGGQGYDVPLGRLDSLAPAPSSAVFDLPQASSNASTLIDVFETRNLDNVDLVTLSGGHTIGKGHCSSFSNRFSEDSDFVRSLASNCSSDFNRLQDLDVTTPDVFDIKYFTNLQQGKGVFTSDQKLTADWRTEWVVNGFAGNHWWFFGQFAASMTKLGNLQGPQGNVGEIRRNSCFVRNGQSILTTTSDEGLAASA

SEQ ID NO: 67879 - protein, 344 aa, Triticum aestivum
  peptide (1)..(344): Ceres Seq. ID no. 13596364
  misc_feature (58)..(290): Pfam Name: Peroxidase Pfam Description: Peroxidase
  misc_feature (18)..(330): Homolog of NCBI NO: 1084393 NR Description: peroxidase (EC 1.11.1.7) precursor - parsley
  misc_feature (41)..(330): Homolog of NCBI NO: 7433070 NR Description: probable peroxidase (EC 1.11.1.7), cationic -
  misc_feature (1)..(327): Homolog of NCBI NO: 7433075 NR Description: probable peroxidase (EC 1.11.1.-) 1 precursor,
  misc_feature (41)..(344): Homolog of NCBI NO: 38345506 NR Description: OSJNBa0039K24.4 [Oryza sativa (japonica
  misc_feature (34)..(344): Homolog of NCBI NO: 38345507 NR Description: OSJNBa0039K24.8 [Oryza sativa (japonica
  misc_feature (34)..(344): Homolog of NCBI NO: 5777627 NR Description: CAA303715.1 protein [Oryza sativa]
  misc_feature (35)..(343): Homolog of NCBI NO: 38345508 NR Description: OSJNBa0039K24.10 [Oryza sativa (japonica
  misc_feature (37)..(344): Homolog of NCBI NO: 5777624 NR Description: CAA303712.1 protein [Oryza sativa]
  misc_feature (35)..(344): Homolog of NCBI NO: 38345511 NR Description: OSJNBa0039K24.14 [Oryza sativa (japonica
  misc_feature (1)..(344): Homolog of NCBI NO: 5777628 NR Description: CAA303716.1 protein [Oryza sativa]
MLVLVAAVLCPAALSKPSAAFISMPTDHVGGRIPPVSPADGLAFDFHADSCPQLQDVVRSAVETALQREIALAAGLLRIFFHDCFPQGCDASVLLTGDGSELQLPPNLTLQPRALQLIESIRAQVHAACGPVVSCADITALATRDAVAFSGGQGYDVPLGRLDSLAPAPSSAVFDLPQASSNASTLIDVFETRNLDNVDLVTLSGGHTIGKGHCSSFSNRFSEDSDFVRSLASNCSSDFNRLQDLDVTTPDVFDIKYFTNLQQGKGVFTSDQKLTADWRTEWVVNGFAGNHWWFFGQFAASMTKLGNLQGPQGNVGEIRRNSCFVRNGQSILTTTSDEGLAASA

SEQ ID NO: 67880 - protein, 321 aa, Triticum aestivum
  peptide (1)..(321): Ceres Seq. ID no. 13596365
  misc_feature (35)..(267): Pfam Name: Peroxidase Pfam Description: Peroxidase
  misc_feature (1)..(307): Homolog of NCBI NO: 1084393 NR Description: peroxidase (EC 1.11.1.7) precursor - parsley
  misc_feature (18)..(307): Homolog of NCBI NO: 7433070 NR Description: probable peroxidase (EC 1.11.1.7), cationic -
  misc_feature (1)..(304): Homolog of NCBI NO: 7433075 NR Description: probable peroxidase (EC 1.11.1.-) 1 precursor,
  misc_feature (18)..(321): Homolog of NCBI NO: 38345506 NR Description: OSJNBa0039K24.4 [Oryza sativa (japonica
  misc_feature (11)..(321): Homolog of NCBI NO: 38345507 NR Description: OSJNBa0039K24.8 [Oryza sativa (japonica
  misc_feature (11)..(321): Homolog of NCBI NO: 5777627 NR Description: CAA303715.1 protein [Oryza sativa]
  misc_feature (12)..(320): Homolog of NCBI NO: 38345508 NR Description: OSJNBa0039K24.10 [Oryza sativa (japonica
  misc_feature (14)..(321): Homolog of NCBI NO: 5777624 NR Description: CAA303712.1 protein [Oryza sativa]
  misc_feature (12)..(321): Homolog of NCBI NO: 38345511 NR Description: OSJNBa0039K24.14 [Oryza sativa (japonica
  misc_feature (1)..(321): Homolog of NCBI NO: 5777628 NR Description: CAA303716.1 protein [Oryza sativa]
MPTDHVGGRIPPVSPADGLAFDFHADSCPQLQDVVRSAVETALQREIALAAGLLRIFFHDCFPQGCDASVLLTGDGSELQLPPNLTLQPRALQLIESIRAQVHAACGPVVSCADITALATRDAVAFSGGQGYDVPLGRLDSLAPAPSSAVFDLPQASSNASTLIDVFETRNLDNVDLVTLSGGHTIGKGHCSSFSNRFSEDSDFVRSLASNCSSDFNRLQDLDVTTPDVFDIKYFTNLQQGKGVFTSDQKLTADWRTEWVVNGFAGNHWWFFGQFAASMTKLGNLQGPQGNVGEIRRNSCFVRNGQSILTTTSDEGLAASA

SEQ ID NO: 67881 - DNA, 1406 bp, Triticum aestivum
  misc_feature (1)..(1406): Ceres Seq. ID no. 13654451
agaacatcctaatcgaaaaattccaagcaccacctgctcctctcctccaacccacgcgcccacgcacgcactaactacctcccttccccggagctcggcggagagacaagaagccaagccaccgctacgtacgccatgggcgaggacaagaaggagaagccgggcaaggcagacggtggcgaccagaagaaggacgccgcggcggcggcccagcccatcgtgctcaaggtcgacttgcattgcgccggctgcgccaccaaggttaagcgggccatcaagaacgcccctggcgtggagtcggttaagactgacacggcggccaacaaggtggtcgtcaccggcgccgcggacgcggcggagatcaaagagcgcatcgaggccaggaccaagaagcccgttcaaatcgtctccgccggagccgcctcgcccaacaaggacaacaaggagaaagacaaggacaagaagcccgacgccggcgataagccggagaaagagaagagcaaggcagcagacaaggagaagggcggtgccggtgccggtgctgakmawaaagagaawaawgtggawaccgccgacaagcccaaggaggaggagaagaaaccaaaggagcccaaagaggagacggtgacgctcaagatcaggctgcactgcgacggctgcatcgaccgcatcaagcggcgcgtcaacaagatcaaaggagtgaaggaagtgacggtggacgctgccaaggacctggtgaaggtgactggcaccatggacgcagccgccctgccgggctacctcagggacaagctcagtcggccggtggaggtggtcacccccggcaagaaggacggcgacaagaaagacgacggggagaagaagaaggacaagggcgctggcgagggcggcgaaaagaagaaggacggcggtggcggcggcgaggacaagaaggacaagtccgcggcgtccgtggcgccgatgcccatggcggacccgagcatgtaccagatgcccccacagtacggctacatgccgtaccccccggcgcccgtcggctactacggccccgccgccccgccgccgaaccccggcttctacccgaacgccgggccccagtacccgccgccctacgcgacgtaccccgcccacgcgccccagatgttcagcgacgagaaccccaacgcctgctccgtcatgtgagcagccacgccacgccacgccacgagccgacgagcacgacgcgaagcccaggctcgctgccgcagcatcagttatcaaaccagagaagcacggcctgggcttagcgcgcggtaccattagcctagctagcagctggtagttagcttagcgcaccgagaattagcagacatgtaaatggcgacagcgatcccgtcccgcgatgttaatgtaatgttccacgatcc

SEQ ID NO: 67882 - protein, 348 aa, Triticum aestivum
  peptide (1)..(348): Ceres Seq. ID no. 15219655
  misc_feature (164)..(226): Pfam Name: Heavy-metal-associated domain Pfam Description: Heavy-metal-associated domain
  misc_feature (52)..(188): Homolog of NCBI NO: 29367499 NR Description: unknown [Oryza sativa (japonica cultivar-group)]
  misc_feature (282)..(348): Homolog of NCBI NO: 15242741 NR Description: heavy-metal-associated domain-containing protein
  misc_feature (1)..(303): Homolog of NCBI NO: 15242741 NR Description: heavy-metal-associated domain-containing protein
  misc_feature (1)..(348): Homolog of NCBI NO: 37534752 NR Description: putative metal-binding protein
  misc_feature (137)..(137): Xaa is any aa, unknown or other
  misc_feature (138)..(138): Xaa is any aa, unknown or other
  misc_feature (141)..(141): Xaa is any aa, unknown or other
  misc_feature (142)..(142): Xaa is any aa, unknown or other
  misc_feature (144)..(144): Xaa is any aa, unknown or other
MGEDKKEKPGKADGGDQKKDAAAAAQPIVLKVDLHCAGCATKVKRAIKNAPGVESVKTDTAANKVVVTGAADAAEIKERIEARTKKPVQIVSAGAASPNKDNKEKDKDKKPDAGDKPEKEKSKAADKEKGGAGAGAXXKEXXVXTADKPKEEEKKPKEPKEETVTLKIRLHCDGCIDRIKRRVNKIKGVKEVTVDAAKDLVKVTGTMDAAALPGYLRDKLSRPVEVVTPGKKDGDKKDDGEKKKDKGAGEGGEKKKDGGGGGEDKKDKSAASVAPMPMADPSMYQMPPQYGYMPYPPAPVGYYGPAAPPPNPGFYPNAGPQYPPPYATYPAHAPQMFSDENPNACSVM

SEQ ID NO: 67883 - protein, 208 aa, Triticum aestivum
  peptide (1)..(208): Ceres Seq. ID no. 15219656
  misc_feature (4)..(208): Homolog of NCBI NO: 5821151 NR Description: RNA binding protein [Homo sapiens]
  misc_feature (3)..(208): Homolog of NCBI NO: 30424862 NR Description: RIKEN cDNA 5033413A03 [Mus musculus]
  misc_feature (3)..(208): Homolog of NCBI NO: 28972153 NR Description: mKIAA0324 protein [Mus musculus]
  misc_feature (9)..(208): Homolog of NCBI NO: 19923466 NR Description: splicing coactivator subunit SRm300
  misc_feature (9)..(208): Homolog of NCBI NO: 7512967 NR Description: hypothetical protein KIAA0324 - human (fragment)
  misc_feature (9)..(208): Homolog of NCBI NO: 6634015 NR Description: KIAA0324 protein [Homo sapiens]
  misc_feature (9)..(208): Homolog of NCBI NO: 5821151 NR Description: RNA binding protein [Homo sapiens]
  misc_feature (9)..(208): Homolog of NCBI NO: 6649242 NR Description: splicing coactivator subunit SRm300 [Homo sapiens]
  misc_feature (9)..(208): Homolog of NCBI NO: 30424862 NR Description: RIKEN cDNA 5033413A03 [Mus musculus]
  misc_feature (9)..(208): Homolog of NCBI NO: 28972153 NR Description: mKIAA0324 protein [Mus musculus]
  misc_feature (182)..(182): Xaa is any aa, unknown or other
  misc_feature (183)..(183): Xaa is any aa, unknown or other
  misc_feature (186)..(186): Xaa is any aa, unknown or other
  misc_feature (187)..(187): Xaa is any aa, unknown or other
  misc_feature (189)..(189): Xaa is any aa, unknown or other
EHPNRKIPSTTCSSPPTHAPTHALTTSLPRSSAERQEAKPPLRTPWARTRRRSRARQTVATRRRTPRRRPSPSCSRSTCIAPAAPPRLSGPSRTPLAWSRLRLTRRPTRWSSPAPRTRRRSKSASRPGPRSPFKSSPPEPPRPTRTTRRKTRTRSPTPAISRRKRRARQQTRRRAVPVPVLXXKRXXWXPPTSPRRRRRNQRSPKRRR

SEQ ID NO: 67884 - DNA, 1419 bp, Triticum aestivum; identical to SEQ ID NO: 65792
  misc_feature (1)..(1419): Ceres Seq. ID no. 13654452

SEQ ID NO: 67885 - protein, 358 aa, Triticum aestivum; identical to SEQ ID NO: 65793
  peptide (1)..(358): Ceres Seq. ID no. 15219657
  misc_feature (187)..(249): Pfam Name: bZIP transcription factor Pfam Description: bZIP transcription factor
  misc_feature (187)..(249): Pfam Name: bZIP transcription factor Pfam Description: bZIP transcription factor
  misc_feature (49)..(337): Homolog of NCBI NO: 21553831 NR Description: transcriptional activator RF2a, putative
  misc_feature (49)..(337): Homolog of NCBI NO: 15221391 NR Description: bZIP protein [Arabidopsis thaliana]
  misc_feature (83)..(324): Homolog of NCBI NO: 18400998 NR Description: VirE2-interacting protein VIP1 [Arabidopsis
  misc_feature (83)..(324): Homolog of NCBI NO: 7258340 NR Description: VirE2-interacting protein VIP1 [Arabidopsis
  misc_feature (83)..(324): Homolog of NCBI NO: 21553989 NR Description: VirE2-interacting protein VIP1 [Arabidopsis
  misc_feature (49)..(337): Homolog of NCBI NO: 21553831 NR Description: transcriptional activator RF2a, putative
  misc_feature (83)..(324): Homolog of NCBI NO: 18400998 NR Description: VirE2-interacting protein VIP1 [Arabidopsis
  misc_feature (83)..(324): Homolog of NCBI NO: 21553989 NR Description: VirE2-interacting protein VIP1 [Arabidopsis
  misc_feature (151)..(358): Homolog of NCBI NO: 29367343 NR Description: bZIP-like protein [Oryza sativa (japonica
  misc_feature (169)..(358): Homolog of NCBI NO: 19401702 NR Description: susceptibility transcription factor RVS1 [Oryza
  misc_feature (78)..(353): Homolog of NCBI NO: 2921823 NR Description: shoot-forming PKSF1 [Paulownia kawakamii]
  misc_feature (64)..(316): Homolog of NCBI NO: 8777512 NR Description: bZIP transcriptional activator RSG [Nicotiana
  misc_feature (113)..(355): Homolog of NCBI NO: 34394739 NR Description: putative transcription activator RF2a
  misc_feature (83)..(324): Homolog of NCBI NO: 7258340 NR Description: VirE2-interacting protein VIP1 [Arabidopsis
  misc_feature (49)..(337): Homolog of NCBI NO: 15221391 NR Description: bZIP protein [Arabidopsis thaliana]
  misc_feature (113)..(355): Homolog of NCBI NO: 34394739 NR Description: putative transcription activator RF2a
  misc_feature (64)..(316): Homolog of NCBI NO: 8777512 NR Description: bZIP transcriptional activator RSG [Nicotiana
  misc_feature (78)..(353): Homolog of NCBI NO: 2921823 NR Description: shoot-forming PKSF1 [Paulownia kawakamii]
  misc_feature (169)..(358): Homolog of NCBI NO: 19401702 NR Description: susceptibility transcription factor RVS1 [Oryza
  misc_feature (151)..(358): Homolog of NCBI NO: 29367343 NR Description: bZIP-like protein [Oryza sativa (japonica

SEQ ID NO: 67886 - protein, 332 aa, Triticum aestivum; identical to SEQ ID NO: 65794
  peptide (1)..(332): Ceres Seq. ID no. 15219658
  misc_feature (161)..(223): Pfam Name: bZIP transcription factor Pfam Description: bZIP transcription factor
  misc_feature (161)..(223): Pfam Name: bZIP transcription factor Pfam Description: bZIP transcription factor
  misc_feature (23)..(311): Homolog of NCBI NO: 21553831 NR Description: transcriptional activator RF2a, putative
  misc_feature (23)..(311): Homolog of NCBI NO: 15221391 NR Description: bZIP protein [Arabidopsis thaliana]
  misc_feature (57)..(298): Homolog of NCBI NO: 18400998 NR Description: VirE2-interacting protein VIP1 [Arabidopsis
  misc_feature (57)..(298): Homolog of NCBI NO: 7258340 NR Description: VirE2-interacting protein VIP1 [Arabidopsis
  misc_feature (57)..(298): Homolog of NCBI NO: 21553989 NR Description: VirE2-interacting protein VIP1 [Arabidopsis
  misc_feature (23)..(311): Homolog of NCBI NO: 21553831 NR Description: transcriptional activator RF2a, putative
  misc_feature (57)..(298): Homolog of NCBI NO: 18400998 NR Description: VirE2-interacting protein VIP1 [Arabidopsis
  misc_feature (57)..(298): Homolog of NCBI NO: 21553989 NR Description: VirE2-interacting protein VIP1 [Arabidopsis
  misc_feature (125)..(332): Homolog of NCBI NO: 29367343 NR Description: bZIP-like protein [Oryza sativa (japonica
  misc_feature (143)..(332): Homolog of NCBI NO: 19401702 NR Description: susceptibility transcription factor RVS1 [Oryza
  misc_feature (52)..(327): Homolog of NCBI NO: 2921823 NR Description: shoot-forming PKSF1 [Paulownia kawakamii]
  misc_feature (38)..(290): Homolog of NCBI NO: 8777512 NR Description: bZIP transcriptional activator RSG [Nicotiana
  misc_feature (87)..(329): Homolog of NCBI NO: 34394739 NR Description: putative transcription activator RF2a
  misc_feature (57)..(298): Homolog of NCBI NO: 7258340 NR Description: VirE2-interacting protein VIP1 [Arabidopsis
  misc_feature (23)..(311): Homolog of NCBI NO: 15221391 NR Description: bZIP protein [Arabidopsis thaliana]
  misc_feature (87)..(329): Homolog of NCBI NO: 34394739 NR Description: putative transcription activator RF2a
  misc_feature (38)..(290): Homolog of NCBI NO: 8777512 NR Description: bZIP transcriptional activator RSG [Nicotiana
  misc_feature (52)..(327): Homolog of NCBI NO: 2921823 NR Description: shoot-forming PKSF1 [Paulownia kawakamii]
  misc_feature (143)..(332): Homolog of NCBI NO: 19401702 NR Description: susceptibility transcription factor RVS1 [Oryza
  misc_feature (125)..(332): Homolog of NCBI NO: 29367343 NR Description: bZIP-like protein [Oryza sativa (japonica

SEQ ID NO: 67887 - protein, 258 aa, Triticum aestivum; identical to SEQ ID NO: 65795
  peptide (1)..(258): Ceres Seq. ID no. 15219659
  misc_feature (87)..(149): Pfam Name: bZIP transcription factor Pfam Description: bZIP transcription factor
  misc_feature (87)..(149): Pfam Name: bZIP transcription factor Pfam Description: bZIP transcription factor
  misc_feature (1)..(237): Homolog of NCBI NO: 21553831 NR Description: transcriptional activator RF2a, putative
  misc_feature (1)..(237): Homolog of NCBI NO: 15221391 NR Description: bZIP protein [Arabidopsis thaliana]
  misc_feature (1)..(224): Homolog of NCBI NO: 18400998 NR Description: VirE2-interacting protein VIP1 [Arabidopsis
  misc_feature (1)..(224): Homolog of NCBI NO: 7258340 NR Description: VirE2-interacting protein VIP1 [Arabidopsis
  misc_feature (1)..(224): Homolog of NCBI NO: 21553989 NR Description: VirE2-interacting protein VIP1 [Arabidopsis
  misc_feature (1)..(237): Homolog of NCBI NO: 21553831 NR Description: transcriptional activator RF2a, putative
  misc_feature (1)..(224): Homolog of NCBI NO: 18400998 NR Description: VirE2-interacting protein VIP1 [Arabidopsis
  misc_feature (1)..(224): Homolog of NCBI NO: 21553989 NR Description: VirE2-interacting protein VIP1 [Arabidopsis
  misc_feature (51)..(258): Homolog of NCBI NO: 29367343 NR Description: bZIP-like protein [Oryza sativa (japonica
  misc_feature (69)..(258): Homolog of NCBI NO: 19401702 NR Description: susceptibility transcription factor RVS1 [Oryza
  misc_feature (1)..(253): Homolog of NCBI NO: 2921823 NR Description: shoot-forming PKSF1 [Paulownia kawakamii]
  misc_feature (1)..(216): Homolog of NCBI NO: 8777512 NR Description: bZIP transcriptional activator RSG [Nicotiana
  misc_feature (13)..(255): Homolog of NCBI NO: 34394739 NR Description: putative transcription activator RF2a
  misc_feature (1)..(224): Homolog of NCBI NO: 7258340 NR Description: VirE2-interacting protein VIP1 [Arabidopsis
  misc_feature (1)..(237): Homolog of NCBI NO: 15221391 NR Description: bZIP protein [Arabidopsis thaliana]
  misc_feature (13)..(255): Homolog of NCBI NO: 34394739 NR Description: putative transcription activator RF2a
  misc_feature (1)..(216): Homolog of NCBI NO: 8777512 NR Description: bZIP transcriptional activator RSG [Nicotiana
  misc_feature (1)..(253): Homolog of NCBI NO: 2921823 NR Description: shoot-forming PKSF1 [Paulownia kawakamii]
  misc_feature (69)..(258): Homolog of NCBI NO: 19401702 NR Description: susceptibility transcription factor RVS1 [Oryza
  misc_feature (51)..(258): Homolog of NCBI NO: 29367343 NR Description: bZIP-like protein [Oryza sativa (japonica

SEQ ID NO: 67888 - DNA, 1316 bp, Triticum aestivum
  misc_feature (1)..(1316): Ceres Seq. ID no. 15225352
ttttttcttgacgcccccaaaaccctagccgcttcttctctctgcccactccccgcgcgagccacagacggccgccgcctcacaccgctgagacctcctcctccccagtcaagcgcgagagtataccccagaataacaccaccatggccggcggcaagatccagaagaagcgacacggcggaggtggcggcggcggcggcgcgcggctgcagggcgggatcccgttcgagaagtccaagggccagcacatcctgcggaacccggcgctggtggactccatcatcgccaaggccggcctcaagccgaccgacaccgtcctcgagatcgggcccggaacgggaaatctcaccaagcggctgctcgaggccggcgtcaaggccgttgtcgccgtcgagctcgacccgcggatggttctcgagctgagccgccggttccaggggcaccccctctcctcacgcctcaaggttatccaaggagatgttcttaaatgtgatcttccgtacttcgatatctgcgtggcaaacatcccataccagatatcgtccccccttacattcaagcttctgtcacaccgtccgatcttcaggtgtgctgtgatcatgtttcaacgtgaatttgccatgagacttgtagcacagcctggagacactctgtactgccgtctgtcagtgaacgtgcagctcctatctcgcgtgtcacatctgctgaaggttgggcggaataacttcaggcctccacccaaggtagattcttcagttgttcgcatcgagccaaggaaacccctccctcctgtcagcttcaaagagtgggatggacttgtaaggatttgtttcaatcggaaaaacaaaactctgggctcccttttcaagcagaagcgcgtccttgagttgctagagaagaattacaagacaatgcaatctctccaacttgcccaagaatctgaaatgggcgaggagaagatgtcacctgatgatgttgcggtgctagccaatatggtcgaggacctgagcatggagatgagtgatgagaaagaggacgacgacatggaaatggatgatgctgacgtggcagatggccgtgctagcttcagagaaaagattatgggtatattgcagcagggtgattttgcagagaagaggtcttccaagctgagccaagttgatttcctctacttgctgtctctgttcaacaaagcaggtatacatttttcgtgagggcccgcttagtcagctagcttgagatggatcttgaaaagccatgtttattttttggtttatgttatgtaagtcctatataagttaaaagtcatctttgtg

SEQ ID NO: 67889 - protein, 356 aa, Triticum aestivum
  peptide (1)..(356): Ceres Seq. ID no. 15225353
  misc_feature (1)..(305): Homolog of NCBI NO: 34854204 NR Description: similar to RIKEN cDNA 1500031M22 [Rattus
  misc_feature (316)..(356): Homolog of NCBI NO: 21358017 NR Description: CG11837-PA [Drosophila melanogaster]
  misc_feature (25)..(300): Homolog of NCBI NO: 21358017 NR Description: CG11837-PA [Drosophila melanogaster]
  misc_feature (314)..(356): Homolog of NCBI NO: 27151490 NR Description: Probable dimethyladenosine transferase
  misc_feature (24)..(305): Homolog of NCBI NO: 27151490 NR Description: Probable dimethyladenosine transferase
  misc_feature (314)..(356): Homolog of NCBI NO: 7657198 NR Description: putative dimethyladenosine transferase [Homo
  misc_feature (24)..(305): Homolog of NCBI NO: 7657198 NR Description: putative dimethyladenosine transferase [Homo
  misc_feature (314)..(356): Homolog of NCBI NO: 21313560 NR Description: RIKEN cDNA 1500031M22 [Mus musculus]
  misc_feature (24)..(305): Homolog of NCBI NO: 21313560 NR Description: RIKEN cDNA 1500031M22 [Mus musculus]
  misc_feature (1)..(356): Homolog of NCBI NO: 15226591 NR Description: dimethyladenosine transferase -related
MAGGKIQKKRHGGGGGGGGARLQGGIPFEKSKGQHILRNPALVDSIIAKAGLKPTDTVLEIGPGTGNLTKRLLEAGVKAVVAVELDPRMVLELSRRFQGHPLSSRLKVIQGDVLKCDLPYFDICVANIPYQISSPLTFKLLSHRPIFRCAVIMFQREFAMRLVAQPGDTLYCRLSVNVQLLSRVSHLLKVGRNNFRPPPKVDSSVVRIEPRKPLPPVSFKEWDGLVRICFNRKNKTLGSLFKQKRVLELLEKNYKTMQSLQLAQESEMGEEKMSPDDVAVLANMVEDLSMEMSDEKEDDDMEMDDADVADGRASFREKIMGILQQGDFAEKRSSKLSQVDFLYLLSLFNKAGIHFS

SEQ ID NO: 67890 - protein, 268 aa, Triticum aestivum
  peptide (1)..(268): Ceres Seq. ID no. 15225354
  misc_feature (1)..(217): Homolog of NCBI NO: 34854204 NR Description: similar to RIKEN cDNA 1500031M22 [Rattus
  misc_feature (228)..(268): Homolog of NCBI NO: 21358017 NR Description: CG11837-PA [Drosophila melanogaster]
  misc_feature (1)..(212): Homolog of NCBI NO: 21358017 NR Description: CG11837-PA [Drosophila melanogaster]
  misc_feature (226)..(268): Homolog of NCBI NO: 27151490 NR Description: Probable dimethyladenosine transferase
  misc_feature (1)..(217): Homolog of NCBI NO: 27151490 NR Description: Probable dimethyladenosine transferase
  misc_feature (226)..(268): Homolog of NCBI NO: 7657198 NR Description: putative dimethyladenosine transferase [Homo
  misc_feature (1)..(217): Homolog of NCBI NO: 7657198 NR Description: putative dimethyladenosine transferase [Homo
  misc_feature (226)..(268): Homolog of NCBI NO: 21313560 NR Description: RIKEN cDNA 1500031M22 [Mus musculus]
  misc_feature (1)..(217): Homolog of NCBI NO: 21313560 NR Description: RIKEN cDNA 1500031M22 [Mus musculus]
  misc_feature (1)..(268): Homolog of NCBI NO: 15226591 NR Description: dimethyladenosine transferase -related
MVLELSRRFQGHPLSSRLKVIQGDVLKCDLPYFDICVANIPYQISSPLTFKLLSHRPIFRCAVIMFQREFAMRLVAQPGDTLYCRLSVNVQLLSRVSHLLKVGRNNFRPPPKVDSSVVRIEPRKPLPPVSFKEWDGLVRICFNRKNKTLGSLFKQKRVLELLEKNYKTMQSLQLAQESEMGEEKMSPDDVAVLANMVEDLSMEMSDEKEDDDMEMDDADVADGRASFREKIMGILQQGDFAEKRSSKLSQVDFLYLLSLFNKAGIHFS

SEQ ID NO: 67891 - protein, 204 aa, Triticum aestivum
  peptide (1)..(204): Ceres Seq. ID no. 15225355
  misc_feature (1)..(153): Homolog of NCBI NO: 34854204 NR Description: similar to RIKEN cDNA 1500031M22 [Rattus
  misc_feature (164)..(204): Homolog of NCBI NO: 21358017 NR Description: CG11837-PA [Drosophila melanogaster]
  misc_feature (1)..(148): Homolog of NCBI NO: 21358017 NR Description: CG11837-PA [Drosophila melanogaster]
  misc_feature (162)..(204): Homolog of NCBI NO: 27151490 NR Description: Probable dimethyladenosine transferase
  misc_feature (1)..(153): Homolog of NCBI NO: 27151490 NR Description: Probable dimethyladenosine transferase
  misc_feature (162)..(204): Homolog of NCBI NO: 7657198 NR Description: putative dimethyladenosine transferase [Homo
  misc_feature (1)..(153): Homolog of NCBI NO: 7657198 NR Description: putative dimethyladenosine transferase [Homo
  misc_feature (162)..(204): Homolog of NCBI NO: 21313560 NR Description: RIKEN cDNA 1500031M22 [Mus musculus]
  misc_feature (1)..(153): Homolog of NCBI NO: 21313560 NR Description: RIKEN cDNA 1500031M22 [Mus musculus]
  misc_feature (1)..(204): Homolog of NCBI NO: 15226591 NR Description: dimethyladenosine transferase -related
MFQREFAMRLVAQPGDTLYCRLSVNVQLLSRVSHLLKVGRNNFRPPPKVDSSVVRIEPRKPLPPVSFKEWDGLVRICFNRKNKTLGSLFKQKRVLELLEKNYKTMQSLQLAQESEMGEEKMSPDDVAVLANMVEDLSMEMSDEKEDDDMEMDDADVADGRASFREKIMGILQQGDFAEKRSSKLSQVDFLYLLSLFNKAGIHFS

SEQ ID NO: 67892 - DNA, 554 bp, Triticum aestivum
  misc_feature (1)..(554): Ceres Seq. ID no. 13596273
aaaccagcaagcttcacacacttccttccttcctgttgtggctcctgtacatgcgcgctagcctcgcctcgtacgcgcaagacctcgccatgcctgccttggacgtcatgccggagaaggcccaccacccggccatgtcgccgtcgcaccacggccacgggtgggacgccagcggcgcccccacccccatgcacaagaggctggacggcaaggtggccattgtcaccggcggcgcgcggggcatcggggaggccatcgtcaggctcttcgtcaagcacggcgccaaggtggtcatcgcggacatcgacgacgccgccggcgaggcgctggccgcctcgctcggcccgcacgtcgccttcgtgcgctgcgacgtgtccgtggaggaggacgtggagcgcgccgtcgaccgcgccgtgtcgcgctacggccgcctcgacgtcttctgcaacaacgccggggtgctgggccgccagaacagcgccgccaagagcatcctcacgttcgacgccggcgagttcgaccgcgtgctccgcgtnnncgcgctgggcaccgcg

SEQ ID NO: 67893 - protein, 184 aa, Triticum aestivum
  peptide (1)..(184): Ceres Seq. ID no. 13596274
  misc_feature (40)..(183): Homolog of NCBI NO: 15192945 NR Description: alcohol dehydrogenase [Zea mays subsp. mays]
  misc_feature (40)..(183): Homolog of NCBI NO: 15192927 NR Description: alcohol dehydrogenase [Zea mays subsp. mays]
  misc_feature (40)..(183): Homolog of NCBI NO: 15192931 NR Description: alcohol dehydrogenase [Zea mays subsp. mays]
  misc_feature (40)..(183): Homolog of NCBI NO: 15192933 NR Description: alcohol dehydrogenase [Zea mays subsp. mays]
  misc_feature (40)..(183): Homolog of NCBI NO: 15192935 NR Description: alcohol dehydrogenase [Zea mays subsp. mays]
  misc_feature (40)..(183): Homolog of NCBI NO: 15192925 NR Description: alcohol dehydrogenase [Zea mays subsp. mays]
  misc_feature (22)..(183): Homolog of NCBI NO: 38326766 NR Description: tasselseed2 protein [Bouteloua hirsuta]
  misc_feature (17)..(183): Homolog of NCBI NO: 1717794 NR Description: SEX DETERMINATION PROTEIN TASSELSEED 2
  misc_feature (17)..(183): Homolog of NCBI NO: 1877482 NR Description: short-chain alcohol dehydrogenase [Tripsacum
  misc_feature (17)..(183): Homolog of NCBI NO: 1877480 NR Description: short-chain alcohol dehydrogenase [Tripsacum
  misc_feature (178)..(178): Xaa is any aa, unknown or other
  misc_feature (179)..(179): Xaa is any aa, unknown or other
TSKLHTLPSFLLWLLYMRASLASYAQDLAMPALDVMPEKAHHPAMSPSHHGHGWDASGAPTPMHKRLDGKVAIVTGGARGIGEAIVRLFVKHGAKVVIADIDDAAGEALAASLGPHVAFVRCDVSVEEDVERAVDRAVSRYGRLDVFCNNAGVLGRQNSAAKSILTFDAGEFDRVLRXXALGTA

SEQ ID NO: 67894 - protein, 184 aa, Triticum aestivum
  peptide (1)..(184): Ceres Seq. ID no. 13596275
  misc_feature (2)..(177): Pfam Name: Equine herpesvirus glycoprotein gp2 Pfam Description: Equine herpesvirus glycoprotein gp2
  misc_feature (17)..(176): Homolog of NCBI NO: 28574039 NR Description: Salivary gland secretion 1 CG3047-PA [Drosophila
  misc_feature (17)..(176): Homolog of NCBI NO: 28574039 NR Description: Salivary gland secretion 1 CG3047-PA [Drosophila
  misc_feature (17)..(174): Homolog of NCBI NO: 28574039 NR Description: Salivary gland secretion 1 CG3047-PA [Drosophila
  misc_feature (15)..(174): Homolog of NCBI NO: 28574039 NR Description: Salivary gland secretion 1 CG3047-PA [Drosophila
  misc_feature (2)..(182): Homolog of NCBI NO: 29826652 NR Description: hypothetical protein [Streptomyces avermitilis
  misc_feature (16)..(174): Homolog of NCBI NO: 28574039 NR Description: Salivary gland secretion 1 CG3047-PA [Drosophila
  misc_feature (21)..(183): Homolog of NCBI NO: 11360494 NR Description: antifreeze glycopeptide AFGP polyprotein
  misc_feature (17)..(174): Homolog of NCBI NO: 28574039 NR Description: Salivary gland secretion 1 CG3047-PA [Drosophila
  misc_feature (10)..(175): Homolog of NCBI NO: 28574039 NR Description: Salivary gland secretion 1 CG3047-PA [Drosophila
  misc_feature (11)..(178): Homolog of NCBI NO: 11360494 NR Description: antifreeze glycopeptide AFGP polyprotein
  misc_feature (179)..(179): Xaa is any aa, unknown or other
  misc_feature (180)..(180): Xaa is any aa, unknown or other
KPASFTHFLPSCCGSCTCALASPRTRKTSPCLPWTSCRRRPTTRPCRRRTTATGGTPAAPPPPCTRGWTARWPLSPAARGASGRPSSGSSSSTAPRWSSRTSTTPPARRWPPRSARTSPSCAATCPWRRTWSAPSTAPCRATAASTSSATTPGCWAARTAPPRASSRSTPASSTACSAXXRWAP

SEQ ID NO: 67895 - protein, 168 aa, Triticum aestivum
  peptide (1)..(168): Ceres Seq. ID no. 13596276
  misc_feature (24)..(167): Homolog of NCBI NO: 15192945 NR Description: alcohol dehydrogenase [Zea mays subsp. mays]
  misc_feature (24)..(167): Homolog of NCBI NO: 15192953 NR Description: alcohol dehydrogenase [Zea mays subsp. mays]
  misc_feature (24)..(167): Homolog of NCBI NO: 15192969 NR Description: alcohol dehydrogenase [Zea mays subsp. mays]
  misc_feature (24)..(167): Homolog of NCBI NO: 15192947 NR Description: alcohol dehydrogenase [Zea mays subsp. mays]
  misc_feature (24)..(167): Homolog of NCBI NO: 15192935 NR Description: alcohol dehydrogenase [Zea mays subsp. mays]
  misc_feature (24)..(167): Homolog of NCBI NO: 15192925 NR Description: alcohol dehydrogenase [Zea mays subsp. mays]
  misc_feature (6)..(167): Homolog of NCBI NO: 38326766 NR Description: tasselseed2 protein [Bouteloua hirsuta]
  misc_feature (1)..(167): Homolog of NCBI NO: 1717794 NR Description: SEX DETERMINATION PROTEIN TASSELSEED 2
  misc_feature (1)..(167): Homolog of NCBI NO: 1877482 NR Description: short-chain alcohol dehydrogenase [Tripsacum
  misc_feature (1)..(167): Homolog of NCBI NO: 1877480 NR Description: short-chain alcohol dehydrogenase [Tripsacum
  misc_feature (162)..(162): Xaa is any aa, unknown or other
  misc_feature (163)..(163): Xaa is any aa, unknown or other
MRASLASYAQDLAMPALDVMPEKAHHPAMSPSHHGHGWDASGAPTPMHKRLDGKVAIVTGGARGIGEAIVRLFVKHGAKVVIADIDDAAGEALAASLGPHVAFVRCDVSVEEDVERAVDRAVSRYGRLDVFCNNAGVLGRQNSAAKSILTFDAGEFDRVLRXXALGTA

SEQ ID NO: 67896 - DNA, 968 bp, Triticum aestivum
  misc_feature (1)..(968): Ceres Seq. ID no. 13596277
ctttttttcccctcctcccgttgcctccacgcctccgagccagccagacacgcgagagggtagaccgcggcggcgaggcctcctgctttgcgcctagggttttgattcgatcccccccgccgccgccgccgcctgccggatggccatggagagggagctcatggagaccttcgaggccgccaagaaggccgccgacgccgccgccgaggaggccgacggctcctcccccgaggccgagcgctgcctcgacgccctgcgccgcctccgcgagttccgcgtcaacaccgacgtcctcgtctccacgcaggttggcaaacgtcttcggtacctgacgaagcaccctaactcagacatacaggcggtggctgcagacctttttgggtactggaagaaggttgttattgaagagacaggaaagaaaaacggcacaccagcaaatggaaaatcaaacaactctgcagctaaggctgagaaacctcagcccatgaaggttgaaaggaagtcagcgaacgtgaaggttgaaaagaactctacgtcgacgactgtgaagactgaaaagaatgcaactgtgaagactgaaaaggattctatgtcggcaagtgtgaagattgagaagactgtgaatagtgattccaaagtccaagttaaggtagagaaggtttcaaaggaagttagcagaacatctgaaacaaagaaaccatcttctgttccaaatggtcccccaaagctgacatcccttgtcagatgcaacgatgctgctcgagataaatacagggagcttcttgttgacgccttcgtcaaggtttccaaggaaactagtgatgatgacagagaggaaataagagatctcctggaccaggtaaatgcatgcgacccatatagagttgctgtgacagtggagtcggcgctgtttgagaggatagggcgttccaccgggacccacaaggtgaaatacaggtcgatactgt

SEQ ID NO: 67897 - protein, 276 aa, Triticum aestivum
  peptide (1)..(276): Ceres Seq. ID no. 13596278
  misc_feature (195)..(275): Homolog of NCBI NO: 15233998 NR Description: hypothetical protein [Arabidopsis thaliana]
  misc_feature (195)..(275): Homolog of NCBI NO: 15227992 NR Description: F-box protein family [Arabidopsis thaliana]
  misc_feature (3)..(275): Homolog of NCBI NO: 18377737 NR Description: putative elongation factor [Arabidopsis thaliana]
  misc_feature (3)..(275): Homolog of NCBI NO: 15224901 NR Description: elongation factor -related [Arabidopsis thaliana]
  misc_feature (3)..(275): Homolog of NCBI NO: 23617251 NR Description: putative transcription elongation factor
  misc_feature (3)..(275): Homolog of NCBI NO: 28876018 NR Description: putative transcription elongation factor
MAMERELMETFEAAKKAADAAAEEADGSSPEAERCLDALRRLREFRVNTDVLVSTQVGKRLRYLTKHPNSDIQAVAADLFGYWKKVVIEETGKKNGTPANGKSNNSAAKAEKPQPMKVERKSANVKVEKNSTSTTVKTEKNATVKTEKDSMSASVKIEKTVNSDSKVQVKVEKVSKEVSRTSETKKPSSVPNGPPKLTSLVRCNDAARDKYRELLVDAFVKVSKETSDDDREEIRDLLDQVNACDPYRVAVTVESALFERIGRSTGTHKVKYRSIL

SEQ ID NO: 67898 - protein, 274 aa, Triticum aestivum
  peptide (1)..(274): Ceres Seq. ID no. 13596279
  misc_feature (193)..(273): Homolog of NCBI NO: 15233998 NR Description: hypothetical protein [Arabidopsis thaliana]
  misc_feature (193)..(273): Homolog of NCBI NO: 15227992 NR Description: F-box protein family [Arabidopsis thaliana]
  misc_feature (1)..(273): Homolog of NCBI NO: 18377737 NR Description: putative elongation factor [Arabidopsis thaliana]
  misc_feature (1)..(273): Homolog of NCBI NO: 15224901 NR Description: elongation factor -related [Arabidopsis thaliana]
  misc_feature (1)..(273): Homolog of NCBI NO: 23617251 NR Description: putative transcription elongation factor
  misc_feature (1)..(273): Homolog of NCBI NO: 28876018 NR Description: putative transcription elongation factor
MERELMETFEAAKKAADAAAEEADGSSPEAERCLDALRRLREFRVNTDVLVSTQVGKRLRYLTKHPNSDIQAVAADLFGYWKKVVIEETGKKNGTPANGKSNNSAAKAEKPQPMKVERKSANVKVEKNSTSTTVKTEKNATVKTEKDSMSASVKIEKTVNSDSKVQVKVEKVSKEVSRTSETKKPSSVPNGPPKLTSLVRCNDAARDKYRELLVDAFVKVSKETSDDDREEIRDLLDQVNACDPYRVAVTVESALFERIGRSTGTHKVKYRSIL

SEQ ID NO: 67899 - protein, 269 aa, Triticum aestivum
  peptide (1)..(269): Ceres Seq. ID no. 13596280
  misc_feature (188)..(268): Homolog of NCBI NO: 15233998 NR Description: hypothetical protein [Arabidopsis thaliana]
  misc_feature (188)..(268): Homolog of NCBI NO: 15227992 NR Description: F-box protein family [Arabidopsis thaliana]
  misc_feature (1)..(268): Homolog of NCBI NO: 18377737 NR Description: putative elongation factor [Arabidopsis thaliana]
  misc_feature (1)..(268): Homolog of NCBI NO: 15224901 NR Description: elongation factor -related [Arabidopsis thaliana]
  misc_feature (1)..(268): Homolog of NCBI NO: 23617251 NR Description: putative transcription elongation factor
  misc_feature (1)..(268): Homolog of NCBI NO: 28876018 NR Description: putative transcription elongation factor
METFEAAKKAADAAAEEADGSSPEAERCLDALRRLREFRVNTDVLVSTQVGKRLRYLTKHPNSDIQAVAADLFGYWKKVVIEETGKKNGTPANGKSNNSAAKAEKPQPMKVERKSANVKVEKNSTSTTVKTEKNATVKTEKDSMSASVKIEKTVNSDSKVQVKVEKVSKEVSRTSETKKPSSVPNGPPKLTSLVRCNDAARDKYRELLVDAFVKVSKETSDDDREEIRDLLDQVNACDPYRVAVTVESALFERIGRSTGTHKVKYRSIL

SEQ ID NO: 67900 - DNA, 739 bp, Triticum aestivum
  misc_feature (1)..(739): Ceres Seq. ID no. 12584242
agatctcgccatccatcccaagtcgtccgtcgtcggctactgccacttcccccgaagaggacctcactccccaccccagcccagccctccccgcccgctgcacagtccaaatccccgctccggccggcgaccgaccgaggatgcccgcctccatgcccaagctgctcttcctcctcctcctcctcctcgccgcggccgcccactcttcaccggaggtgccggatgcggcgggagcggggtccgagcaggcggcggtgcgcatggtgccgatggccccggctggggggtcggggttcagcggggtggtgctgaacgagacgcggcggcggctggggagcttccagctctgcgcgccctgcacctgctgcggcgggcccaggggcgtctgcgtcctctccccgtgctgctacgccatcaactgcaacatccccaaccgccccttcggattctgctccttcacgcccaggtcatgcgactgcctccactgcaacgtctgagctctgctgccgagtgtgatgaatgagggtaatgttgagagcgatagtaagtattttagagtgatgagggtgggagaaaaaacgacatgatagcatgagagttcccccaacccgaatgcttgccgatttgttattgttttagccctatagccattttgctaccgaattgttattaagtatatggtgtagctgctacctctcgatggaattggttggttattagcaaagagttggtgaattgg

SEQ ID NO: 67901 - protein, 173 aa, Triticum aestivum
  peptide (1)..(173): Ceres Seq. ID no. 12584243
  misc_feature (9)..(93): Pfam Name: TT viral ORF2 Pfam Description: TT viral ORF2
DLAIHPKSSVVGYCHFPRRGPHSPPQPSPPRPLHSPNPRSGRRPTEDARLHAQAALPPPPPPRRGRPLFTGGAGCGGSGVRAGGGAHGADGPGWGVGVQRGGAERDAAAAGELPALRALHLLRRAQGRLRPLPVLLRHQLQHPQPPLRILLLHAQVMRLPPLQRLSSAAECDE

SEQ ID NO: 67902 - protein, 164 aa, Triticum aestivum
  peptide (1)..(164): Ceres Seq. ID no. 12584244
  misc_feature (107)..(164): Homolog of NCBI NO: 18412619 NR Description: Expressed protein
  misc_feature (54)..(164): Homolog of NCBI NO: 21954063 NR Description: unknown protein [Arabidopsis thaliana]
  misc_feature (54)..(164): Homolog of NCBI NO: 18408246 NR Description: Expressed protein
  misc_feature (54)..(164): Homolog of NCBI NO: 21593890 NR Description: unknown [Arabidopsis thaliana]
  misc_feature (48)..(164): Homolog of NCBI NO: 34906984 NR Description: P0413C03.15 [Oryza sativa (japonica
ISPSIPSRPSSATATSPEEDLTPHPSPALPARCTVQIPAPAGDRPRMPASMPKLLFLLLLLLAAAAHSSPEVPDAAGAGSEQAAVRMVPMAPAGGSGFSGVVLNETRRRLGSFQLCAPCTCCGGPRGVCVLSPCCYAINCNIPNRPFGFCSFTPRSCDCLHCNV

SEQ ID NO: 67903 - protein, 118 aa, Triticum aestivum
  peptide (1)..(118): Ceres Seq. ID no. 12584245
  misc_feature (61)..(118): Homolog of NCBI NO: 18412619 NR Description: Expressed protein
  misc_feature (8)..(118): Homolog of NCBI NO: 21954063 NR Description: unknown protein [Arabidopsis thaliana]
  misc_feature (8)..(118): Homolog of NCBI NO: 18408246 NR Description: Expressed protein
  misc_feature (8)..(118): Homolog of NCBI NO: 21593890 NR Description: unknown [Arabidopsis thaliana]
  misc_feature (2)..(118): Homolog of NCBI NO: 34906984 NR Description: P0413C03.15 [Oryza sativa (japonica
MPASMPKLLFLLLLLLAAAAHSSPEVPDAAGAGSEQAAVRMVPMAPAGGSGFSGVVLNETRRRLGSFQLCAPCTCCGGPRGVCVLSPCCYAINCNIPNRPFGFCSFTPRSCDCLHCNV

SEQ ID NO: 67904 - DNA, 952 bp, Triticum aestivum
  misc_feature (1)..(952): Ceres Seq. ID no. 12587236
cttgggattttgccgctcccgcccccgctcctccccggccgcgccgcgcctcgtctcgccggcccggcgaccacaggcaggcagtccaagaccaggatggcggcgtgccccgccgcgaccacggctcgcgtgggagcagcgcacggaggaggcctctggaggagaagcgggaggagcccgagcctcctcccgcgcccggcccgtagcacgagcaccacggcgcgcgcctcggagctacagcaggcccccgcccccgcccccgccccggccgccgccgtcccgacccacaaggtcaccgtccacgaccgggagcgcggggtcgtccaccagttcgtcgtgccccaggaccagtacattctgcacaccgcggaggcacaggacatcacgctcccattcgcctgccgccatggttgctgcactagctgcgctgttaggataaaatcagggcaaataagacagcctgaagctctcggaatatctgccgacttaagagagcagggctatgctttgttatgtgttggctacccatcctctgatcttgaagttgaaacgcaagatgaagacgaggtatattggctccagtttggaagatactttgcgcgggggcctgttgatagagatgattacgcgctagagcttgcaatgggagacgagtgaaacgtgcctaacagcggtacggtttttaagctgcggtttgtaggttatatagagttgcaaaaaagacttgatttgcaagtggagaaagaaaagaaaagaaaagagaaagacccctctgctcaatgttgtgtttttgcaaatttgctgtgcaaatgtatatgcttcttgcagagatgccatcctttttgctcctctgtattcccagtagacaaagaacgctatggactgtatgtatgtaaaaagctgtgaacttgtagtacctacttatttagcacctcaactcaatcttgagtgg

SEQ ID NO: 67905 - protein, 218 aa, Triticum aestivum
  peptide (1)..(218): Ceres Seq. ID no. 12587237
  misc_feature (102)..(178): Pfam Name: 2Fe-2S iron-sulfur cluster binding domain Pfam Description: 2Fe-2S iron-sulfur cluster binding domain
  misc_feature (96)..(197): Homolog of NCBI NO: 33864459 NR Description: ferredoxin, PetF like protein
  misc_feature (95)..(202): Homolog of NCBI NO: 33861455 NR Description: ferredoxin, petF-like protein
  misc_feature (95)..(204): Homolog of NCBI NO: 33865808 NR Description: Ferredoxin [Synechococcus sp. WH 8102]
  misc_feature (96)..(204): Homolog of NCBI NO: 37522751 NR Description: ferredoxin [Gloeobacter violaceus]
  misc_feature (95)..(204): Homolog of NCBI NO: 22299199 NR Description: ferredoxin [Thermosynechococcus elongatus BP-1]
  misc_feature (95)..(204): Homolog of NCBI NO: 16330840 NR Description: ferredoxin [Synechocystis sp. PCC 6803]
  misc_feature (95)..(204): Homolog of NCBI NO: 17230411 NR Description: ferredoxin [Nostoc sp. PCC 7120]
  misc_feature (95)..(204): Homolog of NCBI NO: 23127555 NR Description: hypothetical protein [Nostoc punctiforme]
  misc_feature (69)..(218): Homolog of NCBI NO: 15223230 NR Description: ferredoxin, putative
  misc_feature (33)..(218): Homolog of NCBI NO: 13174248 NR Description: putative ferredoxin [Oryza sativa]
LGILPLPPPLLPGRAAPRLAGPATTGRQSKTRMAACPAATTARVGAAHGGGLWRRSGRSPSLLPRPARSTSTTARASELQQAPAPAPAPAAAVPTHKVTVHDRERGVVHQFVVPQDQYILHTAEAQDITLPFACRHGCCTSCAVRIKSGQIRQPEALGISADLREQGYALLCVGYPSSDLEVETQDEDEVYWLQFGRYFARGPVDRDDYALELAMGDE

SEQ ID NO: 67906 - protein, 186 aa, Triticum aestivum
  peptide (1)..(186): Ceres Seq. ID no. 12587238
  misc_feature (70)..(146): Pfam Name: 2Fe-2S iron-sulfur cluster binding domain Pfam Description: 2Fe-2S iron-sulfur cluster binding domain
  misc_feature (64)..(165): Homolog of NCBI NO: 33864459 NR Description: ferredoxin, PetF like protein
  misc_feature (63)..(170): Homolog of NCBI NO: 33861455 NR Description: ferredoxin, petF-like protein
  misc_feature (63)..(172): Homolog of NCBI NO: 33865808 NR Description: Ferredoxin [Synechococcus sp. WH 8102]
  misc_feature (64)..(172): Homolog of NCBI NO: 37522751 NR Description: ferredoxin [Gloeobacter violaceus]
  misc_feature (63)..(172): Homolog of NCBI NO: 22299199 NR Description: ferredoxin [Thermosynechococcus elongatus BP-1]
  misc_feature (63)..(172): Homolog of NCBI NO: 16330840 NR Description: ferredoxin [Synechocystis sp. PCC 6803]
  misc_feature (63)..(172): Homolog of NCBI NO: 17230411 NR Description: ferredoxin [Nostoc sp. PCC 7120]
  misc_feature (63)..(172): Homolog of NCBI NO: 23127555 NR Description: hypothetical protein [Nostoc punctiforme]
  misc_feature (37)..(186): Homolog of NCBI NO: 15223230 NR Description: ferredoxin, putative
  misc_feature (1)..(186): Homolog of NCBI NO: 13174248 NR Description: putative ferredoxin [Oryza sativa]
MAACPAATTARVGAAHGGGLWRRSGRSPSLLPRPARSTSTTARASELQQAPAPAPAPAAAVPTHKVTVHDRERGVVHQFVVPQDQYILHTAEAQDITLPFACRHGCCTSCAVRIKSGQIRQPEALGISADLREQGYALLCVGYPSSDLEVETQDEDEVYWLQFGRYFARGPVDRDDYALELAMGDE

SEQ ID NO: 67907 - protein, 145 aa, Triticum aestivum
  peptide (1)..(145): Ceres Seq. ID no. 12587239
  misc_feature (5)..(143): Pfam Name: Herpesvirus glycoprotein D Pfam Description: Herpesvirus glycoprotein D
LGFCRSRPRSSPAAPRLVSPARRPQAGSPRPGWRRAPPRPRLAWEQRTEEASGGEAGGARASSRARPVARAPRRAPRSYSRPPPPPPPRPPPSRPTRSPSTTGSAGSSTSSSCPRTSTFCTPRRHRTSRSHSPAAMVAALAALLG

SEQ ID NO: 67908 - DNA, 1386 bp, Triticum aestivum
  misc_feature (1)..(1386): Ceres Seq. ID no. 15226556
acctgtctattccccaacaactggactccaacctcctcctcgcaccctcctcgtcccgtcgaatccatcgaggcgagggaaaaaaagagaggagaggttagggttccgaatggactatcctggaaggttctagaagcgtacgctcgttgggagggctccgggcggtgcgctgcagtggttgatggaggaggagaaggccagggggttgtcctcggcggcctcgccgctgatcccgccgacatcctcggagatcgacctcgaggccggtgccggggaccagctccagtgccggatctgcctcgagaccgacgggagagacttcatcgcgccctgcaagtgcaaggggacatccaagtacgtgcaccgcgactgcctcgaccactggagagcggtcaaggagggatttgcattttctcattgcaccacctgcaaggctccttattacttgagggttcatgtccacactgacaggaaatggcgaacactaaagtttcgtttctttgttactagagatatattattcatctttgctctagtccagtttgttatctctgcattggcttatttggtacattttattgatgggtaccagcaatattggctgaggacggcctggggtttcgataatgaagttactttttattatatatgtggagctttgttgttttttgctttactcgggttatcaggatgcttcataacgtgttatgaccgaagagtacggagtgacttggctcagccttgtcgagaactgtgcctctgttgctgccagccagggatgtgtgcagattgccatcttcctggcacactttgcatgtggactgactgcaccacatgctttgaaggctgtgcaactacagccggggagtgtggtggttgcttgggaggtgcaggggaagcagggttaccattgctcctcatcatgggagtaatcgtgctcgggctcttcacggttgtcggcatcttctatagcgttctggtggcaactatggtagggcagaggatctggcaaagacactaccacatccttgcgaaacgaatgctaacaaaggagtacgttgtggaagatgttgacggtgaacgtgcagattggtctccgccgccactccctgcagagcacgtccagcagctcaaatccctgggactcctatagcccatgacatggagctgatggctgttgatgatgaccttaagttgaggaccagcaccacgcactgccccagctgtacaggaagcacatactaagccgatggcagggcatctcttgtatccgcaatttgcgcagcccaacatggtgcgatatcatcgttcctttttgtacattgtaacagggaaacttaccacgccttgatttttatacaaatgagtcaactcgtgcccgtctag

SEQ ID NO: 67909 - protein, 323 aa, Triticum aestivum
  peptide (1)..(323): Ceres Seq. ID no. 15226557
  misc_feature (36)..(83): Pfam Name: Zinc finger, C3HC4 type (RING finger) Pfam Description: Zinc finger, C3HC4 type (RING finger)
  misc_feature (252)..(322): Homolog of NCBI NO: 18403075 NR Description: zinc finger (C3HC4-type RING finger) protein
  misc_feature (30)..(173): Homolog of NCBI NO: 18403075 NR Description: zinc finger (C3HC4-type RING finger) protein
  misc_feature (206)..(323): Homolog of NCBI NO: 25402638 NR Description: hypothetical protein [imported] - Arabidopsis
  misc_feature (10)..(130): Homolog of NCBI NO: 25402638 NR Description: hypothetical protein [imported] - Arabidopsis
  misc_feature (219)..(323): Homolog of NCBI NO: 40253895 NR Description: zinc finger (C3HC4-type RING finger) protein
  misc_feature (2)..(210): Homolog of NCBI NO: 40253895 NR Description: zinc finger (C3HC4-type RING finger) protein
  misc_feature (159)..(207): Homolog of NCBI NO: 15227153 NR Description: zinc finger (C3HC4-type RING finger) protein
  misc_feature (233)..(323): Homolog of NCBI NO: 15227153 NR Description: zinc finger (C3HC4-type RING finger) protein
  misc_feature (14)..(135): Homolog of NCBI NO: 15227153 NR Description: zinc finger (C3HC4-type RING finger) protein
  misc_feature (14)..(323): Homolog of NCBI NO: 28393273 NR Description: unknown protein [Arabidopsis thaliana]
MEEEKARGLSSAASPLIPPTSSEIDLEAGAGDQLQCRICLETDGRDFIAPCKCKGTSKYVHRDCLDHWRAVKEGFAFSHCTTCKAPYYLRVHVHTDRKWRTLKFRFFVTRDILFIFALVQFVISALAYLVHFIDGYQQYWLRTAWGFDNEVTFYYICGALLFFALLGLSGCFITCYDRRVRSDLAQPCRELCLCCCQPGMCADCHLPGTLCMWTDCTTCFEGCATTAGECGGCLGGAGEAGLPLLLIMGVIVLGLFTVVGIFYSVLVATMVGQRIWQRHYHILAKRMLTKEYVVEDVDGERADWSPPPLPAEHVQQLKSLGLL

SEQ ID NO: 67910 - DNA, 549 bp, Triticum aestivum
  misc_feature (1)..(549): Ceres Seq. ID no. 13654459
cgaaaacagtccagactacacccggtgagcgccctttccctcttccccgacctcccatcccttctccgtgcgttcgccgctgctttgccctagctgggtggcaggcggcccacgaaattcttggacagagattagtagatttcccggccccggccgggggaagataaggatagtctccttcggcgaggttggaattaggccccactgagcgcccccagccatgagttgcgggagatctgaaaacactaccagaaaatgcaggacgcgttcaacacctggtgaaacgatgtatctacatactgcagatgctaaaaagatcacccactaccaagctaatctaccaacaacaatggatcgcgatatcggcgcctaccctgtgaagcaccactttccgtctcctatagtttcttggatagaagacctttctagctttggcgatgttccttttagtcatgatactgaatacgtggatgatcaatcaacaccttcatttgggcagtcttttgcatctagcaatttgcatgacatgcaaatatcagtgagattgac

SEQ ID NO: 67911 - protein, 109 aa, Triticum aestivum
  peptide (1)..(109): Ceres Seq. ID no. 13654460
  misc_feature (4)..(108): Homolog of NCBI NO: 34912064 NR Description: P0445H04.34 [Oryza sativa (japonica
MSCGRSENTTRKCRTRSTPGETMYLHTADAKKITHYQANLPTTMDRDIGAYPVKHHFPSPIVSWIEDLSSFGDVPFSHDTEYVDDQSTPSFGQSFASSNLHDMQISVRL

SEQ ID NO: 67912 - protein, 87 aa, Triticum aestivum
  peptide (1)..(87): Ceres Seq. ID no. 13654461
  misc_feature (1)..(86): Homolog of NCBI NO: 34912064 NR Description: P0445H04.34 [Oryza sativa (japonica
MYLHTADAKKITHYQANLPTTMDRDIGAYPVKHHFPSPIVSWIEDLSSFGDVPFSHDTEYVDDQSTPSFGQSFASSNLHDMQISVRL

SEQ ID NO: 67913 - protein, 66 aa, Triticum aestivum
  peptide (1)..(66): Ceres Seq. ID no. 13654462
  misc_feature (1)..(65): Homolog of NCBI NO: 34912064 NR Description: P0445H04.34 [Oryza sativa (japonica
MDRDIGAYPVKHHFPSPIVSWIEDLSSFGDVPFSHDTEYVDDQSTPSFGQSFASSNLHDMQISVRL

SEQ ID NO: 67914 - DNA, 1378 bp, Triticum aestivum
  misc_feature (1)..(1378): Ceres Seq. ID no. 13654314
atcattcactcatcaaacgcgacgcacagagacagagggagagggtccgctgtacttgcatccttccctgcccccttcccctctcctccaagtccagaaatccgttcccctctcccccctccctccctctcgtctgcacccgagacgctcctctagatcagttcctcggtgcggttacctctcgccggaagccaagccaccatggtgtcgccggacgctatccgcaccgtcatcggcgtcataggcaatgcaaccgccctggtgctcttcctatccccagtgccgacgttcatccaaatctggaagaagaagacggtggagcagtactcggcggtgccgtacctggcgacgctgctcaactgcatgatgtgggtgctctacgggctcccgctggtgcacccgcacagcatgctcgtcatcaccatcaacggcaccggcatgctcatcgagctcacctacgtcgccctcttcctcaccttctccgtcggcgccgcccgccgccgagtcctcctcctgctggtcgccgaggtcgccttcgtcgccgcggtcggcgcgctcgtcctctccctcggccacaaacacgagcgcaggtccatggtcgtcggcatcctctgcgtcctattcggcaccggcatgtacgccgcgccgctttccgtcatgaaaatggtgatccagaccaagagcgtggagtacatgcccctgttcttgtccgtggcctcgctcgtcaatggcatctgatggactgcctacgccctcatcaagttaggcctctacatcaccatccccaacgggctgggcgtgatgttcgctgtggggcagatcatcctgtacggcatctactacaagtcgacgcagcagatcctggaggcccgtaagcgcaaggccgaccaggtgcccatgaccgaggtcgtcgtcgacggcaagagcggcagcgccaccaactcaggcgccgccaacggccactactagaagcaataccactactattaactcccgattgaagcgccttcataaatcaccttagctaattctcccatgaatcatgtacgtacgctgcgcgcccagggctcctgtgcactgtcgcgtcttcttgtgcgctctactacccttgaaagacctgttcttcatcttgtctcctttatgcctaccgtgcgtacggccgctactgtcaatcagacggctaaccgcgaccctggttggcgaatccgcgaccctggttggcggatcactggtgttcttggttttctggaagaactatgacagtccaaaggggacggcgtgttgagtttttcttatacatgttattatactactactgtttttgtttgtatttgttttggccgggaatactactactgttttgttgttgcagttgtcg

SEQ ID NO: 67915 - protein, 290 aa, Triticum aestivum
  peptide (1)..(290): Ceres Seq. ID no. 13654315
  misc_feature (138)..(184): Pfam Name: Protamine P1 Pfam Description: Protamine P1
HSLIKRDAQRQRERVRCTCILPCPLPLSSKSRNPFPSPPSLPLVCTRDAPLDQFLGAVTSRRKPSHHGVAGRYPHRHRRHRQCNRPGALPIPSADVHPNLEEEDGGAVLGGAVPGDAAQLHDVGALRAPAGAPAQHARHHHQRHRHAHRAHLRRPLPHLLRRRRPPPSPPPAGRRGRLRRRGRRARPLPRPQTRAQVHGRRHPLRPIRHRHVRRAAFRHENGDPDQERGVHAPVLVRGLARQWHLMDCLRPHQVRPLHHHPQRAGRDVRCGADHPVRHLLQVDAADPGGP

SEQ ID NO: 67916 - protein, 178 aa, Triticum aestivum
  peptide (1)..(178): Ceres Seq. ID no. 13654316
  misc_feature (1)..(178): Homolog of NCBI NO: 10177463 NR Description: contains similarity to MtN3
  misc_feature (28)..(178): Homolog of NCBI NO: 7486709 NR Description: hypothetical protein F8M12.20 - Arabidopsis
  misc_feature (28)..(178): Homolog of NCBI NO: 7486148 NR Description: hypothetical protein F25I24.60 - Arabidopsis
  misc_feature (7)..(178): Homolog of NCBI NO: 15219732 NR Description: nodulin MtN3 family protein [Arabidopsis
  misc_feature (1)..(178): Homolog of NCBI NO: 21592355 NR Description: contains similarity to nodulin MtN3 protein
  misc_feature (1)..(178): Homolog of NCBI NO: 18405611 NR Description: nodulin MtN3 family protein [Arabidopsis
  misc_feature (7)..(178): Homolog of NCBI NO: 18413388 NR Description: nodulin MtN3 family protein [Arabidopsis
  misc_feature (39)..(178): Homolog of NCBI NO: 431154 NR Description: ORF [Lilium longiflorum]
  misc_feature (1)..(178): Homolog of NCBI NO: 34912454 NR Description: P0681B11.31 [Oryza sativa (japonica
  misc_feature (1)..(178): Homolog of NCBI NO: 34912462 NR Description: MtN3-like protein [Oryza sativa (japonica
MVSPDAIRTVIGVIGNATALVLFLSPVPTFIQIWKKKTVEQYSAVPYLATLLNCMMWVLYGLPLVHPHSMLVITINGTGMLIELTYVALFLTFSVGAARRRVLLLLVAEVAFVAAVGALVLSLGHKHERRSMVVGILCVLFGTGMYAAPLSVMKMVIQTKSVEYMPLFLSVASLVNGI

SEQ ID NO: 67917 - DNA, 1385 bp, Triticum aestivum
  misc_feature (1)..(1385): Ceres Seq. ID no. 12614389
aaaaaagaaataaaaaatcacgccctcccctcccctcccctccccgcagccgcagcgaacctcggcgatggcggcggcggcggacgaggcgtggtgccgggagacggttccccgggtgatggagctggtgagcccgcgcctcccccagcgcgacgcctgcgccctgctctcagtcagcccctggtgccaccgcgccctcgccgccaaccccaagctctgggaggtgctcgacctgcacgagatgaagaaagctggcgagcggctcatttcggcgcttacactggcaaggtatcgccatctcaaggtcgtgaaccttgaattcgctcaagatattgaggaccggcattttctccatctgaaagaaacgggtgctatcttactggaagagttggaactcctgaacctgaatgcatgtcagaagatctctgatacagggattggatctgccaccagtctttgtcctaatctccgggccctgtcgatctattggattgttggattgacagacgcaagcattgaacacgctgtgaagaactgcaagcagataatcgacttgaatctgagtggctgtaagaatatctcagatagaggaatacagctagttgccgataattatcaaggactacagaagttggacataaccaggtgcattaagttgactgatgatgcattgcaaaaagttcttgagaaatgctctgctcttgaaagcttgaacatgtatgccctttcaagttttaccgacaaggcttatacaaaaattggatatttagccaacctgacatttctagacctatgtggggcccagaacctaactgacgacggtcttagcagtatatcaagatgcggaagtttgacatatctcaatttatcttggtgcgtacgtgttactgatgttggggtggtagctatcgcacaaggttgtcggtcccttgaactactaagtttattcggaatacttggagtaactgatgcctgcctggaggctttgtcaaaatcttgcccaaatagtctcacgactctggatgtaaatggctgtactggtattaagaggaggagccgggacgacctgatccaactgttcccacgattgagttgcttcaaggtgcacagctagaaacaacggcttgggcttttgtagaattatcattaccctggctggcactcgaaaaagcatatgcggaagtgtctggcgctggagaaacagagcagcacgacagagtttttgccgcctgctggttccttgattctatgctgatgtgagagagatcgcaggacctgtacaatcgattttcgtaatatgtgtggcgtctctcggttacattgttacaaaaattaaaaaccatgacgcacttattttctacatgaccaaagtcatcttttcttcg

SEQ ID NO: 67918 - protein, 348 aa, Triticum aestivum
  peptide (1)..(348): Ceres Seq. ID no. 12614390
  misc_feature (31)..(323): Homolog of NCBI NO: 6063090 NR Description: F-box protein FBL2 [Homo sapiens]
  misc_feature (31)..(323): Homolog of NCBI NO: 16306582 NR Description: F-box and leucine-rich repeat protein 2
  misc_feature (31)..(323): Homolog of NCBI NO: 30519963 NR Description: F-box and leucine-rich repeat protein 2 [Mus
  misc_feature (31)..(323): Homolog of NCBI NO: 5919219 NR Description: leucine-rich repeats containing F-box protein
  misc_feature (31)..(323): Homolog of NCBI NO: 6164721 NR Description: F-box protein Fbl2 [Homo sapiens]
  misc_feature (31)..(323): Homolog of NCBI NO: 7022695 NR Description: unnamed protein product [Homo sapiens]
  misc_feature (6)..(321): Homolog of NCBI NO: 11357437 NR Description: hypothetical protein F14P22.120 - Arabidopsis
  misc_feature (119)..(348): Homolog of NCBI NO: 11357437 NR Description: hypothetical protein F14P22.120 - Arabidopsis
  misc_feature (6)..(348): Homolog of NCBI NO: 15450960 NR Description: putative protein [Arabidopsis thaliana]
  misc_feature (6)..(348): Homolog of NCBI NO: 18410977 NR Description: putative protein
MAAAADEAWCRETVPRVMELVSPRLPQRDACALLSVSPWCHRALAANPKLWEVLDLHEMKKAGERLISALTLARYRHLKVVNLEFAQDIEDRHFLHLKETGAILLEELELLNLNACQKISDTGIGSATSLCPNLRALSIYWIVGLTDASIEHAVKNCKQIIDLNLSGCKNISDRGIQLVADNYQGLQKLDITRCIKLTDDALQKVLEKCSALESLNMYALSSFTDKAYTKIGYLANLTFLDLCGAQNLTDDGLSSISRCGSLTYLNLSWCVRVTDVGVVAIAQGCRSLELLSLFGILGVTDACLEALSKSCPNSLTTLDVNGCTGIKRRSRDDLIQLFPRLSCFKVHS

SEQ ID NO: 67919 - protein, 331 aa, Triticum aestivum
  peptide (1)..(331): Ceres Seq. ID no. 12614391
  misc_feature (14)..(306): Homolog of NCBI NO: 6063090 NR Description: F-box protein FBL2 [Homo sapiens]
  misc_feature (14)..(306): Homolog of NCBI NO: 16306582 NR Description: F-box and leucine-rich repeat protein 2
  misc_feature (14)..(306): Homolog of NCBI NO: 30519963 NR Description: F-box and leucine-rich repeat protein 2 [Mus
  misc_feature (14)..(306): Homolog of NCBI NO: 5919219 NR Description: leucine-rich repeats containing F-box protein
  misc_feature (14)..(306): Homolog of NCBI NO: 6164721 NR Description: F-box protein Fbl2 [Homo sapiens]
  misc_feature (14)..(306): Homolog of NCBI NO: 7022695 NR Description: unnamed protein product [Homo sapiens]
  misc_feature (1)..(304): Homolog of NCBI NO: 11357437 NR Description: hypothetical protein F14P22.120 - Arabidopsis
  misc_feature (102)..(331): Homolog of NCBI NO: 11357437 NR Description: hypothetical protein F14P22.120 - Arabidopsis
  misc_feature (1)..(331): Homolog of NCBI NO: 15450960 NR Description: putative protein [Arabidopsis thaliana]
  misc_feature (1)..(331): Homolog of NCBI NO: 18410977 NR Description: putative protein
MELVSPRLPQRDACALLSVSPWCHRALAANPKLWEVLDLHEMKKAGERLISALTLARYRHLKVVNLEFAQDIEDRHFLHLKETGAILLEELELLNLNACQKISDTGIGSATSLCPNLRALSIYWIVGLTDASIEHAVKNCKQIIDLNLSGCKNISDRGIQLVADNYQGLQKLDITRCIKLTDDALQKVLEKCSALESLNMYALSSFTDKAYTKIGYLANLTFLDLCGAQNLTDDGLSSISRCGSLTYLNLSWCVRVTDVGVVAIAQGCRSLELLSLFGILGVTDACLEALSKSCPNSLTTLDVNGCTGIKRRSRDDLIQLFPRLSCFKVHS

SEQ ID NO: 67920 - protein, 290 aa, Triticum aestivum
  peptide (1)..(290): Ceres Seq. ID no. 12614392
  misc_feature (1)..(265): Homolog of NCBI NO: 6063090 NR Description: F-box protein FBL2 [Homo sapiens]
  misc_feature (1)..(265): Homolog of NCBI NO: 16306582 NR Description: F-box and leucine-rich repeat protein 2
  misc_feature (1)..(265): Homolog of NCBI NO: 30519963 NR Description: F-box and leucine-rich repeat protein 2 [Mus
  misc_feature (1)..(265): Homolog of NCBI NO: 5919219 NR Description: leucine-rich repeats containing F-box protein
  misc_feature (1)..(265): Homolog of NCBI NO: 6164721 NR Description: F-box protein Fbl2 [Homo sapiens]
  misc_feature (1)..(265): Homolog of NCBI NO: 7022695 NR Description: unnamed protein product [Homo sapiens]
  misc_feature (1)..(263): Homolog of NCBI NO: 11357437 NR Description: hypothetical protein F14P22.120 - Arabidopsis
  misc_feature (61)..(290): Homolog of NCBI NO: 11357437 NR Description: hypothetical protein F14P22.120 - Arabidopsis
  misc_feature (1)..(290): Homolog of NCBI NO: 15450960 NR Description: putative protein [Arabidopsis thaliana]
  misc_feature (1)..(290): Homolog of NCBI NO: 18410977 NR Description: putative protein
MKKAGERLISALTLARYRHLKVVNLEFAQDIEDRHFLHLKETGAILLEELELLNLNACQKISDTGIGSATSLCPNLRALSIYWIVGLTDASIEHAVKNCKQIIDLNLSGCKNISDRGIQLVADNYQGLQKLDITRCIKLTDDALQKVLEKCSALESLNMYALSSFTDKAYTKIGYLANLTFLDLCGAQNLTDDGLSSISRCGSLTYLNLSWCVRVTDVGVVAIAQGCRSLELLSLFGILGVTDACLEALSKSCPNSLTTLDVNGCTGIKRRSRDDLIQLFPRLSCFKVHS

SEQ ID NO: 67921 - DNA, 1357 bp, Triticum aestivum
  misc_feature (1)..(1357): Ceres Seq. ID no. 12614549
ccgcaggctcccagcacaaacaactgctaagcccactttgatggtgaatcgagccgttttgccgcagcaccatcgtcgacttgtagggatcaagggccagcgtcaacgcctttgaaagaaatcgaaggaattagggctactaataattcaggtggtgcgtagatcacaagaaggcgacggttaaggaagatcgaggatgccaaagcagcggcacgggaaacgcctaggcgctcttgagctagagcctcggcctcggcaggatcacctgtaccttgtctttgatgactggtcgttcggatataccatccgcaaggtaaatacgtcgaatcgcttcaatccccccgtgcagcgcttgcctcggcctttcttcaaattggaggcgccgcacgagtctccggagtacttcgcgtcagcctttggcactaggattttgctgatgcatcccagggatcctgcgggtcataacttgtccggcagcttcttccccatgttggacgtccgctcgcggagtctcacctttggccctgggctcgagtttccgattcatcccgtctatctcgccgtcggcaataagctattcattattgccgaagcctcttttgagatgctctacttggatccacaatctggctccgagtggtcgtgggaactgctcccacatccgccattccagatttacgacgtctgctcgtacgctttgtacggacattctctccttgtgagcaccgagaacgaagcctttgctgccaccttcacctttgacacggtaaaaagttcatggaaacaacttggcaagtgggtgctgcctttcgagggtcgtggtcacttcgaccctctcctgggcgcatttgttgggctctcgaaagacccagacaccctcggccaactcatttgctgctacatgcacacctccgacactggccacacccttgagttgaagctcagcaaggagaagctgttcagcgaggacccagccttgaggcacataggcgccacccttgtgtacatggaaagccagagcaaattctgcctcgtagaatgtgtctccattgttgacgacagtgctgatcaggagctcaaggaagaggaagacctgccccaatctggctgctgtctttgttgtttgactacattctatctctgtcatgacatgaatggagacccgacgaccggcaggagctgtatggtgcagtactacgaagtgcctagagcaacctctatgttgttcctccaagatcctgttgcattttggatgtaaaatgctaaaatcatgttatgatgaccgagttcctatgtttatttttcactcagttgtgactgctgcatttctatgttttaataatgtgtttactcgtct

SEQ ID NO: 67922 - protein, 353 aa, Triticum aestivum
  peptide (1)..(353): Ceres Seq. ID no. 12614550
  misc_feature (202)..(353): Homolog of NCBI NO: 34393439 NR Description: unknown protein [Oryza sativa (japonica
  misc_feature (184)..(283): Homolog of NCBI NO: 20804941 NR Description: P0456E05.21 [Oryza sativa (japonica
  misc_feature (142)..(353): Homolog of NCBI NO: 34900482 NR Description: hypothetical protein~predicted by FGENESH etc.
  misc_feature (147)..(353): Homolog of NCBI NO: 34898170 NR Description: hypothetical protein~predicted by FGENESH etc.
  misc_feature (17)..(236): Homolog of NCBI NO: 34902598 NR Description: Hypothetical protein [Oryza sativa (japonica
MPKQRHGKRLGALELEPRPRQDHLYLVFDDWSFGYTIRKVNTSNRFNPPVQRLPRPFFKLEAPHESPEYFASAFGTRILLMHPRDPAGHNLSGSFFPMLDVRSRSLTFGPGLEFPIHPVYLAVGNKLFIIAEASFEMLYLDPQSGSEWSWELLPHPPFQIYDVCSYALYGHSLLVSTENEAFAATFTFDTVKSSWKQLGKWVLPFEGRGHFDPLLGAFVGLSKDPDTLGQLICCYMHTSDTGHTLELKLSKEKLFSEDPALRHIGATLVYMESQSKFCLVECVSIVDDSADQELKEEEDLPQSGCCLCCLTTFYLCHDMNGDPTTGRSCMVQYYEVPRATSMLFLQDPVAFWM

SEQ ID NO: 67923 - protein, 273 aa, Triticum aestivum
  peptide (1)..(273): Ceres Seq. ID no. 12614551
  misc_feature (122)..(273): Homolog of NCBI NO: 34393439 NR Description: unknown protein [Oryza sativa (japonica
  misc_feature (104)..(203): Homolog of NCBI NO: 20804941 NR Description: P0456E05.21 [Oryza sativa (japonica
  misc_feature (62)..(273): Homolog of NCBI NO: 34900482 NR Description: hypothetical protein~predicted by FGENESH etc.
  misc_feature (67)..(273): Homolog of NCBI NO: 34898170 NR Description: hypothetical protein~predicted by FGENESH etc.
  misc_feature (1)..(156): Homolog of NCBI NO: 34902598 NR Description: Hypothetical protein [Oryza sativa (japonica
MHPRDPAGHNLSGSFFPMLDVRSRSLTFGPGLEFPIHPVYLAVGNKLFIIAEASFEMLYLDPQSGSEWSWELLPHPPFQIYDVCSYALYGHSLLVSTENEAFAATFTFDTVKSSWKQLGKWVLPFEGRGHFDPLLGAFVGLSKDPDTLGQLICCYMHTSDTGHTLELKLSKEKLFSEDPALRHIGATLVYMESQSKFCLVECVSIVDDSADQELKEEEDLPQSGCCLCCLTTFYLCHDMNGDPTTGRSCMVQYYEVPRATSMLFLQDPVAFWM

SEQ ID NO: 67924 - protein, 256 aa, Triticum aestivum
  peptide (1)..(256): Ceres Seq. ID no. 12614552
  misc_feature (105)..(256): Homolog of NCBI NO: 34393439 NR Description: unknown protein [Oryza sativa (japonica
  misc_feature (87)..(186): Homolog of NCBI NO: 20804941 NR Description: P0456E05.21 [Oryza sativa (japonica
  misc_feature (45)..(256): Homolog of NCBI NO: 34900482 NR Description: hypothetical protein~predicted by FGENESH etc.
  misc_feature (50)..(256): Homolog of NCBI NO: 34898170 NR Description: hypothetical protein~predicted by FGENESH etc.
  misc_feature (1)..(139): Homolog of NCBI NO: 34902598 NR Description: Hypothetical protein [Oryza sativa (japonica
MLDVRSRSLTFGPGLEFPIHPVYLAVGNKLFIIAEASFEMLYLDPQSGSEWSWELLPHPPFQIYDVCSYALYGHSLLVSTENEAFAATFTFDTVKSSWKQLGKWVLPFEGRGHFDPLLGAFVGLSKDPDTLGQLICCYMHTSDTGHTLELKLSKEKLFSEDPALRHIGATLVYMESQSKFCLVECVSIVDDSADQELKEEEDLPQSGCCLCCLTTFYLCHDMNGDPTTGRSCMVQYYEVPRATSMLFLQDPVAFWM

SEQ ID NO: 67925 - DNA, 1723 bp, Triticum aestivum
  misc_feature (1)..(1723): Ceres Seq. ID no. 14313536
aaaaaaccctgcccctctctgtttttctctctccctccgaggtttttagggtttcgcatccgcatcagccgccgccggaaccggggaggcggcgatacgtcgcgatgcagccaacataccagccgccaatgaacggccagcacgcgcctcagccgaaggcctctggggctccgccgcctcctctgcagcaggcacccccgccgcagcagtactaccaggcgccgccgcagtactaccagcagggacccccgccggcgatgtggggccacccgcagcagcatatgcctccgcagtacgcgcctccgccgcagcagtacgcgcctcagcctcctcagcagtacgcgccgccgccgcagcattacgcgccgccgccgccgcagtacggagcgcagatggctggcgggccgcctcccggaggcgaggatatcaggtcgctgtggatcggagatctccagtactggatggatgagacctacctctacaacgcctttgcgcctgtggggccgcagcaggtcacctcagtgaaaattatccgcaacaaacatactgggcagcctgagggttatggttttattgaatttcaatctcgagctgctgcggaatatgctcttgggacctttaatgggcagatgatgcctaatgttgaacaagttttcaagctaaactgggcttcttgtagtgctggtgacaagcggggtgacgatggttctgatcacacaatatttgttggtgatttggctgctgatgttactgacgccatgttggaagagatattcaaagccacctacccatcagttaaaggtgctaatgttgttactgacagggccactggtcgctccaaaggatatggttttgtacgttttggagatctaaatgagcagacacgtgctatgactgagatgaatggagtgctattgtctacaagacaaatgaggattgggcctgcagctaacaagaagaatatgggtactcagcagacatattcaactaatgcagggtaccagagctctcaagtaaatgaggcggcgaatgatcccaacaatactacaatctttgtgggcgggttagattccaatatagatgagaactatctaaggcaagtttttactccatatggcgaagttggttatgtgaagattcctgtaggcaagcgttgtggatttgtccaatttaccagcagggcgtgcgctgagcaggccatcagtgcgctgaatgggtctcagattggtagttccaatgttcgtctttcatggggccgtagccaaaacaaacaggctccccagcaggatgcaaaccagggtaatggcaacagctactatggatatcaacagggtcctgatgcatactatggtgcacccaatgtgcaagatcctagcatgcaaaactatggatactctggttatggcagttacgagcagcaacagcagccatctcagcagcagcaacctcctcagcagcagccaccacagcagcaacagcagcagcccccacagcagtgaccattgaggcaatggagcgcaatcacagattcagagctgcatgaactgaatgctaccgcgtcatgagttatcgtataggtgtccttgtttgtaagatgggtcgtatctagtagtactttgaccgttgggcagtagctctagttctattcagtgcttctcttggttttaaattatcaaactatgtccatgactgagttaagcttttaatgttattttggatcacc

SEQ ID NO: 67926 - protein, 498 aa, Triticum aestivum
  peptide (1)..(498): Ceres Seq. ID no. 14313537
  misc_feature (240)..(312): Pfam Name: RNA recognition motif. (a.k.a. RRM, RBD, or RNP domain) Pfam Description: RNA recognition motif. (a.k.a. RRM, RBD, or RNP
  misc_feature (58)..(481): Homolog of NCBI NO: 18416906 NR Description: RNA binding protein 45 (RBP45), putative
  misc_feature (58)..(481): Homolog of NCBI NO: 7485342 NR Description: hypothetical protein F10M23.340 - Arabidopsis
  misc_feature (80)..(492): Homolog of NCBI NO: 21592583 NR Description: putative DNA binding protein [Arabidopsis
  misc_feature (80)..(492): Homolog of NCBI NO: 15221071 NR Description: RNA binding protein 45 (RBP45), putative
  misc_feature (65)..(475): Homolog of NCBI NO: 9663767 NR Description: RNA Binding Protein 45 [Nicotiana plumbaginifolia]
  misc_feature (56)..(480): Homolog of NCBI NO: 40253807 NR Description: putative RNA Binding Protein 45
  misc_feature (74)..(485): Homolog of NCBI NO: 39545835 NR Description: OSJNBb0060E08.6 [Oryza sativa (japonica
  misc_feature (61)..(485): Homolog of NCBI NO: 34896988 NR Description: putative RNA binding protein [Oryza sativa]
  misc_feature (86)..(490): Homolog of NCBI NO: 34395214 NR Description: putative RNA Binding Protein
  misc_feature (49)..(490): Homolog of NCBI NO: 34901884 NR Description: putative RNA Binding Protein 45
KTLPLSVFLSPSEVFRVSHPHQPPPEPGRRRYVAMQPTYQPPMNGQHAPQPKASGAPPPPLQQAPPPQQYYQAPPQYYQQGPPPAMWGHPQQHMPPQYAPPPQQYAPQPPQQYAPPPQHYAPPPPQYGAQMAGGPPPGGEDIRSLWIGDLQYWMDETYLYNAFAPVGPQQVTSVKIIRNKHTGQPEGYGFIEFQSRAAAEYALGTFNGQMMPNVEQVFKLNWASCSAGDKRGDDGSDHTIFVGDLAADVTDAMLEEIFKATYPSVKGANVVTDRATGRSKGYGFVRFGDLNEQTRAMTEMNGVLLSTRQMRIGPAANKKNMGTQQTYSTNAGYQSSQVNEAANDPNNTTIFVGGLDSNIDENYLRQVFTPYGEVGYVKIPVGKRCGFVQFTSRACAEQAISALNGSQIGSSNVRLSWGRSQNKQAPQQDANQGNGNSYYGYQQGPDAYYGAPNVQDPSMQNYGYSGYGSYEQQQQPSQQQQPPQQQPPQQQQQQPPQQ

SEQ ID NO: 67927 - protein, 464 aa, Triticum aestivum
  peptide (1)..(464): Ceres Seq. ID no. 14313538
  misc_feature (206)..(278): Pfam Name: RNA recognition motif. (a.k.a. RRM, RBD, or RNP domain) Pfam Description: RNA recognition motif. (a.k.a. RRM, RBD, or RNP
  misc_feature (24)..(447): Homolog of NCBI NO: 18416906 NR Description: RNA binding protein 45 (RBP45), putative
  misc_feature (24)..(447): Homolog of NCBI NO: 7485342 NR Description: hypothetical protein F10M23.340 - Arabidopsis
  misc_feature (46)..(458): Homolog of NCBI NO: 21592583 NR Description: putative DNA binding protein [Arabidopsis
  misc_feature (46)..(458): Homolog of NCBI NO: 15221071 NR Description: RNA binding protein 45 (RBP45), putative
  misc_feature (31)..(441): Homolog of NCBI NO: 9663767 NR Description: RNA Binding Protein 45 [Nicotiana plumbaginifolia]
  misc_feature (22)..(446): Homolog of NCBI NO: 40253807 NR Description: putative RNA Binding Protein 45
  misc_feature (40)..(451): Homolog of NCBI NO: 39545835 NR Description: OSJNBb0060E08.6 [Oryza sativa (japonica
  misc_feature (27)..(451): Homolog of NCBI NO: 34896988 NR Description: putative RNA binding protein [Oryza sativa]
  misc_feature (52)..(456): Homolog of NCBI NO: 34395214 NR Description: putative RNA Binding Protein
  misc_feature (15)..(456): Homolog of NCBI NO: 34901884 NR Description: putative RNA Binding Protein 45
MQPTYQPPMNGQHAPQPKASGAPPPPLQQAPPPQQYYQAPPQYYQQGPPPAMWGHPQQHMPPQYAPPPQQYAPQPPQQYAPPPQHYAPPPPQYGAQMAGGPPPGGEDIRSLWIGDLQYWMDETYLYNAFAPVGPQQVTSVKIIRNKHTGQPEGYGFIEFQSRAAAEYALGTFNGQMMPNVEQVFKLNWASCSAGDKRGDDGSDHTIFVGDLAADVTDAMLEEIFKATYPSVKGANVVTDRATGRSKGYGFVRFGDLNEQTRAMTEMNGVLLSTRQMRIGPAANKKNMGTQQTYSTNAGYQSSQVNEAANDPNNTTIFVGGLDSNIDENYLRQVFTPYGEVGYVKIPVGKRCGFVQFTSRACAEQAISALNGSQIGSSNVRLSWGRSQNKQAPQQDANQGNGNSYYGYQQGPDAYYGAPNVQDPSMQNYGYSGYGSYEQQQQPSQQQQPPQQQPPQQQQQQPPQQ
